United States Patent Application Publication US 2004/0031072 A1 - sequence listing, part 20

SEQ ID NO: 90581 - DNA, 420 bp, Glycine max
  Clone ID: PAT_MRT3847_52807C.1
ggccgacccacgcgtccgctcggccgggtgcgccgccccagtgctctgtgggatactggaagtctcgagcgtcggctccgggttcccagccctcctctggcccgcactcatagaaacattcacacaccccctgcctcccctctcttccctctccgcctcccccttccccccctcgcgataagaagacccggcggcaggagaggggatgaagatggcggacgcgaagcagaagcggaacgagcagctgaaacgctggatcggctccgagacggacctcgagcctccggtggtgaagcgccagaagaccaaggtgaagttcgacgatggcgccgtcttcctggctgcttgctccagcggcgacacggacgaggtcctcaagctgctgcaccgcggcgccgacatcaattacgccaatgtgga

SEQ ID NO: 90582 - DNA, 322 bp, Glycine max
  unsure (1)..(322): unsure at all n locations
  Clone ID: PAT_MRT3847_52808C.1
tcgcangcacgcgtacgtaagctcggaattcggctcgaggggtggttaattttgttggacaaatgacaaatggacacgattgaaggataccaagtgaagccagaattcatccccatgttaagaaaaattctcagcaagcatggagatgtcatggagatgtttttaaggattccatggtattcacaacgttactccggtcagtattctcagaggtgatatgagatgtttttaaggactctatgtggcatcatcttagaattgcaagacaaaggtctcgatacnntcnacagaagatgagctgcgtaacatgtttggtgttgcn

SEQ ID NO: 90583 - DNA, 293 bp, Glycine max
  unsure (1)..(293): unsure at all n locations
  Clone ID: PAT_MRT3847_52809C.1
cccacgcgtcctgtacttttgcaaatttatttgaaacctgctgtggnactnnnagtganggatgcatccttaaaaagtggcatgttcacttactcacagacactcattgataagccagttactaagcctatcataataaagcagcaagacatatacaattcacataccaagccacctatcatattcacttatagagcaccttgacatctacaaaaaacaatatcataaatcttcattattctatgataccctccatactcacaactacttaaattctaatctcactacaccta

SEQ ID NO: 90584 - DNA, 278 bp, Glycine max
  Clone ID: PAT_MRT3847_5280C.1
ctcaaatctgaactcggctctaggatcgacggacagaacgcatgagatatgtggcacaagctccaagctgtgaagcacaacagtgtgcaagtcctacaatcagttagcggaggagactggactgaccaacgtctatgttgctcagcttctcacgagacaggctcagctcaatccccacactgcccctctacttcgggcagcgctgcccgacttgccccaagaccttgtttctgagatgatgataccccctttgacgtcttatgaccctaatctcatcc

SEQ ID NO: 90585 - DNA, 178 bp, Glycine max
  Clone ID: PAT_MRT3847_52810C.1
ggtaaaccgcattccttatgaggttacctaacggaaccgttcccttttaaactcttatctctctttttcgcccaaaatttaatttttttttattattaaatcgcgttttatgatcatgcttacttacaagcttagcttttgactgcgcataaattttaaccttccttccttggatccc

SEQ ID NO: 90586 - DNA, 555 bp, Glycine max
  Clone ID: PAT_MRT3847_52811C.1
ggactagcgtcgatctatggctagccaatgtacccaagtacctgtacactgtacacttgcaagtacctgtacactaaggagagacagagatgctataacacacagtttttaacagagccaaaaaagtagatagaagtaccaaaataggtgacttgaaggattgagaggagcgataaagaagaaaaccacagagggatactaagaaaaaaagaggtggatagtagcgtacttgagagtaagtcgccccgcaattgccgcggcaatttagcacaaagaaaaattgacacaaatacgatttgtataaacaccacgggcgataaggcagtttgcaaaggcatacaccaaacctgcagcaacgcaagcctatgcctactcacgggccgccgcccgcgtttaaccacacctgcagggctccggtgcaattgaaccttaagcaaaccataagaacaacccaaagtccgctaacaaagccgcaagcaactgtgcacatcacgttttaagatgcagcccaataaaaagaggcagagccgtaagtaaagttcacaggtaggcctg

SEQ ID NO: 90587 - DNA, 517 bp, Glycine max
  unsure (1)..(517): unsure at all n locations
  Clone ID: PAT_MRT3847_52812C.1
gtccagtaccgctgccagaagacgacggaggggggagcatanagctgtgggtgatgaggggagagagagactctcaattgtgacattttttgcgcctagctatgaagtgnagcatgggccaatgcgagagtgtgtgggggagaaccacccatgcgagtgtaaaagatacagtgagggggagtgcagtgaacactatgtgacaaacaggttacaaggggaaaaggccctgggctttgcgaagagccaaaccaaaaacaaaaactaggagggggcccaacttgctaggagtgctataattaggctaagggagtaactatgtgtgtgtgtagagttatctaccacataaaagcgtcgtgggcaaatctctcaattctatttttgtggagaagtgggcgaaggggattaggtgggtgatgtgggaggggtgtgattgtggggcacatacagagggcgcactgtgtcttattccaaatttgggtatgccatctgtcaatggggactagggacatcttattnt

SEQ ID NO: 90588 - DNA, 358 bp, Glycine max
  unsure (1)..(358): unsure at all n locations
  Clone ID: PAT_MRT3847_52813C.1
gtcgcangcacgcgtacgtaagctcggaattcggctcgaggataatctgtactgtagccaatcaattctattctccattcttgcttaattgtattagccataaaggagttcaggttcataggactcagtttctctattaaaccgtcattgattatggaaatactgtcttaagcactatgcagattaacaccatacttttcttccattacatctttcaagacagtcactcacaactcagaagactgatacagcattagatgaaaaaaacaagattcccagatatatgtagtgaaactcaaactaggagtctttctcaataaaaaaaaaaaaaaaaaaagggggtttttttttnttttct

SEQ ID NO: 90589 - DNA, 477 bp, Glycine max
  Clone ID: PAT_MRT3847_52814C.1
gggtggcagaaagcaacatgaagggggacaacacgcaacaacagcaccattcccaagcctgaaggatcggactttgaagacactaatggctatgttatgcgagcatcaacaaaacacccttagcctctctagcaacaaagaaccaatggcttcctgatacttaaaaactatctcaactagtgccaatctcattgaggctgactaatatagacagtccaagattcccaagcaccttcacagctgaaaataggcctgaaggctaaccctagatccttaaaaatacatggattatatgacattgacgacacacctgcttataaactgaatgcctgtagagcctgatatcagcaacaggaccaccgatatgcacatgtggtgaatatcattagaatgttataccagggtgtctacaaccagatgacgaagagatatttactgactttgaaagactgaggaaagcacccatggaaaactgac

SEQ ID NO: 90590 - DNA, 215 bp, Glycine max
  Clone ID: PAT_MRT3847_52815C.1
gttaacgagagcaaattgttaagcttgacacatgctaatagactgctgaagagcaccctattcaagataccggcttccaactgtttaattaaggataatgtaattgtggctttgaaaactgcactaaagcccttctggttgaactcggcaaataccctgccgaactggaacaccattaacaacaccatttttgtaagaaggggaggcctttttaa

SEQ ID NO: 90591 - DNA, 702 bp, Glycine max
  unsure (1)..(702): unsure at all n locations
  Clone ID: PAT_MRT3847_52816C.1
ctactagcgatggtgaagtgtttggcacaagggctccacagaaaaagcttgatgatgatatcaaaaactcgtatacaagttaaggaagggactcccaagaggagcttgctatctctcgagacagcagatagcccgggattgctggttgaaatcatcaaagtcattgcagatgtaaacattgatgttgaatcggctgagattgatacagagggtttggttgctaaggatacatttcatgttagttacggcggggctgcattgaacagttcaatggctcaggttttggtgaattgtctgcgttactacctgcgaacgccagagacagatattgacagttactgaagaaaccacccttgtgaaataagccaatacaatggttctttcttataccaattccccagttagctcgatatcacctgcgaatcatatggtagctttactgctaccacattatggaatgagttatgagtacgtgttgcctatggaatgaatgaatacctgtaactaactatggaatgaatacatgttgcctatggcatggaatctaggataccagaaactcactgatcatccgtcaaatcttatatgaaagctaaaaaatcgaaaatgaattttgcctcatttcctaaaaaaaaaaaaaaaaaaaaaaaaaaaaaaaaaaaaaaaaagaaaaaagggnggaaaggaagggaaaggagagac

SEQ ID NO: 90592 - DNA, 326 bp, Glycine max
  unsure (1)..(326): unsure at all n locations
  Clone ID: PAT_MRT3847_52817C.1
caaaagaaagacngnnnaacaanancannnggaaaacagnaacaacanacannnnacannnnggnncccagcccccnacnacanggnnggaaaaggagcnanaaaagaaggcgganggcacgggananagnaaacgcncanancagnanccancagagnnnccaaaagggnnanaancngnnnnnaaaaggaaaggacacaagaaagacccggnnaananaaggagagaaaaancaancacanacagcagcaangggcaaggagagcnaaccaggggaagggncanncanggaaaaagaccnggnnacaaggngggaanncagcag

SEQ ID NO: 90593 - DNA, 1312 bp, Glycine max
  Clone ID: PAT_MRT3847_52818C.1
cggctgcgagaagacgacagaaggggacatccccacgcgtaaccggacgcgtgggcacgcccgcacctctctcacaagtctcaccaacttccactctcatcaatgactctcaccaatgctttcctcgctccttccttcgccgttcacggtggtagggtttccgatccgcgctccattcctcttttctctcttccctccgacgccttcttccgctccccaacctccctctccagggacaagaacattctatatgcttctgcttatgatttgaatgcagttggttcagcttcactgcaatctggtgacaatcctgatagtcttcctatgccaatagttctaatagatcaagaatcagattctgaagcaacaattgtgcagcttagctttgggaatcgccttggagctcttcttgacacgatgaaagcattaaaagatttgggattggatgtttcaaagggaactgtctccacagagggattagtcaagcaaacaaaatttttcattacacaatcagacactggacgcaaagttgaagatcctgatatgttagagaggattcggcttaccattattaacaatctgttgaaatatcatcctgagtccagtgaactactagcgatgggtgaagtgtttggcataaaggctccaaagaagaagcttgatgatgatatcaaaactcgtatacaagttaaggaagatgggcccaagaggagcttgctgtatatagagacagcagataggccgggattgctggttgaaatcatcaaagtcattgcagatgtaaacattgatgttgagtcggctgagattgatacagagggtttggttgctaaggatacatttcatgttagttacggcggggctgcattgaacagttcaatgtctcaggttttggtgaattgtctgcgttactacctgcggacgccagagacagatattgatagttactgaaggaaccacccttgtaaaataagccaatgcaatggttctttcctataccaaatcgccagttactgctaccacattatggaatgagttatgagtacctgtaactaactatggaatgaatacgtgttgcctgtggtatggaatctatgaatacctgaaactcaatgaacgtccgatatatctgatatgtgcgaatcatatggtagctttactgctaccacattatggaatgagttatgagtacgtgttgcctatggaatgaatgaatacctgtaactaactatggaatgaatacatgttgcctatggcatggactctaggataccagaaactcactgatcatccgtcaaatcttatataaagg

SEQ ID NO: 90594 - DNA, 397 bp, Glycine max
  Clone ID: PAT_MRT3847_52819C.1
ggctcgagctaagatccaggcaataaacaaacaactgaacttctctttatgtatggtctggcctctggctggaagaagccacccacactaatacgctgcagtggaaccatcgatcccactcagtggggttaatcatcactacatgtcccttgatcagattgtcagagctgtttgaaaaataagcataaacttttgatgatacacagggccttagcaagatccacataggctgagctatgcgacatcgtggcttaaagttagtcttgctggttagcgtgatcgtgtccttcactgacctctcttcttcaataaccatgagcagatgattggtataacttccataacaatatgcgactctgtctgtgctgaatattgacagcgttttaatgacgctggc

SEQ ID NO: 90595 - DNA, 892 bp, Glycine max
  Clone ID: PAT_MRT3847_5281C.1
gtcgttttttttttttttttttttgtggtattttttttttttttttaattatcttggtgtggacataattatattacgccaggtttggggaaaaaaaaccggggaggaggggcgaaaattctatcaagatggccggaattaaaccaataagcccccagggaaaagccggaaatagctgacagggatcccaacggccatgacttggtagtagcaacgacacccttggagagacgggtgaaaacgggggcaaagtgcccccggggggaaaaagggtgtccccccaaaaccccccccaaaaaaaaggcgggaaaaaaaaaggggaccccgggggggcgccaagggggggccccacccccctaaagggggggggcccaaagggcccggttaaaggggggaaaacgggggggcccccctctaaaaaaaaaaaacccccccgggggggggggggggggttttttaatggccccacggggggttttttttccccccagggggggggcgacacagggggggtccccccccccccccggccccggaaaagagggtgcaaaaggggggccccaccggtggttccccccccaggggagaaaaaattgggtggggggggggagcacccgggggaaaaaaaacaagaggcgccgctggggggagcccccccccccccccgaggaaaacccccccccaccccccacccggaaatggaaggggggcctctggcccccaccccctttggggggcgggacccccccccggcggggggggaaccccccccctaacacaactcgggggggggtaaaggaaaaaaccaaaaagggccccatcggggcccctccccccccccccccttttccagtaggggatgaggcgggggggaaatttgttttaaaagaaa

SEQ ID NO: 90596 - DNA, 358 bp, Glycine max
  Clone ID: PAT_MRT3847_52820C.1
ctaacctttttaactagattataaaattttaacaagacaagaacaccaaagggggacggggaaaaaccataacaggagacaaccctgacacccaaacaactaacatacctagctatgggatgcaaaggacagagaaggacataaaacaacaggagctgttactgcactaaagacagttgctgggaacaggctaccaagccacacgcctatacaatggaagggatggccatcgccacattcttctcagacatccaaaaggcacacagattgcctgaaaagactatagcactggtgactgagcaggacacagcattcttaaggacgaactcaatagcagggaaggtagagtgggaacact

SEQ ID NO: 90597 - DNA, 267 bp, Glycine max
  Clone ID: PAT_MRT3847_52821C.1
atatcagaatggagctgctcgaaccgtgtctatcgaagcagtaatgaaccagtctgaggaaactgtactataatcaggcactgagtgctgggcttgctgatgacagttgacttgccacgcactaattgtgcgaatcgagctctatggctgtagacactatgatgcaacatgtggagcatctctatactagatgcagggacactgctcaagtctacatcatgagcatctggacacagactgagactgctatgagccgtgatgcgggac

SEQ ID NO: 90598 - DNA, 387 bp, Glycine max
  Clone ID: PAT_MRT3847_52822C.1
ggggctggcttttttttgttttggttttttttttttttggcccaccacccggaccaaattttttaacaaaagccttttttgctttttacaaaaccccaggtttttccctccccttggggcaagtccccccaaaactttcaaaaccgggaaattttttttttacaggggctttaaaaaaaaatcccaggcccgggccttttaaaaaaccaaaacccccccccaaagcctttaaaaaaaagggtttttccctttaaaccccccttttttaggcgggggggccccagaacccccggaattggttttaaaaggcaaggcccccggaacctttggcttcttagggggtaaaacggggccttttcccagggaaaaaatcccctcccccctttt

SEQ ID NO: 90599 - DNA, 388 bp, Glycine max
  Clone ID: PAT_MRT3847_52823C.1
agtcaggagggtcagcatgaggaagaccggcgcgaagcaggccaccgccggaagcccatgggacgggccagaccgcgtgaagtacttgggcccattctctggcgagcgcccgtcctacctcactggcggagttcccaggggactacagcttggaacactggatgggctgtcggccgacccagaaaccttggccagaaaccgtgagctcgaagtgatccactccaggtgggccatgctcggggcctagggctgcgtgttacgcgaactgttgtcccggagacgggtcagaggtggagaagctgtgtggtgcaaggccgggtcccagatcttcagcgagggggggctggactacatgggcaacacatgtatagagcacgcgcagagcatg

SEQ ID NO: 90600 - DNA, 452 bp, Glycine max
  Clone ID: PAT_MRT3847_52824C.1
aaaatatttagagagagagagggtttcatcaagtaaacactgaaactaatttttcacaaatatcgcggcaatgtcaaattatgatcttccaccaccggatactcattcggaaacatcggttccccaatggacaccacctttgccaacatatccaccaccaacgtcttatttttcatcaacatttgatgattcagattcatcttcatccacatccacctttggcatcatcgtaggagttttggttggtgtctttggacttattttgttgtacggcatttggcacaagtatcttaggaagaaatgttcaaagtaatcttcttgtaaaccctcccaaatgttgtattattttatttcaacattaagttttatttcgttggttgtgtgtaggcatgaaaatgtcacgtaattactgcttgttctgttgagttgcatgaaagcattggggttctatt

SEQ ID NO: 90601 - DNA, 228 bp, Glycine max
  Clone ID: PAT_MRT3847_52825C.1
tttggttcttccaaaggaacgaaaaactggtctctttcctagaggtagaagagttgcaaatatgagactacgacatgtggagccggatgaagaagccctacaaaaggaactgttgggtactctacctgagtttcagatccaaaaggcagaaggctggaactgactgaggggactacagcagatcctgtgtctgggaactgaaaaggatgtgctagataatataactgg

SEQ ID NO: 90602 - DNA, 187 bp, Glycine max
  Clone ID: PAT_MRT3847_52826C.1
gttattcgtccgacacatgttttctccgatcccctattactctccagtctccgtggaggtcgattttagctagtcaaaagggacattgacttggtagatagacagatagatcgattgctatgggttaacgtgaaatccgaatccgaatctgaatctgaatctgatcgaatcatattcatgttagggc

SEQ ID NO: 90603 - DNA, 231 bp, Glycine max
  Clone ID: PAT_MRT3847_52827C.1
tcagatcttaacccctaagaaaagtatcgaaaaaagactcatagtccatcacccagcaagaaaaaagaaaatcgaagaggaagagcaaggacacaacacaaagaaaccaaaggaggacttggggtgcagtgggtgaatctaacttaagtggtcgaagttgaggttgcggtggcaatcctgtaaaccttccaaggccaaaattcttaagggacggtttggcttctctggttt

SEQ ID NO: 90604 - DNA, 555 bp, Glycine max
  Clone ID: PAT_MRT3847_52828C.1
acgaggtttactctcctttcctcttttccattgacatcatcaccgccacaacgaacttggtttcgtggcaaccaccgccatcacctattacatcctttacggaaagtgcgtctccaccatggactttttttgtgagatcgaaacccttggggacacagtcacgcagaatgagaatattgtgcgtcttggactttgatggcggtcgtgccctttgccaacgactatcgtatctcgtcggagtcgtatgtttacatggcaatagacttgtcgctccgccggaggcgttttacagagaagttttgtcagcaatgaggttgaggatcgtgccaaggatacaaaggaggacctccttggtggcttttggcagtgcggaagggaaactgacggcggcgacaacggtgtcgtcggggacgagattttcatctgcggtggatgacgatgacgaaacaatttaaacctgtgttctcgtggtggttgctttgttggtccattaaactctttctcgaatgccactatttccaattatacaaaggaattggaggagatgaagcatgt

SEQ ID NO: 90605 - DNA, 260 bp, Glycine max
  Clone ID: PAT_MRT3847_52829C.1
ctcaaaaacttgggattatgagatatcttatttttaataaacaaataaataaataaaactaataaaaacaaatagataaaagtaagttatacagtccatagtttccaaggctagcctttagcaagaagttaaatcccaatttccgataatggaccatactgctttattggtcgtccatcacggtcacggcattgcctccctctaactgattcagcgggatgctgttgttcatcttctttcccacgtagcaattatttatt

SEQ ID NO: 90606 - DNA, 362 bp, Glycine max
  Clone ID: PAT_MRT3847_5282C.1
ccacgcgtccggcgtgtagggatggaggatatattttggatgggtgcagggaattcgtagcaagtggtgcggaaggcactgattcagctatgacttgtgctacatgtggctgccataggaactaccacaggagggaagacttttgtgattgtccttctcatcctgctgctaatggagcttgaattcgatatgtgtgctatgcctgaacaactatatgtaaaccacctatgatatttatattttctatggatctgcttttgcttgttaattttggtgttatggttttcaattttatcttaatgattatgtaatggacttttgtttttgaaatctagtgtgctatatgggttcatggtttttcc

SEQ ID NO: 90607 - DNA, 234 bp, Glycine max
  unsure (1)..(234): unsure at all n locations
  Clone ID: PAT_MRT3847_52830C.1
gaagattccgcaacagagagtagancaagatggcgcggttgatcacagtggtgtggtgcgcggtggcggtgctactgtgcgccgcggcgggcgcgtacgtgggtggaggaggcggcgaacccgatacgaatggtggcgggggtggaggcggagtggttcgggtgatagggcactgncggcgcgcnctgaagtttgctangttcatgagcangttcgggaagagttaccgaagcg

SEQ ID NO: 90608 - DNA, 197 bp, Glycine max
  Clone ID: PAT_MRT3847_52831C.1
attctatcctattgtaatcacctttgagtgagtgtagtaatgactagttctcgagggcgttcgatgaatgcggctaatcacttctaaggcgttcagatcagggctttgagagaccgttatggacactgcatcattgccattctagacttcccgattaaggttgactagtatacttgaactctcgactatgacattgc

SEQ ID NO: 90609 - DNA, 247 bp, Glycine max
  unsure (1)..(247): unsure at all n locations
  Clone ID: PAT_MRT3847_52832C.1
cacgccagggggggaaaancaaaacaaggggccancggngggggggaaacaggaccanggccangccccngngncggaggggggggggggagttttttttttgggnggcatcgncggatctccgacctggggggggagggaaaaacatgcccaaaagcgggaactcatagtnccgagatgtgatgaaagaaggcgccttatgaggggaacccagnaagtgggtgcctctgtgtatggcgcccttcca

SEQ ID NO: 90610 - DNA, 250 bp, Glycine max
  Clone ID: PAT_MRT3847_52833C.1
agaagtaaacataaagagacattgtatgtgccatgaataaatttataagaagtaaagtatttcggttatccttcacaatcatctctttagtctttatcaaatggaatattcatttaaaaatggaatatttactaaaaaaatttactaaaatggaatatttttttaaaaaaatttatcaaatgagatagattttgaaaaaatattcatttaaaaataaatcgtaaattgaaccacgactgtgtacatatag

SEQ ID NO: 90611 - DNA, 375 bp, Glycine max
  Clone ID: PAT_MRT3847_52834C.1
gtaccatacccgctgctgcgttttagactcactactcgcacgaaggccagcaacaggagtgccattgtccaacgcgggctgtgagcgtaccatacgagacgtgcgcaacaccggagtgcacattgctgaccgcaatgcgcgctgttacgaagatgaccgtttgcttggcaccacttaactgtgccactaagaaaaggcgttacgttcgcgcagcacagatcaattgcacgttgccgctggctgcgtggagctggctatggtcgtgcgcgtgatgctatggtattgcataaagtgcaacgacaactacctaagacactgcttcgcagggagactcgcacactagatcgcggattcagcttcagagggcacgcagcg

SEQ ID NO: 90612 - DNA, 488 bp, Glycine max
  unsure (1)..(488): unsure at all n locations
  Clone ID: PAT_MRT3847_52835C.1
gcaccaggcaatgccggcggtcgacaagaagctgcagttcctggactcgcttgcggcgtccttgcttggagatgacagcatcacaatcacaagccaggccacgtgcgagaagcttgtcgatgttgcgattgaagcactgcctgaagggaagctgaaggcggccctgcgtgcggatcgcgacggctacttgacctacatctggagcaagattcagccaacggtggcatcgaagcagactgggtcggccgcggagacaaagggtgacgcgaagaagggaaagaagaaggagaagcaagagacacagcagcaaaccgccacccggcggcatttgatggtgcanggcggatgggacgcagccatgagtgccgttgccgcacttgactctacctcccgtcaaactgcttatgcaaagcttttcgccagcgcaaccgcacaccctgcacccgatgccctcatccacgcttacattgacttgcagagtcgacgca

SEQ ID NO: 90613 - DNA, 474 bp, Glycine max
  Clone ID: PAT_MRT3847_52836C.1
gtcttgctgtcccagagttcagaaactcagttacctttgtccagaaaattgcctaacaccactcctcctccttgtctcctaacactaccacactaataaaaatgaaatatataactgtctgcatattaaatatgtaactgtcctacataactgtttgtttgcataattaaatatgtaattgtcctacataactgcataactgtcactgtcctgcataatgccccacgacagagtcctactacaccccatgccctcttcaattgtctaggctttagaaattgatacaattgcttatcctaacatatttgttttgtgtatttccatgataaggttgattagacagataatcaacatctttagctatgcctattcaagagctatatttacttttattccgatagcacttgcattttcacgttatgtggtatgaccttgtgctcatctagttatctattacatttgtcccaatatttt

SEQ ID NO: 90614 - DNA, 214 bp, Glycine max
  unsure (1)..(214): unsure at all n locations
  Clone ID: PAT_MRT3847_52837C.1
tccaaccaaggaacccatgggaaaccccttcaagaaaatcaccaaccgggttaaggcaccaaaaattaaaaccagcccggaaccaaaaaattacaaggcggcaacggtaccttcccggaacaaggttccttgccaaaacttggtaaaggtgattaattccttgctttccntgtgtaaaaaaaaaaaannnaaaaccacaaaaacaaaaaaggac

SEQ ID NO: 90615 - DNA, 711 bp, Glycine max
  Clone ID: PAT_MRT3847_52838C.1
aattcggctcgaggatggctaagcatcagcagcaaatctccatgccaggtttaaggaagggttcttccacattcttgaggccaaagaagtttggtttgtaaattatgttgataatacagagaaatatcagcagactgtgaaagagaaggctgcattctgattgtaatgagatgtaagaaatattggcagactaagaaagagacggccgcagattccttggatggcggcaggactgccagaacacactatttacattatggaaaacattattcgaaagacctgataaacctttgcgattttggtgctggactgccagaacacactgtatttacattatggaaaacaatattcgaaagacctgatatattagttttggtaatagcactgagctcttggaatattgtcgattgctctgcaagtttctagggttcataactgcacaaagcagaaactgtccacatgaaacaactggttatgtattcctatggtgtgtgaccatgtctagtatttacaacctcatcttcccacttatcattgtaatttagtcattgtaagctcttcaactcctaagcatcacgttttccatacacaatgaggtttgagttttaacttctagacattaattaaggaggggggagtgactctttgtttttgcgattttcaaggcagaatttgaacaaataatactatttttgccttgccaaaattcac

SEQ ID NO: 90616 - DNA, 267 bp, Glycine max
  Clone ID: PAT_MRT3847_52839C.1
ctcgaaaacaaaacgacgtggccctgagcatctcaaagctcctgatgccgacatgagcacgggacaagaacctcgtgtattcgccgataacgttgcacgtctgaactcagcatcatcgccgctggatccacaaggccccacactcgaacagcttctctccttcgctaccgatccaaatcccccgatcatctcaaatccatcgcctctcagctctacgccgtcgtgctatccgacgccactcccgccggagaggatcgactctccttc

SEQ ID NO: 90617 - DNA, 571 bp, Glycine max
  Clone ID: PAT_MRT3847_5283C.1
caaagattaaatggacccagcaactggcgttcaaaatgttaaattagttgtggttggagatggttctgttggtaaaacaagtttattaatatcatatacaactgggtcatttcctcatgaatactgccctacagtttttgataactacagttgtatggtcctcttgggttcgaaacaagtgagtttaggtttaatggacacagcaggacaagaagattatgatagaattagaccattatcctatcccaacaccgatatatttttaatttgtttctcaatcacttccaaagcttccctcaataatgttaaaaataaatggttgacagaagtgaaacatcactgcccaaatacaccatttattttagttggaacgaagacagatttaagagaatcaactccgaattcaattaacgcggaggaaggtaaacaatttgcaaccacccttgaagctgtcagatatttggaatgttctgcaatattaaacactggtgtaaaagaagtttttgatactgccattaaacacgctgcttttggaaagaaagaagttaagaaggtgaagaaggagaagtct

SEQ ID NO: 90618 - DNA, 235 bp, Glycine max
  unsure (1)..(235): unsure at all n locations
  Clone ID: PAT_MRT3847_52840C.1
gganantgaancataagcaatantaccaatcaatactcatcattantaatcataatggntatagcaatanaactaggaatagccccctntcacttctgagtcccagaggttacacaaggcacnnctctganatccggnctgcttcttctcacatgacananactngcccccatctcaatcatataccangatctctccctcactagacgtaagccntctccncacnctcncaatg

SEQ ID NO: 90619 - DNA, 319 bp, Glycine max
  Clone ID: PAT_MRT3847_52841C.1
cttcttatctcttagggaaccttttaccttccaattaaaactgtttattttttttttttgcgcccaaaaaaaaaaaaaggacccccaagtccttaacttggttgaaaacaccccctagagccgagccactcctaaaaaaaaaacgggagacccaagtggggaacccgagccccacccaccattgttgccttaaccccccccctaaaaagcccattgagaaaaaacccgttatcccaccctcacaaggctgaaaaaagaccctgccggactcacccacctttaaagaaggggggtgagacacccaaaaccccccccttga

SEQ ID NO: 90620 - DNA, 184 bp, Glycine max
  unsure (1)..(184): unsure at all n locations
  Clone ID: PAT_MRT3847_52842C.1
gaannnccgggccgacccacgcgtccgaaccaccttattaaggttgtcattctccaagttttcttttactttctaacttactatcttagggcagggagtatatttacctacgctgtcctattctcatagcttttctaaaaagacaaattaatgtgacatgacaattttttaattcataactaat

SEQ ID NO: 90621 - DNA, 2172 bp, Glycine max
  Clone ID: PAT_MRT3847_52843C.1
ggagatttctcagttgtcaacacccttcggcacttcagcacagcgtgtggcagcatatttctcagaagccatatcagcaaggttggtgagttcatgcttagggatatatgccactttgccacacactcaccaaagccacaaggtggcttcggcttttcaagtgttcaatggtattagtcctttcgtgaagttctcacacttcacagcaaaccaagctattcaagaagctttcgagagggaagagagggtgcacatcatagatcttgacataatgcaagggttgcagtggcctggtttgtttcacattctagcttcaagacctggtggagcaccttatgtgaggctcacagggcttggtacctccaggaaagcacctgaactggttcattcatggggaggtgagttggagccataaactactactcagcattagttgactctcttgggtcaagctatggggaggagagtgaggagagggcatgtggtggaacagcaactattgtctagggagattcgaaatgtgctagctgttggggggccatcaaggactggagacccaaagtttcagaactggagggaaaagcttcaacagtgtggttttagaggcatatctctagctggtaatgctgccacacaagctagtctactccttggtatgttcccatctgaggggtataccttggtggatctagagggagcggatatgagctgggtgggggttttttttagtacacggggaaatagttatagtactacttttcatgaaagaattccccaaaaaccttttttcacctttataggctcttgtacccactttatgtctgccttttttcttttctaaggaagattgggaacaatgattaagtcttgttttgaatcactctctgcacatatattaatggggagaaaccaaaaaaagaactgtagaatgtatatagtaaggattgaatgacatggtgatgggtctcgtgtatttatcattactaacattgtcacactaaataatttcaggagtttaattaaaggcatgctactgtaaaaccaatccaaaatcttctttgctatcacctgttaaagtgtttatttattatgaaagttaataaattttgtatcttgctaaccaaactcaatgcttttagcatactaattaagaaattaaaaaaatatttattataagatcacaggagaaaatagaaaaaattatggacaaatagatacttattaacatttgtcataaattcattttatacgaagaattatgattggataatagtataaatatgaaacttattgcatggacttgtgttatgcaggctggcacctaaagtggtgactgtggtggagcaggacctaagcaacactggttcattcttggggaggtttgtggaagccatacactactactcagcattatttgactctcttgggtcaagctatggggaggagagtgaggagaggcatgtggtggaacagcaactattgtctagggagattcgaaatgtgccagctgttggggggccatcaaggactggagagccaaagtttcataactggagggaaaagcttcaacagtgtgggtttagaggcatatctctagctggtaatgctgccacacaagctagtctactccttggtatgttcccatctgagggctataccttggtggaggacaatggcattcttaaacttggttggaaggacctttgcttgctcactgcttcagcttggagaccacccttccatagtgccattacccatcacaactaggcttttgtgttggcctttttcatcatcatcatcatctcattattctaatcatgtgtagcatccaccccctctttgttacttaatttagagagagattgttaaggtgatcccatagcacgtgatttttcttgcctaatgtgtaccccttcagcagtaacatattaaaaaaaaagatatagttaaaaataggaaacagtgatatgaccaaatggttgaaggggtaccccactattgacataatgcaagaaagttctcttgctcggggagcacttgagagtttttctaatagtattttattaagagaacttataaggatgttacttttatattctgattttaatgaatacccttataaggatgttacttttatattctgattttaatgattacccttataaggatgtt

SEQ ID NO: 90622 - DNA, 1470 bp, Glycine max
  Clone ID: PAT_MRT3847_52844C.1
gggagaccctcttgtccctctctctcttctttcttctctcaccttttcctctctcaatttcctttcccttttgaaattatgatataagagaacaaaaactcccccttaaacagataaggtatatataagccacccttcagagcaatttgtccatcttcttcaatttattagcagaagatgtggtgcattagattaccttagtctttgtcctagtgtcttccacaacaacacgcgtccgcgtttccaaatattcacataagagaagaacaatagttctctccctagaaactcatgatatgctagataagccatccttaggagcaatatatccgtcctcttcaatttattagcagaaggtgtgttgcgtattagaccatagtctttttgtcattgttgtttcccaacaacgcagtttagcctttgagagcatcagcaatcacatggtgatcagaatatcattcagcaattgaagatcagtggcatcaggcataggctagcaagcaatgatatggctttcttcccagcaaatttcatgctacaaacacctcaccaagatgaccatcaacctccaccttcactcaactcaattataacttcatgtgcacctcaagagtaccatggtggaggagcatcctttcttggcaagagatctatgtcattttcagggattgagcttggagaagaagctaatgctgaggaagatttgtctgatgatggatcacaggcaggagagaagaaaaggaggcttaacatggaacaagtgaagacacttgagaagagctttgagttgggaaacaagcttgaacctgagaggaaaatgcagcttgcaagggctcttggcttgcaacctagacaaattgctatatggttccagaacagaagggctaggtggaagaccaagcagttggagaaagactatgatcttctcaaaagacaatatgaagctatcaagtcagataatgatgcacttcaagctcagaaccaaaaacttcaggctgaaatattggcactgaaaagcagagaaccaactgaatccatcaacctcaacaaagaaactgagggatccagcagcaatagaagtgagaacagctcagagatcaagttggatatctcaagaacaccagctattgacagtcctctatccactcagcagaacaacaacaacagaaccctctttccatcttctgctagaccaacaggagtggctcagcttttccaaaccactccaaggccagagattcagtgccaaaagattgatcacatggtcaaagaagagagcctaagcaacatgttctgtgccattgatgatcaatctggcctttggccttggttggagcagcaacatttcaattgatcatcatgcaaaaggagagtgtgagagtgagtgagagagtttcatattgcaatgtaatttttccttttccgaatgaaaatgaaatcatctagaggtgtctgtgtcaattgattacc

SEQ ID NO: 90623 - DNA, 310 bp, Glycine max
  Clone ID: PAT_MRT3847_52845C.1
gttgggacaaaagtggcttaactgggttaatgtacaactctactcttaaccctgtctgtgttccattttggaaaacacactcaagtgtatggcgatgttttatgcaaataaccctaaccttgggacgaaattggtcggttccgctgcttagaccttcaatacccgattgaaatacagtatgcatatattgcaaggcacagggattgtgttcaccaaatttgaacctcacatggttgaagaatcaccataactgtgatgttccgactgcttccacctgatgaaaaattccaataaccttgaagtgggtctt

SEQ ID NO: 90624 - DNA, 314 bp, Glycine max
  Clone ID: PAT_MRT3847_52846C.1
gcacaaagaaagaagatttatatgctggggtgaaaaacacaacacgcatgggatctaggtataaagaacaaacacctaacatagcatgctaattgggagttattctaccaaacatcccagatcccacataaagggttcaaatgaaaaaacattcgtaaccacatgattggtggagctgttaatagcattcggttttttttccagctgaagatccacagaatatgacggtggtgcaggccatgctagcggcagaacaacaggctcatgctgagcataagcagggcgccgcaacgtgttcgggatcactccgaaca

SEQ ID NO: 90625 - DNA, 356 bp, Glycine max
  Clone ID: PAT_MRT3847_52847C.1
tatcccccaattgcaactgcaaccctccattctcaatctcattctcaacctcactctcaccatcatcaccatcatgctgttgcctcattcaatcgcatgcttcttatgcgccctcccccacccaccttccattttgacaacattctgagttcccttgtcaagaacaagcattatctcactgtcatttccctttttaaacaattccaatcaaatggggttacacctaacctttgtactctgaacatcctcataaactgtttttgccatctggctcacatcacttttgctttttctgttttcgccaacattctcaagaggagttatcatccggatgcaattaccctcaacacactcat

SEQ ID NO: 90626 - DNA, 527 bp, Glycine max
  Clone ID: PAT_MRT3847_52848C.1
cacagacgtaacaaaacacctctatgatttacgtggttatggaaaccgaagccagcttcaccaccggatgatggttgggactgatgctcctgcaggcaggttacaccgcccatgccaccatacatgatactaaggatcgaaaatgagactgaaacattgagatgcactacgatacaacatatagtaatcagaatttttttgaaccagatcttatggacatcgactgcattgacggtgccctaaaggttagatccggcgcagttcacgttacatgtgcgaacatcattgcacaagtgacagatccagagtatcatatatcggaaccggctattaaaggaacagataatgtgaagaatgccgcgaaggaaccaccactgaagcacgtagagtctacttcatacagtgcttataccattctaagagctaatcggccctctgatcctaacttgggagaactcagttggacgcaccctgtatactgcaagcaataggtcatgtaatatccccatgactatactattccatat

SEQ ID NO: 90627 - DNA, 389 bp, Glycine max
  Clone ID: PAT_MRT3847_52849C.1
cttcactttttttttatagttttaaactagttccttactattacaaattaataaaaatactagattagagttttaaaatattttggtatgactttttttgaccggatgcaacctggctggcgataagcatatataagccataagctggagtgatctaaaaccttgcaaattgtcaaactaaactatcaaaattattatcgtcatttataatgaatatttatttatttatttcaccaaaaaataatgaatctctatttatttaaataaataaattttaatataaattaacaaaataaatcatttatactttatataaataagaaaacaaatgtgaatgatccgaatagtttgaagtgtacctaactataaaactagggttgaattagcag

SEQ ID NO: 90628 - DNA, 608 bp, Glycine max
  Clone ID: PAT_MRT3847_5284C.1
ttaaaaaattaaaaaaaaaaaaaaaaaaaaaaaaaaaaaaaaaaaaaaaaaaaaaaaaaaaaaaaaaaaaaaaaaaaaaaaaaaaaaaaaaaaaaaaaaaaaaaaaaaaaaaaaaaaaaaaaaaaaaaaaaaaaaaaaaaaaaaggggggggccctttttaaagaaccaaatttttttccccggtctttgcaaaaaaaaactttttttttggggccccaaaaataaatttctgggcccgttttttaaaaacgtggtgttggaaaaaaccttggtttacccaatttaaatcccttggaaaaaaacccctttttcccaagttggaaaaaaaaaaaaaggcccccaacaaaccccctttcaaaaaatttgccccccctaatgggaaatgggaccccccctttaagggccctttaaaccgggggggttggggggttcccccccaggggaccctttatttttgcaagcccctaagcccccgtttttttctttttttcccttttttttagaaccatttcgggggttttcccccaaaaatttaaaaaggggggcctcctttggggttccaaattaagtgtttaagggcccttcccccaaaaaaattttaattggg

SEQ ID NO: 90629 - DNA, 374 bp, Glycine max
  Clone ID: PAT_MRT3847_52850C.1
caaacaagagcaagcaatgaacttggcgggattaaaaaggagtatagtcttgcatctcatacacccaagcattgccattggcttaaaacggaggcttgtacagtaaaaattatactatgcatgcagatgtataatgaaatgttaaaagaaggagatctatgacagcaagcaaataattactaattgttaactgtaacttatccttttgcgggagctgcctcctttgatgatagaagcttttacctccttgagatatttgtcattaccgctataatcacacagttctttcggattctgtactgtataactaactttgttgaaccttaagcaccctgctttaacagtgatttatcatccattcttttggtgggaaa

SEQ ID NO: 90630 - DNA, 289 bp, Glycine max
  Clone ID: PAT_MRT3847_52851C.1
cccggtttgcgcttccctccgggcacgatatgattggagccagtccgagccccggccctagcgagatcgtcgccatgtggcgcccagaccccgacccctacccggacccctagcctgcctgcggctcccttacttaccccgcattccccagactcctagccctgttgacgattcgtacttacctctgctctctcaaacgccgtcttctgctgtcccaatcgtgtctctcaatcatcactcatatctgctatgcagtgtcctcagcatctaccttccttacagtgcctct

SEQ ID NO: 90631 - DNA, 1530 bp, Glycine max
  Clone ID: PAT_MRT3847_52852C.1
cccacgcgtccgaattttcaacccggattcccgggtcgacccacgcctccgattttcagtttcaatcttgggggggctgggtttcagccctatcttttttcgttggtttcggtgggtgaatgatcatccgaagaggctcaggaaaaggacaacttcgcaactcgtgaatcgattactgtagaaatcgtcgattctatcttaaaacgtattgggcactggccgccattttgaattctggttgagggattgaagtgcgattataggtggaggaggatggcttgtaggggatgctgggaatgccttttgaagcttttgaacttcatattgacccttgctggtctggccatggtcggctatgggatttatctgtttgttgaatacaataaaactccggataatactctcactgtcggtgatgatcaaactctagttcaacttggccgacccatgctagtggctgtgtctctgtccaacagttttttagatgatttgcccaaggcttggtttatttacttatttattggaattggtgcagtcctctttgtcatttcttgtttcggttgtattgcagctctgacacggaatgggtgctgcctgagcttttattctgttttagtgttgttgttgatcttagtggagctgggatgtgcagcctttatattttttgacaaaagctggaaagaagaaattcctaaggacaaaactggagattttgatatgatatatggaatttctgagagagaactggaatattgttgagatgggttgctcttggaattgtcatctttgaggctcttctttttgtattagctcttattgtcagggctgcaaacaggccaacagagtatgatagcgatgaagagtacattaatccaaggcagcaagttcgtcagcctttgctcaacagaccagcaggcccagtatcaggtgcaccagcaactggcacacttgatcagcgtccaagcagaaatgatgcttggagtacacggatgagggagaagtacgggctggatacttcagaatttacgtacaacccatcagaatcacacaggtaccagcaagtaaactctcagccaactgaagaaggaagccgctgtgccatcatgtgatcactttgcatttctccaaaaccacagcagattgaatttcaatgattgtttttgtgggaaaatggctcgagtctaagtttgtcagaaaacactcttccttttgcttagtttgtgtatcattcacactttactggatctccttcacttttttttcatgacatggcagcaacatcttcattgtgttgtgtgtaacattctgccgagtgaacataagaatttatttctctttgttatgttcataatgtattggagtaaatgaagttgtttttggttatggatgacctctttctcccatgtttttaagtgaccatcactcggtagttgggaaaactatgatttagtccttaaaagttctgattgacattaatttgatttacatcactattaccatcaatttaattttctaaaaaaagttgacttt

SEQ ID NO: 90632 - DNA, 2127 bp, Glycine max
  unsure (1)..(2127): unsure at all n locations
  Clone ID: PAT_MRT3847_52853C.1
aatccgtaaacccaaagaaatgttggatgattaaatcacagcaccagcaacctaaagctagtaccatctggctcaactttctcttcaaattcaaaactctatctatcatgctgcgaactacatacaattctcaaatcaaaattcaaacacataatagcagtatcagggcattagcacttcaactcacaaaccttacacacattttttataaagaaaatgaagctctccgcgttgcagcagacttatctcacgcgccgggcgaacagcttcagaggatcggcgcagttggattcgtccgccgacggctctgtgaagtcgccggcggcgattttctggcttgtaatccacggcgtctgctgcctcatcagcttggttctcggcttccgcttctcgcgcctcgtcttcttcttcctcttctcgacaagcctctacaccgcgccgttccggagcggttcggaaatcgcggctccgcatgacgttcctccggcggcgaaccggacggcgatgctgagcaccgcgagccgcgtggtagtcgggcggcacgggatccgaatccgcccgtggccgcatccggatcccgtggaggtgatgaaggcgcaccgcataatcgagagagtgcagagagagcagagggctctgttcggagtgaaaaaccctaggacggtgatcgctgtgacgccgacgcacgtgcgcacgttccagacgctgcacttgaccggtgtgatgcacacgctgatgctggtgccgtacgatctggtttggatcgtggtggaggccggtggagtcacaaacgaaaccgcttcgattattgccaagtcaggcctcagaacaatccacgttggcttttctcaacgattgccgaattcgtgggaagctagacataaactcgagtctcggatgcgacttcatgctttgagaattgtgagaaaagagaagctggatggagttgtggtgtttgctgatgatagtaatatgcatagtatggagttgtttgatgaggcgcaaaatgtgaaatggattggggctgtttcggttggaatattgcttcattcggatgaatcttcgtatatggttcaaagtgaggaggagggtgcttctatgcctgtccaaggtcctgcttgcaatgctacggataagttggttgggtggcatactttcaattcgttgcggtatacagggaggaatgcggtttatattgacgacggtcgcgtggggcgcctgtgctgcccagaaagcttgagtggtctgggtttgtgttgaattccaggttggtttggaaggatgtggatggtaagccagagtgggttaaggatcttgataaatttgatggggttgatgaagagatagagactccattgtccaattccactagcacctctgtggtagagccgcttgggaattgtggacggcaagttttgctttggtggctgagggttgaagctcgcacagacagcaaatttccttctcgatggataattgaccctcctttggacatcactatcccatcaaaacgcacaccatggccagatgctcctcctgagctcccattcaatgaaaaaattttaactggcacacaagagcagacaaacaagccctctacaaggaccaaatcacccagatcccggcgcagtagaagcaagagaaagcatgacaccaaagtgataggtgtgcaagtctcaacacattccgaacaaaactgagatgattttagtatttctgaggaatttgctgccctgtggatacttgactgctgcgggccttcagcaacaagaatttggattgctcaaacgggaaagaaagctgacgcattactgctacatacgtcggtggcataacttttatgggagcctggccagcaatgtgcatccgagtctgatttcacccattttttttaattgatttttcttgtcttctttttattggagttcgttcgttcgaatgaaagtttgaaaggtaatatcaacttggttttgcaatgcagcacttgctgcgtttcaggaagcctgtattcaattttattccatgttaatacatattcttctcgataggattatacaattgtcatgtatttttgcacagacacttttccttacttacagaataacaatgtnnccccccccccgcctc

SEQ ID NO: 90633 - DNA, 370 bp, Glycine max
  Clone ID: PAT_MRT3847_52854C.1
atattatcttttttgctttgggggaggaatttattccccacgcatattgcaattttggcacaccaaaaagtacattttgggccaacggaaacaaccctttttttttttgggagcaacccgaattttttggggggggggaaccctaattaaaaagtgatagaccccaaataaaaacctgtttttcacagaaaaaaattctatcctttattggccacaataaaatgaaacaatttgtaaacaaaaatgatgttgactgaaaacgttccttaaaactcggtcaaggaaccgttgcacttggggaagggggcggggctaattgccgccggccatgggggaaattggcaacgcccaggcttgaaacggaattgcc

SEQ ID NO: 90634 - DNA, 778 bp, Glycine max
  Clone ID: PAT_MRT3847_52855C.1
agtagttccctccaaagttcaagtgcttgatctttgggagaccaatgacaccctgaggaagtgagcaattgaaagcattgtcataggcatccagcacttcaagctccttcagctgggagattttccaactcaagttcccactgaacatgttgatagacatgttgaggaacctcagctttggtagcttgtgaatgtcccttggaaactccccagagaagccatttccctggagtgagacactcacaaggctcaagagtcctgtgatggaaggtgaaagtgaccctgaggcattcaaattagatatgtcaagtgacaccacagagatgttgtcctggtcacactgaatgccataccaagtgctgcaaagggacatgtaatttgacatgtcccagctcctcagagaagagtttgcaactccaaaatcttgcttcatagaaacaaggattgaagcttgccttctcagggaaagaggaagtgaagaaacataagcaggactagtgaggcacacaaggaagaagaacatgcaaaagggtacaaaactgaaagaagaaagggtagccatttgtgagaaaaatggtttagaggagtagcatatgaaaggaaactaatacactatgagagtgaaatagcaatgacaacatttcatagaccttaaaaagttaaactgattatacactaacaggattgataaggtgatttctctaatgaagagtatagaaagctagcataacactaacagcatccaatgttctctttctttctcttcccttaacacttt

SEQ ID NO: 90635 - DNA, 320 bp, Glycine max
  unsure (1)..(320): unsure at all n locations
  Clone ID: PAT_MRT3847_52856C.1
aggaaagcgccgganggggntcgaggacgcaccaaatgacaaactcacttcttttcctaccgcgaccaacccttatcgtgttttttttcaaaagggtgcgcctattcaaaaccccaaattactttaccacacactcacaactggagtcatcactgttcatctcattacaaactattacttatgcaactgctcatacatctcaatatcttatacaaacacaaccaataataaatccatgtaacaacataaattctttctaacaaaatctttaaactctcattgctaaaaaatacacccatatataccccaaatacatcatc

SEQ ID NO: 90636 - DNA, 250 bp, Glycine max
  Clone ID: PAT_MRT3847_52857C.1
ctcccaattaaagttctttgtggacacattcaacaagtttagttcactaatcaaccttgttcctatattcacattcatatcatattctaaattacattgacaagccttctccactttttttattcacttctaaacattcagaaatgggagttggatggctactggagtacttgtctgatctaatgggtcatggtcaccaccaccacaagaagaagaagatgcagttccaaaccgtggagctaaaggtgat

SEQ ID NO: 90637 - DNA, 226 bp, Glycine max
  Clone ID: PAT_MRT3847_52858C.1
cacatatacaaattctctgtgttgtgttgtgtacttgtgctaattgtgttgttgctgtaggaactttaagtgcagagagaatgatgatgaagtctgctatgtgtgattgcgtgcttgtggcactggttgtggtctgaagtggggcccatggctgaggctgcggtgactttcaacccagcacagttgactccttgtcttccggcaatcaattcaggttctgcacctt

SEQ ID NO: 90638 - DNA, 386 bp, Glycine max
  Clone ID: PAT_MRT3847_52859C.1
cataattcaaagagtaaactaaaaatgttaaatctgttggatagagccaaaaacttcgctttggagaaggtatatgataaggcctagccttatgcctgcgagattgaattcatctttaagtacgtgggcaaggataatgctagagtcattggccaacgacactgggcataacctttatttaactcttatacatatcagtgagatcaattactctagaaaaagcggattcaaagagacagtatcatgcaaaatttcagacgcaatattggggcaggtacaagacacaacagtggaagcagtgcctgataacgtatcatacagcatctggatcagcttggcggaggacattggtgctgactgagacatcaactatacatgggatgttg

SEQ ID NO: 90639 - DNA, 457 bp, Glycine max
  Clone ID: PAT_MRT3847_5285C.1
tttgggctgatttatgtgcttgaataggctcgcgacgtttccagacgcctcgccttgtatgtgtgtcatatcgacgcacctagtgagctcacagttccggttgataggcttgggcaactcccgaaaccctactgcgacggggacagactaccgtaaccgccggctcctaatgaggaaccttcagcaagtgtgagctactagtctgtgccgatcatgctttcgtttcccgcatatattgcttgctgtcttcattgaccgaacggcttggcgaagcgcctggaccgtcgtgattccagtggcctgtccctttcgatgccgcgagaagcttatcgaattccactacccaaaggaagtagaagcctccccgaaggaagtcacccaagaatagaccgaatctcccccatcataagaataggccgaaaaaaaccggacaactacccaacaattcccccacccc

SEQ ID NO: 90640 - DNA, 109 bp, Glycine max
  Clone ID: PAT_MRT3847_52860C.1
ccttgtcacaagctggtagtctaacgttgtcttcggagcctcatctgtacataggttgttctgttatgttcggtgcgtgttgtcgttcttggcatccaccatatctggg

SEQ ID NO: 90641 - DNA, 239 bp, Glycine max
  Clone ID: PAT_MRT3847_52861C.1
aaaaaaaaaaaaaaaacaaaaaaaaaaaaaaaaaaaaaaaaaaaaaaaaaaaaatctgggggatccgtacttacaagcgcatacatacaacgccataaaatctaatatacagaatcctaaattctatatcactgaatatcattttacaacatcttcaactcggaaaactctgtccttacccaacttcatttcctcgctcaacatcctcctttttcaagctgccgtaatatctctcactt

SEQ ID NO: 90642 - DNA, 454 bp, Glycine max
  Clone ID: PAT_MRT3847_52862C.1
agctcactcgtcggctggaccaccttattgttattgggttgaagttttttttttcccacatagatggaaattgatcggggggtcaaattgatactgatgattagcttaccttaaaacaacaagacccagggcttttacgaagaagagccaataaatggcacggcactttatgatggataatttatagaagacatacctgaagccacagctggtgaaatagaaaatgatgcaatcattcatagaaacatttcctgcaagatagcacaaaatccttagagtttagtgtaccacacatggacatcgagagcattacgaaagataacataggtgcaacgaaaatcgtagaacaaacaatgaacgactattatgatctgcaaatgaaattctcaaccattcaggagatcattatatgaaaggatcatgaaatgcctctctcacttcaagacattgctac

SEQ ID NO: 90643 - DNA, 463 bp, Glycine max
  Clone ID: PAT_MRT3847_52863C.1
gatgggtccagtgccttcctatggtgcacgttcccacggtcttcttttcccgctcatgtccaacggtcacaccgctaccccttatcaactgggcccaaatccttcttcggcatttcatattagtcaccgtcaccgcagcccgagccaaccactctttcatggtgcgattctttaaactgcaccgtcgccttcatccttcctctcccattccccaccgccacgaatatccccgacggagtggagagcacatgactatcttccctacatggggctagcctctgtactacaagttcagcaccggcaaatctgccctgccggcccggttcgagcaccagcttaaaaccctaggtccacgtgtgagattcatggtaaccgacgagcttcctctggtggacactccagtcagacaagatatccaaattccccacgctggagtacattggcatgacctgctactgcacta

SEQ ID NO: 90644 - DNA, 379 bp, Glycine max
  Clone ID: PAT_MRT3847_52864C.1
ggctcgagctttaacctcacccccccctagccacttcctaattagcattattattgtccacagacagctaaaggatcctgtatgtctctctctatatctactctagatccgacacccccatacatctctccctatgactccaacccacatctgatgtcagtgatacgttctgactatacttactatgtgctctcctaccttcgctgaactacatgctcgccacaacaacttctcattccacctctccaccccaattgtcaccaacgaattcaccgcatatgttcgcttacatgtcgaactaagctattgttcatcgttgttgccaccccatgcgccaatgcctcatgcacgatacccatatatgtcttagagcatgtaa

SEQ ID NO: 90645 - DNA, 383 bp, Glycine max
  unsure (1)..(383): unsure at all n locations
  Clone ID: PAT_MRT3847_52865C.1
gggttnnntttttttttttttttttttgtttttgttttgtttttttttgggttgngggggaaacctgaccattttattccggtgggggatcatcaaatcatcacttttttaccttacagggttttataaagttaaaaaaaaaaatacaatattacttttattttttaggggaaaaaccggggggatgtggatggatgtggatggaaaccttaatttttagctgctgctgatggaggggttcatcttggcgaaaaacctatcccaaatcatgaggcccccgtatttgggccccttttgggcaaactgcaacccgttgtattaaaggtccttttgaaacatgtacccttccttgtccgccttgggcaaccccccaaccccaaaaa

SEQ ID NO: 90646 - DNA, 443 bp, Glycine max
  Clone ID: PAT_MRT3847_52866C.1
tcgtacggctgcgagaagacgacagaaggggtccaggaacatttctgttacaagaagtggcgaaaagtgcacataattgttgaatgcattcttaattgtactttcttcatttaggtattgttgtatactatgtttagtttataaaaaaaaaaaaaaaaaaaaaaaaaaaaaaaaaaaaaaaaaaaaaaaaaaaaaaaaaaaaaaaaaaaaaaaaaaaaaaaaaagggaaaaaaaaaaaaaaaaaaaaaaaaaaaaagggggccgtttaaaagaatcaaagtttacttcccggggtttggaaggtaaaaatttttttatgggtcaacaaaaattaaattaaggggccggggtttaaaaacttgggaacgggaaaaacctggggtttaccaaattaaatcgcttggaaaaaaatccccttttgcccagtggggaaaaaaacaaaa

SEQ ID NO: 90647 - DNA, 533 bp, Glycine max
  unsure (1)..(533): unsure at all n locations
  Clone ID: PAT_MRT3847_52867C.1
ggattnnnntcttggaacccaaaggggcctttaaattggaggccagggagggagactccccttaacaatcattcnntcaatccccaaagggaaacaaaaaccacccacaacttaacacccttacctaaacccttaccccacggtttctacctggcttacccccacacaggaaaaccagaccccccactgggcttaataacttaaccttggcttacacacaccatggttgggggtcaaggaccacaatggttaattttaaccatatcttcaaatatttaaaaaggctccattttatttnnnnncgaatatttatttattccaaacttaaattgaggaccccaaggggtacccctattactctttggacaaaacaaaaaattcaccctggtaaataagaaaactcccaatggcgagggggaactttcatttttaccaagaattattcttttaccccttaaagaaccgggtctaaaaattggaccaaaggnnntgggaaggggcactctttttttttttaaaaattacaannnttt

SEQ ID NO: 90648 - DNA, 276 bp, Glycine max
  unsure (1)..(276): unsure at all n locations
  Clone ID: PAT_MRT3847_52868C.1
ttctgtgtntgcggctgaggattccgaacgagcgaccttcttcgtttctcgcaaagtttaantnnatcatgggtaaggaaaagacttcacatcaacattgtcgtcattggacatgtcgactcgggaagtcaactaccactggtcatttgatctacaagcttggaggtattgacaagcgtgtgattganaggttcgagaaggaggctgntgagatgancaagaggtcattccaagtatgccgggtgcttgacaacctcaaggcgagcgngaaangga

SEQ ID NO: 90649 - DNA, 345 bp, Glycine max
  unsure (1)..(345): unsure at all n locations
  Clone ID: PAT_MRT3847_52869C.1
tcgagcnttgttatctcttctttctcaaactctcgtattttcccttcgataatcaataaaatgttgttttaataaaggcaaggcccctcatatctcaatttattaattaatctctgctcattatttataaacatctatatcctggaacaaagaatgactctctccaccgataaacaacattatatatccaattccaatgaatcatacctccatatgcatcatcatccccctctatctaattaaaacatatctttcaaaaacaacacctcctctccttgactctcacccgataactattatattctcaaccatatacacacttctttacgtaatttacatctattc

SEQ ID NO: 90650 - DNA, 326 bp, Glycine max
  unsure (1)..(326): unsure at all n locations
  Clone ID: PAT_MRT3847_5286C.1
cgcgatcacgcgcccgcccacgcgaccgcgcnccgggacgaaagcacaaagagaccgcggaaaaacccccaaagacgacacaacaggcgcaggcgcacaccccgcagaagaccaccccgaaaaagaagaccaagcacaccccaaaaagaccgaagccacgaagagacaaagaanagacccccaacacaaggaggggcacgcccagacggaaacaaaccaggccaaaccgacccaggaagacgacgaaacccccacaggggccacgcgggaccccaaaaggcaccaagcaaaaaccgccacgcccaaaaacaccagacggaggaacc

SEQ ID NO: 90651 - DNA, 171 bp, Glycine max
  Clone ID: PAT_MRT3847_52870C.1
gatcactgcattaggcacatgtatacctttattattgatatcgctgcagctagtggggggggctacatgaacactttatcaatcccctatgcaggtgcggtgcaaaattgacacgcgtgacgcccacaaacgtaaaatggatccttattgagatatcagagagagtaccaa

SEQ ID NO: 90652 - DNA, 206 bp, Glycine max
  Clone ID: PAT_MRT3847_52871C.1
tgtgatgtggagatgcttgatctgcgacctgtaagttggctgctgctgatagtgtgaacagagttttgatggaacagaaaacgcaaagaagggattgaggatgatctaaacacagctaagatatgagatgtaatttctgagaattcgtcccagaaaacccccttatattcacgccccactattctggggggggggccccccccctc

SEQ ID NO: 90653 - DNA, 298 bp, Glycine max
  Clone ID: PAT_MRT3847_52872C.1
acaggtataatctaatcaatggatgacaaattgacagcatgcaagaggaattgctcggaaggaaagattagttgctcattcacttcaagtattgttctcacaaggtagcacatttgaagtccgtggagaatctgtggatattgtccatattgataattgggaattgaacctgcaaggattgccacttactggtgtgcccctgttgtcatccatttctgtctttgaaatgtttggtatgaacccatttgattattgttccaaattccttactattttaaattattcatttaccttattc

SEQ ID NO: 90654 - DNA, 338 bp, Glycine max
  Clone ID: PAT_MRT3847_52873C.1
ttcggctcgagatcaaggtttcttcctttctctgctctttgtcttctctgacacatttggggccttgttgagtgtgtttttgcaagagggtatcgcaacggacattgaagttgctgaacggggctccttccctggaaaggaccagcagtaccctcaaccaacacaagccatgaatgctcagggcccccaaaatgggccctttaaaaaggcccctaactgcggattcaatggcaacttggtcctcccccaaaatactggggccaaaatttcaaggtccaagcaccaaacgggttatgctgaagcctgtggtgaggttggcaatcctggcaatgcaatgg

SEQ ID NO: 90655 - DNA, 208 bp, Glycine max
  Clone ID: PAT_MRT3847_52874C.1
gatggtcagtattagagaacttgttttctcttcctggattggatcgatcgtgcgttctctctctcgtgttgatgcgatgattgactgcgtatcagtgcctgtgcttgaaacgagagggagtgtttccattgggaaggtataagcctttgtttgtagcattgccttacatgatcccttgtcctacttatctcggtctcttccactaact

SEQ ID NO: 90656 - DNA, 1376 bp, Glycine max
  Clone ID: PAT_MRT3847_52875C.1
cagcttcgggcattgggcaaggaaggcacccgcccacgctgcactcacatcgtcgctcgctccacccttcgtggtctgtgattacttctcccctcgccagtgaaatccatattccaaggaatatatcttgccctgtttcacccattggaagcccacttttgaggccaagatcaccacaacacatgaatgggcgaatgtctccctctcctatatctagccctcggactgcttctggtgcatccacgcctcttaatggtggtagcggtgccattccatttagtaatcacttagtttacattcaagagggtcttggaaacttgccaaaatcttcaaatggtgtctacgttagtggccctgctcatcatgacttgaatgttgacatttttcgaggaatgcaacagacatctcacattacatcagaactggttccaagtgaaagtgatgttctggggaagcagtttgcacggactcctcataatgagccgtatgatgttcaatcagtcttggctgaccgtgtttgccggcagctgctgggggataatgtgaaaattaacccatcccttgatctaagtcccaactctttgctcagccgggctaatggtttatgacatggagcattttccttggcccactttttgagcaagtctttgatgtttgtcagaatgatccatttattgttctatttgctgaggaagtaattgtaaaataaggagccaaagcataggagaatcaatgtaataaattttgatctaagaatataggagctggggcatataattccattttgcatggcttcaggctcaggctagtggagttcagaacctttcattggaagtgccaaactaagccttaggatgaaacttcctgacatttgatttgtctatatcaactgaaggctgcaaaaagaggagcttatgtttgtatgtagaattttcaagatgctggcagcatcagtgcatgataagtagggagcttggatttctctctggtgcctaagatatgagaatgataggattaatgttaatattaactcaaggaatgactttttctaatcatatgtatgcagttccttcagttaaagaattcatgcaatgacaactgtttcttttagaacatcatatagatgccaaaaaaaagtgaaattggtacaaaatttagtttctagactattttttgggaggtgatattgctgtacagaatatgggagactgtattgtgattctgcatttattgatgaaaagccaaggatttgtggaacccatacatctcttgattgcatgctcagatgtattctgtcattatataccccttctactggatttattttgtacattattatttgaagtaaaaaattgaagatatatgatttgtgatcc

SEQ ID NO: 90657 - DNA, 256 bp, Glycine max
  unsure (1)..(256): unsure at all n locations
  Clone ID: PAT_MRT3847_52876C.1
tatgattntgttcggagcctcaancaaccgagactgcatgcagattatctagcggccaaggaacaacaanncncctaatctgccatggatatgagccatgaatcaagtgtgagcatgcaagcagcctaatggctgtaaattcgcaatgtatgataatcatgtagataacaattagttataccctcggatcatagcatgtgatgaaattgataacaggttattttgttgcacaatattgaaattttttttgcctttt

SEQ ID NO: 90658 - DNA, 401 bp, Glycine max
  Clone ID: PAT_MRT3847_52877C.1
gggtgtggttgctgcaaggggttcgtctggtggcaggtcaagctggcttgctggagagcgggataacgctgctgcggctgaggccacacccaccgggggggtcgctgttgcaggctcacttggacatgctgttacacagagcacgaccacgagcgcaagacttgacagtggtcgctatgatgctgaaagcacctctgctgaccgtgcaagttagatagggccttctactgatctggggtccacataggcaacggcttcatcaagcagagcgtcacgctcgctagaggaatcaggtgatagctgtgcagcagacacggatgcacaacctgctgtaagggatgtatcaaaccctggtggtcatgcacagaacctggttctatgctgtgcttctggggaatgca

SEQ ID NO: 90659 - DNA, 2231 bp, Glycine max
  Clone ID: PAT_MRT3847_52878C.1
gaaggcatcgcctctctctttggagcaattcatctccattaccgctcctcttcttgacttggaaaaggaagctgagatttcaagctcgatcgccactggtgcgtccaggaatttggatactgctcaaaagaggggttctacaatcctcaacttgaagtgcgtcgatgtccagacagggcttatggggaagtctctgatcgagttccagtcaacaaaaggagatgttcttcctgcacacaagtttggtactcatgatgttgttgttttaaaactcaacaaggctgatttaggttctcctgctcttggacaaggtgttgtttacaggttaaaggactcatcaataaccattgcttttgatgatataccggaagacggtttaaacagtcccctaagactggaaaaagtagcaaatgaggtgacttatcgcaggatgaaagacgcgttgatacagttgagtaaaggagtgcacaagggtcctgcctctgatctgattcctgtcttgtttggggagaggccaccaacagtgtccaagaaggatgtatcttccactccctttaataaaaatcttgatcactcccagaaagaagcagtttcaaaagctctatcatcgaagaatgtgttcttgttgcatggaccacctggaacgggaaaaactacaacagttgtagaaattatattacaagaagtgaaacgtggatctaagattcttgcttgtgctgcctcaaatattgctgttgacaacattgttgagcggctagttccacatagctggtgagactgggtcatcctgcacgtttattgcctcaagtactggacagtgcactggatgctcaggtactacgaggagataatagtggtcttgcaaacgacattcggaaagaaatgaaggcattgaatggaaagctgctgaaaaccaaagacagaaatactagaaaggacatacaaagggaacttaggactctatccaaagaagaacgtaaaaggcagcagcttgctgtaacagatgtacttaaaagtgcagatgtaatattaactactttgattggggctttctctaaaaaactagacagcacttcatttgatttggtgattattgatgaagctgctcaagcacttgagatagcatgctggatacctatactgaagggttcaagatgtatacttgcaggggaccatcttcaacttcctccaaccattcaaagtgttgaagccgagaagaaaggcttaggaagaacgctctttgaacgacttgcagaaatgtatggagatgaaatcacatcaatgcttacaatccagtatcgtatgcatgaacttatcatggattggtcttctaaagagctttacaacagtaagatcaaggctcatccaagtgttactgcgcatatgttatatgatcttgagggtgtgaagcggacaaattctactgaaccaaccctccttctcatagacacagctggatgtgacatggaagaaaagaaagatgaagaagatagcacctttaatgaaggtgaagctgaggttaccgtgactcacgcaaagagactagtgcaaagtggggtgcttccttctgatattggaattattactccgtatgctgcacaggttgttttactcaagatgttgaaaaacaaggaggaccagctgaaggatgttgaaatctcaacagttgatggattccagggaagggagaaggaagccattattatatcaatggttcgatcaaattcaaaaaaagaggttggctttctgagtgatcgccggcgaatgaatgtggctgtgacacggtccagaaggcaatgctgtcttgtctgtgacacagagacagtcagtggtgacggatttctaaagcgattgattgagtattttgaggagcatggtgaatatctaagtgcatctgagtaccagaatgagtaggccagattcacagggttaagatttctattgtcgcactctcatgtgatcaatttgttgattttggtgatgttgctagtagatctgtgtaggtttctcaaatctttcctgagctatttggaatggaaaaaggttgatagtttttatagaaccattttatgtagatagaaaaaaattcttggtatctactaatgttattactttgattttgttaaaaaaaaaaaaaaaaaaaaaaaaaaaaaaaaaaaaaaaaaaaaaaaaaaaaaaaaaaaaaaaaaaaaaaaaaacaaaaaaaaaaaaaaaaaaaaaaaaaaagaaaa

SEQ ID NO: 90660 - DNA, 245 bp, Glycine max
  Clone ID: PAT_MRT3847_52879C.1
gaacgaaacagagagtgatttcactgagtgatcggtgtgcacttgatcgcaacagaatcgtcagcgtcaattgaagaagatgccgatcagagagagcgccgtcggaacgcctcaagcagcgaggcatcccgacacgttcagggccgcggtggctgagttcatcgcaaccttcaacgtcgtgttcgccggcgcatgctccggtatcgcctacaacagtctcaccgagaagggcgctgccacccctg

SEQ ID NO: 90661 - DNA, 205 bp, Glycine max
  Clone ID: PAT_MRT3847_5287C.1
catggttgcttcgttctccggcctcaaatccatggctggctatctgtcttggtgtacctgctatggcgttgcctggcttgcttgctgcggtggatgagttcattgcatgtctgtcttgccatcaattgagaagaaaaagatcgagactctttgctacttgctcgaccttgatgattcccatttgtctaatgtagtgagattcctg

SEQ ID NO: 90662 - DNA, 410 bp, Glycine max
  Clone ID: PAT_MRT3847_52880C.1
ctcctagcgtgcatcttacccttcatcaccttcctcgggactgtgggaactggatatgtgatgggttagccagaggcagagagaccaccttggtactagaggcagcggtatcttcacactcacaccaccctctgggcgtgcggggatacggctcactgaatacttaggactatttctactgcaccttgttgcgctgctacttcacccatcttgttgggggatcttgtgctacacatctcatcaaccaatgaaatcaccatgcggcgctcctatctccagttttctaccacagagtagatcccttatgggcactggaccaggtgctcacttgtttatgttaccccaattttgcatgtaacttgatgacaccactactactgaccccagtgacaccttagatagcttataca

SEQ ID NO: 90663 - DNA, 252 bp, Glycine max
  Clone ID: PAT_MRT3847_52881C.1
attggttcaaaatggtccttttatcgtttaaagttaacgtcattaatgatattcaaatattgatagctaaatggcttatttatcaaagcgtaagtaatggtccgtttggtagagtagaaaataataaaataaagatcaaatggttcatttatctttggaaaagttcattttggttctttatttttttaaattggttcaaaatgattcttctatgagtttgaagttaacgtcattaatgatattcaaatattg

SEQ ID NO: 90664 - DNA, 289 bp, Glycine max
  unsure (1)..(289): unsure at all n locations
  Clone ID: PAT_MRT3847_52882C.1
ctttggtttggctgtagctcagagctcgntctcctcgncggtttctcntcatcgntaattttccagtcntccctgtgacnatggtnaagggtnatgnggtngaangangncctgaagagccatgtacnaacgcccgagaaacgggggaancgccaagtcatgattaggccgtcctcgaaggtcatataaaatcccccttggtgatgcngangcntgggnaattggnaattcnaanangtgnngaccnaagggntgggaaatcntggtnnatnnattggcaagcnggatt

SEQ ID NO: 90665 - DNA, 549 bp, Glycine max
  Clone ID: PAT_MRT3847_52883C.1
ttccggcattcattcattcatacggtttccttctaaagcacaacactaaagttcagcaatcagtactctcaagaagaaaattacaagatcatcatcacaataacaatatgagttcaggaattagagcatggagtgtggcaactagcgttggagttgtggaggccttaaaagaccaaggtatatgtaggtggaatcatgctttaagatcagctcaacaccatctcaaaaaccatgttggttcattctctcaggctaacaagctttcttcttctgctatgagctccacaacactaaaacatgggaagacaaatcagtcagaggagtcattaaggactgtcatgtacttgagctgttggggtcccaattagatgccataaggccaataaaaaaattgattctttctctttcaatttctagaaatgaaacttagtctcaaaggatgatgatggttgagatttctggggtcatactgtatagtattgaaagattgcttgcctgatgtgacaatcagtttgtaaattttgttaaatgataatgtttagcattgcc

SEQ ID NO: 90666 - DNA, 463 bp, Glycine max
  Clone ID: PAT_MRT3847_52884C.1
gtggtttgtactctttttttttttgttttttttttttgttgttttttttttttttgttttgggtaggctagaaaagaacccctggcgactcactatgtttttggctctccaaaaaccagaaccccctcttttgagggaagaggtggttgctgttgcccccgcttggagaacagaggggtcttatgacggatagggggatcctttgccactacttgaagcgttttggcaaaggggattaattggggacacttaaggggagatggtggaggcggttcttggtacgcggttggagggaaaggaaatgtttgaagtggagggccccccccatggggggctggagaagtccccacccctatttttttttcgaaaaaaaaatagggtttggggacaagggcgttaaacatgtgccgaagattttcagtaaaaacattgccagaggcttgcttcgggtgtggagccccgc

SEQ ID NO: 90667 - DNA, 474 bp, Glycine max
  Clone ID: PAT_MRT3847_52885C.1
ggttaactcaacaaagaaatgtgtatatatatttcaagaaggtacagaaaataccagcatgacaattgtaacagaaaagatagatacataagcagatccggttactgcatatttaccccaatatgagaaaatattaagtaaccccactgctacctaacccaaaaagcaccaacaccctccactatcagtaaacatagattcacatgcagcactgtgtccactcatacatatataagaatactattcactgctccatgcctccatcaatatagacccgccacgccacgccccacagtatcagctagatgtcaccaatacacgatgctatgcatgctgcagggttactataccattgcacaaaagaaaatttgaatttctgaatagaatcatgcatacacaaccagcacaagaacctgacttcatgcaacaatgttgctctatccatcacagcgcgtttataaatgctcgcatttc

SEQ ID NO: 90668 - DNA, 3243 bp, Glycine max
  Clone ID: PAT_MRT3847_52886C.1
ctcgagccgaatcggctcgagctcttctctcttcttcttctgtgtgtctgtcgttgaagccaaaacgaaacggcgaagaagaagaagaagcatgggttcaacgagacgcaacagtgggtctttctccaacagtaacaagaggcgtcctcttcttcttccgaagacaagactccttcccctccccctaagcgccaaaaggtcgacaatggtgccgccgcgtcggagaaaccgatgccggcggcggaaaattccaaggaattgggcacgccggagcctcccgctgaccccggagaatgcgccgttcaggacgcgcagatcgccggcgcagcaagttccgacggcaaggccgaagctactccgccgatcgccgatggttctacaccgactgtggtggctgataaacctaggggttcgttctcttcttggagggtacatccgaagcaaaacccaaattttgaaccttcagttccatggtgcagactcttgtctcagtccgcgcagaatccgaatgttttaatttccacacccagctttactattggctcaagtaggagttgcaatttttcgttgaaggatcagactataagtgcaaatttgtgcaagatcaagcacacgcagcgcgagggaaatgtcgtggctgtgctagaaagtatgggcagcaaaggatcggtcgtagtgaatgggactctcgtcaagaggagtgccagctgcgtgcttaactcgggggatgaggtggtttttggtttgctggggaatcattcttatatttttcagcaaataaatcccgaagttacagttaaggctgcagaaattcagggtggtgctggcaagttttttcagtttgagagaagggccggagacccttcagctgtggccggagcttctattttggcttctctttctagcctcagaccagagcttacaagatgcagtcatagtgttttatatatgcggtgtgactgacctgaaggaggaatttaaggggaccgtctaatggaagtcgggggaaggttgtcttactatttgatgataatcccttgtctaaaattggtgtgagatttgataaacccatacctgatggagttgatcttggtggtgcctgtgagggaggtcaaggatttttctgcaatgtcaccgatcttcgtttggaaagcagtgctgtagaagaactggacaaattacttattcattcattgtttgaggttgtttttagtgagagtagaagtgcaccattcattttgttcatgaaagatgctgagaagtctattgtaggaaatggagattcacattcatttaaaagtaagcttgaaaatcttccagacaatgtggttgtaataggttcacacacacaaaatgacagtcgcaaggaaaagtcacatcctggtggtttgctttttacaaaatttggtagcaatcagactgcccttctcgacttggctttcccagatagttttggacgattgcatgacagggggaaggaagccccaaaacaaaatagaactttgactaagcttttcccaaataaaattacaattcacatgccacaggatgaggctcttctagcatcctggaagcagcaactggatcgagatgttgagactctcaaaattaaaggaaatttacatcacttgcgcacagttctgggacgttgcggaatggaatgtgaaggacttgagaccttgtgcattaaggatcagacacttacaaatgaaaatgcagagaagataattggttgggctttaagccaccacctcatgcagaattcagaagctaagcctgattcaaagcttgtattgtcctgtgagagcattctgtatggaattgggatcttgcagtctatccagaatgaatccaagagcctgaagaaatcacttaaggatgttgtgacagaaaatgaatttgaaaagaggcttttggctgatgttattccacctagtgacattgatgttacttttgatgatattggagctcttgaaaaggtcaaggatacattgaaggagttggtgatgcttcctttacagaggcctgagcttttttgcaagggacaattaaccaagccctgcaaaggtatcctattatttggtccccctggaactggtaaaacaatgcttgcaaaggcaattgctactgaagctggtgctaacttcatcaacatttctatgtcaagtatcacatctaagtggtttggtgagggtgagaaatatgtgaaagctgttttctctctggcgagtaaaatttcacctagtgttatatttgttgatgaggttgacagcatgttgggtcggagggaaaacccaggagagcatgaggccatgcgaaagatgaaaaatgaattcatggtgaattgggatgggttacgcacgaaggaaaccgagagagttcttgtcctggctgccactaacaggccttttgaccttgacgacgctgtcataaggaggatgccaagaagattgatggtaaatttgccagatgctcctaatcgagcaaaaatattaaaagttatactggcaaaagaggacttgtcttctgatattaatatggatgcaattgcaagtatgactgatggatattccggaagcgatctaaagaatttgtgtgtaactgctgcacaccgtccaattaaagagatattagaaaaggagaaaaaggaacaggctgctgctgtatcagaaggtagacctgctccagcattaagtggaagtgcagatatccgatctttaaacatggaagatttcaaatatgctcatcaacaggtctgtgcaagtgtttcttctgaatccataaatatgaccgagcttcaacaatggaacgaactatatggtgaaggtggttcaagagttaaaaaagcattaagctatttcatgtgataaaccctttgtacaaacgtttctcccattgctgcctgtctagaagcctgcgtatatgaagctttttgccggcctcataatgcttgcagggcttgatgctgagctgtttcgtctataaaaatgaaatataggttttttaagtaccttttttttttctctctttttaaaacccaaacctgtgggatgtgggttttgaaaggagtggagccttacagaattttggccaggctctgctgcatgtattttgttcctcatcccctggccgccgatgtgtgttgaaagtgtcgcactagaaaaaagaagagtcataatgaccatgtgaagcatttatttgccctctcaatggaatctgctaaaacaattaagcatttagatc

SEQ ID NO: 90669 - DNA, 414 bp, Glycine max
  unsure (1)..(414): unsure at all n locations
  Clone ID: PAT_MRT3847_52887C.1
gcggaacccggggcgtcccacgacgccgagtanagcacaagaaaangaaaaacagggcgcagacgaaagcctaaaggaccaaacaccagcagcccgacaagacgcaaacaactaagggcaagaaggaggcaaaagaaaagaaccccagacaaagaagggcaggcgaacaaaaacaccacaccgacgggaaggagcatgagggaaagcaaaaccccgaaaggaacaatagtgcaggggagaatcatgcagtccaaaaacccctaacggaacaacgaagaaaggagggaccactagtgcaagcgaccccagaacagcaaaggtgacagaaggcagcaagccagaaggtactgcaatgcatgcgggagccagagaaaaaagcatggacaaaatggcgggcacagacggcaacacaga

SEQ ID NO: 90670 - DNA, 1296 bp, Glycine max
  unsure (1)..(1296): unsure at all n locations
  Clone ID: PAT_MRT3847_52888C.1
ctcctcatttctttctctttctctcttcttcttcttcttcttcttcttcttcttttcttgtgtgtgtttgtgtccgccgttgaagcctaaacgaaacaacgaagaagaagaaagaagaagcatggtttcaacgagacgcaacagtggatctttctccaacagtaacaaaaggccttcttcttcttcttcttccgaagacaagactccttctcctccccctaagcgccaaaaggtcgacaatggtgctgccacgtcggagaaaccgatgccggcggcggaaaattccaaggaattgagcacgctggagcctcccgctgaccccggagaatgcgccgttcatgacgcgcagatcgccggcgcagcaagttccgacggcaaggccgaagctactccgccgatcgccgatggttctacaccgactgtggtggctgataaacctaggggttcgttctcttcttggagggtacatccgaagcaaaacccaaattttgaaccttcagttccatggtgcagactcttgtctcagtccgcgcagaatccgaatgttttaatttccacacccagctttactattggctcaagtaggagttgcaatttttcgttgaaggatcagactataagtgcaaatttgtgcaagatcaagcacacgcaggatatgtatgtgcagtatgattactgttgtttctggaaatgatcagcgcgagggaaatgtcgtggctgtgctagggctcgagggtagcaaaggatcggtggtagtgaatgggactctcgtcaagaagagtaccagctgcatgcttaactctggggatgaggtggtttttggtttgctggggaatcattcttatatttttcagcaaataaatcctgaagttacagttaaggctgcagaaattcagggtggcgttggcaagttttttcagtttgagaggagggctggagacctggctggagcttctattttggcctctctttctagcctcagaccagagcttacaagatggaaatctccatctcagactgccagtaaacctcagcagggtacagatgtgtctagtcattctgttctccctgatggtacagaaactgagctcgatggcctggaaggcaactcagctccaaatgtagcgactgataaagcttctgatgttggaacaagtgacaagaattcacctatggattgcgatccagatgatgcaggcacagaagcaggcaatgtaaaaatctctggggtgaatgctttcctaaggcctttcttcanggttctagctggatctacttgtaaactgaaattgagca

SEQ ID NO: 90671 - DNA, 4890 bp, Glycine max
  Clone ID: PAT_MRT3847_52889C.1
ctttctttgattatctcttctctcttcttctactgtgtgtctgacaccgcgtccgctctccttgaaaacagaggagaagaggaagaagcagaggaagagagaagaacaaacgaagcatggtttcgacgagacgcagtggatctctctctgccaaaagatcttcctcctcggaagataaatctccttcgccgaagcgccaaaaggtcgacaatggcggttcgtcggagaaatcggtgccgacgccggcggagaattccaaggatttatcttccccggagcccgtgcctgatcccggagaatgtggctccggcgacgctcagatcgccggagccggtgccgccgatggagtgagctctggcaagggtgacgctacgccggctgtgcctgtcacggcaccgattgctgatgccgcatgtccgtcgttctcttcgtggattaattatcagaaacagaatccgaatatcgaaggtgcgccgtggtgcaggttcttgtcgcagtctgcacagaatcctaatgttgctgtttgcacacccattttcacgattggttctaatagaagttgcaactttccactgaatgatcaaactataagtggaaatttatgcaagatcaaacatacgcagggtgacggaagtgctgtagctgtgctagaaagtatgggtagcaaaggatctgttctagtgaatgggacacatgtcaagaagaataccagctgtgtacttaactcgggtgatgaagtggtttttggtgtgcttggaaatcattcttatattttccagcaactaaatactgagggtgcagttaggggtgcagaagttcaaagtgggattggagaaatttctactgcttgtaaggagtaaggcgaagatccttcagctgtggatggggtgtcttctttggcatatctttgaaactgacagggactcaaaagttgtgatgtttcgtctgagcatccaatttagggttaccatcgtacaggcttctcaaattgagtcgataatcatgaagatgtctcttaagggtgttgttaaccgcaaaaagagtttgaagagaggcgttatgctgaagtaaagctaccaaccagtgacaagattacaatcatggattgcggagcagttgaagatgtcaaggatggaatggaagaaatggttatgcttcatttacaaaggccagagctattttggaaagggcaataaactaatccgtgcatgggtatgctattatttggtccccatgggacaggtgaagaaagacatgggacgctggatatgcaggctgcatcgacttagtgtacatatgtgcgctgtgcagggattaaatcagaggggtttggtgcggttgaggattgagaaaaaatagttccttcttttgaaactgtacgggactatagaagtataaacattaaagaagttcaggtggctccttgctttatgtacctaaggcataatgatcatgaaatgtttactgcagatcttacaaccatgaaccattgtaatggtctatgtggacctgaagcgtaggaagtacttctggatatgttggtaaaagcgctttctaactaatatggggctaagttgctgatgcttcctcgtcatttactgttgatttttttagcttctcaaaaagctgcacaaatcaaggatgttcttcttgcaaagaaggacttctgctccaataatgatattgatgcaatagcaagtatgactaatgtagattccgtagcttgcgaaaaagaatcagcgtgtaattcatgcacaccttcaaattatggcgatgtttctaaacctaaaatggaaacagataacatgccatccacctctgggacagctaaaagttgctcattcaaattaagtgatagggtgaaatttagttgttgatcttattgaggcgtataacaaagatcttgaaggggaccgtctaatggaagtcgggggaaggttgtcttactatttgatgataatcccttgtctaagattggtgtaagatttgataaacccatacctgatggagttgatcttggtggtgcctgtgagggaggtcaaggatttttctgcaatgtcaccgatcttcgtttggaaagcagtgctgtagaagaactggacaaattacttattcattcattgtttgaggttgtttttagtgagagtagaagtgcaccattcattttgttcatgaaagatgctgagaagtctattgtaggaaatggagattcacattcatttaaaagtaagcttgaaaatcttccagacaatgtggtggtaataggttcacacacacaaaatgacagtcgcaaggaaaagtcacatcctggtggtttgctttttacaaaatttggtagcaatcagactgcccttctcgacttggctttcccagatagttttggacgattgcatgacagggggaaggaagccccaaaacaaaatagaactttgactaagcttttcccaaataaaattacaattcacatgccacaggatgaggctcttctagcatcttggaagcagcaactggatcgagatgttgagactctcaaaattaaaggaaatttacatcacttgcgcacagttctgggacgttgtggaatggaatgtgaaggacttgagaccttgtgcattaaggatcagacacttacaaatgaaaatgcagagaagataattggttgggctttaagccaccacctcatgcagaattcagaagctaagcctgattcaaagcttgtattgtcctgtgagagcattctgtatggaattgggatcttgcagtctatccagaatgaatccaagagcctgaagaaatcacttaaggatgttgtgacagaaaatgaatttgaaaagaggcttttggctgatgttattccacctagtgacattgatgttacttttgatgatattggagctcttgaaaaggtcaaggatacattgaaggagttggtgatgcttcctttacagaggcctgagcttttttgcaagggacaattaaccaagccctgcaaaggtatcctattatttggtccccctggaactggtaaaacaatgcttgcaaaggcaattgctactgaagctggtgctaacttcatcaacatttctatgtcaagtatcacatctaagtggtttggtgagggtgagaaatatgtgaaagctgttttctctctggcgagtaaaatttcacctagtgttatatttgttgatgaggttgacagcatgttgggtcggagggaaaacccaggagagcatgaggccatgcgaaagatgaaaaatgaattcatggtgaattgggatgggttacgcacgaaggaaaccgagcgagttcttgtgctggcagccactaacaggccttttgaccttgacgaggctgtcataaggaggatgccaagaagattgatggtaaatttgccagatgctcctaatagagcaaaaatattgaaagttatactggcaaaagaggaattgtctcctgatgttgatttagatgcagttgcaagtatgaccgatggatattccggaagtgatcttaagaatttgtgtgtaactgcagcacatcggcctattaaagagatattagaaaaggaaaaaaaggaacgtgctgctgctcttgcagaaggccaaccagctccagcattatgcagcagtggggacgtcagatctttaaacatggaagactttaaatatgctcatcagcaggtatgtgcaagtgtttcttctgagtcagtaaatatgactgagcttttgcaatggaatgaattatatggagaagggggttcaagagtaaagaaagcactcagttatttcatgtgagagtttttctatagctgacatgtcccctctcccccgcagcctccatctcctgaagcttgcatctatagttttgccaaattttatcgcttaagggtttgctgttgagccatttcgtttgtaaaatgaaatataggtttttatttataaagttatttttattacatttgggatgatgggttttgaaaggagtggagccttccaaaattttggtttgttctgctgcttttgttttgttcctcatccctgaaggacgtcttatttcaagttataaaagttctactagatgaaaagataaagtagtcaggtgatcctgtgatatatttgttctcttatctatcgaaatctgctggaataataagcatttagatcctttctatatctgtgtttatcacttttatgtacatcccatctcatatatgatatatgttggagccctctttgcttgatagagctccctttagtcgaatttccttaagaatgtaaatcaatgaaaaatttgttggcctcaggttagacataaatatgaccgagcttcaacaatggaacgaactatatggtgaaggtggttcaagagttaaaaaaggacgcgtctatttcatgtgataaaccctttgtacaaacgtttctcccattgctgcctgtctagaagcctgcgtatatgaagctttttgccagcctcataatgcttgcggggcttgatgctgagctatttcgtctataaaaatgaaatataggtttttgaagtaccttttttttttctctcttttttaaaccctaacctgtgggatgttgggttttgaaaggagtggagccttacagaattttggccaggctctgctgcatgtattttgttcctcatcccctggctgccacctctaaaagatgtgtgtgttgaaagtgtcgcactagaaaaaagaagagtcatatgaccatgtgaaagtatttattggccctccgctaaaacaataagcatttagatcatccctgctttctgtttactgtacatatgcatgatagagctccctttagtcgaatttccttaagaatgtaaatcaatgaaaaatttgttggacttatgcgatggttcaattctttc

SEQ ID NO: 90672 - DNA, 399 bp, Glycine max
  Clone ID: PAT_MRT3847_5288C.1
acgcacgcatgcgctcgtccgggagttcggattgcggactcagcatggcttactattttaagacccgtgaacgtctcactataggaattagtgacgaattctgcaagcgggcgcaggctgatcgccgaacgcctgttctaatacgaagaccacctgagcgcgaagcctagccgtgcgatgtgatggattgagatgaacatgtttagtgaagatgcggatatttaagttcataatcaggggaacagttggttgagcgggctggcaatacacgaggcttactcgcgagatgggctagggtatattgcgactacagtagttgacatgacagctgggcatgtattctaaccatgccgatccaaggaatgatgaaggcacagccgttctgcaagttatgctccc

SEQ ID NO: 90673 - DNA, 1685 bp, Glycine max
  Clone ID: PAT_MRT3847_52890C.1
gatctaaatgcttaattgttttagcagattccattgagagggcaaataaatgcttcacatggtcattatgactcttcttttttctagtgcgacactttcaacacacatcggcggccaggggatgaggaacaaaatacatgcagcagagcctggccaaaattctgtaaggctccactcctttcaaaacccacatcccacaggtttgggttttaaaaaagaaaggaaaaaaaggtacttaaaaaacctatatttcatttttatagacgaaacagctcggcctcaagccctgcaagcgttatgaggccggcacaaagctacaatacgcaggcttctggacataggggcagcaatgggggaaatatttgtacagagggttttctcacataaaatagcttagtgctttttttactcttgaaccaccttcaccgtatagttcgttccattgttgaagctcggtcatatttaaaaaaggatctaaatgcttattattcccataagagacaacaaatatatgcacaggatcacctgactactttatcttttcatctagtaaaacttttataacttgaaataaaaataaaagggcgtccttttgggatgatgaacaaaacaaaagcagcagaacagaccaaaatttttgaaggctccactccttaactcctttcaaaacccatcatcccaaatgtaataaaagtaactataaataaaaacctatatttcattttaaaaacgaaatggctcaacagcaaacccttggaagcgataaacattagcaaaactacaaatgtgcaggcttcaagaaatggaggctgcaggggaggggggacatgtcagcaataaaaaaactctcacatgaaatagctgagtgctttctttactcttgaacccccttctccatataattcattccattggaaaagctcagtcatatttactgattcaaaaaaaacacttgcacatacctgctgatgagcatatttaaagtcttccatgtttaaagatctaacgtccccactgctgcataatgctggagctggttggccttctgctagagcagcagcacgttcctttttttccttttctaatatctctttaataggccgatgtgctgcagttacacacaaattcttaagatcacttccggaatatccatcggtcatacttgcaactgcatctaaatcaacatcaggagacaattcctcttttgccagtataactttcaatatttttgctcgattaggggcatctggcaaatttaccatcaatcttcttggcatcctccttatgacagcctcgtcaaggtcaaaaggcctgttagtggcagccaggacaagaactctctcggtttccttcgtgcgtaacccatcccaattcaccatgaattcatttttcatctttcgcatggcctcatgctctcctgggttttccctccgacccaacatgctgtcaacctcatcaacaaatataacactaggtgaaattttactcgccagagagaaaacagctttcacatatttctcaccctcaccaaaccactgaagcaaaaagaggcaagaaaatgagttgtatgcacagcaaactaataaaggtgaaatcaatatacacttagagagagacaaatttaaccttagatgtgatacttgacatagaaaagttgatgaagttagcaccagcttcagtagcaa

SEQ ID NO: 90674 - DNA, 1360 bp, Glycine max
  Clone ID: PAT_MRT3847_52891C.1
aattcggctcgaggcgaggagctcaggctgtttctcgaggccaaggagcggctgccgctggcgaaaaccaccgacgttgcgtcgcggatgctcgatggcgccgtgagactgccgaggcagctgttcagtggagaggcggagctgggagaggtggctcagccggccaagggcgggagggacttgctcaggattttcaaggagttgaagcagtctgttgccaatgactgggttgggagcaagccccttgttgtggaggaggataaggagttcatggagaggaaggataagttggtggattttgagcaccatcttagcaatgtttctcagcaggctgaatcccttgtcaagtttcagcaagacatgggtgaaacggtgggtgaactaggtctggcttttgttaagcttaccaaatttgagacggaagaagccatatttgagtctcagagagttcgagctgctgacatgagaaatgtggcaactgcagctgttaaagcaagcaggttatatagagagctgaatacacagacaatcaaacatttggataaactacatgaataccttgggacaatgctagctgttaacaatgcattttctgacagatcgagtgcattgttgactgttcaaacactctcatcagaactagcttctttacattcacgggtggaaaaacttgaagttgcttcatccaaaatatttggtggagacaagtctaggatgcggaaaattgaagagttaaaagaagccattagagttactgagaatgctaaaatttgtgcagatagagagtatgaacgaatcaaggaaaataataggagtgaacttgaaagaattgaccaagagaggaatagcgacttcctaagcatgctgcgagggtttgttgtcaatcaagcaggctatgcagagaagacggcaactgtgtgggagaagcttgcggaagaaacggctgcttactcgagtgacagcagctaaaatgtacttggctgtataaattattgtttttgccttttctatgcagaaattctagattttggttccattaatgtaatcttatgtagttacattactttagacgaacttagcattagcccagagttgtatatgcatatatccttttatttttgtccgaccttcaagatttcaatgggtttaactaatcagagttgtacatttcttgcatattcctttgattttcatgttataaagtaatgtttaatttttgttccattaatttaatcttatgtagttacattactttagacgaacttagtgttagctcagagttgtatatgcatatatcccttttatttttgtccgacattcaagatttcaatgtgttttaagttttaactaatctgagttg

SEQ ID NO: 90675 - DNA, 268 bp, Glycine max
  Clone ID: PAT_MRT3847_52892C.1
ggatgatggacggaaggtgtttgataaaatgcgtgtgcgcaatgtgttcgcgtggaccaccgtgatttctgggcttgttgcctgtgggaaattggacactgccagggagctatttgagcagatgccttccaagaatgttgtttcatggactgcaatgattgatgggtatgtgaaacacaagcagcccattgaagccttcaatctgtttgaaagaatgcagcaggttgataatgtgaggccaaatgagtacactttggtgagcctggtc

SEQ ID NO: 90676 - DNA, 1693 bp, Glycine max
  Clone ID: PAT_MRT3847_52893C.1
cattttattatagaattaactaaagtaggaatgaaataataggggggggggagagatatatccacgcgtccgcggaagcgtgggtgtgaatagagagagtgatgggtgagaggggggacgaagctgtaaccccggcggggaggctgttcctgcaggcagaaatgaaacaagtaatccactgcgtcatagggctgaagaaccccatcgacgcggagctagtgaaatcacaagtccggaactctactatgctacaacacccacgcttcacgagtctgatggtaagaggcgaaggaggagtggagcactggcggcccaccgaaatcgacatcgatcggcacgtgcttataatagaggaagcagtgggcgagagggaggaggaggatgaatcggccatcaacaagtacctggccgaattatccatagacagcgatgggcttagcatggagaagcccctgtgggaaatccatcttcttaaggcccacaagtgcgttattttccgaatccatcacgccctcggggatgggatttccttgatgtccatgcttctcgccagctgcaggaaactcaacaacccaaacgccctccctaccatcgccgcctctgcctctacctctgcctctaaaactaacctcatcaatttccggaatctcctcgctaccctctggttttgtttcatctttgccctcgagttcatcctcaggtgtttgtggattcgtgaccccaaatccgccttaaccggtggcgctggggttgagctctggcccaggaagatagctactgccactttctccttagaagacatgaagaccgtcaagactgctgctaatgcgaccataaatgatgttctatttgcagttatatcatctgggatatcaagatacctagactttcgagcacctaatgggctgcgagatggtgttcagctaacaggtttagctatggttaatttaagaaagcatccaggattacaggaattatccaatatgatgagaagtaattcaggagcaaggtggggtaacaaatttggtatgattctcttgcctatatattaccatagaaccaacacttcagatcctttagaatatctgaagagagctaaggcaatgattgacagaaagaaacgatctctagaagccagtttctcatacaaaattggggattttgtaatgtccacccttggtccaaagtttgctagccttctaaattatcggatactctgccacacttccttcactatctcaaatgtggttggcccgcaagaggagattatgattggaggcaatcctataacgttcttaagggcaaataattctgccttgcctcatgctctcattttgaatatggtgagctatgctggaagagcagacatgcaagtgcaggtggccaaagacatcattcctgatcctgagtttcttgccaagtgttttgaagatgcattgcttgaaatgaaggagcaggttacggccaaaatctgacatttggagaaatttgattttgttaaatgttacaacattgctatgaatattgagatacatataatcacaagcaacataatttacattgggataacatttactttcttaataaatgttatatagggacttatttgatacatctagttctctcatatgtaccattgatggttgtatgacctattaatacataagttgaaaggatttgaagcatattatta

SEQ ID NO: 90677 - DNA, 332 bp, Glycine max
  unsure (1)..(332): unsure at all n locations
  Clone ID: PAT_MRT3847_52894C.1
gtttctccactngtacgnnanancggacttcggntagatnntaagcgtaangaagnannngnagaaaagncantactncctccnnncntgaganancnccanggnnacannagcaacggnnnnagcaccacccanccagnangaggaaaaccaggacnacaaccnnaaggacgnnnaccnccaagaccncaagnnnnanngacgncccanncaggaacagnnngccacgacnccnagnaancnnannntagcacttncctcnacggaggnngggncgnangangcaatngcnagcnnnncanncggaccaganncnacnccaannnctcgnc

SEQ ID NO: 90678 - DNA, 567 bp, Glycine max
  unsure (1)..(567): unsure at all n locations
  Clone ID: PAT_MRT3847_52895C.1
agtcattgcttctttgtttgttattttgtgctcttgctatatatgctgtttactgtgcgtgttttttattgagcaaaaaaaccaccaaactttggtgttctctttccggatggggcagcagtaccaaaaactatcgccccactgggagggggtttccaccttgtgctggcccacctctaaaacattattttcgagcaacgcgggggcattcggtccatcgaaggctttatacggggatgccaacatgatctggaacgaccccccccccactttcaaggccatagctgatgctgggtacaatccggttggaacccctctccttgatcctgcatcaaatgacgggggggaattatccagaattatgagcgctgccactaaaaatgcgacagagaaccacatgcactcccgtgacgccaaactcatggtctatgaacttggaccgacttatggaggatacacactccacaccggagcacaatttgggactaccggtgccaccctggcaagaacaacaaactgggtggggccatgggtccnataaaccccccccaccctaaacaggctttt

SEQ ID NO: 90679 - DNA, 467 bp, Glycine max
  Clone ID: PAT_MRT3847_52896C.1
ggaattcggcacgaggaagaatactaatccaagtgatttgtttttatcttttttttttctttatatatgcatgatttgttttcatctaactttatcttcctaacttttgaaaattaattctttttaactttgttctattaaaaaaaagaagaaaaaagtgtttgatgtgcaaatttggttattctaaaatagtaaaaataaataaccaattttaaaagttgatgaaaaaattaacaaataatagtttaatacacttataatttgttatgcatgtacacatgatattaactattatttttttttcccagcaataactctctaaaaagagttgctgactttaggaaaatagatcttgatgtaatactacttaccacatttatatataaaaataatttaaatatatattgtaattatattaagatgatgtttcttaacttcaaaacccaaatttccatctaccattcttc

SEQ ID NO: 90680 - DNA, 226 bp, Glycine max
  Clone ID: PAT_MRT3847_52897C.1
ttcattgatatttccttttttttcattcttgttattgacacggaaaggggtgaagaagattatagatccaattaagtattaaatatatgtaattaatatgtaattaatctcctcttctttatttcgtcttttataacttcttttttttacaattgtaatagaataagttaggaaagtgaaagattaagggttaatttggcctaattgaatttcggaataaactggg

SEQ ID NO: 90681 - DNA, 437 bp, Glycine max
  Clone ID: PAT_MRT3847_52898C.1
atacatttttttggcttttctccccaaaaaaacccttccttccctagccataattttaacacaacctgtcttataccttcatccaattcaacactccttaaaacctctgaccatttatttcataacgttgcataacattaataaatgtaaacaaatcacaccttctacaacaacctagtcccattcttcaaaaccaaccaacttaaacactcacttctttttctcaaccccctttaaaaaaccttctaaaaaaccaaccttatttttattgatcgccagccttacacttgtctttcaaagccgtctgaataagcagaatactctcaacttctttttcaacatacatgttcctctctccaacacccttggacattcctcacattttaaaccaaccaaacaccgtactacatctattaacaaaaggattcccacaaatt

SEQ ID NO: 90682 - DNA, 430 bp, Glycine max
  Clone ID: PAT_MRT3847_52899C.1
cctcaagccgaatcggctcgatggagttcagaagcttgaacctaggccatccccaaaatcccattccatagtgaaggagtatgggagtagattactataagattttgcaggttgacaagcatgccaccgatgaagagttgaagaaagcttacagaaagcttgcaatgaaatggcaccccgataagaatccaaccaataagaaagaggctgagactaagttcaagcagatatccgaagcttatgaggttctgagtgatccccagaagagagcaatctatgatgaatacggagaagaagggcttaaagggcaagtgccacctccagatgccggtggccatacattcttccaaactggagatggcccaacaacgttcagttcatctccaagaaacgcagatgacatttttgctgagtttttcgggttctcgag

SEQ ID NO: 90683 - DNA, 461 bp, Glycine max
  Clone ID: PAT_MRT3847_5289C.1
agaatgaatccttgtgtttaaactagacatactaattacaacacattctcaacttaagtcacttttgcctttcatatagtgaaaagactgtgtgcatgacatcatgataagattaatatatgcatcacagaaatattagtttgctttaaaaatctttatatgtatgcgattaaagacatatccaggaatgtaagacatcaatcatcaatgatacaagatgaaatgctaactagtaccatatctgaaacacaataaccttgaatgcaactcacaagttgtttttgtttatttaaatttatttggtttgcaactctaaacgccacgtggaatccacacaatctgaaaagaagctgagatattgatatcttgatgtgaccactcctccattcttagttgagactcctgataggtttgtgtgaattgaaacccacctcgttggaaggaggaaggaacccaatcat

SEQ ID NO: 90684 - DNA, 611 bp, Glycine max
  Clone ID: PAT_MRT3847_528C.1
gctgcaagttgagcgtggattccaaggacaacatggttacctagtgtgtactttagtttcagttactggttttcatgaataatcaatatcttaggtagcatctgagctttactttaattccactgaagttacaacctattttaaccaaagcacgtaagttatcttcactgtcttgcctaaaaatgcccgcattttttgttgtcttatgatgctatataggtttcattttatggtaccgatggacaaaacaaaagctcctttttccctttcagtggagtaactgaagaattaaaggcttttattaatgatgtatctgaaaacaccctcaagggtgcaagagatgttgctgtgttagcggcaatgcttgaatccggagctaagaggcaataatggaactctttgcattggtcacctaattcattggatgaagttttaggattcgtataatatgtcatgcacatattaatactcacgaatttctttatttctggtgcacttcgtgggctgcctcgttaccttgtgttgtcagaagggaagcttagctttactgacaattatataatgtatgaattatttaaatttggtatatgttagaaattagaatgtcgtgc

SEQ ID NO: 90685 - DNA, 618 bp, Glycine max
  Clone ID: PAT_MRT3847_52900C.1
ccgcataagtggaaatagtttattgacaagtgtcatgggtacacatgggataaacccgaaaacacaactcactttatggaagttccactagttctaagtacaacctgtgctctactttcatctatacaagccttaactccagcaccaccaatcaatctgaactctgaagaagtagaaacaggatggagcaaagtgtttttgtgtttgtagaactaatgaagatgtgttgcataccacttcagtggcaacaaactcccttcaagctacatatagcttttggctttgctgaagccatgtttgcaatcaagatgaagaaacctgctgttggagtttgctcatgtgtcatgcattcaaaaggtttatgatcaataagggggacaaaaaaataacagtaatcacgtgtattttctctcaagccttctgaaatgtgcgagaagaaactccatgcagaagcctaacaaaccccaagaagctaagcttcccatctgagtgtcttatccaatcttggagtaccacatgaataggcactgaagggctaagcccaagttccgaagcaagctcttcaatcataattggtctatttccttccttttcaacatctcgtcgcacgccttgcat

SEQ ID NO: 90686 - DNA, 280 bp, Glycine max
  Clone ID: PAT_MRT3847_52901C.1
cgccacaaagttcataacgcttgagcctccccaggctgcatacatgagcgcatgggatcgcgataaccctctccgacaagctcttactctgtacctcatcacatggatctttggactggccgtctacttcattgttgccaccctctcatacatgttcatctatgacaagcgcaccttcaaccacccccgcttgatcaagatccaggtccgactcgagatgatccacgccaacacggtcatgcccgtcatggacggcatgacagcgcccatgttcctacta

SEQ ID NO: 90687 - DNA, 221 bp, Glycine max
  Clone ID: PAT_MRT3847_52902C.1
acctattatttaattactgatctaataatattaacattcggacaagattaatataaacttatcattggactttatacagtattattcatcatttaattaacatttcatcttaattcattctctctcatcatttaattaattaatcctatccatttttattttctactttatataacattaattcttctttctcattatctttacatacatatatttattct

SEQ ID NO: 90688 - DNA, 308 bp, Glycine max
  Clone ID: PAT_MRT3847_52903C.1
gccacgcgtccggtagtgtggaattggatcatatctggttggttgagagagatgtcaccgggggaaacctgattcggaaggttggttaagggctctctggggggtttcgcactgggctctaagctttgcgcgtgtgtgcccgttctctactggggatttaagaacgcccttactctctgcaacaacaacaacaaactctcttgcgctttctgtctctgtgactgtgctctccctctctcgctcttccaacttgctcctgggctggcgaaaattctctgtctcatattgtggaagtaatgacccccatc

SEQ ID NO: 90689 - DNA, 161 bp, Glycine max
  unsure (1)..(161): unsure at all n locations
  Clone ID: PAT_MRT3847_52904C.1
gaagactttttatggggaaacatatcttgtgcacatagaagaaggttcgtttttatgcagggtttgccttgttgagtgcatttttccaaagnnntattttgtttattgaataatggttcatttgtagggctattcttattaggtgttttactacatgttca

SEQ ID NO: 90690 - DNA, 411 bp, Glycine max
  Clone ID: PAT_MRT3847_52905C.1
gagaaaaaaggggttgagatttgagagaaagagaaagaggaggttaacacacacacacacacacacaaagcagaacaagagaagtatccccccataacaaaaccgtactacacaataaagcacaccaaccattcatttccttttgcccacatttactatcccacattatgtttcctcagacaatcgcagtgccacagaaccaactagccactccttcctgtacttagctacctcacttctaccttcttatttcttccacaacccttttttcctcccttcaacatatgcacccactttgtcttcatctctttaaacagcttctcctcattgtttaatttgtcactgatactgatggcaccactgatgggagggtgcttttggctttggtggcagctgaagcagcagtgccaa

SEQ ID NO: 90691 - DNA, 923 bp, Glycine max
  Clone ID: PAT_MRT3847_52906C.1
gacggctgcgagaagacgacagaagggggatgaaccaaatgagaggtatttctggttctggttcgagtagcagagaagcaaggagaagaaaggcgaggtcgacgtcaccagtgaaggaccgatccaaaacctcttcatctaagttaacctcttcttcttcttcatccaaacgaagcacctcaccctctgccactctcctcgacgtcgatgatgacgtcacctcactctttcacgattaccctagccctaaccctaaccctaatcctaaccctcggagcttccctcacagcgttaagcagaaatgctgggaaaaggccgacaaagtcaaaggacgcgaccccgatcgctggcgcagggacgccctcggcaacactctctttcgcaagctcgtaggttgccccggttgtctctgccatgactacgaccacattattccttactctaaggggggagaaagcacgctggaaaactgtcaagtattacaggcaacagttaatcgttcaaagggtaatcgaacagagatctccaaagctgaacttatccagaagagttcttattgcagggtttcagatcgtgatatggatcttctggaactgtcgggctatggcaatgtacggcgtggaccagattctggggggtgtagaatccaatgaacaatgaaacatttatctccatatcaatctattgtgtggttgattcctagatgggggctaaatgatgtccttgtagctattcatccttacaaatttgtgtacagacaagctaaaactgcaaaaaaaaagtgatgacattgtcattcttgaagttgatgtattcaagtgtagctacattactctctccttcccttaaactcccccgtttttctcttgagcagaatctgaatgatttggaaggtaagttctggcgctcacttgttcgcgtcc

SEQ ID NO: 90692 - DNA, 424 bp, Glycine max
  Clone ID: PAT_MRT3847_52907C.1
cccaaaaaaactcccattttgggggttttttttgtttaagaaaaaaatttttaattggtggtaagaaaaaggggccccaaaaaaccaagggttccttggggacaaaatttggggggtttaggtttaaggggtttgactttgttaaacctgggcccaaattccgggttttcctccgcggggttgggaagtaatattttttttttgggggcccctaaattaaattcacggggcgggtttttaaaaactttggacggggaaaacccgggggttccccaaattaaatgctttggaaaaaatccccttttcgccaggtggggaaaaaaaaaaaaggcccccacccgtcgtcttttccaaaaattccccaaccttaatgggaaatgggcccccccctttatggggacattaaacgcgggggggggggggg

SEQ ID NO: 90693 - DNA, 271 bp, Glycine max
  Clone ID: PAT_MRT3847_52908C.1
gcgttgatcgccgactacgcgctgagcgagtactacacgcagttctggggccaagctcacccttgtcaaggtcgacaagggcgacactcatgacagcatacagcacctactaccgtttcgtcctcaaagcccaggatggatccgccaaggccagatacgaaaccaacctacgcatagaagccttggctccattacatgaatgtaacttgcttcataccgttccattaatgttaaacccatacttttgatcactctctctcttatgatatcc

SEQ ID NO: 90694 - DNA, 532 bp, Glycine max
  Clone ID: PAT_MRT3847_52909C.1
aactttataatcatattttagctatattatcttgtgggaaatcaatctatctatctatatctatctatacaattacaaagtgcgattacagcatcacagaactgactactactactataaatttctatgctgccgctgtgttcaatatatacaaaactatatatttaacataacatgcaagtactcccatatgaaccgcgtctttctatcttccaaaaagctactcagaaattataatttggcaatgcacaaagttgagaaagaaatgaagaagctttgcacttggcataggtggctgtggataagattcaaactcttccagatgcagaacctttagaagattgtgaaaaattaacatcaacttgtcaaagcaagactcgaattttcacattgaagtcgtccaccacatcccatatgctatgagctgcctcccaagtagctattgctactgccagaactgcttaaaacggaaggcatatcacgaacaaaaaacctggcgctacgggtgccaatatcatccaatatttcttta

SEQ ID NO: 90695 - DNA, 471 bp, Glycine max
  unsure (1)..(471): unsure at all n locations
  Clone ID: PAT_MRT3847_5290C.1
acgaagttagagtatacaagtgatgtacaacggttacctcctgatcttgcttttgtncttgaattgcgtccatacctacattcataagatggtatcaaagcatatccaaaattaatccaaagggtcacctaccatagttatccactcacctcaccccttgcttctttgggatgggaattggatctttgaaactaaagatcacatttcaatattaaaattgagatagacaatgggaagagatggtaaaacaattctagatcaaatcttgcaactggtacaatagatgcagtgaacagctcaacctggaaagaaaagaaagcaaaaacaggccctgagatggggatagagggaaaaaattgaaaacgaagcataattcatattgtaaaaagacaatatcactaatggaatgaatgtttagaggtttattccgttatcaagcatactgcatccaaatgaatggtcagtcacaaa

SEQ ID NO: 90696 - DNA, 467 bp, Glycine max
  Clone ID: PAT_MRT3847_52910C.1
ggggaaggaaggaaccaggtccttgaatgtggccacccgtgtattaatggacttctgagccacccttttgtgtgaaacgagcaactgcaaaggatttatcctcaactggtccctgaagaattgggccaccaaatcctgaacaccttgtgcccttcgggactagaaaaaaaagctgatacgaaccatgatgggtaagcgaaaacttacacaagttgccgaaacaacttcaaatgtattactactatatggctgaccagccactccaagtgtgggcccacatgctaggcttgtgtggcttatttgtagagaagtcatcacagtaaacaccattacatgaattcatctggactggagactcatgtcgatcatctccaaccgtgaatagaactataatggggacaagcctgagattgattggactcaccgcatgatctggggcatcgttttccttgcgcatcacccatgga

SEQ ID NO: 90697 - DNA, 384 bp, Glycine max
  Clone ID: PAT_MRT3847_52911C.1
ctcgagccgagagacgaagccttcgaatctctctgaaacttttctcttctctttgattcttctctatcagtgaatctcacggcaagcaatccagcaggtgtatgatgccaagcttaacaagtgaacccaaaaatgttgaaatctttggtgtctatgaaatcatagtgagctggtttagtggtgttgatcaagcccctcacttgctcaccaagacatcggatttgttgtgtgctaccttaaacttttggtggccaattctacatctggaagctagaagagttaaacattagaatgagccgttcacaggatccacacccttcccgatctttcttcccttttggaaatccttttcggatgatatcacctaaaagctctcgcatgtct

SEQ ID NO: 90698 - DNA, 351 bp, Glycine max
  unsure (1)..(351): unsure at all n locations
  Clone ID: PAT_MRT3847_52912C.1
agtcgcatgcacgcgtacgtaagctcggaattcggctcgaggngacaattcggtaattgcgagannatacntcantnncagtagtatttncacnttntgnntncnncacngttctcgaangcnngactgtcgatgnncgancanatnnctagacaaacancnntntcatggcaacngncangantnacagccgnnccanaggtngcaanttgnttnngntggacanacacancancaagcntntgnaacaagcgaantcagaactntgtccccagcanncacnttngcagggccgnaatgactcangntagggccagtgaggctgacngaanggntnggncgctaggtggc

SEQ ID NO: 90699 - DNA, 387 bp, Glycine max
  unsure (1)..(387): unsure at all n locations
  Clone ID: PAT_MRT3847_52913C.1
gggcccggaccgccagacccgacccacgcgaccggnnaggngtaccttaactnncaccaacggcacccagcagacacgacgggggggattgcaaacagaaaacaggacccaccccacgaacgcagcctggacaaaacgcagcacgagggaaagcaaggggggggagcaacgaggaagggcgaaaaaagactgcaaaaaacgcgagaagccgggcgggaaacaaaggaaacaccctgaggagagaagagaatcggaggcaggaaggagtaaacgccgagaagaagagcgcagcagaagacagccccaaacagaacagaaaaggccgcgaacaaggtggccaagccggccagaaagtacgaaatgaaagcacccacaaagaaacgaaga

SEQ ID NO: 90700 - DNA, 270 bp, Glycine max
  Clone ID: PAT_MRT3847_52914C.1
gaaggttgcttaatagaagaaccatgggtgaagatctcttttgggctgttagaggtggtggtggaggtagctttggtgtggttcttgcctacaaaataaagctagttcgagttcgtgaaaaagtcactgttttccaagttgggagaaccttagagcaaaatgccacagacatagtttacaattggcaacatgttgcgcctagcattgacaatgatcttttcattaggctcatcttggaggtggtaaatggtacacaaactgcaacaaaga

SEQ ID NO: 90701 - DNA, 118 bp, Glycine max
  Clone ID: PAT_MRT3847_52915C.1
tgccagctttcttagatgctagtgaacgcggagtccatcacaacgtcatatagagattcggcgttgatcatacagtactcgctaatatcccatgctataggcaacatggatatggggt

SEQ ID NO: 90702 - DNA, 535 bp, Glycine max
  Clone ID: PAT_MRT3847_52916C.1
ctacaaatacaataaaatatcattaattattttttattaaccattaaaattatttagattttgctgtaaaatttattttttttattttattttgtatttatttcttctaaattaaaaatattaattattagtaattaatgatgaaagataatgtttgaaagagtgagatggacggtgtaagtggggtgagcgttgaagtgtttttgaactattcacgtgaatgggtcgcgtgggtggggtaaggcagcgtttgggagtcaacgatttcggtagtggtgcagttaaaatgaattaaataggtataccacgcatgatagcgacaaaacagcatagggttccttttctcttgtcaagaagcgagtttttagaaattgctgaaacaagacaagacagagaaattcaaacttgccaaactcaacccttctttcaatcccttgtcgttttttttttcctccctttagttatttgcctttgactgttgaccttttgtttaatttattgcatccatgtttaattcaacttacaattatgtaag

SEQ ID NO: 90703 - DNA, 271 bp, Glycine max
  Clone ID: PAT_MRT3847_52917C.1
attcggatcatgcagtggactttaccccaaagtatgtggaaggtttatgagatactgaaaggcccagaggggagaactttgaggttatgctgctaaccccaaaagatgatgacgggacaaacacggagactaacagaaaggaggacagaaacaacctggctttcaaggaaaatctgtgggaagcagctcggtacttcgagctttcaacctccccatttggttattattggaccaatgggcaaactcttcttcaatgttgctgaggcattga

SEQ ID NO: 90704 - DNA, 698 bp, Glycine max
  Clone ID: PAT_MRT3847_52918C.1
ccccccggcctcgtgccgaattcggcacgagggagagaaccaacttctccttttattatatttccctccaaacgagtgtgaccgaactgtgtggtggcgaaggttgtggcggtgatcggcgacgaagcacataaagtattgctgtatcatggaagaagtcaccttcgagtgtgatctgattcattccattttgaagcgcttttggacactgcaagcccttgagcgcgaaaatgttgaagctaacgaccctccggactccgaggtaggagttggaacatccaagaagaatcggtcaacttctgctaatgccaatgctctgaagcttacttctgaacttctccggatttttatcacagaggctgttcaacgtgctgctactattgcagaagcagagggtgctagtcaaatagaacctactcatttggagattattctccctcagttacttttagatttttaaagcatttgaaatacttaaatgtagcttctacttctccctatcatcaatgtagtagaaaggtcattaagatttgtttggtccgaagctataccagctcgaaaaagaaaagggctggggtgaaaactgtggagtacctttactcgtttctttctattgctcaagtgttttttaacttgtagtcttgtactgctccattaatgaagtctacatcaattaagatttccagattttctcatgc

SEQ ID NO: 90705 - DNA, 374 bp, Glycine max
  Clone ID: PAT_MRT3847_52919C.1
gcaaacaggcaatgggctttcccataatattattgaattatactttggagagaaattatacccactttactggggtacgtatgataaattacaataaaaatattgacgatgcctaaaaacatcgactcaggtgacgctttttccttgtgaagtagataatagtactactacaacgtgacatcccctaatatttatttcccaacaacactggttacctacctggacacttaactgaagctgactttggttatggcccaaaataacataatattgcttcccctgttaaatctgatttttgccttgccggataagctcctttgacattgccggatctttgccaatatgggatcatagacttccacaagttattgcca

SEQ ID NO: 90706 - DNA, 205 bp, Glycine max
  Clone ID: PAT_MRT3847_5291C.1
ggagaagtgatcctagaggcgttttttttttttttttttgggcttcaaaaccaccaccgaggtatttaaggatatgatgatcctgtatacacccattttttaattacaccctatacctcccctttgcttaatactattatgcctttttaaaaaaaacacctattgttcaaaaagtttgggaaatacttcctattcaaaaagtttc

SEQ ID NO: 90707 - DNA, 204 bp, Glycine max
  Clone ID: PAT_MRT3847_52920C.1
ggaaactgtttaaagtaaacaccttatcgcatatgctttaatacctgaaataaaggggaggctttctatccttgggagtttgtcaactttaactgaaaataaactaattcacacccttccagaaccaaataatgtctttactaaacacaccaaaatttttttccaaaggaatcctttaaaattttaccatccatattttctttc

SEQ ID NO: 90708 - DNA, 495 bp, Glycine max
  Clone ID: PAT_MRT3847_52921C.1
tgataatgagggtaagatatcaagcatcccacgggcggtgcgaaagaccaaaatgcgtaagcatggtgacatgacatatgagggggatgctgattgggaaattttaattgatgatcaagctctaaatgaaagtcaagttatgacagatggtgaccgcactcttagatcaagattgaagcatgattcctctttgaatactggtgaagactctgaaaatgttgcagtagtagcagtatcagctgggctgaaagcccgtaaagctggtccaattgagaaaataaagtttaaggaagtcttgaagcgtaaaggtggtctcaaggaatatttggattgcagaaatcagattttaagtctttggaacagagatgtcacacgtattttgcctcttgctgaatgtggagttagtgatactcattctgaggatggaagtcctcgttcttctcttattagggaggtctatgcatttctcgatcaatatggttatataaatgttgg

SEQ ID NO: 90709 - DNA, 169 bp, Glycine max
  Clone ID: PAT_MRT3847_52922C.1
tttttgtttgcttttttactggcaaaaccattcttgcattgcgccgagggaaaaataacattccactgaattataagccctctggagatactaacagaggctcctggacgtcacacatggagaaaaaggaatatgcacttgtgctttcccaactaaaacatgatctaca

SEQ ID NO: 90710 - DNA, 327 bp, Glycine max
  unsure (1)..(327): unsure at all n locations
  Clone ID: PAT_MRT3847_52923C.1
tcgcccagcgtccgacggctgccagaagtcacagaaggggcagctggggaatcgacagaggggtcggctgcgagaagacacataagggacggctgagagaagacgacagaaggggtgggctgatggatcgataggcttgtatagaggctgtgggattactatactggctaaagcgctcctccggtgaaggggtggacccnnactccatggggcatatactcatgggcgggcgcctgggggcctactgggagatacagtggtagagactcaaagggtgtttttacctcttcagcgggcggtctagaggatgcaagctgtacgccgcgg

SEQ ID NO: 90711 - DNA, 226 bp, Glycine max
  unsure (1)..(226): unsure at all n locations
  Clone ID: PAT_MRT3847_52924C.1
ttctcgctgtttgcggtccttcactcgccttttctcacttgtccccgtctnctccgatcttgtacgatcatcatctgccggcccttgagatggtcctgctttcggattcgatctcggttccacctacccccccgtcggattgtggcaccactaccgtgtcgacatcatcgcccatgaccagggttacagaaccacgccgtcttacgtcgctttcactgcttccgag

SEQ ID NO: 90712 - DNA, 255 bp, Glycine max
  Clone ID: PAT_MRT3847_52925C.1
actcatgtcattcactatttagggaacgcaattatcctgttccctttatggaaaagaaaaatggatcctaaagatctaggataataacacatggaatataaaacatccttagaagtgctctgtattattggagtgtaacctaaacttggggaaggttctataattgtttaacgcctacacccaaaccttatagtgcggctttcatacttttacaggggtaatacgaaccgcactgtaaacacatgctactcaaat

SEQ ID NO: 90713 - DNA, 1522 bp, Glycine max
  Clone ID: PAT_MRT3847_52926C.1
gcgcccacgcgtccgtacggctgcgagaagacgacggaagggggttcgcgagtataatagtagaatagaaaaaccaaagctttgtgggtttgtgtggacttttttttagtgcaaaaaacaaagtgccacccctctctttttttccccactttttctaccttctggggttattgattatccatcaaaatctcttctttttaagtgtgtgggggagtttcacttggcttctttctcatggagtgtaatgaatttgtgtatggtgaaattctttgattccacagtcaacagtacaagagtggatgtgtgttcttctatgctgagctgttttttaaggcttaattcatagtttagacctttggggtttttcttctaaaatcactttgttggagtttgtctgcaagttgcttcaaaatggcacaaaaaatggaaatagtgagcacttctggtcatcattgattgtgacagcacggctctaaacacatactctctcatagtcttgtgttggaggagccaagcaatgactgttttcatgctcctatgtgcaacagggccaccgatcaaaagaagagcgggtttgagaattaaacaagcagggagaggttcatacagaggaagctaggcgtgtgtttgaagttgctattgggtttttcttttgtgtttcttctttgttttgcgtagtcctggaaagtagaacagaaagatggatgccacttctataatgcatttgttgaagggcttttgtgatcacacacaatggaaatatgctggtttttggaagcttgaccaacattttcctatgacgttgacctgggaaaatggttaccagaaaagagatgaggttaaggaaagtatgtggggtgacctcagtttcaaatccccagatgagttatattcttcaagcggtgaaaattctgattattcggctcgattactcttgattgaaatgtctcatcgcaaatacagtttgggagaaggggttgttggcaaaatagctctcgccagggatcattgttgggtttcatatgaggatattctcaccagtaaatttgacacagatttaatcactgagtgtcctgatgagtggctgcttcaatttgcatgtggcatcaagactattgtgcttgtaccagtgcttccacaaggggttttgcaattcggttcatttgaagcggttgctgaagacaaggaatttgttaccaatatcaaggagaaattctattccactcattatctggaagcagatattacccctttaaatttgggaactgattgtcaagatgtgtcattctcagacctaatgcataatttgatgggcagtttggatgaatcatcatcttctgttacaaaaagtatattgaaaagtgaagtttcaactagtcctgctgccctcaattcaaatggttcaaggttgaacccgactatgctatcatttattcaggatgactgtttcttttctagagaaaatttactagaatctctgaaaagagaaaatgaaaatgagataggttcctcatcaactgag

SEQ ID NO: 90714 - DNA, 159 bp, Glycine max
  Clone ID: PAT_MRT3847_52927C.1
ggaatattcctagcaaactgccaagcccacccatattgtctcattactctcaagcatgcaatggccaacgccacagcagctgccacctcgtactgcatggggacgtgtctcctgggggcccactccggggcggggcggctgcatgcccggttcgggtct

SEQ ID NO: 90715 - DNA, 396 bp, Glycine max
  Clone ID: PAT_MRT3847_52928C.1
ggcacaagtgagtttgatgatcgagatatctacagacagtgtgatgaaaatgaaggtcgttgtattcttcgttgctacacttttggtagcatggcaatgccacgcgtacgatatgttacctctccgaacgaacaatgactatggtgcccatactctggaagtgaaatgcacacgttggaggcatgctgtggaagcacacagtatctatggctttgagaccattcatgaatagtgcgttgacgcaccaagggaatacatcgatggcgatcagtatacatcagactctaaatcagtgaaacaacaagcttacttttatgacaaagacctcgacatctatcacaacgacacatttgtgttcagtatataccggaacgtaccctctataatccaatacta

SEQ ID NO: 90716 - DNA, 294 bp, Glycine max
  Clone ID: PAT_MRT3847_52929C.1
ctacactactgagatggtagtgatactaggatctcactactacaggggtcgccgcgaaatatgatggttgtgtcacgcctatctagacatagagcgtgatatgatgcacttgatcacatgatcgattaaggggatgtacgtttctcttgcaaattttgacgagataaaagaactgatccgtctaactactagagctatagaattgatccctgatgtgaacataggtggagccctccatcgacatcagggtctattacagatgacgtgactaatgattttaagctttcttatata

SEQ ID NO: 90717 - DNA, 950 bp, Glycine max
  Clone ID: PAT_MRT3847_5292C.1
ggcaaggaaactgaactcagcctctaacaaaagttaatttaaatatattacatattttatatattttttacatatacaaaataactagtcatactttacgtgacgcaaatatgttatctgagcaattactacctcctcattatattaaggaatacagtgttaataacctctttcagattcctgcaaccaacaacttccatcttttctaaaccttcggttcccaaagctttttcagccaccttgggtactatacacattctgtaacccaatttcgcaacggtatatacccttttctccattctaggaaccatgcgaagctcaccaccaaggccaatttcaccaatgaatgcaatgtcatttggaatagggatttccaagcaactgctgcaaattgctgctgctatagctagatctcctgcagtctcagtcagtgccaatccactaacaacattcaaaaatacagcatgttcttggagacgaagacctgcttgctttataagaacagatatgatcatatcagctcttttttgttggatcccattaacttgccttgaacctgttgaaccagaaagacaaagtgcctgaatttcaataaggaatgtccgggacccatccatgattacagcaacagctagtccagctaatatttctgaatccaggagctgttcactgagaaacatttcactggcatttgaaacagcctgaagtcctgaatgtgacatctcaaaaaccccaagctcatcagcagatccaaatcggtttttcacagctcgaagcatacgatgagaagagtacttctcaccttccatatacaaaacaacatcaacaatatgctccaagacacgaggtcctgcaatgtctccagattttgtcacatgtccaatcaaaagaactgggatgtttgtcttcttcgcaaatcgcagtaaagctgaagtacatcggacgcgtgg

SEQ ID NO: 90718 - DNA, 410 bp, Glycine max
  Clone ID: PAT_MRT3847_52930C.1
ccggctcgagcacgctctctccctctttttcactcacgcacacgatgctagcgctctcggtgggctaagcacactagctctctccgtcgctctctctccctcttagccagtctcaagcaccacatgtagcgctctctcacaaggtatacaaatggccctgtatttttagcaccttatcgagagactagatatcatcttaatgagtggatcggaaacacccctcaaaactacaaggagttatttaatctgtcatttaagtgcaaggaatgttattgaaaggtcatttggggtattgaagaaaagatggagttatattaagaactccttattctttttatataagaacacaaatcagaattattaatgtttgtttcatgctacataatttcataagagatgaacaacaaagt

SEQ ID NO: 90719 - DNA, 232 bp, Glycine max
  Clone ID: PAT_MRT3847_52931C.1
gagactacagagcggccgcctacatagtcgagctcttctatcctttacttaatttcgaccggccctacatgcatggcaacttttcctatagtgacgggtgtctcaaccacacaacattatcgaaatccctgctctctgtgaaataatgacatgcaatcactaattctcttaccttacgagacgacctcatcaattgttcaaactctgcatcctgattggattacactctaca

SEQ ID NO: 90720 - DNA, 722 bp, Glycine max
  unsure (1)..(722): unsure at all n locations
  Clone ID: PAT_MRT3847_52932C.1
gccaataaagaatcttaaaataatttcattgatctcaaaatttacatgacgtctgcctcaaaacgccaatcttaattacaaaacctgactcggtagatggaaaaattgtattgcctttagcccactagtaggcagaaagaacaggttaacggttgcggagacaaaagggcaaccaggaacaatcaaaagacaaaaaaatgtatttcggaagacgaaacatctgtaccattgtttctccgtgcctcatctgaaaattgtaatatttactctgttctgaactctccaaatttatgcttttcttcatgcagctgcttgaacacattatcaagttcgggaaatgccgatgtcagcagcagctccaagatgtcaaaaaccagctgcttcaagataacggatgactgaaggaaaaaatatagatcccttgcacattgctcatactccttccgaccaacaagacctacaattgctggcggtgcatgatcgatcattagctcgtatacaaattttgcacgccgatctgcctcctgttgctgctcatcatccaaccttggagaagacacttgtgtaggttgattgccatgnnnagaattctgagatggactagtaggtggcggtggtcgtcgatttggatgcttggttatgaatattccatcnnnnnatagtatttgctcaactcgctgnanncctgaagcanccactgatnnnnnacggnnnnnctgaaa

SEQ ID NO: 90721 - DNA, 1433 bp, Glycine max
  Clone ID: PAT_MRT3847_52933C.1
aattcggctcgagataaaattatagtattttgagtactgtgtatgtgaagaaatcagattttggtgtggcggcgtgcatagcgacttccctggcagagaaattcaagagcccaagcaagcattaagcacgttgtcgcttcggtctcgtcggactctgtctttgttcattggagccgggaactgagcaatcaatgactggaaaggatttggaaattgaaggatacacagttggggggctgtccattggaggccatgaaacatgcgtcattttccccacacttaaagtagcctttgatattggtcgctgcccacctcgcgctgtttcccagaactttcttttaatcacccatgctcacatggatcacattggaggacttcctatgtatgttgccacacgtggtttgtatcgtatgaagccccctacgattattgtgccaatttcagtaaaggaggatgtagagaagctttttgagattcacaggaaaatggatcaatcagaacttaagcacaacctgattggcttggatgtaggagaagagttttatttgagaaaggatcttaaagtaaaagctttccggacttaccatgttatacctagccagggttatatactatattctgaaaaacagaaacttaaaccagagtatgttggcctttctggaaatgaaataaagaatttgaagtcatctggcgtggagataacgtacactttgacagaaccagaaattgctttcacgggagataccatgtcagatttcatagttgatgaaaataacacagatgtcttacgggctagaattcttgtattggagtgcacctttgttaacaattcaatcactgtggaacatgccagagattatggacacactcatctgtccgagataataagttatgctgagagtttacagaacagagcaatccttttgattcacttttcggctcgttacacagtagaggaaattcaacacgctgtaagtgcattgcctcccagtttatctggtcgaacttttgcgcttaccgaaggtttctgagtccctgacaagttgggagtttggttgatacataaaaatgactatggagctgtttttgcctcctccaaacccacctgagactattggacgcagttagaatgtactgtcatcattgatgacaaatgtgggagaagtggagtgcaaagcctaatccactgatgcatagtgtgtttggattaccatatgaatcaccaaaaacgtttatttgcacatttcaagagagaaaacggagaagcaacaccagtgtttcgttgaatataatgtatgtttgcgttggaacgaaccattttccaaacatacactatcactctatcagctaccttctttattaagttgtttctagtaatatttatttggtatcttttgatatatatatatatataatcagctaccttctttatt

SEQ ID NO: 90722 - DNA, 244 bp, Glycine max
  Clone ID: PAT_MRT3847_52934C.1
aaaagggagctcaatgcgtatttaaactattcgtcatattcttatagagggagcatccattccttgtttctgaataaattaactctcttgtcaaatactataatattaaagctcacctatcaagttcaaatttgatattcttttacatacgaacttttatcaaatttttctattgctcaacaccttctaatcacaattatggactacactgctacctcgaaatcttaaatagagccttgttctt

SEQ ID NO: 90723 - DNA, 498 bp, Glycine max
  Clone ID: PAT_MRT3847_52935C.1
aaattgttgttgttttattgttctttttctatttttatattgtatcttttttcctgggaaagaaatcaggaggaaaactcttttttcttacttgaaaaaattaaaaaccccaccacaatgcggcacaataacacccagggttccaacaaaaaccgaaccccaagataaatttcccacctgaccgctttttttggggtgagggaataacaaactggattggaacaatggacaaaaccggtgtgcccctaaatttttaacgaatccgctgtttttccccctttcttaaccccgtttcctttggccacttcaatttttcaagaaccccatctctcctgaataggaagctttttactgaggggctttcattggaaaaaggaccccctcccatgctccgatgggtcatgcttttattttttcgccctggcatttgcttttgtttaattggaaaacccattggaggcttactggcttatacccccctcttttaggcccaaatct

SEQ ID NO: 90724 - DNA, 328 bp, Glycine max
  Clone ID: PAT_MRT3847_52936C.1
gagtttttggtaccaactctttctctctctctctctctctctctccccctcttctccagcgtagtttcagcagaatttcagggccaaattaaaaacgcacctaaatctcaagagatgctataaagaggaggataagagcacagaactttgctacaaggagagtgagaagaaaggctttgatcagctttgggattgtaaaagtggtagtggtcggaaaaaaaaatctccctacacccatcatccaagtcgatcaaaatctgattgaaaaatgagagcgtggcttttggaacacaaggattgcggcagtgtgtaacaatcaaaacacaaa

SEQ ID NO: 90725 - DNA, 323 bp, Glycine max
  Clone ID: PAT_MRT3847_52937C.1
aaggaaaaatattctcaataatattatgaagagggttccatatagataggaacactcaaaaattgtttaacaaaattaagcaaaaagaagttatgaagaagactcaaactcgagctacatctgggcaagcatttgtgaagcaaggggactgatggaagaagactgcttatggaaagggggcaatgggcgttgtattcttgctttcaagcataaacgaatcccaaatatctctggaaacatcattcaaccctgtgatagggagatgggtcaagaagacatccttggtcataaactgggcgggacgagggaaacacctgggacaa

SEQ ID NO: 90726 - DNA, 162 bp, Glycine max
  Clone ID: PAT_MRT3847_52938C.1
gcccaaacaaaagcaaggggggacggctttggcctatttattgctcgcccctacaaaacgcccttaatttaataagactccctactgcccttatgtttcatctcagatacacacgaagggttttttagaaaaaaaaaattctcatccttggtttgccatatc

SEQ ID NO: 90727 - DNA, 464 bp, Glycine max
  Clone ID: PAT_MRT3847_52939C.1
aacgaatattatccattgataaaggtttggtttcattatctttgttttttagaaacgctgaaaaaacctttatcacgatcccccctcctctcatttaacacgaagggaactagtcccccccttgagcgggaattcggaagaaaaccccgggggggaaagccctccccaccggaagcaccccgagaaattcagatagccccatttctttttttgaatttacactttccccccgttggaaataagggggggggaacccctcgggggcgccgtttctaacagccgctccaagaaggggggcggccattgcacccttgtgggggggcccggccccagcaccccgggggggggggcaggggcccactaaagcttcatgcccaattggaccctggggtataaggggccctccgcgaaaaggcccccccccccaaattgagagggcccacaaagaaacacgagggggccgg

SEQ ID NO: 90728 - DNA, 146 bp, Glycine max
  unsure (1)..(146): unsure at all n locations
  Clone ID: PAT_MRT3847_5293C.1
ttcaaacttaaatttataacacttnncttagttcacatatggggaaagcccttcacttctctctcatatcttcccctttggcttgctacctnncttgtcgagttgccatgccctttgctattaaagctccagcaaaggctcaaacg

SEQ ID NO: 90729 - DNA, 127 bp, Glycine max
  Clone ID: PAT_MRT3847_52940C.1
gattccggttggggtgggcccaaaacctcattcaaaaggtttttttttgcttggaccagggcaccattggaggcggttgttgaggtggtggtggcccttcttttggggaccttgattcaggggaaaa

SEQ ID NO: 90730 - DNA, 309 bp, Glycine max
  Clone ID: PAT_MRT3847_52941C.1
cttcttcattccgatacagtcccttacattgaagtggttttgagagaaaatcaacaagatgacgagtatttcaaagaaagagttgagaggttggagagtgagagggaagagagaaatggggtaatgtttaaggcttcggagtctctcacctcaaccaaggaaagcttgtctagtgtcatagaggggttagagggagaaaaagatgcaacttttgtggaaaatggtaatggggagtggtcagatgtggaatcaaggatgttgttggaagatgcaaggttgatatcaaggcttgcaattgaggtggagaca

SEQ ID NO: 90731 - DNA, 230 bp, Glycine max
  Clone ID: PAT_MRT3847_52942C.1
cttcgtttcttttttttttttttttttttggggaaacaactcacactgtcgtttgccttttttatatgtggaaatacttaatagtacattgcaatttgtctagataaatgaggctggcctatcacccaaaaatttacaaatttggtgcacaatgttttgttcttacacactatatattgggcctcacaaaacgagatcttaagactataccttaagcttgtttctttaca

SEQ ID NO: 90732 - DNA, 571 bp, Glycine max
  unsure (1)..(571): unsure at all n locations
  Clone ID: PAT_MRT3847_52943C.1
aataaaatccacacatcaattgagtgtgaggggcactaataccacatgtgaatccaactgggacaaacagtgcacatacatgtgtgcttgtgtcaaaatagggaagtggtgagctcagtaacttccgagacaacttgagcataatctgagtttagtttctcttgggccccttgctctatttctccctttgcaggctttgtgtgtgccaaaacacaggaagtgggcgctctttgtggctcctgcgcctgcaagatcttctttagatggggcataaatataaggagatggagagtcttcacagagaataggagagatgagggaggacatcaatcggcgatatgttcccagcaatcacacacaatcctttatgacctctccttatgcttttaacaacctccttcactcctcttttcaggcatttgtgtgcggcagctctacaaacaaggtttagggtgcggttgcgaaggttctttccggcaagggggttancaatgggagcgagcgcaagcatcttcttcttctccttctctggctcgcgtggactccccatctctctctgcgatcttaattg

SEQ ID NO: 90733 - DNA, 443 bp, Glycine max
  Clone ID: PAT_MRT3847_52944C.1
gttattttttttttgttttaatttataaacaagccatggggggaacacaaaataatttaaaaaatttatttctcacagggataaaacctccttattttaccccaatctttaggaaaagcagccacaaattcaaatattatatattttttagtacagtctgaacaacaaaaataagggtttttaacacaaaaagttgtttaacatccaaaatgtatggccttacccaaccttaagaggaccatgttaacgactgtttctgaaataaatttgccaactgaaattcattatcattctcatttcctgctttttctgctctcaaaaacaaatcttcctccttagtgtataataacgccccccttaagagatgccttatgctttttaacagcagaagtatttttttttgtatgtacattagacatgccaaaataatttgaggtaaccaa

SEQ ID NO: 90734 - DNA, 415 bp, Glycine max
  Clone ID: PAT_MRT3847_52945C.1
aaaaaaaaaaaaaaaaaaaaaaatttaatttaaaaaaaaaaaaaaaaaaaaaaaaaaaagggaaaaaaaaaaaaaaaaaaaaaaaaaaaaaaaaaaaaaaaaaaaaaaaaaaaaaaaaaaaaaaaaaaagggggggccgttttaaaggaccaaaatttacgaacccgggcttgcaacataaaagtttttttattgggcaaccaaaattaaattaacgggccgtggtttaaaaacttctgaacgggaaaaacccgggggttaccaaattaaatggcctggaaaaaaatccccttttccccaagtgggttaaaagcaaaaaggcccagacaaatcgcccttccaaaaatttgccaaccttaaatggaaaatgggacccccccttaaacggcccattaaaagcgggggggttgggggt

SEQ ID NO: 90735 - DNA, 276 bp, Glycine max
  Clone ID: PAT_MRT3847_52946C.1
tcgcattcaccaaacttcttcactggggccattctctggttgatgagaactgaaggtcattcggaatgccactttttagggggaaaccctttttcttgggcgaaccttcctaggattttaaacccgattaacccggttacccaaatcgatttaccaaagaaatctttcaagaatttcaaggatattttaaaccattggaactataccccccgaagggtttgatgtgttaaagcacctggaaaaactggtttgcatattaaaaaggctttggggttt

SEQ ID NO: 90736 - DNA, 293 bp, Glycine max
  Clone ID: PAT_MRT3847_52947C.1
cttacgcgtgggggaatactctgatcccaggttgatctgcaccacaggctcctgccagaccttttgacaatgcccaatgctctgcatgatcggaaccatgtttgcaccatcgttggcaccaccgttcaagaaactatttgacattttgcctgacgcctctagaagagggtgctctggctgttagaaaagttccacacctctcatatttgagttaacgatacgcccagtgtgagatgctccacaaatatgaagatttccaatacggcggccgttttggaggattacaagctcac

SEQ ID NO: 90737 - DNA, 719 bp, Glycine max
  unsure (1)..(719): unsure at all n locations
  Clone ID: PAT_MRT3847_52948C.1
cttgaccgtgagcttgccgatgccaagaagcagctcgagaacgagcgccgctctcgccaggagtctgaccgcgccgccaagaaggctgaggctgacttgtctgactacaagtcccgtgtcgagggctctggttgcgatcgcgataaggttgagaaggacaagaagaaggccctcaaggagcttcgtcagctccaggagcgcctcgactccttggaggttgagaaggacgagcaggagcgtcttgcctggaagttccaggaggaggctgatgctctccatgaccagttggaccaggagcacaagttgcgcgttaacgccgagaagtccgtcaagactcttgagcttcagttggctgagttccgcgaccaggctgaggaggcttcccgctctcgctcctctgctgagcagaagctccgcgacanaccaggttgaggttgaggacttgaaggaccaggttgaggatctctctgaccgtttgtcctctgccgaggccttccgccgcactcatgcttctttggttgaggaggccaagaaggctctcgatcgtgagatctcgaaccgtgaggccgttgaggaggctaaacgttccatcgagcgcgagaacaacgagttgcgtgatcagctcgatgaggagcgcgttgctcggggtaacgccaaccgcaaccgcaagaaagctcagtctgagttggaaggattgaacgcccagatcaacttgctca

SEQ ID NO: 90738 - DNA, 134 bp, Glycine max
  Clone ID: PAT_MRT3847_52949C.1
tcgctcacgcgtctcgtctactcgtccgttgatagtagctatatcctacaagatgttggagctaggctacactgcgattttctgcgaaacgcattttatctctaacgctcgccttcaaaacctgactgagaaaa

SEQ ID NO: 90739 - DNA, 253 bp, Glycine max
  Clone ID: PAT_MRT3847_5294C.1
ggcgttttcaagctttctaacataagtggcaagaagcgggaacctataccagcttcagcagttgaagctgacactgatgtggatagtgacagcagcagcgatgaagaagatgaagagattaatgaggatacaaaacccatcctacatctaaaaaaggtggctcatgcggggtgtgtaaatcggatacgctcaatgactcagagaccacatataagtgctacgtggggacatactggtcatgttcaagtgtggg

SEQ ID NO: 90740 - DNA, 442 bp, Glycine max
  unsure (1)..(442): unsure at all n locations
  Clone ID: PAT_MRT3847_52950C.1
gttgcactcgctcgcagcaaagctctcaactttactttacgatttcgctacttccagttctagtagtcgcagattgacagtgcagccttcctcttgtttcttcttttgagcaagttaagttcactgtttcaagtattttgggatccacaaggtggggacgtaaaggattgggtttccgatggagactgacagacctgacggccggactcccaatcaactgagacccctggtctgctcctgctccatcctacatcgatcccatggctcggccagttgggctcaaggtgaaactaaagtgcttgctgcagtttatgggcccaaagctggaaccaagaagagcgaanaccccgaanaagcatccattgaagttatttggaaaccgaagactggnacaattgnnanagtggagaaagagtatgagatgatatttgaagagaacttt

SEQ ID NO: 90741 - DNA, 272 bp, Glycine max
  Clone ID: PAT_MRT3847_52951C.1
tcatgggtcagactagaactaaccaactcaagctaatctgcctacatcatgatgaggaaaacatgtggcttattgttcttgctcctccttgtcgtaactgctgaccagacggtgaagcaaaccgaggccaaagagtgcttgacacggaggcacgggttccatggtctatgcttattagaccagcaatgtgcacatgtctgcaggaacgaaggtttcatcggtggtcagtgccaaggccttcttcgccaatgcttttgcaccaggacatgttg

SEQ ID NO: 90742 - DNA, 361 bp, Glycine max
  Clone ID: PAT_MRT3847_52952C.1
taccgctgcgagaagacgacagaaggggcacttcaattgcaatcaaattagttcattcggtttgcggagttccctacctgtgctttcaagatgcatatcttcgtcaagaccctcaccggaaagaccatcacccttgagggggaaagctctgacaccatcgacaacggcagggccaagatccatgacaaggaaggaattcccccggttcagcaacgtctcatcttcgccggaaagcagctcgaggacgggcggaccctcggcgactacaacatccagaaggaggcaacccttcaccttgtccttcggctccgggggggcatgcacatctttcttaagactctcaacggggaaaccataaccc

SEQ ID NO: 90743 - DNA, 1186 bp, Glycine max
  unsure (1)..(1186): unsure at all n locations
  Clone ID: PAT_MRT3847_52953C.1
gaaccctctctcatggctgcttccaagcttttttctgcttctctcctggtctccatggtcaccctcttggtcctttcgtctgacaagtgcctcgcgttgcaatgccgggtttcctatgagacaatcaccgtcgtcaatgagtttcctcacgatccacaagccttcactcagggccttctttatactggaaatgacaccttatttgagtcaactggactttatggggagtcatctgtccgtaaagttgctctttgtactgggaaggttgacattattcacaagatggatgattcttattttggggaaggtttaactcttctcaatagcaagctcttccaagtaacctgggtgcggacaaatggttttatatatgacccaaaaacatttaagcccagcaggggcgattagtgaagataatattttgaatgggatagcatgggatggttggggtctggcaactgatggaaaagtcttgtttggaagtgatggcagttcaacattgtatcaaatgattcaaactgatcctcagacatttaaagctgtatcaaaacaagttgtctactataagggtcatgaagtacacaatctcaatgaattggaatacataaatggtgaagtttgggcaaatgttttaccgactgactgcattgtaagaatctctccgagtgatggcagtgttcttggatggattctcctccaagatttaaagaaagaacttgttgaagcaggggcgattagtgaagataatattttgaatgggatagcatgggatggtgagcaaaagcgtatcttcgtgaccggaaaactgtggccaaagctgtatgaaatcaaggtttcaccaataaaggaaccaattgaagaagggaccattgagcaactttgcttgcctgagccttatgtacctccatcgaaccttgtgctggctgacccagcccaaagggaatgaggtgaagctaaataggaaattatgggcacgagtatagactcaaaaagaaagtccaagacaccttactatagttgaaggactttatcttatattgngtttagaataaatgtcattagatcttttttcttgttttcctaaaattgtgatgttgatgcatggatggctctcgttcatttgcttgaagcccttcgggatatttaatcgttttgtcattaggaatcacaatgaaagttttgaatt

SEQ ID NO: 90744 - DNA, 213 bp, Glycine max
  Clone ID: PAT_MRT3847_52954C.1
agctgaaatagggcatatgggaacttttagtccaatgggtgtacattataaggcctaattattaccatacacgatattaatcaatgacaattacaatgcccatcatcaacgacttacacttaagatcccagcctaaaggatctttggttatctccactttcaaccccttcgcgctatttagattctacatctgattgcagctcatgggctatc

SEQ ID NO: 90745 - DNA, 392 bp, Glycine max
  Clone ID: PAT_MRT3847_52955C.1
agtcggcggccgcccttttttttttttttttttttttttttttttttttttttttttttttttttaaatttttggtccttgattttttttttttttctttctttccgcccaccgcgaaaacaaaccaaaattccccctcttggaaactgaaatccccaagagctgaaattacgagggcaaaatggggccacaaattattatttctggggataaaaactctttagaaaaaggtcttttccccctcccatttcttgcccacccctgagggccggccgcttttctcaaaaaaacagtttttaaaaaaatcttcctgttgagggcttttttaaggcggtttaaagaattttctttccacacacgcccccttgaggggcattccccagggagttttt

SEQ ID NO: 90746 - DNA, 655 bp, Glycine max
  Clone ID: PAT_MRT3847_52956C.1
ccacgcgtccggtaattttaatgaatattgaaataaatttaaaaaactgaacaagctggagcagtttactcaggtgattaattctttgctcatgtatatttctgatcttcagccaaaatattagtcaaggctctattcaattgaaaaagtttttttttcttttaacaggaactgagtgatatgactgccattaaagctgaagacatattaaccactctgcagagcctagaattgattcaatacaggaaaggtcagcatgttatatgcgcagatcccaaagtgttggatcgccatcttaaagctgctggcagggggggcctcgaagttgatgttagcaaattgatctggactccttataaagaacaaagttgataatcaaatattcatcaaagaaatactatcatgatgtaacttgttcttttgtgtataaagtatataggctaggtatcttagacaaatcctttgatgtattagtattaactaataagattcaatacattttagatgagaataggaacacaactgattgttttatgtgctgaaccgtagccttaggtatatgtttagattgtgtcttcgtttctaatgatgaatgccagagggaaacattttgtttatctgtggctatgtatgttaatcctgagattggcggttg

SEQ ID NO: 90747 - DNA, 501 bp, Glycine max
  Clone ID: PAT_MRT3847_52957C.1
cacagctcaaatatcagctcaagttatctagcacaaagaccataccctctctattcccacccagaaggtgagtactccacacagacgtatactgatatgtaacgcattagcaaaatgcatgcctacattaaaaacataacatgtgacactagggcgcggagttatacaacgaatccccatgccttcgaactgcacatacacgtaactacctgttgaacatcattctctggatagatacaggatgccacgatgatacccaccgtatcgaaagcatgcgccctatcaatactctaagctgggctacaatttcaccccccgaaatttctagtggcgaccaaaccacatgtaaccatcagatgtccctgaaaaccttctcatgatgccgctatagtcttttttatgccaatatgatgccgttccccgcctgtgatcccaccctcactctgggagggtgcctaatagacacctttcggcatgcttccccaaatgatcctaccccac

SEQ ID NO: 90748 - DNA, 596 bp, Glycine max
  Clone ID: PAT_MRT3847_52958C.1
cgaagctcggaattcggctcgagcacatcttaatccccaaactgaacccacccctcttcgtccggttcactagcgttcgattcgtttctatctctctctctctctgtcatgggttcgctcgaggcaccaaccgccgcgggagcccgacgcgtcgaagcggcgcagatcgtcggtgctcccgttggaggtgggtacgcgcgtcatgtgccgttggagggacaacaagtaccaccccgtcaaagtcatcgaacgccgcaaggttcccaacgccatccccaacgattacgagtattacgtccattacaccgagttcaataggaggcttgatgagtgggtgaagcttgaccagttggatcttaattcagtggaggctgttgttgatgagaaagtggaggacaagggtgcgacagggttgaagatgacactgttctccaaagaggaagattacttgacatcttgtagcagggacttgaggagcttgatgatgctctgcccattcccacaacctaaaaagaaattacaaagtgttaaatatctgtctgttgagcttggaaatgtgtttaaattgagattggcacgtctccctgagagaggca

SEQ ID NO: 90749 - DNA, 1735 bp, Glycine max
  Clone ID: PAT_MRT3847_52959C.1
agctcggaattcggctcgagcagtcccgaattcccaaactcgaccgacctaatcccaaaactgaacccaccctcttcgtccggttcacagttcactagcgttcgattcgtttctctccctctgtctctctaatgggttcactcgaggccccaaccgccgcggaaaacggttccgctcccgccgccggcaacggaaaatccccctccgtcaacggcgcggaggcggcgctggagcccgacgcatcgaagcggcggagatcgtcggtgctcccactggaggtgggcacgcgcgtcatgtgccggtggagggacaacaagtaccaccccgtcaaagtcatcgaacgccgcaaggttcccaacgtcatccccaacgattacgagtactacgtccattacactgagttcaataggaggcttgatgagtgggtgaagcttgaccagttggatcttaattcagtggaggctgttgttgatgagaaagtggaggagaagggtgcaacaggtttgaagatgactcgccaccaaaagaggaagattgatgagacacatgtagagggacatgaggagcttgatgctgccagtttgcgagaacatgaggaatttaccaaagtgaaaaatatagctactattgagcttggaagatatgagattgagacatggtacttctccccattcccaccagaatacaatgactgtttgaagctgtacttttgtgagttttgcctcaatttcatgaagcgcaaagaacagcttcagaggcatatgaggaaatgtgatcttaagcatccccctggtgatgagatatacagaagtggtacactgtcaatgtttgaggtcgatggcaaaaagaacaaggtttatgggcagaacctttgttatttggccaagttatttcttgatcacaagaccctctattatgatgtagacctgtttctgttctatgttttgtgtgaatgtgatgatcgaggatgtcacatggttggctatttctccaaggaaaaacattctgaggaatcttacaatttggcatgtatcctcaccctaccaccttaccaaaggaaaggctatggaaaatttctaattgcattctcatatgagctgtccaaaaaagagggcaaagttggcacacctgaaagacccctttcggaccttggactgctaagctacagaggatattggaccagggttctcttagacattctgaagaagcataagggaaacatttctatcaaggaactgagtgatatgactgccattaaagctgaagacatattaaccactctgcagagcctagaattgattcaatacaggaaaggtcagcatgttatatgcgcagatccgaaagtgttggatcgccatcttaaagctgctggcagagggggcctggaggttgatgttagcaaactgatctggactccttataaagaacaaagttgatggtcattggtcatatccatcaaggaaatactatgatgtgatgtaacttgtgcttttgtgtataaagtatatgtaggctaggtttcttggacaaaccctttgatgtattagtctttacaaataagatttaatacattttaagatgagaataggaacataactgattgttttatgtgctgaaccgtagccgtaggtatatgtttagtttgtatcttcgtttctaatgatgaatgcaagagggaaatattttttaaaaaatggacatgtttagtttgtatcttcgtttcttagacaaaaat

SEQ ID NO: 90750 - DNA, 522 bp, Glycine max
  Clone ID: PAT_MRT3847_5295C.1
ggctcgagcttccattggaaagatttttgctgaagtttctaacagcggactccctggaaacttggtcaaagtttctctaagtaatagaaaagtgacagatgcaagtgttcaatgggcttcactcccatcatctatttcaaagattggaagggaagtaatgaaacacagagatgcggcacagatagcagcaactgaggctatgcaagaggctgctgctgctgagagtttactgcaatgtctaagaacatattcagagctaactaattctgctaaggaacataacccacagccagcagtagagcagtttttaactcttcatgctagcctgaatagtacccggacaattgctgaatccttgtcaaaacccattccagatggttcatctccagattatgaaaggagcacagtggaagaagctctaaaagtaaaatcagatagacaaaaacaatcggcttcctgggtccaggcagccttggccaccaatttgtcatcatttgctgtttttacaagagaatctcaatc

SEQ ID NO: 90751 - DNA, 401 bp, Glycine max
  Clone ID: PAT_MRT3847_52960C.1
ctcggaatctcgctcgagtggtcgacgggcggatgtccgctcacactatcgctctctccataatcgcatctacaatgggcgtcttctgtgattgattctacctaatcaaaagactggacgcggattatattgaactcaatcagagacaaaacatagctgttgattctgtggctaaacatatcacgagggacaaacgcttaaaaaagcgacagatctttgattcacgtgaaagcaaattgacggggaggaaaacaggaacagagcatcctgcataattactcaatcgaggtgtcataaactcgatgtatatgtgtctccaatctctttgaactgcgaaacaacagatgcggacagacgcacgaacacttccatgccagtggcatcgtcttccccttctatta

SEQ ID NO: 90752 - DNA, 491 bp, Glycine max
  unsure (1)..(491): unsure at all n locations
  Clone ID: PAT_MRT3847_52961C.1
acctcacctagtgggataaggcatggttgttgtctgtgcataataagtactcttattagctattacaaattttaaaccatagggacttatttgtattttctcaagacatagagagctgcatagtaatataaacctaactgtttgcctaaaatattctgaagaagaaattctgagcagtttggaattatataatttcttttcacgtaacttcactcctattctatagttaactcttaacacccatttttaaatagatttcttgcaatcatataagcattagccataattgaatgctacatgggtgccacttcaatgttttgaagcttctccagcatgcaactaacccgtttccacaaatatggctgctttagtttttgcttgtcattcaattgtattcctcttgcctagttctattaccaatgttanaacaagtaatgcttatgttttctgaaaggaaacattgttctatggatgttaggttctttcatcaa

SEQ ID NO: 90753 - DNA, 329 bp, Glycine max
  Clone ID: PAT_MRT3847_52962C.1
gggagtcaataaccggggctcacacatataggaaagaataaaaacgccaagaaggaaaattttttcaacaatttccccttgaaggggggtttttaacccgctcaccacagaagggggtatattcaaccggcacaaataagtttttaataccaccggcgaaaaaaaacccattttaaattacaaatgcgaaatataaaacctttagttataagaaaacgttctatatggcctttcaggtaataagaaggtctatttggacgcatagtaaaaacggaggaggtttttcaacaaataataaatcccgtgaggcgttgggaaaaaataaaaca

SEQ ID NO: 90754 - DNA, 616 bp, Glycine max
  Clone ID: PAT_MRT3847_52963C.1
aattcggctcgagggctgaaatattggtgaatgttgtgccaataaccaaagaggatgacagaattcacaactaccaagtgccttctgatgactgttttgctcacttggaagttcagttcagattctttgctttgtcccaaaaagttgatggtgtacttggaaggacttataggttggattttgagaacccagcaaagcctggtgtggctatgcctgttgttggaggagaagacaagtacaggactaactcattgctctctcctgattgtgtttcttgtgtgttctcacaggaaagttctgctgagaaagagaccatggaatatggcacccttgattgcaccaagttttcaaatgggttgggaatcgtttgcaggaagtgaaaactgttttttattatccttaatttatgttgtgttgggtatgtttagaaacaataatccaatgcgtggttgaggtgaaaaatctgaaacctcgttttgggaataatgattctatatatgcacactagtttgcctttgtcgtatgctcagtcactcattgtaatgttaaactcttgtattgttgcagtacttattaactgccatgcatgaaaataaaaatgttgtgtttgtagttt

SEQ ID NO: 90755 - DNA, 1834 bp, Glycine max
  Clone ID: PAT_MRT3847_52964C.1
acttatatgtactgtacctctttattaatttgcgtttgcatgttctaaacaaatttgaactcgcgcggtggctgctcaaattcaacagacacatccatctcatcctcacctcagtatcataagaataataagctcttgtcactgttacaaaaggaacttcatttaccagcttcgctttcgaatttcaatttccaggaagaagaaaaagatggtgattgaggagggcgagatgaagtcccaaggtgaggtggaatcatggctccagcaagaagcgaagaagaaccaccattctccattattctcatcttcttcatatctgggaagacaaacatcatcgatatactctctcacactggacgagttccagcacagtctatgcgagagcggcaagaacttcggctccatgaacatggacgagttcctcagcagcatctggaacgctgaagagaacagccaagccatcaccaacaacaacgtccctctgtcgtcgaccctaacaatattaaggaaacagccaagcctccctcgccaaccctcactgtccctccctgctcctctttgtaggaaaaccgttgacgaggtttggtcccagattcaaaaagaacaaaacaagaacaacaacattagcaatgttcttaatgataataccgagtctgcccctcgccaacccacttttggtgagatgactttggaggattttttggttaaggccggtgtagttcgggaaacaacgtgtgcaccgccactaccggtgtctcactctcatcagccgcattacgcgaataataacaacaacgttgcaatggctccttcttttgttggtaggcatgttggtgcagtgagtaacgtggttgcaccgggttatcaacaagttgttggggaggcttctggtgggtatggtaagagggatcataatggtggtgggtatcattgttttggaggtggtggtggtgggtatggggtggggcccacaatgggaatgggtgggcctgtgagtccggctaattcgtctgatgggatagggaatgatggagggcagtttgggcttgacatggggggtttgagagggagaaagagggtggtggatggtcctgtggaaaaggtggtggagagaaggcagaggaggatgatcaagaatagagagtcagctgccagatctagagccagaaaacaggcatacacagtggaattagaagcagaactaaaccagttaagagaagagaactcccaactgaaacaggcgctggccgagctcgagaggggaagaaaacaacagtgttttgaggaagtgaacgttagtgttaaaaccaaagctcagaaagcaaaagagaaactgagagctttgagaaggaacatgagttgtcctttgtgaagaaactgcacggtaatggtagcagtgaaatacttggattttagtacgcacaacaagagtttgttgtgatgcatctactacttgtgtggctaaacgaagaaatagtcatgacacaaatcaagaggggagaagaaaactaaagaactactcaagtcaaagccggttgaagaaacagagaaacaaaaggtcggagttatgaaatttaattataaagccaagctgcaagagtcctcaagttcaagatcaacgaaggattagatcatccaatttggaaacttctttatcatatgataactagttactcaaatgtacaacatagttattgtattgttgatgacatttcatcttgtttacgcttaccagttaccacacccttgtttagttactgatttgatcgttggtcggcactattgccagatataagtaattaattaccagaatcaatctaattatttatgaaac

SEQ ID NO: 90756 - DNA, 425 bp, Glycine max
  unsure (1)..(425): unsure at all n locations
  Clone ID: PAT_MRT3847_52965C.1
cactgagcatcgtctagctatctcgatcgaactgtccaaggtcctgtcactcaccgggcacacccgatgcctagttaaaaaagcccggtgaaaatgaacgtggtcccttagacactatcaaccttctgcgtaagagggctgcgctggccgtgggctgcgggtggggagtggggcccactagcctaaacaacgccagtgcccaacccacagaattggctaggcaaacggaagaattgcagcatgcatgctatgcggggatttaagggcacggggcaagtgtagtataagcagcgacaaaggcgtcaattgcgtgcacttaaacgtgaaacacggtacgttgcgcagcgcaaagagatgcaggagatattggcttaacacgtaacattcagtaagcatagggtttanacacaagagcagtgagacac

SEQ ID NO: 90757 - DNA, 400 bp, Glycine max
  Clone ID: PAT_MRT3847_52966C.1
gaattcggcaccagggaaatcactgatatcaaaaagttcttgcagatcgccaagcccgatgagaagccccaaggcgctcaaggagccaagaaacccgctaccaagaaagtcttgatcatcaagcacggcaaaagaatcactaagttcaagcttagaggtcctaaatatctatacaccttcaagactactgataaagataaggcctcaaagctcactcaaagcttaccccaaggcttagaaagagttgaaatcaagtcaaagaaaatcatcagcaagaagagaaggcgttaaactataaagagccttttgggctctcggctttaggactttggattgttttaagtatgccaagtttataaaattatgtatcagtgcatgttatctccaaactaagaaggaa

SEQ ID NO: 90758 - DNA, 563 bp, Glycine max
  Clone ID: PAT_MRT3847_52967C.1
tcggcggttttgcgttccctcgtatactctactgctgatcacacttcgctcctcgcttaattcctcatttccccgttattacacgagaaatgatccaccaaaaaagtttagccgactgatccttcgaacttcgaaacctttaaaacttgacacctactaattcatttcatttaacttgtaattttttttttgtttcaaatttacccgagcaactctctctctccctctctcttggaagctactgtctaaccattttttttttttactccttttgcttttgtgcggcgccaccaaccctaaactttgacacctccaacgagcaaagaaaggggaaagagatatgagcggaaagaagggatggcggcggtggtgcgagcggcggtgatgaggcggtgcgagtggtggcgtgagcagcggcgaagcgagatagaggaaagggaaaataaagggggctacacggatgttttccggcgacctggactacgattgcgagggttcgtggcggcgctggcagcggtgctttggctaacggatccagagcggcggcgacagatgcaggcgga

SEQ ID NO: 90759 - DNA, 347 bp, Glycine max
  Clone ID: PAT_MRT3847_52968C.1
tgcacctcataccatgatcgtcttttctttttcaattgcctctttccttctacctaccctgcatgttcaccgaaagttcactaccattcaagtggcctaatgctaaatccaaatttatataattgtggaaaagtctgccttagtctctttagcacttatcatcttagtaatagttaaaattgtataccacaaaaatcaaccatgctacaaatgttggtttcgatacaagctctaattctaaatgaaaagcctttttttaatgagcctgagtatacttcaacatattctggatcttattgtctaactatatcctatgaattcaaccagagttcatttattttattctt

SEQ ID NO: 90760 - DNA, 444 bp, Glycine max
  Clone ID: PAT_MRT3847_52969C.1
aaaacccgggccggcccacgcgtccgcgcgtgtccattttttttttttcattatcattttctcatgttctatctttctttctcaggtggtaaatatataaacaaggtgggctaaaacaagtctcatctaatggctttttcttctcaaaacacatttgatgatacttttgatcaagcatttgatgatacttttgatcaagctttcgaggattttgctcttcaatattgtcatcaagaagaagaagaaaagaaaaaaaaagaagagtttatatcgaaagaaatcgtgaagaagacaatctacaattatggaatgattatttgagtgaaactctaacatatcctcataatctattccgacgactatttataatgaacaagccattgttcatgcatattgttgatcgcctttccaatgaagttgaattgtttctatacaagaaagatt

SEQ ID NO: 90761 - DNA, 270 bp, Glycine max
  Clone ID: PAT_MRT3847_5296C.1
ggctaaagtttcctctacaatagcataatgtgttagtggagtcactttcaaatatgacataattggagagggttcacattcttcagaagattctcctgaaaaggagaatcagtgcaaatccaaaaagattgatgccagattgggacagagcatagaatcctcaatacaatgaggttcaagctcagatggaaacaaatctgggtagattgtctcttgacgatgctgaaactcctaacagctccatgttgacatcttaaaatttcgcaatct

SEQ ID NO: 90762 - DNA, 344 bp, Glycine max
  Clone ID: PAT_MRT3847_52970C.1
agttgttgtttgtaatataggctgtttaatgttttttattaaagatagcccgcgcttgcaacattcttacggagtttaagagacgggtggaaacttttgaatagagcagaccttaccaaaccagagggtcatgcctcatgtccttggtcgaattaaacaccccatccctcgaaagataccctccttccaaatgatgcaggggctaccgtgttttcagaatatgtggcactaacctgggaaacaaaacaagctggcataagagtttaccaacagttttaaaattttgagaaattcccaagatattatccaaaactgtataccgtgtgggattgtcaataaggaaa

SEQ ID NO: 90763 - DNA, 1492 bp, Glycine max
  Clone ID: PAT_MRT3847_52971C.1
aaacatgggcagtcagtccccgtggagcaggttggctttttggatcaagggttacttcagagtcacgcgtccgcggacgcgtgggggagagcagtgtttaagttgtgtttggcagctccgagggcaagctagggaatactataccgcaccatgacttgttgactcctttgaacctaacgcaacctgatccgtggcttctggttctcgccctgacccatcgttcgcacggagccgtggtggttctggctctgtccttttttcctttctctcgttaccggaaccagaagaaccatttgtggccaacatggaattttggaccagtggatctccaaggtcaaagatggccagcatcttctagaagacgagcttcaacttctctgcgaatatgtaaaagagatccttattgaggagtccaatgtgcagcctgtcaatagtccagtgactgtttgtggtgatattcatggtcaatttcatgatctaatgaaacttttccagactgggggtcatgtgcctgagacaaattatatttttatgggagactttgttgatcgaggttacaatagttcttgaagtttttaccatccttttacttctaaaagctagatacccagctaatattacccttttacgtggaaatcatgaaagtagacaattaacccaggtctatggattttatgatgaatgccagaggaagtatggcaatgccaatgcttggcggtattgtacagatgtgtttgactatttaacactttctgcaattattgatggaactgtgctttgtgttcatggtggcctttctcctgacattcgaacaattgatcagataagggtcattgagcggaactgtgaaattcctcatgagggtcctttctgtgatctaatgtggagtgatcctgaagatattgaaacatgggcagtcagtccccgtggagcaggttggctttttggatccagggtcacttcggagttcaatcacataaataaccttgatcttgtttgtcgagcgcaccaactcgttcaggaaggccttaagtatatgttccaagataaaggccttgtaactgtatggtctgcacctaattactgttaccgatgtggaaatgtagcttctattctgagtttcaatgaaaatatggaaagagaagttaaatttttcaccgaaacagaggagaacaatcagatgagagggcccaggacaggcgttccatatttcttataagttggtgcaaattttgttttgaatttattgtaaaattagacactcatgtatttatgctttgccttttaaaggtggattttattggtcacaagattaccaatcaaactatatcttagctctgggtcgcacagataattttatgtttaaatttttattgaaaaatattttttttcttaaaaaaaaaaaaaaaaaaaaaaagaggaggggccgcaagagagagagggcctttatgaattgggccttgaaaatcgggtattggggctttcccttttt

SEQ ID NO: 90764 - DNA, 841 bp, Glycine max
  unsure (1)..(841): unsure at all n locations
  Clone ID: PAT_MRT3847_52972C.1
acgtggaaatcatgaaagtagncaattaacccaggtctatggattttatgatgaatgccagaggaagtatggcaatgccaatgcttggcggtattgtacagatgtgtttgactacctaactctttctgcaattattgatggaactgtgctttgtgttcatggcggcctatctcctgacattcgaacaatagatcagataagggtcattgagcggaactgtgaaattcctcatgagggtccattttgtgatctgatgtggagtgatcctgaagatatcgaaacatgggcagtcagtcctcgtggagctggttggctttttggatcccgggtcacttctgagttcaataacataaacaatcttgatctggtttgtcgggcacaccaactcgttcaagaaggtcttaagtatatgttccaggataaaggccttgtaactgtatggtccgcacctaattactgttaccgttgtggaaatgtagcttctattcttagtttcaatgaaaatatggaaagagaagttaaatttttcactgaaacagaggagaacaaccagatgagaggccccaggacaggcgtcccatatttcttataaattgatgtttttcttgaatttattgtaaaattatatagtaaatggcttactattatgattggacgttgatagtcttgtatcgtggagattcaaatgcatagcttttctatagatggatgtggatcttaattttggcataagatttcacaatcttatttgtgtgccgtatgtagcattgggaataccattatattagcaccatatgtatctaattcttnnnnnnnnnnnnnnnnnnnnnnnnnnnnnnnn

SEQ ID NO: 90765 - DNA, 789 bp, Glycine max
  Clone ID: PAT_MRT3847_52973C.1
tctcttctaccaacctattcttattattatttcactctccctctcttcctcgttacaacaacaacttcattctctgcctcttctctccactctcttaaccaacaaacaaccttgtattattattaatatataattaatgcaatggcaatagactgcataacaagcatacccatgatgcctcaaccaccaacccaagaaacaaccaaagaacaagaacagcagcagccactggtgtttgatgcctcagtcccccgacaccaacttcacataccctcacaattcatctggcccgatgaggagaaagcatgcttggacgaacccgagttgttggtcccattcattgacttgggagggttcctctctggtgacccagttgccgcagcggaagcctcgaggcttgctggtgaggcatgccaaaagcatggcttttttctggttgtgaatcacgggattgatcaacggttgatatctgatgctcatctttacatggagcacttctttgggcttcccctgtctcagaaacagagggcacagaggaagccaggggagcactgtggttatgctagtagcttcactggcaggttctcctcaaagctcccttggaaagagacactttcctttcagtactcagctgacaaaaactcatcaccaactcttgtcaaagactacttgtgcagtaaaatgggcaatgagtttgagcaatttgggaaagtttaccaggattactgtgatgccatgagccgtctttctttaggtataatggagcttctaggaatgagccttggattg

SEQ ID NO: 90766 - DNA, 427 bp, Glycine max
  Clone ID: PAT_MRT3847_52974C.1
ggaatgatttttaaaactttgatctgtaccaaaatccctatactaataaagcaaaaggcaggttcatacatgtatttgttagtttgttgactcctttcaacctaacccatcatcgttcacacccgtggttctggctctgccctattttcggttcctctcgttatcgaaacagaaaccatttgtggtgaacatggatttggaccagtggatctcgaaggtcaaagatggccagcatcttctcgaagacgagcttcaacttctctgcgaatatgtaaaagagatccttattgaggagtccaatgtgcagcctgtcaatagtccagtgactgtttgtggtgatattcatggtcaattccatgatctaatgaaacttttccagactgggggtcatgtgcctgaaacaaattatatttttatgggagacttt

SEQ ID NO: 90767 - DNA, 836 bp, Glycine max
  Clone ID: PAT_MRT3847_52975C.1
tgcccaagtatcatactgatttatgttaattttgtaatttactgttttgctaggtctatggattttatgatgaatgccagaggaagtatggcaatgccaatgcttggcggtattgtacagatgtgtttgactacctaactctttctgcaattattgatggaactgtaaatatctttcactccctcctcttcaagtatctatcccccatgtgcctctgtgcatcttggtgctttgtgttcatggcggcctatctcctgacattcgaacaattgatcagataagggtcattgatcggaactgtgaaattcctcatgagggtcctttctgtgatctaatgtggagtgatcctgaagatattgaaacatgggcagtcagtccccgaggagcaggttggctttttggatcgagggtcacttcggagttcaatcacataaataaccttgatcttgtttgtcgagcacaccaactcgttcaggaaggccttaagtatatgttccaagataaaggccttgtaactgtatggtctgcacctaattactgttaccgatgtggaaatgtagcttctattctgagtttcaatgaaaatatggaaagagaagttaaatttttcaccgaaacagaggagaacaatcagatgagaggacccaggacaggcgttccatatttcttataagttggtgcaaatttttgtttgaatttattgtaaaattatagcaatacagtcatgtatttatgctttgccttttaaaggtggattttatggtcacaagattatcaatccaacgatatcttagcactgggtcgcacggataattttatatttaaattttattgaa

SEQ ID NO: 90768 - DNA, 1173 bp, Glycine max
  unsure (1)..(1173): unsure at all n locations
  Clone ID: PAT_MRT3847_52976C.1
cggccgctgaaaagcaatagcaatagcagtagcaacagagaaaaacagtagcaacagcccatataaaatataatggccgaaacctgcgactccaacaataaagtgatccgtgaataccaccatgatgcttcctttatgtcaaggtgtgacatctttactgatgttaccgagtaccaactgtgtctggcatatgccggagaatctggtaaaggaaagttcgaacctaagtgggacacagacaatgtcactccccaacttatcgagcagttcaagctaaattgtgatgcctcgggtctgccagtcaaagtatttgtcagcatcggaggagatgaccccttcaaagttgctgctggtggtgccgatgattgggttctcaatgccacaaccacactccaccacatgatcaacgagtaccacatcgatggaatcgatgttaactacaccacaatccagtgcaaccaaacattgtttgttaactgcattaagggtctcataaagggcctaagggaagctctatgcaccactgggtttgtggcttccttagctccagatgctaccaccaatgagactttctacttgcccttgtaccgatctattgataattcttggattggaactgttgtgtttcagtgcttcgttgatttcgaacctctagatcctaacagaccagttgaaagcttggtgcgccaggttgagaagatagtgggagagtatgattattatgactctaagatcttgcttggctacagcgccattaaggaggattggaataaagtttcaccacccctcttctttcttgctctcaatcgcctagtgcattcttggcctagggttaagggtgcatctgtcaaggttattagtgacacctatgccttcattcccccaacgtggatccctaaactcctgtctttggccgtctccgatgctggaaaatatccttaattgaagatccataattattaagttctatctatggaataagacccatgctatatctattaattctatgtgtgtgttccttctgcctatatctatatatgttgtgcgtgcatttgaaaaaacaatgcatggcatgcatatttgtgctctgttaatgcctacgtgcatctttgtctcatcaataaaatatattatatgtctttgtgcttcattnnctttcgattattgtatata

SEQ ID NO: 90769 - DNA, 1343 bp, Glycine max
  Clone ID: PAT_MRT3847_52977C.1
tcgagcaactggctccagacagtggcttctaatcctgaagcaatcctcttcaagtttgtacctatttcctcacttctcacaggaattcctggaagtggctatcttagtcatgcaatcaatttgtatttacgctataagccccctccggatgatttacaatgcttcttggagtttcaaattccaaggcaatgggcacccatgttttatgaccttcctctgaggcatcaaaggaaaaagtgttcttccccttccctgcaatttggtttcatgtttcccaagcttcatgtcagctgtgcacaggtagtaagtgaacaaaaacctgtggtaggcctacggttgtacttggaaggcagaaaaagtgatagacttgcaatacatgtacaccacctttcaagcctcccaaacacaatgatccactcttcatcaggcatatcattgtggcgaggatctgatgataatgaatccagtgacatctttctagaaccaataaggtggaagggatttgcaaatgtgtgcactgcagtggtcaaacatgaccctaactggttgcatgaaacaagtggtgtttatattgtaagtggtgcacaactcattagtaaaggaagttggccaaagaatgtgcttcacttgcgcctcctctatactcacatacccaattgcagtatcaggaagtcagaatgggatggtgcaccagaggcttcaagaaaatcatctttcctcacaaatctaagcacaacattttcattcacacaacaaagtcctcctcagaagcaggctccgacagtacttgactctggtgtgtatccagatggtccaccagtgccagttcgatctggcaaaatgcttaaatatgtggacacaagcgagtttgtgaggggcccgcatgatgctcctggtcattggttggtaactgctgctaagcttgttactgagggtggtaagattggattacaggtcaagtttgctttgttagactactagttattcattcattctaagttacttctctctcatgtatatgtagaaagaagagaaacattagtggactgcatttgttaatttttttgttttgaaattacagatcacatgtacataggcacatgctttctgatgaatttgtacagtcagtacagtatacagtaatgagtggtggtttaagttaacatcagccacaagaaaattaggatgtagctataatactgcattggtttggtgttgggtttttaatttacatttcaaaaaaaaaaaaaaaattcaattcaaccatcttgtgaacaaagttgaggagaaaaaaaaaaagagtaatggaatatattggtggaaaaaaaaaaaaaaaaaaaaaa

SEQ ID NO: 90770 - DNA, 317 bp, Glycine max
  Clone ID: PAT_MRT3847_52978C.1
caaagatgagtttgctgagattactttagactttttgctagcacaggagaagaaagagtcattgtggcaaataaatggggaatcgggactaagctcaagctagtgacactactagctcggctgactgtaacctcctgagatagcttagtatgtacattcaatacctgtggacgagtattgtcacaggaatgctccattaggttccttgactgggccaattttggtcgctaatggaatatagatgatacaacttttagtttattttagaaatttatgaatgggatccacttaaactgaaaaaaatatttaagtttaat

SEQ ID NO: 90771 - DNA, 481 bp, Glycine max
  Clone ID: PAT_MRT3847_52979C.1
ttggatccctgcctcttcattccgcttccagcgttctctatgataagtcactcataaacttgggaggtaacatagacttaagattacgactttccatcagcctagaccgtgtctttcggggcctaaaatagagtactagtattatctttattacaacgtgaccttcatgctccatcctcttgtgccatagtttttcagatacactagtttccttccgacaccactttcttccttaataactgcgaaaaaattttataccttccaatcacccacccaaaagttagggacttcaaattttatatgaagatgtgagattgattaattccctagtgaaggggtctggggtcatgtctttcggtgggttaagtattgctttaagtcttgtatttgggtgtcttctgctggctctgtgtgctcagctttactacttcttatggtggaagaagagaaggacacagatggatattgagatggatgcaaa

SEQ ID NO: 90772 - DNA, 348 bp, Glycine max
  Clone ID: PAT_MRT3847_5297C.1
ttgatataatctttgggacaaaaaatatatgcaattagaatttagtccaagggaaactacccagttggaagatatcattgggaataggattggcttacaacggcaattcctgcaaccagttgtactttaaaaatcaatttaggactaacacaggatgatgatgacgaaaatgatgatggacagggcagagtaaattccaatgggctgcctttaaacttggaaaatagtttatctagttttcgaccaaaaaacactggttgggttgcattttcgtttttaaaaaggatttccttctttccaactcgtttttggggaacatttagcaaagatccaaactccaggcgaaaa

SEQ ID NO: 90773 - DNA, 371 bp, Glycine max
  Clone ID: PAT_MRT3847_52980C.1
caggaacggacctagccatgttttattgagcacgtaccaccacggaacagaagaaagcggcatgggacgtctgttttatgtcgcaaagcaacaaacacaatttagttacatatttttctcaaaccacaaaaatccacaccgagggaaatttacaagccactaaagggtcatgaactgcccaacctgtgacggcatttggaagtaaaagtgacactacgcaggtttcacaggttccgtttctcgctgtagaggctccaggtccacaaacgtaaagggggcggttgggtccacaccgggtttggaacgcatgcactgccagcacatcttgaaaggtcctggaccagtcctgacagggttcccctcaatccaag

SEQ ID NO: 90774 - DNA, 215 bp, Glycine max
  Clone ID: PAT_MRT3847_52981C.1
cccacgcgtccgagaggggccagggtgcatttttccttttaccgaaactttgggaaaactttaaggaagcttggtggtcggtccgagagggagcgtttggaccccgggttgaagctggtcggttggtccggacttggttgcaggggggggtggtggggggttaatttccttttaagccttttttgtattatctttggattttttttgtctttatt

SEQ ID NO: 90775 - DNA, 155 bp, Glycine max
  unsure (1)..(155): unsure at all n locations
  Clone ID: PAT_MRT3847_52982C.1
aanncccacctttggcccccaagtttaaaaaaggcactggtntttaattacttgatttttaaaccaccgtttgaccctatcgggggggggtaaaagaaataaattattgtacctttcaataaagacattacaagggaggcgacgagcccgtttgt

SEQ ID NO: 90776 - DNA, 271 bp, Glycine max
  Clone ID: PAT_MRT3847_52983C.1
gtgtgttttttttttttttttttttttgtttatttctttttttttttctttttttttttgttagcaaaaaaaaaaactccttttgccaataaacttttcccaaaggggtaggaaaaacacaactggaacagataccaagtcccatagggttttctcccaaaaaaaaaaaagaaataaagggggggttgtttttcaaaaccactttacaattttattgccgattgttttcccttttaagaaatgaaaaatttttgacaaaattcccttctta

SEQ ID NO: 90777 - DNA, 231 bp, Glycine max
  Clone ID: PAT_MRT3847_52984C.1
ggaattcccgggtcgacccacgcgtccggcaaaatcagccgacttcgtcgggaatgtccttttgatgaatgtggtgctggagttttcatgggtagccactttgacaggcattactgtggcaagtgttgtctgacttactgcttcaacaaaccagaagacaagtagttgtgtatgagttaataaagagaaggaactgaaaaaaaaaaaaaaaagggcggccgctctagagga

SEQ ID NO: 90778 - DNA, 133 bp, Glycine max
  Clone ID: PAT_MRT3847_52985C.1
ctcgagccggcgagtagtcaccgagtcgtgccgtcaattaattgcggattggtacctgcacgcgaactacctgcgtctatactgactcgaaatatcgccttacgaaatcatggtgatatctgtgtcctatgtg

SEQ ID NO: 90779 - DNA, 499 bp, Glycine max
  Clone ID: PAT_MRT3847_52986C.1
cgggacgaacataaataactttcaatatgcccctttgttaagcttaaagattaccctaacgtggaagtttgtgctacatatactaggacaccgacaccaattgaagcgttacttttgggagttccagtcaatatggaaattctcacgtttaaatgattttaaattgtaaaacagggggtcctgaatcattatggggccgaaaacttgataaaatcctaatagcccgctccctataaagacgaagtggggacaaaatccaaagaaagtcactcataagcccttgaaaacattaggctaggctggcgggacttcaaatcatttaggattcattaactggggaaaaatatccaaataaactatggatgaactcctattacaatgtgtaagaactgccttacaagatccataacatgcttgagccgggaagaactactttacattctggattaagacagagcacaggcttacatagggaagggggatatctaatctgggatta

SEQ ID NO: 90780 - DNA, 173 bp, Glycine max
  Clone ID: PAT_MRT3847_52987C.1
tcccactcgtgcggtcacacgtccgtcgagatcacagggcgctgtacattgagacccgaatcaaatgcaatctgaccctgatgaagagattgttgctctatatgtgtaatcattggcgctcggtagctttgtgtacatagagctagctgtatgggcagatcacacaacttctt

SEQ ID NO: 90781 - DNA, 263 bp, Glycine max
  Clone ID: PAT_MRT3847_52988C.1
cggctcgaggccgtcactcattttctgggtgagtggggctgcctgccgtgtgcaggtcattacttggactatagcctgtctcctggcattgctggtgccctctcgatgcagagtcctgctgctagggccattctccagctaagcaccagaggagcaccatggacagcactggggacacatgcgtgggcaggacagtggccagaagtgggctcacagccaggcgtggtggctcatgcctgtaatcccagcactttgggagggtg

SEQ ID NO: 90782 - DNA, 486 bp, Glycine max
  Clone ID: PAT_MRT3847_52989C.1
gttgttgtggttttttttttttttttttttttttttttgccttaaattgtttttaatatgctttacattccaaaatcctaaaatttggcccaagtgcttaacaaggacagaatattcgtacaatacaacacttttttttttactaattagtgcttcactggaagtaggggggtttatggaaaaaacctcccccccagcaaacaataaccaatatcaccctttaggtttccttcattttttgttacttctgctgctcccctgatttcagtctctgttttcctaaataagggcagatcgtattattcaacaagtcactgtgtttagtgatattttttgtcgtttcacttgcttgacccttcaataagatctatcctccacttccccccttgaatagtttaaatgcccaaaaaattttttttaaggccgaaaaaatcttgggtgaaaatgttcgggtttccaaatcttccttttcccaacccctaattt

SEQ ID NO: 90783 - DNA, 331 bp, Glycine max
  Clone ID: PAT_MRT3847_5298C.1
ctaaatctaaactctcgcatctctctaggttttcatgcacggatccacactccggaactggttagcttttaattctctagccacccctaaagctacaaagcacttatgccacgatccaaaggataatcttgatgatcatgatgatggtagtaacactagtaacaacaataatagcgcactccaatacatttaagaggtcacaagcaactctgatgtaaattaagaaaaggttctagcccagatcctttctcgttgtgcacaccctcaattcctccaacgccctgttcctaaatgggctcactgacagaaacacttttcaagatgatcattc

SEQ ID NO: 90784 - DNA, 450 bp, Glycine max
  Clone ID: PAT_MRT3847_52990C.1
tggcccgcttgatctatttttccacggaccccaaaaaggaaaccccagggacagattttggacacaagtttgagggaacccccaacactttccccttggataacattaatccccccaacaggccccgggttttttaatatttccccaaaaaaaaaagttttttgttttaggacaccgggggtaaaaaattttttttttttttaaagaaaaaaaaaaagggtttaaaacaaaaattcctaaaaatggggggcctaaaaaaaaattttttcctgaaagaaagaaatgtttgagataaaatacattcgcgggaagcaactctggcaccaaataaaaattttacctaaaaaaaaaagaattgggagaaaaatttttaagaaaaaagtttttttcgggaacttccacttttttttggttgcttgtttttgggagggaacaaaaaaacaatttatt

SEQ ID NO: 90785 - DNA, 502 bp, Glycine max
  Clone ID: PAT_MRT3847_52991C.1
ggaaattttgctaaatgtcaaggataagtctagcaaacagtggctgaagtttaaggatttgactgaggctgctaatgctcatctttcctatttcttttatgttgagtatggagagattgaaatggttaaacttatatctcgtagattgttggaaattgggaagtatgacgggattctggagttcatatatttggtagctgtgttttaaaggggatgcttgattgtgttttaagtttatggcccttaattaaggttattttggtacaccattaagaaaagacatgaatatagtgaatttgatgtttagaagatataaataccgaaggtatgttgcgataatagaatagataaacgagggatactcattttaaggatatcattgcaaaaggatttctgaatactgccttgggtacgagagaatcaaacattagattgaggggagatttatacctatttctcaaatgtcctgttgaatgacaaaataagaaaaaattagatagct

SEQ ID NO: 90786 - DNA, 215 bp, Glycine max
  Clone ID: PAT_MRT3847_52992C.1
ggttaagcactctcttgttaaaaaaattatcttagattagcgtgatcgcgggcatagccctacccttatccggcgcaatcgtaaccctataccaccgtgacgatgccgacggtgcctaccgtagtgatcagccccgggttctgtgcgccataaccggtgaatctagaggtggtgaagcaggtgatgacgctctccgacgggaactttctggtcac

SEQ ID NO: 90787 - DNA, 349 bp, Glycine max
  Clone ID: PAT_MRT3847_52993C.1
gtggttattgttgtgtttagttttttttggaaccgcaaagtagggaggacattgaaaacgcaagccaactacggaggggaaaacccctaaaacatggtgggcttagaaaaagggggagcgggggtggtcaaaagcccagcccattaaaccagaatggtaaaaggggttttggccccgggtgtcaaaaacccaattatgggaacaaaatttgggaaatgatgggggggactttaaactttggccgaaaaacaagctccctaaaaacgaggacccaagggccagaaacccacctgttttggacccctaagaaaggacataccctggagaaccaaaccgaccgatggctttt

SEQ ID NO: 90788 - DNA, 394 bp, Glycine max
  Clone ID: PAT_MRT3847_52994C.1
ctggagggctggtgcgacgtggagcacggtggggacggctggagggtggaggagctgccgggagactgtggggtggaattcatccatgatgagagcgtcaagaagtacttcgcctcctccttcgagtggtgtcgcaaagcgcagataattgatctgcaggctgagggctactgggaggagctactggacaccactcagccggcgatcgtggtgaaggactggtactctggtcgcagagacgccggctgcctgtacgagctcaccgtgaagctgctgtcggagcacgaggacgtgctggccgagttcaacagcgggcaggtggcagtgccggcggacagcgacgacggtggctggactgagatctcccacaccttcaccgactatgggcccggcg

SEQ ID NO: 90789 - DNA, 302 bp, Glycine max
  Clone ID: PAT_MRT3847_52995C.1
aaaaaccattaccataccatatctcattaaccccggggttttcaattgtctgtcaatcctattgtgagccaccacaactaagttacttgcaacagttcataactcaactgtaatttaaaaccatgatgatttacttcattgcccttcttcttcttcagcaaaattcagaatctgacaaacatctttctcatcagtgttgaaataggacctcctcccccccaactcagcaactctttttgctgcaccggaatctctgggactctcattcaaacacttcaccattttaatctttggaagcatga

SEQ ID NO: 90790 - DNA, 214 bp, Glycine max
  Clone ID: PAT_MRT3847_52996C.1
tttataattacaaccaaccatatttagcttgttttcttatcgggccaaccaaataatatccctaaaatgattatccatctactacacttttgtttaacccaacaacaagaacacaaacaacaattctaaaaataaatcttacacataatatatttctttgcctaatctaatttcacccaaattataatgacccccttaacatttcacaaaccac

SEQ ID NO: 90791 - DNA, 321 bp, Glycine max
  Clone ID: PAT_MRT3847_52997C.1
gcacacaaaggcctaattctatcaccagtaaacactatctcaaagtgaagctctaagcattgtaagtatggagttcttcggctctttgagctgatataccctgcttatccatagctaacttaccagatcaatgaagcccgtacactgaacttctctccacactgactttaggctcggcacaacccagagagaatatctgacgagagacgttatgatggcgttgacattactgcgattacgaccataatcggcgttgctaagaagacgatcagatccgtgctttgcgactatgaaaagggatcttacgatatccattgatgt

SEQ ID NO: 90792 - DNA, 239 bp, Glycine max
  Clone ID: PAT_MRT3847_52998C.1
gcttgttcctagctataaactagtttatcgaaaaacaaatacaaaatagctggtgatcttattggatgcagacggtattttaacaattccaatccatatcaccttactaccagatcttccttaaactaatgacaacctcctatcattacacctatttgcaactctactccacaattagcaggcacactaaacactcacaaatcatccactcctaaactaccattactacaaactatatt

SEQ ID NO: 90793 - DNA, 546 bp, Glycine max
  Clone ID: PAT_MRT3847_52999C.1
aaccctttccatggtattgctgcgccatctgcatagctagctcagaaccaaaccatggtgggtcccattattcgttctctctggtcctccaccagaaaatccttctcttcttcttcttcttctttttctccctctcctcctttatcccactcgcgcttcttctcacgcgccttcgccgccgctcccgccactgcccctgccgcagcaaccaccgcctcctccctcgaccccagccgcctccgcaacctggccgtgatcgctcatgtcgaccacggcaagaccaccctcatggaccgcctgctccgccagtgcggcgccgacctcccccacgagcgcgccatggactccatctcgctcgagcgcgagcgcggcatcaccatctcttccaaggtcacgtctgtttcgtggaaggagaatgagctgaacatggttgatactcccgggcacgccgattttggtggtgaggttgagcgtgttgttggtatggttgagggagcgatttaggttgtggtgctggtgaagggcactggcccaacaaaattggtg

SEQ ID NO: 90794 - DNA, 987 bp, Glycine max
  Clone ID: PAT_MRT3847_5299C.1
ccacgcgtccgaaaaaaagtaacctcatttgatagaagtgttgggaattatgcctcacagaagactgcttcacccagggtgcctgaaactgactcttctgatggatctggtgcacatcctccggaaaatcaaagttttttctctcagggcattggtttacaattggctccccctactcaaaggcttcctgtggtatcttcttatggctcatcagagacagatcatactacaccgcatgtgtctgagacaagggataaggaccatacatggttgggtactaatcagacgtttccatctctagatccatcccatggggagcttaggagtaatatttctagcacagcaggacaaatttttgataaggcatcacaatacggtatgctgggaaacattccacaggcttttacatctggttttcctttctccaggatccatactcagaatcagaatttggcaagtcttggtggacaagtagcaaatactcaatctgctaatgtaactttcactgcttccatgaatcagactgatgaatactgtgaaaaagctccaactagtcaatctgaattggcttctgctcaggacatgtcccagctgagtgctatagacgaagatcgtctgagagatccggccatccaaattttgacagcagagactggcactcagccttctgttactttcagtgcatctctacatggcaccccttcaaaagttacgcacaatgtatggaccagtttttctagcaagcaacatcctaatgcttcaaggtttctatcccagccccaacaaattaatgattgtgaaatgatctccagctcacagaagccaggtgatgagggtttggagaaagattgtaatgaccattctggtactggcccttgttctgcttactccaataattctgtgggaaactcgcttaaagaaatctctgtgctgcagacattgcctgagagtgttgttgcttctgaacaggctgcatgttcatcacat

SEQ ID NO: 90795 - DNA, 400 bp, Glycine max
  Clone ID: PAT_MRT3847_529C.1
aaaacacgggccactgttttgtttctgctgcccgtgcagagcaggcacactggtctagtttgtttaattgtggttcaagagaacattaaatgaagagggtaagactgtacgagccttgaacttggcataaatggttaggttcctatctaataccaattaaaagcttcaggatggtgatgaatgatgaattgatattaagagggcattttatcatgctacttgagtaactgttataattaggaagttttcggcatagagggaaagaatagaataaggagactctgaagtattcacttgtgtagtgcgatgtattacattatgttatatatgtaatatgatgaaatctaaagcactccctgtttatattaacaacaatagaaactaaatacaaaaacaaatc

SEQ ID NO: 90796 - DNA, 256 bp, Glycine max
  unsure (1)..(256): unsure at all n locations
  Clone ID: PAT_MRT3847_52C.1
atctaatcatatggatgtcccatcagcgctacatatgacacagncacggtggttagctcacttcatatacagaaacttccgataaacttggctatgagcatgccatccgctgagatgtgaatcccatagatctcantgtctaaaacgatgtgtataggctatagtgcaggtccactagaatgaagtcactggcacttcagtagactttataaattatacaagctgattcctctgagacgagtattcgcagcctcaa

SEQ ID NO: 90797 - DNA, 1471 bp, Glycine max
  Clone ID: PAT_MRT3847_53000C.1
attcggctcgagaaagctgccccctccaccacattgcattgcagcgaaaatttcgcagaagtatcttttttctctctctcatccgcgccccaaatcttagggttttcacccaattcaattcctggaactctcctcgattcgattccacatcccccccccctgatgagatttgtgtgattggatcgtacgatggcggcgccgaggaatgtgacggcgacgagggacgaagagaagggcgaggaagacgattcgccctccgccaagaagcccaaatcggagaggttcccactgaacacgtgggaattcgccgtcgccgtcgccgtcttcttcgtgttctccaccggcctcttctgcgtttacctctccttgccctccgccgcttacaccaacctcaagctcccccgcacgctctccgatcttcgcctcctcaaggaacatctttcggcgtatgcgagtaaccaccctgcgcagttcattcttgggtactgctccacctacatcttcatgcagactttcatgattcctgggacaatcttcatgtccctcttggctggggcgcttttcggagttgtacgaggaatcttattggttgttttcaacgccactgcgggtgcatcttcatgtttctttttgtccaagttgattggaagacctttggtttcttggttgtggcctgaaaaactaaggttcttccaagctgagattgcaaagcgtagggataggttgctgaattacatgctttttctgaggataaccccgacattgccgaatctgttcatcaatttggcgtctcctattgttgatgttccctttcatatattcttttcggcgacattgattgggcttgttccagcctcttatattactgtcagagctggccttgcccttggggatctaaagtcaattaaggatctatatgattttaagacattatcggtacttttcctcattggttttgtttccatagctccaacacttctgaagcggaagcgagtatatgaataaggtttcctggctcagtttgcacaatccattttgtcaaaaggcaagttacgggatctaattagatggtgatgacaatggatcagagaagataatatttaagaaagatatccatgaaaagggatgtattgttattttgttattaacttaaacagtggcatatgccccattttattttctgtggtggagcctaagtctttttgtttccctttttgttttttgattgtgtggagagagtaagggtagacttagctgagtggtgaacaatcaattcagataaggttatgaggctttgttggataaattacacatatactggccttgatgtcatcaggaaggttgtggtgattgtttagccatactgtatgcatacgtgcttctcaccatataggatctgacttttcaccctgtagtattcaatataagatatgatagtagagaatttcaaccattactcttgcggtcaccg

SEQ ID NO: 90798 - DNA, 1524 bp, Glycine max
  Clone ID: PAT_MRT3847_53001C.1
gttccggctcgaggaaaagctgcctgcgctctctctctctctccaccaaattgcattgcagctaaatttcgcagaactatccttctctctctctctcatccacgccccaaatcttagggttttcaccaaataaaacaaccccaattcctcgaactcttcgattcgattacccaaccccacacgctgattccacatcctccatgagatttggttgattggatcgtacgatggcggcgccgaggaatgtgacggcgacgagggacgaagagaagggcgaggacgatgattcgccctccgcgaagaagcccaaatcggagaggttcccgctgaacacgtgggaattcgccgtcgccgtcgccgtcttcttggtgttctccaccggcctcttctgcatttacctcaccatgccctcggccgcttacaccaacctcaaactcccccgcaccctctccgatcttcgcctcctcaaggaacatctttcgacgtatgcgagtaaccaccctgcgcagttcattcttgggtactgctccacctacatcttcatgcaaactttcatgattcctgggacaatcttcatgtccctcttggctggggcgctttttggagttgtacgaggaatcctattggttgttttcaacgccactgcgggtgcatcttcctgtttctttttgtctaagttaattgggaggcctttggtttcttggttgtggcctgaaaagctaaggttcttccaagctgagattgcgaagcgtagggataggctgctgaattacatgctttttctgaggataaccccgacattgccgaatctgttcatcaatttggcgtctcccatcgttgatgttcccttccatatattcttttcggcgacattgattgggctcgttccagcctcttatattactgtcagagctggccttgctcttggggatctaaagtcaattaaggatctatatgattttaagaccttatcagtacttttcctcattggttttgtttccatagctccaacacttttgaagcggaagcgagtatatgaatgaaggtttcctggctcagcttgcacaatcaagtttgtcaaaaggcaagttacgtgatctaattagatgatgaagacagtggatcagagaagataatatttaagaaagatatccatgaaaaaggaatgtattgttattaacttaaacagtggcatatgctccattttattttctgtggtggagcctaagtttttttgtttcccttttcattttttgatcgtgtggagagagtaaggttagacttagctgattggtgtacaatcaattcagctaaggttacgaggctttgttggagcattaaattatgtattggccttgatgtcatcaggaagattgtggtgattgtttagcggtgctgtatgtatgtgcttcgcaccaaataggatctgactttttaccctgtagtattgctttattcaattataagatattatcgtagaaaatttcaagtattccacttagttataaaaaaaaaaaaaaaaaa

SEQ ID NO: 90799 - DNA, 1212 bp, Glycine max
  unsure (1)..(1212): unsure at all n locations
  Clone ID: PAT_MRT3847_53002C.1
ccacgcgtccgctaaggtagttctttctctccctgaaatatctctctcgcgcacgcacgctcgctcgctctctctagtctagtctagggtttttgttgctggtggccgtacactactactcactcagtctagggttttgccactctcattccatggccgccgagaagctccgagatttgagccagccgattgacgtccccttgctcgacgccactgtcgccgccttctatggcaccggatctaaggaggagagaaatgccgccgatcagattctgcgggagttgcaaaataatcccgatatgtggcttcaagtcatgcatattttgcaaaaaactcaaaatttgaataccaagttcttcgccttacaggttctagaaggtgtaattaagtatagatggaatgcattacctgttgagcagcgagatggaatgaaaaatttcatctctgatgttattgtacagctttctagcaacgatgcttcatttcgagcggaaaggttgtatgtcaacaaactcaacattatattagttcagattttgaagcatgagtggccagcaagatggcgaagctttattcctgaccttgtctcagctgctaaaactagtgaaacaatttgtgagaattgtatggctatattgaaacttttgagtgaagaggtttttgatttttcaagaggagaaatgactcagcagaagataaaagagcttaaacaatcattgaacagtgagtttcaactcatacatgagttatgcttatatgtgttatcggcatcccaaaggactgagctcatacgagctactctatctacattgcatgccttcttatcatggattcccttgggttatatatttgaatcacccttgcttgagacactcctaaaatttttccctgtcccagcataccggaacctcaccttgcaatgtttaactgaggtggcagcccttcaatttgtgaattattatgatgtgcagtatgtcaagatgtataacatattcatggtccagttgcagggaatactcccgccaactacaaatatacctggagcatatggacagggttcaagtgaggaacaagcatttatacagaatctggcactgttcttcacttcattntacaagtttcacattcgcatcctggaatccactccaagagatatagctgctttgctagtgggccttgaatatgtgaaccacatttcatatggggatgata

SEQ ID NO: 90800 - DNA, 731 bp, Glycine max
  Clone ID: PAT_MRT3847_53003C.1
gataagggaggcgggtagaaacgtgaaccagaaccagaatggatcttcaacaacgaccactgaaacttcactttattccttacctgtcaccggggcatgtgatccctctctgcggcattgcaacactcttcgcctcacgcgggcagcacgtgacggtgatcaccactccctactacgcccaaatcctccgcaagtcaagcccctccctccaactccacgtcgttgactttcccgccaaagatgtgggccttcccgacggcgtcgaaatcaagtccgctgtcaccgacctcgctgacactgcaaagttctaccaagccgccatgctcctccgcagacccatctcccatttcatggaccagcacccacctgattgcatcgtcgccgacaccatgtattcctgggcggatgacgtggccaacaacctccgcatcccacgacttgccttcaacggataccccctcttctccggcgccgccatgaagtgcgtcatatcacaccccgaactccattccgacacgggccctttcgtcatccccgattttcctcaccgcgtcaccatgccctccagaccacccaagatggccaccgccttcatggatcatctcctcaaaatagagctcaagagccacggcctcatcgtgaacagcttcgccgagctggacggagaagagtgcatccagcactacgagaaaagcacgggtcacaaggcttggcatcttgggccagcttgt

SEQ ID NO: 90801 - DNA, 377 bp, Glycine max
  unsure (1)..(377): unsure at all n locations
  Clone ID: PAT_MRT3847_53004C.1
caaaacctaaaaaatttattttcataccatccaactcaacaattgctgctcgtttaattattaccaccaacctcaaacaaacaaaaatcaataacttatccactcttctcaccatttatcttcaacactccttttccaaaatctaacaatttccatcctnattaaaactccacatccaacaataacaatatacacattcctaattcaaaaaatcatattaaaatttccttcaatattaacaaattttataaactgcatacaatcataacaacataaaacttattatcatcaattcatcaacaatatgaccaataaatatttactttatctccctttaccanctatactatctactcctcttttttaccatataataa

SEQ ID NO: 90802 - DNA, 1040 bp, Glycine max
  Clone ID: PAT_MRT3847_53005C.1
acttcatgtgcttttttgtttttgttttattaactaacttgggtctttttggaagagacggtttgaatttctgtggggagagatattcatatttagcatctgatcgagtcttgaacaatatgattgtcttggatttgtcttccaaggaagatacttgtgggaaataaaaataactaaccaactacaaattatatatgtgttctcacatttttttttcgtagagattggatcgatctggaactgggagtcgccagaaaagaactccgtctatttctcagggggctaggatcactgaacaccatgttggccctttggatcccacgcgtccggtcagtctcatggagattgaaactagatcccgagcacagacccctgcttcatctgctgttgcagttaaagcacgtttaaaagatgttagtaatgctttaatgacatccaaagagctacttagaattataaaccgcatgtggggtcatgaagatcgtccttcatctagtatgtctcttatctcagctctgcatactgagctggagagggctcgcctacaggtcaatcaacttatccaggaacagcgctcagatcagaatgagataaattatttgatgaagtgttttgctgaagaaaaggctgcttggaaaaaaaaggaggaagaaattgttgaggctgcaattgaatctgttgctggtgaactcgatgtagagaggaaactcaggagacgattagaaagcttgaacaagaagcttgggagagaactggctgacaccaaaacatcccttcttaaggtggtgaaagagcttgaaagtgagaagagagcaagagaaattattgagcaagtatgtgatgagttagcaagagatgctgatgaagataagtctgatattgagaaacaaaagagagtgtctacaaaagtttgtgaagaggtagagaaagaaaaggaaataatgcagttgactgataggttacgtgaggagagagctcaaaagaaactctctgatgcataatatcagcttgaggaaaagatgccagctgttgataagcta

SEQ ID NO: 90803 - DNA, 658 bp, Glycine max
  Clone ID: PAT_MRT3847_53006C.1
gaaaacagcgcactgagtgctgagaacgttacctcattcaaaagcagcaacagcagattattcttctttgtttctgttctttcttcatcagccgattcagctttgtccatggccaccgaaccaaaagcagccgccgatgaggaacaagaagcccctgggtcacgatcatttttcacagagattattgcctcaatctcagacataaaatttgggaaggatggaagatatatacttagtcgtgattacatgaccttaaaggtttgagagctttactattccaaaatacatgcttctgtcaatgaagcttttctgagtattttggatggagttactctaaatttattgaattgaactccatgagacatgggtgtttggttttggtctcaatgataagattcttacttaggctcaagttcaatcagattttttgaaaaaattggtatttgatagaatccattggtggtggttgttgataccatgaaccaacaactttctgttcaatttttttattttttatttaatttacattggacattcaattgttgttgggcaggcagagcatgctatgtaattcattttttttttacttttgtttggattccctctgtttttatcaacaaaatcccacaagtctcatctgtcttgtatttcagttatg

SEQ ID NO: 90804 - DNA, 311 bp, Glycine max
  Clone ID: PAT_MRT3847_53007C.1
ggggggaaaaaacaccttaatttattttctttttaatttaagggccattaacggtatgcgtgatgggggtagtggcaacgccaaaaaactaatgtggaagagatgcagtaaggaaatattggattgcttgccacaaatgctttaaaaaggtaaaaacccttaaagaagggcccaaggggaaaaaaaaggaaaaaacttgaaaataaccttatttttggggggaagattagaaaggatattttgggcccaaccaacccaggggtacaaattttttttttaaagaaagattttatataccacgttaatattcc

SEQ ID NO: 90805 - DNA, 118 bp, Glycine max
  unsure (1)..(118): unsure at all n locations
  Clone ID: PAT_MRT3847_53008C.1
cccacgggtttcttggagttgtgancaactacgtnacnncnctcttggttttcttcancnnccaccntcacctggntnacntccttcgataatnaactttatcaaaancaaactttga

SEQ ID NO: 90806 - DNA, 208 bp, Glycine max
  Clone ID: PAT_MRT3847_53009C.1
gccacgcgaccacccacggggatcgcccacgcgtttccgacggactcgcaaccgcacaggtgataggtgcatatggatgattaatggatatcaaaggaacttttttttttttttaggtagaagagaagaaaggacgcgcttgcataaaagaaggtacggcttaggccttattctgtgggggtggtagaggagcatgttcgtatgaaca

SEQ ID NO: 90807 - DNA, 226 bp, Glycine max
  Clone ID: PAT_MRT3847_5300C.1
ggctcgaggctccagtaaaagtatgtgatatgcaatctaaggctctggaaatcgcgattcttcatatggggagacactaaactcattgcactgacctctactgttggacgcgctttgctcaatggcatggaaccaatagttcttaccccctatgtttggcgattgagacgaggctactcagcgctggaggctgcgaatggaaggttctgctactggatcaggacta

SEQ ID NO: 90808 - DNA, 320 bp, Glycine max
  Clone ID: PAT_MRT3847_53010C.1
gttgctccaactatgggggtgcccaaacttaagggggagcccccccttacctgaggttttcccttctgtacccttctggcaaccttacccttctgtcggattcttgggtccttccgacacttaggtccacccgcctattcccgacccaaacttacctatataccatcttttcctataatggggccaataagagcttggcctaaaaatgggtataactgttatccgcgcgaaattgttatccccatacgattccaaagaaaatacaagcaagcctcctgtagcttataagctggcttgcttacagaaatagcgaagcgccc

SEQ ID NO: 90809 - DNA, 573 bp, Glycine max
  Clone ID: PAT_MRT3847_53011C.1
acggaaggcatgaaggaagtttacattggaaaagcacatcaactgattttcaggatcccaaacctctgagtgaaattctcaaggtcaaaaggaccatggatcagtgagattggcaaaacctgcaacaattgaattatgagattaaaatgactaatgatttcaagagactaatatttttaccgaagataaaggataagttggctggagacgggtgctatcttagcatcctttaccatgctaggatattgccactggtagatggtgataagtttttgttcgagttagtggaaggttatgagggcccgaggcggataggatagagatattagatcaccagtgtttgactagaaaagttatcttccatagttagttcaatatgttgatttagacagtgacgtcttaatctagagagtggtatgctgatttacatgaattttatgtgtgattttggcctacttgtttttcctgtacagagctgcattgactcgctactctgtcttggacagtgtttttagtatatgataattgtccccattctggatttttactaattgtccccattctggatttttc

SEQ ID NO: 90810 - DNA, 279 bp, Glycine max
  Clone ID: PAT_MRT3847_53012C.1
acttaacagtatcaatattgatatatataagacttgtaagacacatatgttagcccgttactggcctttttcacttacaagttcaaatccacacaaaacaactaagcataatattgcagaatggcttgggaagcgaaattgagaaaattatttattcaaggtccaagccagagatggatcacaatttaattatgttccccgtaactttgttgttgatccgaattgctttgaaggtagtcgactatgtttttgtcacttgaaaactttggcaaaacttat

SEQ ID NO: 90811 - DNA, 330 bp, Glycine max
  Clone ID: PAT_MRT3847_53013C.1
aacacaaattgcaactaatttcacataaaaactgcggttttttctattaacaggttcttcatcctttaataacggaatctttttttgattccctaccaaatagttattgcttccaacctaacattctattcttcattttcaatcacaaattaccttaaagacaaataaaaaaagaaaacccttttattgctatccactaaacccctagctactattccttatataatgatcaaattggtggcattctttggttgcctcagataataaatacttcactttaatataaccatttcatttaatcctcacatattttttgattatcccttaaat

SEQ ID NO: 90812 - DNA, 259 bp, Glycine max
  Clone ID: PAT_MRT3847_53014C.1
ttatctttatcatgcttgccaaattaagatcaatcacccactaatttggagatccataactgatcgttcatgtcgcacacatttacaccattatctgactaacttgttcctaaactgaacgtacttttactaataacactcgtaatttttttcccaaacattatcgtgactatgcgaaatatatatcatatttacagcggtatagtgaaagactcactacgattctactagcttgtggtgatctccctcagcaactcag

SEQ ID NO: 90813 - DNA, 247 bp, Glycine max
  Clone ID: PAT_MRT3847_53015C.1
gatcagctatattttgctaacttgtccattcctttttcagctttttgtcaccttccaatttttgttttgaagatcttcacttttaaccctgattacaattatatgtgtactatcatgtttgcactttgataaaaatgaatttgaagcctttgaagatgacataggcaggtacattatgtgttgctcttttccccccttttcaattttacagttcactggagaaaggtcagccttatatttttcgtgt

SEQ ID NO: 90814 - DNA, 289 bp, Glycine max
  Clone ID: PAT_MRT3847_53016C.1
aaaaaacaaaactgcacattttttacttaagccagtgataagtgatacatccaacatttgctttgctgaaattattataattttcaattcacatatatattctacagaaaaaaatattaaaaacaagtaaggcatgaataaaaaaaataaaaacctacaatgcaaacaaatgattatacccttaccaataccagaaaatgaactagcttgacaatttttgctaacgttcagatgtgacactttggaatcactcaagttcatagcagcagcaatagctagttctttgcat

SEQ ID NO: 90815 - DNA, 445 bp, Glycine max
  Clone ID: PAT_MRT3847_53017C.1
gcgggggttttttttttttttttttttttttttttttttttttttttttttttttttttttacataagaatttgttttttttaattttaaaaacacatatattccgaaggactttaaaaaaccccaaaacaaaagcccttacaattaaccaaaaaaggggacgcgggggaccccttggtggtttataccaaaaacataaccattaaggaaaaataaatcaaaatctggggaatttccgcctgggtaaaatttatggccccacaccctttttaataagccggagggtggaacccccaatttgagggaagtatttgaccttccaaaggctggggggggcccaggggaattaaaaacggacggaacaaactttaaaaacgaaccttaatccaaaacaaaggtcaaaaattcgggaccaccatgcctttggccaataattagccccccc

SEQ ID NO: 90816 - DNA, 277 bp, Glycine max
  unsure (1)..(277): unsure at all n locations
  Clone ID: PAT_MRT3847_53018C.1
tacactcaccaatnggacgactgctgcacaacaggatagcgtactttcggccaaccaacttccccccacaagcgacccctccgaacttttggttcttaactccttcggacactcaacccatttgattggcccaagtttaaactctccggcgtcgacccggaccttctcaacatgctcaatgatgcggagaaggtaacggaccgtgaccctacaatgaagggccttgactcggtaattaagagttccgaggaagaatctttctccggttccgaacccg

SEQ ID NO: 90817 - DNA, 419 bp, Glycine max
  Clone ID: PAT_MRT3847_53019C.1
tcgacccacgcgtccgctaagacatcatcaattataaacggtcacgaacgggggccacaacatatgtgctctcaaagaaagcctgatggctgtgccgatgctcatgcaggcactgaaccggatctatgggggcgacaccatattggatagacagggggtgaggccaccactgttgaagcggaagatttttttagataaagagctactgcaaacacgtgaccctgggcaaatggacactgcgactgtgaacacgaacgtgttggcctacaacaagacatgatgcgaacgcccacctgggagtgactcatggtgatgaccatcctgctgatcaagaagatgatgtgaccaaactacaagacacatcggcacgacgcgctgatcaacactgaagtggaagaccctggaggagatggctccca

SEQ ID NO: 90818 - DNA, 690 bp, Glycine max
  Clone ID: PAT_MRT3847_5301C.1
aaaaaacctctcaaagatatatcagttgccacaggagttgcagaaggaaccattaggaactcatacaaggatctttatccccatgtttcaaaaataataccaagctggtatgcaaaagaagatgatttgaagaacctgtgcagtccttaaagcaaaacaatagcgaccacatttaacaacttagatgccattggaacgttctgttctggatctactgaactgttttatacttttaattcaaaatgaaaatgcctcttctattagtattttcttcttctaactgcacattaattttggttaaccctcccaatttgagaattctaggggagaggcaccgctgatatatagaattagctcaacctttatgatagtaagctcattttgcacttgcgttgaaattgctgggtcatatagggtaatagttatttgtagcatgagaaatgctaaatgctctaattttttttttgaatatatcttttattattagatgaagtttattggaaatctcaattttgtagggttcattattttttctttttaattttgtaattttaataaattaactaacaaataacaatagtgtgttgtaggagtgtgttagtgctaatgtgttaaaaaaagtacgttggagagtgtatctttagcaattcttttgtagctttgtagattatacaagatactattgaatct

SEQ ID NO: 90819 - DNA, 140 bp, Glycine max
  Clone ID: PAT_MRT3847_53020C.1
ggctcaacttaacttatattccaaaacgcatagccagggcatggctgtccctttgaaccactcttacgccacccacacccaacatcgtaggcacgactaccacgacgaacgacccaccgcttacccttcgccgcgaaact

SEQ ID NO: 90820 - DNA, 331 bp, Glycine max
  Clone ID: PAT_MRT3847_53021C.1
ggttgtggttcgaatctctctcgctaacaaaaaaaaattaactattaacatttcccgataaaaaaaaaaagtaatcttaggctttcaagtaagctataatgcttactatttgagctgattgcacatactgttatcccaaatcgacaggccatcgtccgcaacacaatacttgcatataaaatttgtggattgtcctgaataatctaatctagaactacatagtttggttggtggctgtttaattgggctaatcacaatcgcttaaaagacactgaatttgattcatctgaaaaataaatacccctattgtgattgtccatctgttgcctta

SEQ ID NO: 90821 - DNA, 445 bp, Glycine max
  Clone ID: PAT_MRT3847_53022C.1
gtgagtttttaatagaagggcgcccttaaatcgttgatctgagtcgtaatgggacggtcaggaagttcctatggaatcaacagcaaaagagctgagaacttttaaaaattgtttattcaatacaaaattttaacaacactagaataagaaacaatgggctcgaattctatactccctataaagaaggaaaggtatgtggatggtggtgctttcttccacgaaaaccctaacacaaacagggttcctcctaaattcaattcccagcccaaccagagggtccctttctataaaaaccccgggttcttaattaacagaaaattgccatcaacaacaaaaaacttaaaaaaacggcattccggcggacgaggttaaaatccttgaaaaatgaaagccccgccaaaaatacatacgcgttctagaagtttttagaaaagcaaaacaccct

SEQ ID NO: 90822 - DNA, 144 bp, Glycine max
  Clone ID: PAT_MRT3847_53023C.1
tttccaaaaggagggcgcccataacacactctccacctacaaagccgctcaacacattcctaataccgaattgcctccaactcaccctaccacgctcaatctagctctgaactattaacacaattactatcaaaatcttaaccc

SEQ ID NO: 90823 - DNA, 499 bp, Glycine max
  Clone ID: PAT_MRT3847_53024C.1
gtgaaatcaacaactcctaatcattctagtaacgatggtattgctaccccactgagcaacaatcctgcactaacctcttctaatacagaaggaccaacttctaagttacctcacatgtcacttaatttcacactacttagagaaatcaataaattgaccgtatcattgatgaagaaatctggaagtactggagttggcgctaactattccaaggcttcaaaggatagctcgactcttatcaagaccacaactaaggcttctaacaatgagtctcaaaagcattcttcatttactccgataacagacccgccatgaagtagaaagaagaccccacattatatcatccccatttacgtagagcaccgaagacagagctccctttagaaagaagaaacttgagagagtgtgcattgctagtgaatcacagatggtgcagccacatccaagattctgggataaagctgagacccagattagaaagctaagtctgagcatttgt

SEQ ID NO: 90824 - DNA, 1783 bp, Glycine max
  Clone ID: PAT_MRT3847_53025C.1
ccacgcgtccgcgaacaacataaatttaattgggccccgattggagctttctttccgcttctgactccgtgccctagcttcttcttcctcctcctcctctgccattgcagcaaggcacacacctcaggctccaacccatttcacgagggatcggattcgctcgccatcatggggaagaagaagaagagagtttcctcgaaggtgtggtgttattactgcgatcgcgaattcgacgacgagaagatcttggtgcagcatcagaaagccaagcactttaagtgccatgtctgccacaagaagctctctaccgctggcggcatggccatccacgtcctccaggtccacaaggaatccgtcaccaaggtacccaacgcaaaacctggcagagagagtacggatattgaaatatatggaatgcaagggattccaccagatatcttggctgctcattacggtgaagaagaggatgatgttccgtcaaaggcagccaaggtggatattccaccaactcagcttgtaggtggaatgattccacctcctttgggtacaggatatcctccgcgaccaaccttgcccacaatgccaccaatgtataatcctgctgtacctgtgcctccaaatgcttggatggttccacctcgacctcagccatggttttcacagcctccagctgtttcagttcctcctgctgccccatacacacagcagccattatttcctgtgcagaacgtgaggcctccactgccagctactgctcctgcgctccaaactcagattactcctcctggactgcctacatctgcacctgtcccagtttcacaacctttatttcctgttgttggtaataacgatacaactactctaagttaatcattttctgctctttctcatcattaccgttgaacttctcttacttcagtggtttctgcacatgcgcttgtcgtgacatatttgatcagatattcaactgatgcatatatttttttcggttgatgcaaatctgaggggctacctatcatttacaagtatttatcatctgatcggggttccagttggagtagctagtaactcacattcttatgcttctggtccaaatactggtggtccttcaattgggcctcccccagtaattgcaaacaaagctcctgctcctcagcctgccaccaacgaagtctacttggtttgggatgatgaggcaatgtccatggaggaaagaagaatgtctttgccaaaatatcaggtgcatgatgaaagtagccagatgagctccattgatgcagccatagataagaggatacttgagagcaggctggctggtcgtatggcattttagatcaatctcatccacacattcttgtgaaatttcttcagtgatatgggctcaaaatggcattttaataaggctttgacagcgtgtggtcaagattcctttatttaaggtccagaaagtaacattgttattggtgcaattctttgccaaaatgggcaatgggccctacggtcatagtggaatcgaagaaaaaatattgaaatggttctgatttcttcttaggaagttgcaaaactttgtttatttctcaatttcataccttttctccctttaatgtttgtagtcaacctttaggacatgatacttgaaagagtactatatattatttggtgtaatctagattattacatgttttgggtggaaaattgatggcaattctcggttggtttaaaaaaaaaagaaaagaaaaaaggggaggagaaaaaaaagaaaaaggaaaagaaagagggggga

SEQ ID NO: 90825 - DNA, 1078 bp, Glycine max
  Clone ID: PAT_MRT3847_53026C.1
tgatctttctttccgcttctgaatccgtgccctagcttcttcctcctccgccattgcagcagggcacacaaccttcgtcacaaacccaattcgcgagggatcggattcgccatcatggggaagaagaagaagagagtttcctcgaaggtgtggtgttattactgcgatcgcgaattcgacgacgagaagatcttggtgcagcatcagaaagccaagcacttcaagtgccatgtctgccacaagaagctctccaccgccggcggcatggccatccacgtcctccaggttcacaaggaatccgtcactaaggtgcccaatgcaaagcctggtagagagagtacggatattgaaatatatggaatgcaagggattccaccagatatcctggctgctcattatggtgaagaagaggatgatgttccatcaaaggcagccaaagtggatattccaccaactcagcttgtaggtggaatgattccacctcctttgggtacaggatatccttcgcgaccagccttgcccacgatgccaccagtttataatccagctgtacctgtgcctccaaatgcttgggtggttccacctcgacctcagccatggttttcacagcctccagttgtttcagttcctcctgctgccccatacacacagcagccattattccctgtgcagaacgtgaggcctccactgccagcaactgctcctgccctccaaactcagattactcctcctggattgcctacatctgcacctgtcccagtttcgcaacctttatttcctgttgttggaaataaccatacaactactcaaagttctgcattttctgctccacccctgccctcaagtgttccatcagttactccagtgatgtctacaaatgttcctgttgatacacatttgagcagcaactcttcagtaacaagtagttatcaggctataggggttccaggtggagcagctagtaactcacattcttatgcttctggtccaatactgggtgggtctttcattgggcctcccccagtaattgcaaacaaagctcctgcttctcagcctgccacaaacgaagtctactttg

SEQ ID NO: 90826 - DNA, 1415 bp, Glycine max
  Clone ID: PAT_MRT3847_53027C.1
tttcagcttatctttacttcaaaaggcaattgatgtttaatttggttcggctcgagttttatgtgtctgatttgaggttggagcgtagttagcttctcttttctgccgaaagctgcagaattgtgttgttttctctcctttgggggtcaaacaagcggttctcttcatgatgccaagtgttaaccctgacaaagattccgagccatttgttgagaccgatccaaccggtcgctatggtagatacagtgagttgctcggatgtggtgctgtgaagaaagtgtaccgtgcatttgatcaagaagaaggaatagaggtggcatggaaccaggttaagctgaggaacttctgtgatgaccctgccatgttggataggctttactctgaagtgaggttgctcagaagcttgaccaacaagaacatcattgcactttacaatgtgtggagggatgagcagagaaacactttgaatttcatcactgaggtttgcaccagtgggaatttgagggagtacaggaagaagcacagacatgtttccataaaggccctaaagaagtggtctaagcagattttgaaagggttgaattatttgcacttgcacgatccctgcatcatccacagagatctcaattgcagcaatgtgtttgtcaatgggaatactggccaggttaagattggtgacttgggtttggcagcaattgtgggcaagaaccattgtgcacacacgattcttggcacaccagaatttatggctccagagttatacgatgaagactacacagaattggtggacatatactcatttgggatgtgtgtgttagagatggtgacagtagagattccttatagtgaatgtgacaatgttgctaagatatacaagaaggtgtcttctggagttagacctgctgccttgaacaaggtcaaagatcctgaggttaaggctttcattgagaagtgccttgctcagccaagggctaggccttctgcagctgagcttctaagagatcctttctttgatgagattgttgatgatgatgacgaaaatgatgactgttcttgttcatatcaatagaataatatttcttacagtgttggttttttaatttgattcacctaccttttcagtatgcaatgtcaatttgggcagcctagatagaagtgtgaaaattaaattgtttttattttccatttggcgagttgtgaaattggataaggtttggttgatgaatatgggggttaccaggggagggcttgattggggttggtgtcattttgtacataggaaattttactgactgttgtgcagcatacattgaatgatgatttgatttggcaatatatgttaaaaaaaagtatattagatgtaatcagcagtcaatgaatgcatgatggaatataaatactatatcttgaaaaat

SEQ ID NO: 90827 - DNA, 717 bp, Glycine max
  Clone ID: PAT_MRT3847_53028C.1
accgaatgaaaggaacatttttatttcaatcagctttgattgctgaggtgcttcatacaaaaaatctattcataaaaatggtatactatacacatcatatattcataactcaagataccaaactctaacaggttttatttagccttattagacaatcatctacaacctttcatcaaatacgaagaagggcttgagaagctcatagctgaggatttgctgttttcatctctgcctggtgtttcacattcactaaagtcaagtgtgcgtcgctctatcaaagcatttgaaggcaactgagaatggttcccagactgattgacaggataattattttcatggtccttatccttgtcgttttcagatgcatcttttggtaatgctttgggagtttcatttcctaaaatctcctgagcattggcatatgtggcagcagtttgttcactgatatgtttcaacaatccgagtgcatcatagcttctatcacctggactcataaaatacccaaaatcctcaattgtaatttcggtatcaagtctggggctagatagaaaagtgttgaagaaccaaggggatttccatgcagaaggtgttccaattccgaagatgctacatgtttcaaaaccaccatcttttctggtttgttcccctgaattgtcccctggagcttgaacacgaataacagcaactgaaagtccttcatgcttcttagcacgaaca

SEQ ID NO: 90828 - DNA, 431 bp, Glycine max
  Clone ID: PAT_MRT3847_53029C.1
gaaaaagctggcagattccttgccctcaattggtgcaatagaggaccgctagaagagctagctcacatgagcttcaacctccaccgttcactcttcgaagaactagacggttcatgatcgtacagttacagaaccctcaccactctcagcctcatcgttacggaatttgaaggctccttttctgccacctcaatgttgtcgtcttgagttgacagacctactcgtggttggaaccatcgaaatgacagtgcaggtgcacctatggctcttcattcccgcgctgattgatagatcagtggagaagcatggagtgaagatagagattacaaaataggaacggttggaagtggaagaaggatgagttggatcgatggtgcttgaaaaatgacgagttttggaagcggattctatggagaagacatggggccctt

SEQ ID NO: 90829 - DNA, 743 bp, Glycine max
  Clone ID: PAT_MRT3847_5302C.1
ctcgagcggctcgagcggctcgagtacggctgcgagaagacgacagaagggcatctgtcttttttacttatacatctttttttttggtttcatatttttttataaaaaatatatatcctcattttggaaattaattttgagattttaacactccagaacattaatttctggaagccttggaaattttaacacccttttttctctttgctgttttatctttatctttaccaatcataaaacccaattcactaatccccttcacctccaaaccaacaatgctgccacacctttaaaattaaccaaaaccttaaaaatctagaaaaacaaaatatgatgccaaaccatccatgttttccgttcattgcactgttgttcaattatttctttcttcttgtggtttcaacttactatgcatctttaagctaaagcaatgtgacaaccatctacaaggttttgagtgaacaaacactcctgacaagtctattcctaatatcgtgaaggagttctcaatgggagaggacagtcacttctaggtgcatttgagtatccacattgacgatactctctttttcatttttattagattagtgaacaacaccatctaattttgaaaagtgttaaatcaatgaagacactatatttttcatttgggttgacattgcaaaacattcttagacacaatacacacattcattctcacatagatccatcgcatacgtacacctcaccatttcgtctttctt

SEQ ID NO: 90830 - DNA, 392 bp, Glycine max
  Clone ID: PAT_MRT3847_53030C.1
ttcgaggccaatccgaccttcagcgaggagcaactcatcgatgttggtccaggatctggtcacgagtggcaggctcctcgacagaatgacctccgtggcccatgtcctggcctgaacgcctttgtcaaccacggctttcttccacgaaacggatatgccacgatttctcaatttatcgatgccacgactaccgtcgtcggtatgggcccaattctcgctgccttcctcgccgtccttggtgcaagtatcgatggcgatggtttatcgtggtcgatccacggaacaccaccgctcggtgttggtggaccactcgcacggatcggcaactgcattagcggattcgcactacaagtacgagtccgatgccttcccaacccgaattgatctttacc

SEQ ID NO: 90831 - DNA, 126 bp, Glycine max
  unsure (1)..(126): unsure at all n locations
  Clone ID: PAT_MRT3847_53031C.1
gantttnttnnntctctctnagaggacattttgcttcccacttgtnntnnttgccccattcccttcttacaatagcatttgtncngnattntgacaatcatgtatttgaaatccattggtttaanc

SEQ ID NO: 90832 - DNA, 633 bp, Glycine max
  Clone ID: PAT_MRT3847_53032C.1
atgaaaccaaactgggaactcaaaaactgctgcaaccacgaccaggtggtgtttctggtcactgttgctgtctgcactgtcgttatacttgcactacggagaacagttttactcagaccctttaagcttgttactgtatttcttcatgaggcaagccatgcaattgcttgtaaacttacttgcggtcatgtagaaggaatccaggttcatgcagatgaaggtggaacaacccaaacacgtggaggcatatactggttaatcttgccagctggatatcttggttcatctttctggggcatggtattgatacttgcatcaacaaatcttcttaccgctagaatagctgctggctgttttattgctgctctacttattgtcctcttcattgccaaaaattggactcttcggggactttgcattggatttatcagttttcttggtgtaatatggattctgcaagagacaaccaaagttcgaatactacggtacattatcttgttcataggtgtaatgaatagcttattttcagtatatggtgtttacttagttgagctgacaaggaaagccagggggttaatatcttttgtgtttctttgcggagctgtgtatctgggtgctgtgatcttgtcataa

SEQ ID NO: 90833 - DNA, 1477 bp, Glycine max
  Clone ID: PAT_MRT3847_53033C.1
gaccgtttgccacgttcgcaaccaaacacctcccacgcgtcccacgcgcgcccacgacgcctccgatttctcgtgccgttcccaaatcaatttctctctctttctccgatctgttttgcttctggggctacccgctcctgcaatttgcttttgcgattggagtggaaggccattctcgcaacgtttgagttcagcagatccagaatttttcagaaaccaggttaaggagaatgaagaatacggaacgaattgccaatttggctttagcaggtttaaccttagcgccgcttgttgtgaaagtagatccgaatttgaatgttattttgactgcttgcctcactgtgtttgtgggattgttaccgttccgttaaaccaaccccaccaactgagacaatgtccaatgaacatgccatgcgttttccctttgttgggagtgcaatgttattgtcactcttcttactcttcaagtttttatctaaggacttggtgaacactgtattgacaggctacttctttgtacttgggattgttgcactttcggcaacattattaccatttattaaacgttttctgccaaagcattggaatgaggacctcatagtctggcgttttccatattttcgttctttggagattgagtttacaaagtcacaggtcgttgctggcaatccctgggacctttttttgtgcatggtatgctttgcggaagcattggctagcaaataatatattgggtcttgctttctgtattcagggaattgaaatgctctctcttgggtctttcaagactggtgctattctcttggctggtctatttgtgtatgacattttctgggttttcttcactccagtgatggtcagcgttgcaaaatcatttgatgctccaataaagcttttgttccccacagcagattcagcaaggccattttcaatgcttggccttggtgatattgttatccctggtatttttgtagcattggctttgcgatttgatgtgtccagaggaaaacagccccagtatttcaagagtgcatttgtaggatacactgttggcttggtccttacaattgttgtgatgaactggtttcaggctgcacagcctgcccttttgtatattgtaccttctgttattgggtttttagctgctcattgcttatggaatggtgacgtcaaacagttgttggagtttgatgagtccaagactgccaattcatctcaagaggatgctgatgccaaatctagcaaaaaggttgaataagtattagcctgttcaataccaatactttcgagatatttacaaccgttacctgtaatgcaatgttattaaaaggcatacgtctgtaacagattttgattaagaaaaacttttgagctaactagccttattttcagtgtaggattttgcttttacttctgaagtttgtttttatggcaaactattttggcattttaaaaaaaggaaaaatttcactgccgt

SEQ ID NO: 90834 - DNA, 622 bp, Glycine max
  Clone ID: PAT_MRT3847_53034C.1
cccgcgtccgtgagttacaaagtccaggtcgttgctggaatccctgggacttttttttgtgcatggtatgctttgcggaagcattggctagcaaatatatattgggtcttgccttctgtattcagggaattgaaatgctttctcttgggtctttcaagactggtgctattctcttggctggtctatttgtgtatgacattttctgggttttcttcactccagtgatggttagcgttgcaaaatcatttgatgctccaataaaggttaagttttttgctaatgaaatggagatttctgtttgtctttgtgtgaattttaattgtatatttactatgatatcagataagaaaaatgtaataaatctattcctaatattgtcattcaaattattttgcagcttttattccccacagcagattcagcaaggccattttcaatgcttggccttggtgatattgttatccctggtaggatgaccctcaaactctcttccccttcacaagttttggaacttccatttaaggagacttgttcccttttctaccttcttacttcaatgcctgaataactccttatccaaataataacagactcctaaagctaatttcaaaattaaaaactc

SEQ ID NO: 90835 - DNA, 761 bp, Glycine max
  unsure (1)..(761): unsure at all n locations
  Clone ID: PAT_MRT3847_53035C.1
aaaaaaaaaattagattttaccaatcacttggaaagcattgtgttttacatcaggaccctcttctattagctccaaggattaaaattagaaggctgggtaaatagaaatgccatacagtaattcagaaatgagagtgaagagagactttttttttaataaattgtggatgttacataactctaaaatggatgctgataatcaagtagtcatttaccaaatgagaattttttattagccgtatgtacaaaggaccaaaagtggagtcctttctttgataaaaccctaaaaaaagaccaccttctaacgaatgtaacaagaatacactaagccacagatccatgtcaaccagctcatgctggattctgtaaacctgaaggagcaaatgagcaatgagggaaaaacctagaaaccaaggtttttttcaacttctaataccttagtacatatatgggatggggttaagtaacttgccaaccttggttctcttctcataatttaacccatggctctcatctatctttgataaggcatctttttgagtgttgctagtccttgctacttgttttgatatcagcaatgcatccatcacttttcttatacaaaatgtttaactccatcaatcccttgaggacatgcaatgaaatatgaattttcccaacagacttcaagcttcagcacgatgttcttctccattgcttcttccctttcttttgatgcaatttgaatggactccaactcttnctgcgtttagaggtctcgc

SEQ ID NO: 90836 - DNA, 392 bp, Glycine max
  Clone ID: PAT_MRT3847_53036C.1
cccaaatcaatttctctctctctctctctctcgctctctgatctgttttgtttcaggagccacccgctcctgcagttttcttttgcggttggagtggaaggccattctcgcaacgtttgagttcagcagatccagaatttttcagaaaacaggtttaggagaatgaagaatacggaacgaattgccaatttggctttagcaggtttaaccttagcgcctcttgttgtgaaagtagatccgaatttaaatgttattttgactgcttccctcactgtgtttgtgggctgttaccgctccgttaaaccaaccccaccaactgagacaatgtccaatgaacatgccatgcgttttccctttgttgggagtgcaatgttattgtcactcttcttact

SEQ ID NO: 90837 - DNA, 227 bp, Glycine max
  Clone ID: PAT_MRT3847_53037C.1
ccatagcaaagaaatgtgataagccagatacctagagcaagtgcaggagcttgaataccctgggtctgcacaagctgttgagaagctattaaagaaccaaagagaatcctactttgtggatgctcagcctaagaagaaaaaggaggggaataagggaataacgggtcctttgccttcaatttagctggctttttactgaatacatatgtactaaaatgtatgctata

SEQ ID NO: 90838 - DNA, 246 bp, Glycine max
  Clone ID: PAT_MRT3847_53038C.1
agaagggataaaaagagactctaccaaacagttagaacatcacaatacaaaagaaatggtaatgatgaaagagagtattattgaagtgaagcttggaaggagccaaatgtctatggtagaaggtgagttccaaggaacatggggtgtcaagagacgacgaagagaggttgctgcagcagcaagcagccgtgatgataaccaccaccagcagtcaccacagcaagaagttggtgaaaattcttcaat

SEQ ID NO: 90839 - DNA, 307 bp, Glycine max
  Clone ID: PAT_MRT3847_53039C.1
acggctgcgagaagacgacagaagggggaggtttctactcgttttatttcatttagacacacagtgtaaaccggcacattaattaaaccgcgcgcggcaacctatatattctcactcactgatactatgacgctccacatactacttgagatagttaaactcatcttcagggatcgatcttattgtttctcatcatccacttttgttcattggtctacatgagtaataattaactcctgatacttctattgtagatgaattcaattttttaatatctaataattatttttatctcaatcctattttt

SEQ ID NO: 90840 - DNA, 557 bp, Glycine max
  Clone ID: PAT_MRT3847_5303C.1
ttttatcaaaaggattatattagagtatttaccattgtcatgctacaaataaccgtcaacctatatgacccagcaatttcaacgcaagaacaaaatgaacttactatcataaaggttgagctaattttatatatatcagcggtgcctctcccctagaattctcaaattgagagggttaaccaaaatgaatgtgcagttaactaactaactacaaggaaaatgccaaacagaagaaaataactaataaaagaggcattttcattttgaattagaagtataaaacagttcagtacatccagaacagaacgttttccaatggtatctaagttgttaaatgtggtcactattgtttttcttttaagggctggataggttcttcaaatcctcttcctttgcataccagcttggtattatttttgaaacatggggataaagatccttgtacgagttcctaatggttccttctgcaactcctgtggcaactgatatatctttgggaggttttttatcatcagaaagctgagttatgatgtatataactgctgcaacaattgata

SEQ ID NO: 90841 - DNA, 424 bp, Glycine max
  Clone ID: PAT_MRT3847_53040C.1
ctcggcgctggagaggacacgatgagaccgaatctactgcttgagtcatacttatctctgcgatgatgtataagagaggcataggatagatgaatactagtatgtgaataatacaaatgcatagctactgaaccagctcaaggatttgaaggcggagctagcatgtgctgcgcgttgtcaaggatacacgacgggccctatacaagctgttgcaaagtaaagaggtgaggctatcgatcgcgcacgtattgacggatatttcccagaagcagcaagcgcagctgagagaggcttacaagatgaagaagtatttagcacttgacctacagccaaagaagacacgagccattcgctgacgcattaccaaacaccatgtagtgtttgaagacggtacgtgagaagacgatcgagctgctctttccac

SEQ ID NO: 90842 - DNA, 456 bp, Glycine max
  Clone ID: PAT_MRT3847_53041C.1
ctgggatgccagtttcgaaccgagggtttgaagctcatgctccaagccaacaagttactcaggaaactgacaacgatacattggacagtttataatttaacgttgaaaccagtagcatgttttgaaaaggttttgttattcattggaagctcaggagtcatcttttgaagaagataaccatccttctatatttcgctctattttcattcaaggttgtgcttcatatgaacaaaatccatcttcttggaataaagttgtagacagtgtgaagagaagacacacttaaaaggtctgtacttatactgggtcagttcaatttgttgagatttgtttcctcggttaagagcagtggaggtttccttttggttaaaagctttttggagacacttgcacaagaaatcctttgatgccccgggacttttgttctttgcagttaacactgtatgatactttctt

SEQ ID NO: 90843 - DNA, 183 bp, Glycine max
  unsure (1)..(183): unsure at all n locations
  Clone ID: PAT_MRT3847_53042C.1
gccattgaacggnccacgaaaaagccaaaggtgaattaaggcgggacccccgaggcaccacggcanaagcnagaaaagacaaccccacaaaaaggacaggcgcaccacacagcaacggaaagaggcggagacaccaaaaacagaggcgcccaccaaagcggggcagaagagagagcaagaaac

SEQ ID NO: 90844 - DNA, 336 bp, Glycine max
  Clone ID: PAT_MRT3847_53043C.1
cagcattcaatggtactaaagctatttcggaaagggtaagtcatatatgactcatttttttgtctcattgagatattgtaatgacaattgcttgagaaacaaaccataatcatattgaattttgctactggaagctactaagtagagcatacaaaagtttgtcattataattcggtgtttgctatcaaaacttgtcacataagaatgagagagtcttgtccttagttatctcttattgtctttcttgtacttaattttcattttctattataatcaattctccttttaaccataataagtacttagagcataaatgccgattggactattattttt

SEQ ID NO: 90845 - DNA, 264 bp, Glycine max
  Clone ID: PAT_MRT3847_53044C.1
ctcacgcgtcctgtccgtccttttttttcttttttagttgttaatgatctaagtttcccgtttgattttatattatttaaaaacaagcctttcaaatcatccttgcaatgcatattgatacaaaccagaatttactaaatattctgctgatgctacattcattcaaactctgatattaatgaaaatatcatttatcctaaatacaaatatgctattttaaatctatattactgttataatttttaaccaaataacttttaccta

SEQ ID NO: 90846 - DNA, 811 bp, Glycine max
  Clone ID: PAT_MRT3847_53045C.1
cccacgcgtccgcggacgcgtgggttcagaaaacgtgccaaacttgagcgacgtcactaagaagaccaaaggtcggcaaaagatagagatgaagacgatagccaacaagtgtagccttcaagtgacattttcaaagcatcgaactggagttttcaagaaagcgagtgagcttgccaccctttgtggtgtggaccttgctgtgattatgttctctcccaataaccatgtttactccttcggtagccctaatgtggattctgtaatccaacgttatacgacagagggcccacctcccctcttcacccaagacctcaatgaggccccttgcaccatggatgagggtgagctccaagcacacctcaactgtttgtccaaccaaattgacgcggagaagcaacgtgtagaggatctaaaccatttgttgatggctgcgaaggatcacatctggtgggatgtgccaattgaaagcatgagcaatgcccaactcgagaagtaccataagatgttgaaggagataaagttgaaacacatgagacatacacatggagaatgatctatttttgggttcttttgatttcttcatatgagatctatcattgttgatgtcctacttaaatttttagtttgtgtttttcaattctggtttagaataagcactagcttaatcggtttcatgtgtgggacatggttaggactgattatctagggtttaggttttgttatcttaaatataatcttcatcatgttgttggtgaaccgtgttttctttatgttgtttctttgatttttaattggggattgtagttgttcc

SEQ ID NO: 90847 - DNA, 559 bp, Glycine max
  Clone ID: PAT_MRT3847_53046C.1
ttcgtccgtttaattttaaagttttgcttttcttattccctctgctttcatttatcacttatggcgcaattttgccaaattatgaggcaacagcaaagaatgggcccaacgaaacgccaaaatttcaaaacaacgatttgattggagacaaatttatgaaatgctgcaaggacaatgaaatttcatgctcagaggtttgcacttacccaccacctgctttttcattttctgaacaatggtgtatgatgacttatatttcggattttatcaagtgttacaccggcggacataacaacaccgaatgttgcgaagaccatggcgttgttggcatttatggggcatgccgggacttttgtgacggcacccaagcgtatacgatgagtccatcatatttggtttgtggcccagtcacaaacatcatctcaaagtgtaaccgtgactccattaaacacaatgattgagaacatgagagtgacggaaattagacatggaaaccagaaatagtattcaaaatatcttttttcttcaagatttttttttgttaacataaattacaatt

SEQ ID NO: 90848 - DNA, 253 bp, Glycine max
  Clone ID: PAT_MRT3847_53047C.1
gtgacagtgggagaaagttaaaacaagaaatgaaaatacaaggtgacaaaataaggatacaaaatgatttgatgagatggattatgcatactgctgttcaattttctaatgctacaaccataagagttttaaatcctgacaagctcacataacaagtacagaatattgctctggagacaagtgactatgatggtgcaggatgactggatgttcatccatgatacttcacaacgtatatctacattaggtgatt

SEQ ID NO: 90849 - DNA, 191 bp, Glycine max
  Clone ID: PAT_MRT3847_53048C.1
ccgggaattttccgggtgcgactccactgcttcccgctcctatgcagcaagctagaagagcactctggactgctctcatcaataaccggctctcaaaacctgatgtgtctctatcccagggagagactgtgcatagctgatggcagactactcaccgcgctcggccatgttcaagatatgtctcatgagag

SEQ ID NO: 90850 - DNA, 272 bp, Glycine max
  Clone ID: PAT_MRT3847_53049C.1
aaagcttgtttaaataacaaataaaaacaatatgggctgtgttattttcaaacagtgcttataacaaaaaatagacttattaaacattggacccttaaccctatttataaacattttttaatgcccacaccaaaattccctacttttgtaaagagacaacttatgaagactcataatatgccaattcttctactatcaatgctaaccaagtcaagacaaggttaaacaaagcctatttttacctaacattatcattatgagctacacctcaa

SEQ ID NO: 90851 - DNA, 424 bp, Glycine max
  Clone ID: PAT_MRT3847_5304C.1
actcgcttgcacctcgtagcttgatccttagagggcgccctcattttacttccatttgcttttccaaagcaactattctttcaactggcagggaaactcacaagttgagatactgaccttcacacaattcattatactgcatagtacaaactaaacactggtcaccacaaagaacacgaccaatatcacaccccgatattgtcagagaaaaatgaggatagacaaaacgaatatgctgagccccattgagaagtgacagacattatttaagcccggagtaaaatcctgaggagaaagtttcatttatgcccccggaaatacatgcatattttctgaagcaccctaaatcttagaatagcctaaaagcaaaacatgccaaacccaatcaaaaacaatatccctcccatacacggtctgaaaagac

SEQ ID NO: 90852 - DNA, 772 bp, Glycine max
  unsure (1)..(772): unsure at all n locations
  Clone ID: PAT_MRT3847_53050C.1
taggatatggtgcaagtgctgtgtgtccgtacttggcattggagacttgtcggcagtggcgtttgagcaataaaaccgtaaatctgatgaggaatggaaagatgcctactgtatcaattgaacaggcacagaagaactattgcaagttactgtggtgcacaaatatttgaagtctatggattagggaaggaagttgttgatcttgcattcagaggaagtgtgtcgaaaattggtggattaacttttgatgaggtggcaagagagactttgtctttctgggtgaaggcattctctgaagatacagctaaaaggttggaaaattttggatttatacagttcagaccaggaggggagtatcatgcaaataacccagaaatgtcaaagttgctccacaaagctgttcgtcagaaaagtcaaagtgccttttcagtttatcagcaatatttggctaatcgacctgtgaatgttctccgtgatcttcttgaattcaaaagtgatcgtgctccaatacctgtggggaaggttgaacctgcttcatctattgtgcaacggttttgcacagggggcatgtcacttggagctatttccagagaaacccatgaagcaattgcaattgccatgaacagaataggtggaaaatcaaattcaggggaaggtgggngaggatcctattcgctggaaaccacttacagatgtcgtagatggttactctccaactcttccacaccttanaggtcttcacatggggatactgcnactagtgccatcaagc

SEQ ID NO: 90853 - DNA, 284 bp, Glycine max
  unsure (1)..(284): unsure at all n locations
  Clone ID: PAT_MRT3847_53051C.1
ttctnagttatnaatagtttanaaaaaaagaagaanagaaagttaaaaaagtnactcctcatgaattgntgcnacctcagatagttttnncgtgtnccactntcnagttagaatananagaattatgagctgtgaactcttatgattnatcntaatgttcagatggnnatctgggtctttcgtgatatggaggantnctannctgctggtcggtcctgtngatgaaatcctgaaggntaagaatgnatncgcctataccagtgctgagcngtcggtngntaant

SEQ ID NO: 90854 - DNA, 4320 bp, Glycine max
  Clone ID: PAT_MRT3847_53052C.1
aagtggagcatctcagaactgtgggcccgtgcttctcactggaggggtgctgcacctgcagatcctgcgttaacaccgtcattgttatgctccaacgttagttaactcctgttggtgctttacaacttaagaccatctatgtcttgtaggttaggatgcaagatatttgttgccgtccttggagtgggagacgttgcggctggtgcgtttgagcaattaaacagtggatgagtcagaggaggtattgaaaggccgtttgggtccaggcatgatgataacggttgatttacttggcggtgaggtctatgagaatacagaagttaaaaaacgagtagccttatcaagcccatatgggaactggattgaagaaaattttggggctttgaaactcgggaacttcctttttggtgctgctgtggaaaatgacgtcgttataaggagagcacgggcatgtgttgatgtgagaaacgcgcttgctgaagctgtggttgaaggtgcaggagatcattgttgtgagtacatgactggaggctgtgtggttgtcttgggaaaagtgggtagaaatgtagctgctggaatgactggaggattggcttactttcttgatgaggacaatactttcatacccaaggtaaatggagaaattgtaaaaattcaacgggtgtcagcccctgttgggcagatgcaactgaagagcctgattgaagctcatgttgaaaaaaccggtagtacaaaaggtgcggctattctgaaggactgggagaagtatttatcactattttggcagctggttccacctagtgaagaggatacccctgaggcaaatgccaagtacgacacaactacggcagatcaggtcacttatcagtctgcttagggtgacgatgcaaggttatattaaatttattagaccaggctgtggaactggagccaactccctcagttgtatcggatatgccttgctgttggtacaagttgatcagcctctaatccagaatggcctgcgaatgttcagcttcaattgtagcagatactgctcagtgctttagcactcaccagtttgcctgtttaataggatatggtgcaagtgctgtgtgtccgtatttggcattggagacatgtcggcaatggcgtttgagtaataaaactgtaaatctgatgaggaatggaaagatgcctactgtatcgattgaacaggcacagaagaactattgcaaggctgtaaaagcaggtcttcttaaaattctttccaaaatgggcatctcattgctatcaagttactgtggtgcacaaatatttgaagtctatggattagggaaggaagttgttgatcttgcattcagaggaagtgtgtcgaaaattggtggattaacttttgatgaggtggcaagagagactttgtctttctgggtgaaggcattctctgaagatacagctaaaaggttggaaaattttggatttatacagttcagaccaggaggggagtatcatgcaaataacccagaaatgtcaaagttgctccacaaagctgttcgtcagaaaagtcaaagtgccttttctgtttatcagcaatatttggctaatcgacctgtgaatgttctccgtgatcttcttgaattcaaaagtgatcgtgctccaatacctgtggggaaggttgaacctgcttcatctattgtgcaacggttttgcacagggggcatgtcacttggagctatttccagagaaactcatgaagcaattgcaattgccatgaacagaataggtggaaaatcaaattcaggggaaggtggggaggatcctgttcgctggaaaccacttacagatgtcgtagatggttactctccaactcttcctcatcttaaaggtcttcaaaatggggatactgcaactagtgccatcaagcaggttgcttctggaaggtttggtgtcaccccaacattcttggcaaatgctgatcagttagaaatcaagattgcacaaggtgcaaaacctggtgaaggtggacaattgcctggaaaaaaagttagcatgtatattgctaggttgagaaattctaaaccaggagttcctcttatatctccacctcctcatcatgacatttattctatcgaggaccttgctcagttgatctttgatcttcatcaggtgaaccctaaggccaaggtgtctgtaaaactggtggctgaagctggaattggcactgttgcatctggggttgcaaagggcaatgctgacattatacagatttcaggacatgatgggggaacaggagcaagccctataagttccatcaagcatgcaggaggtccttgggaacttgggcttacagaatctcaccagacactcattgaaaatggacttagagaaagggttattctcagagttgatggtgggtttagaagtggagtagatgtcatgatggcagcaataatgggtgctgatgaatatgggtttggttcagtggcaatgattgctactggatgtgttatggcccgcatttgccacaccaataattgcccagttggtgttgccagtcagagggaagagttgcgtgcacgctttcctggtgttcctggggaccttgtcaactactttttgtatgtagctgaggaggtaagaggcatattggcacagctggggtatgagaagttggatgatgtgattggccggactgacttgtttcaaccacgagacatatctctagcaaaaactcagcatctagatctgaattatatcctctctaatgttgggttgcctaaatggagcagtaccgaaattaggaatcaggagcctcataccaatggtcctgttctggatgatgttttgctagcagacccagaggttgccgatgccattgaaaatgaaaaggtggttaataagaccataaaaatatacaacattgatcgtgctgtatgtggacgtatagctggtgtcattgcaaagaagtacggtgacactggttttgctggacagttgaatataacatttacaggaagtgctgggcagtcatttgcatgctttctgactcctggaatgaacattcgccttgttggagaggctaatgattatgttgggaagggcattgctggaggtgagttggttatcactccagtcgacaagaccgggtttgaacctgaggatgcagctattgtagggaacacttgcttgtatggtgcaactggtggacaggtcttcgttagagggagagctggtgaaagatttgctgtcagaaactcacttgctgaagcagtggtggaaggcgcaggagatcattgttgtgagtacatgactggtggctgtgtggttgtcttgggaaaagtgggtagaaatgtagctgctggtatgactggagggttggcttacattcttgatgaggacgatactttcatacccaaggtaaacagagaaattgtaaaaatccaacgggtgtcagcccctgttggacagatgcaactgaagagcctgattgaagctcacgttgaaaaaaccggtagtaccaaaggtgcggctattctgaaggactgggataagtatttatcactattttggcagctggttccacctagtgaagaagatacccccgaggcaaatgccaaatatgacacaactacggcagatcaggtcacttatcagtctgcttagggtaacaatctaaggttacattacattgattacgccaggctatggagccattgttgtgtccctgatttgtacaggaattggagaggctatcaattaggtggaaatgctagccaaaatatgggattaaactatcccttgaaaccatggtgctgcatttattctcaagatcatttttgccagcagtatgaggaaccccgtatacatccatctgaagcattagcattctcttttgtatagccatgtgaaaggaaaaaagctgtatataaaatgcagttgattcgaatttgattgggacttttgtggacggtcaaaataaatagttggggcttgatatgcctgggtcccctttgctctcctgaattaatgaaaaattattgttttttccttgcacgatcgaagtgcgttgtttctctgcacttataaatataggatgtaattttttatgcttatattgttgataaagtactagcgggtttaatacatattatacatgagatgaatttacaataccttaagaaacatctcaagtatttgtaatgaataatatcaatggggaggtaatgattgggtacaaagttagaggctggtaccgacttcctctccggcgaaggcagagggtgtggccaacaatgccccgctcgaatttcaggacaccaagctcatgactggggtgaccta

SEQ ID NO: 90855 - DNA, 350 bp, Glycine max
  Clone ID: PAT_MRT3847_53053C.1
aaattctaattaaaaaacatattgttattttctaaaaacaatgctaggatcttttaattaatttctcttatttatattcactcctactttattcaatcatatttctcaacaaaattcccaacctacgcttcttcaatccaattctaatattatccatatacccttacttaattctctagctcttgatcgcaacctacttaaatcctctattaatcttaattcactaactctcaaaaaacacttaaacttatcacaacactaaattaaacattttaacaatttaaactatcaaactaacattaaatctcaattatagattccaatattgaaatttttaatatatcctaaaa

SEQ ID NO: 90856 - DNA, 252 bp, Glycine max
  Clone ID: PAT_MRT3847_53054C.1
ccgacctttttttttttttttttttaaagaacaagcccagatggatattctttaacaattaacaggaggtgcttggttattttcagttataggaactcccaacatgagggtggcccctaaacattttacatgaacatgacaggccctttccatggtcttgtacacggaacagagggatcacattgggctcatgacttattacctagccttcagaaggatctagaacataaaaagttgcgctaaaaatgttta

SEQ ID NO: 90857 - DNA, 531 bp, Glycine max
  Clone ID: PAT_MRT3847_53055C.1
ggggggggaaaaaaaaataatcttgggcctgggttattttttcaaattctatacgaaaaccgggctagctaaaaaataaaaaaccgcggggggggcccaaaacaaaatagccccaaaaaccccttgggctatataaaaaaataggagcaatttcaaaggctataaccctgcaaaggcttggcccattttttggccctggaaggatcatgaaagccccagttttaaacactggtattcctaccaccaccaccaccacctggggtttccccattttctgaaacatcacctttatggtccccaacccctacaacagtttcccctggcctcctaacacactcatggatttccccttcaagggggctatacccaacatacccatgggggcgggccccaagggctaaaaaaatcctttttttttctccaccttttatctctccaatttttaagacttttccacttccaactttttccccagccccacatatttttaactggatttcgcgcacaatgcccccaagcattttggccaaa

SEQ ID NO: 90858 - DNA, 548 bp, Glycine max
  Clone ID: PAT_MRT3847_53056C.1
ctaaactcatgagaagcagattgcttccagaagggtatcaagtacgttttatatggtcagatgagaaaaaaatatgggattctcaattccctaaaccatttgatgtgtgtcagacatatgccttgtgtggtgcaaatgctatttgcgatttcaatggaaaagctaaacactgtggatgcttgagtggattcaaagccaactctgctggttcaatttgtgctcgaactacccgtctagattgtaataagggaggtatagataaatttcagaagtataagggaatgaaattgcctgacacatcttcatcttggtatgataggactattactactcttctggaatgtgaaaaattgtgcttgagcaattgctcttgtactgcatatgctcaattgaatatcagtggcgagggaagtggctgcttgcattggttttctgacattgttgacatcaggacactcccagagggaggacaaaatttttatgtacgaatggctacagttacagcttcagagttacaattacaagatcaccgctacagcaggaagaaa

SEQ ID NO: 90859 - DNA, 414 bp, Glycine max
  Clone ID: PAT_MRT3847_53057C.1
cagctgaaaagagaggctttttaaacaaatcctcacttaccattgctctgtgagagatagttaataacaaacctttaagttaggtgaagccttaatggcatccataaaaaaatcggagggacaaaattcactgataacctccaatgattaaaaggatagagaatctgggcttaaaatcactaactacagctttaattcgcgggaaaataacctactgattatgtttctcgttagctggccctgaaaaaacctcaacaccatctagttggcccctgatgtctgtcatggatctcagcatagccttagtgtggcccttgggagctgaaactttatctctgtttcacctgctggaaactagctttaagcatgcatcttaagggtgattgtagctactctatgggggggggatgagcc

SEQ ID NO: 90860 - DNA, 957 bp, Glycine max
  unsure (1)..(957): unsure at all n locations
  Clone ID: PAT_MRT3847_53058C.1
tgcttacaggatttcgggttcggtcctgcggaccgccccggatggacggcgaaaaaagaaaaaaaaaactttgctatattcttctctcgtgttgtatgtctcttctttcttgatgctatgttgatgactggataaaatctgagacagaagggtagtctctagaaacttgacagagctaattaagagaatcttggtatttataggaagtagattactttattaactgggtaataagtcgttgtttggaggctatagatggcgatgcaaaccgtttatctgaaagaacatgaaggacttgtccacagttctgttgggcagttgtcatctgtaacttcagctccctggtggagtgccttaggatctcaaccagtttacggggagtattgtggtcaaatgaagtccttttcattggagatttccaactatgtggaccaatttggtgctggtaagcaagcggcacgaggagttgagcaattgttggataaaggacatacaactcagtttaccatctttccagatgattgtaagatgtcaggtgatgcacaaaatcctcaggcaacattatcactgcaatcatcactggctgagccccacaatcgttttgagataggggttaatcagcctatgatctgtgcaaaatatccttatatggatcaattttatggactcttctcagcatatggacctcaaatttcgggacggataatgcttccaattaacttgacatccgatgaaggaccaacttacgtaaatgctaagcagtaccatggaattatcagacgtaggcaatcacgtgcaaaagccgtacttgagaacanaatgataaaacgtcgcaagccttatatgcatgaatcacgccatctacatgcgacgcggcgaccaagaggatgcggtggtcgcttcttgaacacaaaaagctctactgatggaaatggtaaaaatgaaagtgaagtgatt

SEQ ID NO: 90861 - DNA, 484 bp, Glycine max
  Clone ID: PAT_MRT3847_53059C.1
aaaaaggccaaaagggtttccatagccagctaccacaatcagcttctcactaggtttaccaaaaaactgaagccaatgcagggggcaaaaacttggtgggtacaaaaaccctgccccaaacccccattcaacaggcaagctactttaagggaccccattcccttaatactaaaaaaataagggccccccaccgcaaaaggggacccatcatgccccccaataaaaaacccataatgggtcaagttctgttatcaaaacccaccccataaaaaaaagggaaaaacttcaaggggaccagaaaaatgataaaaaaaagcccctgcagttatataaaaaaaaactatttcatatcccggccatccccaactgggcggcaaaaaggactgaccgcaaagaaagatcccccgaaaggaaaaggagggaatagagcatttgggttaccctaaaaaccccagcttataagagggcaaattctccatggaaa

SEQ ID NO: 90862 - DNA, 459 bp, Glycine max
  Clone ID: PAT_MRT3847_5305C.1
aaaaaaaatattggggaaaatttttttttttacgaaaaaataaggatacaccagcccctttggttaatccagttatccatctggggggggtcccttttttatgaaaaaaacctagggcttcttctgacccttttaaaaaaaaaccctcaaacccttaaaaaaaaaaaaaacctccctaaagcttttttttcctacccaggccctttaaattcccttttaacggtgggaaattggctggacccccctaaaaattgggggctgggaaaaagggccttttcccccccccacaaattaccttttgggcacttttaaaacaagggcccttggccccccttttgacaaaaaaaaaatcttttgggttttcaaaaaaaaaccagaaggttctttttttaacagccccccttttaaccccattttcaaaggtttcacccctcaatcctgaggggtccaaagcaaaaa

SEQ ID NO: 90863 - DNA, 426 bp, Glycine max
  Clone ID: PAT_MRT3847_53060C.1
ggcattgtttttcagcaacaacagctcctcccccatcgcaggagctggacttggacaacctcaaactcctcaaagtcctaggaaaaggcgccatgggaactgtcttcctcgtacaagacacaaccaacacccccttcgacctcaaagtggtggacaaaacgtgcgtccacgcgaagctcgacgcggaacggcgcgcgcgttgggaaatccaagtcctctcaacgctctcccaccctttcctcccttccctcatgggaacgttggagtccccacagttcctggcgtgggccctaccctactgccccggcggcgacctcaacttgctgcgctaccgccaaaccgaccgctccttctcccccgccgtgatccgcttctacgaagccgaaattttctgcgctctagaccacctccattccatgggcatcg

SEQ ID NO: 90864 - DNA, 268 bp, Glycine max
  Clone ID: PAT_MRT3847_53061C.1
gactcaaacgtccaacgacgacagaaaggggttgcgtgtgtgcgtgacataagcaagatgaaagaatatcatcaaggtaaagtagattccttacgagacattgcgttcaacgagacatgctacatagctcagggatcaccagctttgtccatagatgaatccactcaggccaggaagttccttcagtcatggaagagggacgtgtatcctcaaagattggcttcaagtcgtgtcatcgctggtcattgggaaacctcagttcacacgg

SEQ ID NO: 90865 - DNA, 778 bp, Glycine max
  Clone ID: PAT_MRT3847_53062C.1
ctttgtttttttttttttttttttggttaacagttaacttttaactgctatggatttttttttcattgtttaattaaaatgcctgtagtataagccattataccgtgcaagaggtttacaaatagagtaacaaagctcacctaaaggattaatattatacagatctctactcaactaaaatatatctaattatatgtacaagagtaaataaatttatggatattataccatagaattttggttagaaggatctacggctgaaaggttattattgcattgcatctcctctagcctcttgaaattactgcacttgtgtttagtggaatctttgcaatgcaatgcaactccatctattgaactaagagagaagcaagcaaaatcatgtcctttgttcattaagtctcctctcagcagctacagcagctgccactgatggtggcaagtgtctaagattcgtgtccctgttaggattttcatcactttctggcattgttagtggtgctctagaaagcaaggcttccacatccttcagggttagaacaggttgatcttgatttttagtgttcccactgatgaacgaatgattgctcctgcttctgttcaatttatatatgctctcttcaaccgtgtcttttacaatgaaacgatgaatgagggtcttatttttttgtccaatccgatgtacacgactgattgcttgtgcttcggcagctggattgagtaatggttctacaaggactacatgctgtgcttccatagattgagtccattggctcca

SEQ ID NO: 90866 - DNA, 277 bp, Glycine max
  Clone ID: PAT_MRT3847_53063C.1
gtcttgatgtaattaggtgaatagtggtttaaagtgggaaattgtaataggttcacaatcccaacaacatacaaaccttatgcataaggatgaaagcctgagggagcctagtgagataaatagaatacattaatggcattaagctgattgccacttttcaaatcttgaaaagcctgataaaccagttgaataaatgaaaaaaaaaacactcgcgaatagggggttggggtctgggcgctaagggtggtaaatattttaaaaagttgaaacggggaaa

SEQ ID NO: 90867 - DNA, 108 bp, Glycine max
  Clone ID: PAT_MRT3847_53064C.1
ctctttccttgggtctaacaaaacgttaatcaaacgtttctacgatgtgcagacacgtataaggagtacctagatatgtgagactgagaaatcataggaggcagattg

SEQ ID NO: 90868 - DNA, 458 bp, Glycine max
  unsure (1)..(458): unsure at all n locations
  Clone ID: PAT_MRT3847_53065C.1
aaaagggggcgaccgacgcgtacgataaaattaaaaattactcnatttttatttttccaaaatcatcaaatatataagatggccgcgacttttaaatgaacggcagcacttcatatttatcttattactatgcttaatgagcaactccctacttttttagaaccgctccactttaacacatttataaacccccatcatcttataaatcaattaaacaagaactaataaccaactcatccttctcaattatctatatctaaagaactattcaaaacaaaaaaaaatatacaaaaactatctattataacaacttaactattgccaagcatataataacaaatatcttatttacttttaaatcaatataaatatacatatctattaatacgtcaaacaaaaaaataaaaaaaaccattcatatatatactctaatatctaaaacgcctattccttatatt

SEQ ID NO: 90869 - DNA, 283 bp, Glycine max
  Clone ID: PAT_MRT3847_53066C.1
aatacaaaggttcagtctgtgtattgagaacaggtgcatgcacaacagtcggactcgacatcgtggagaaaagcacaacaagtaattcttgtatacaagaacttgaattcaatgattcactgaacattgtgacgtgcaacttttgtgcatagatgaactggatgtgtccagtccaaacatactaatgaaactgggtagactattaatgaacaaaagctgagacactcaatgacatgcttttggttggaacagagtcattaactcttgcgctcctgtgaatttt

SEQ ID NO: 90870 - DNA, 673 bp, Glycine max
  Clone ID: PAT_MRT3847_53067C.1
ccacgcgtccgggcaaatccaaccattgatggtattcgatctgtcattcaaaggattggtagctccaaaggtggacgtccaatactttggcataatatgagagaagagcctgttatttacatcaatgggaagccatttgttcttcgtgaagttgaaaggccaggaaaaaacatgctggtctttaagggcattgaccgtgaaagagtggagaaaatggaagctcgattaaaagaagatatcctacgggaagctaaacagtatggcggtgccataatggttattcatgaaacagatgataagcatatatttgatgcttgggaggatgttacctctgatgtgattcaaaccccacttgaagttttcaaaagtctggaagccgaggggttgcccattaagtatgcacgtgtgcccatcactgatggaaaagctcctaaaagctctgattttgacactttggcaaataatattgcttctgctgcaaaggacactgcttttgttttcaattgtcagatgggtaggggcaggacaagcactggtactgtcatagcttgccttgtgaaacttcgcatcgattatggtaggcccattaaaatactgggtgatgatgtgacccatgaagaatcagaccgtggttcttcaagtggagatgaagctgggggttatgtcactacat

SEQ ID NO: 90871 - DNA, 262 bp, Glycine max
  Clone ID: PAT_MRT3847_53068C.1
acctgctgttagatcctccacaacagaccactcggtggatggttgggttatacttgagagagtttctgatgatgaattcaataactataagcttgtgttctgtccacagcgtgctgtggatgacaaatgtgtggatattgggattagtattgatcatgatgatggaactaggcgtttggtggtgtgtaagaacgagctgttagtggtgtagtgtgcatgtgtgggtagagagtggctggtggagagggataatgggctttct

SEQ ID NO: 90872 - DNA, 800 bp, Glycine max
  unsure (1)..(800): unsure at all n locations
  Clone ID: PAT_MRT3847_53069C.1
aagattccttacgaggctgatatcctcaaattatccactcgtgttcttgtctttagctttatacttactttctactgtatcatctagagaagtcagtgaaggccaaaggggcttcagcattgatcttattcaccgtgactcaccattgtcacccttttacaaaccttcactcaccccatcagatcgcatcataaacactgccttgcgctccatttatcaattaaatcgagcttcccactctgatctaaatgaaaaaaaaacactcgaacgtgttaggattccaaaccacggagaatatctcatgaggttctacatcggtacccctcctgtggaaagacttgctatcgcagacacagcgagtgatcttatttgggtacaatgttccccttgtgagacatgttttccccaagacaccccattgtttgaaccacacaagtcttccacgttcgcaaatttgtcatgtgactcacaaccttgcacatcatccaatatatattattgcccacttgtaggtaatttatgcttatacacaaacacttatggtgacggatcatccaccaaaggagtattgtgcactgaatccattcattttgggtctcaaaccgtcacatttcctaagactattttcggatgtggatcaaacaacgacttcatgcatcaaattagcaacaaagtcacanggaatagtgnngtcttggggagctgngcnccattgtcgctagtatcacaactaggttgaccanatcggtcacaaatntctcataatgntttacttcnctttcacttcaacctctacaatc

SEQ ID NO: 90873 - DNA, 928 bp, Glycine max
  Clone ID: PAT_MRT3847_5306C.1
tgttcggctgcgagaagacgacagaaggggataactgagcgcttcgcaaaataaccatttctctcttttgtctctctcattttcaactctcaacaatgccgccggcgaagcgcaaagcggagggaactgctgcagctgccgcttcttctgcggcggctccgatgagagtcactcgtgctgcggcgaagcgcgccgccgcgagctccgaccctccgccggtgccggtggttaagaaggcggcgaagaaggccaaagttgctgctgctgctaagaagcagaaaaggaacgaaaaggaaaatgaagatgttccggttgagagcgagaacaaagcggaagaaaaagaagaaggaggagacgcctccgagaagaacgttctagacgcttccaacaagaccatcgtcgtcgaacactgcaagcaatgtaactccttcaagaccagggccaatctggtgaaggtcggccttgagaaggccgacattggaatcactgtgattttaaaccctgagaagccaaggaaaggatgctgcgaaaagacgacagaagggggtggcaagaagttcataactctcttggacttgaagcgtccatttaaaccaatgaaggatttggacatggacaaggtcatctcggacatcattgaggaaatatcaaagactagttgatttcagctgttttgcaagagcctttttatggcttgacttacagtgaagctagatatattttgttcacatggtagaaatcctacaatggaaacttgttcaaaatgtgttatagccatgtatgggagttttagtttgaggtgagacatcattttggatatgttccttgtctcggacaagtaccaattttaatttgcattttgagatcgaatttcttgttatcatctccaaaaaaaaaaaaaaaaaaaaaaaaaaaaaagcggccctct

SEQ ID NO: 90874 - DNA, 486 bp, Glycine max
  Clone ID: PAT_MRT3847_53070C.1
tacgaagacgacagaaggggaaatcaacaacccaacatcaaatagcaattcactagccaccaatctgaattttggccaatatcttgaaaaacagaaccgaaataaacaaatcctggactaaaacctaaatcaccattttgtcctaatgtgtacgatgtttgtaacttttctgttttgaatcaggccattatccaccttgtacagccttaggaaagggtatttgacctctttaacagattgccattttttttatttatttgtttttttcactgcagctgatggtggcttgggttcctttgagaaaccagctccatctaacaatctagaaagggagtgcaagaaaaagatggataacaaatgaactagagtagtagattgtatctttgaaagattaggctccctgtgtctgtataaaaattcaaacataaactacggttgcaagattatatcagtataactctggcctgtggctcactaatatgacat

SEQ ID NO: 90875 - DNA, 464 bp, Glycine max
  unsure (1)..(464): unsure at all n locations
  Clone ID: PAT_MRT3847_53071C.1
ttcggctcgagaatgaataacatggtccatacttttgttgttggtgatgatcagtcaacaccatatttggacaagctacattcttggctaaaacgggtaggtgcaaatgtcaaggcacatatttctgacaatgaactttgcattgaggaagaggagaaggaaaatattagtagtgtacatagtgaaaaacttgcatttgcatttggtttaatagattctcatcacacacctcaaattttacgtatagtaaagaatttgagaatgtgtagagattgccacgactcagctaagtacatatcattggcatatggatgtgaaatatatttaagtgattcaaatttcttacaccattttaaagatggtcattgttcttgtaaggattattggtagggcaaatatatgtgaaagagaatcaatgatttcaaaaatatggtaaactctctttgtatacttgntcttgatgt

SEQ ID NO: 90876 - DNA, 296 bp, Glycine max
  Clone ID: PAT_MRT3847_53072C.1
acacatgagtagggcctctttcaacggaggagcagaggacttcataggcccatgacgcgacacatgcaccacctaataatcataactgcacatcttgacatacaaaagacaaagacgttgaattttaaaacgttgacaagagataaaccgatcatcttattgaaatgaaaccaaaaccctcaaacattggcttgatttttgttggtgatgttgttcccaactggattaaacatgaaccgtttgattgaatcacttggactagaagggaatggccctgaatacgacctggtggtaga

SEQ ID NO: 90877 - DNA, 273 bp, Glycine max
  Clone ID: PAT_MRT3847_53073C.1
gcccttttgggtgttttttttttttttttttattcttcaaatttaaaaaattaaaaagggctcactcatcactaacaccagagaggaaattacggggacaggtacggggacaacccagattctcactaaatggaggaacactgtgccaacaggataagaatcatcacagcggggggggggcaaaaatcacataaacagaacacgggggtgaaattaaattaaggagggcgtgagtaattgaggaatcgcgggcttaattaactatccctaggt

SEQ ID NO: 90878 - DNA, 248 bp, Glycine max
  Clone ID: PAT_MRT3847_53074C.1
ctaataccaagaaatcctaatgatagtatcaaaactaaatataataccataaaattataaatattcaacattacaacttcatcataatgcaaaccaatgtaataaagtatgacagagtaagtgtaaatcttacataaatgaccaaatcagaagtttgataggtgaaaacttattggatcaaagaagttcttgtaattcttggcttagaacctaactcaaccccactagatcggctagtacgataagga

SEQ ID NO: 90879 - DNA, 469 bp, Glycine max
  Clone ID: PAT_MRT3847_53075C.1
tgtcatcactgtatgacgtcctccttctttgggggggggggggggaaagcgaaaggcggggaaaacaggaagccgtacagcgactggggataataggaacatgtaacgaaattaaataggagaaagggcaagatgagcatataggatttacggcaggagcggtgaacagatcgaattaagataagacgttatcagaaccgcgaaaaaggctagccacacgagtgtatattaggtaatgtggcaaccaaaggtaagtagtcatatgtagcaccaaaagcaggcgaatctgtgagtaaaatgggtggtaatgcagcagatttcgggcattaagatagcctgtgccagcacaaaggggtagtgcgtgcaagcagggcggaaagccgggcttcacgcaacatcgtagataatgacaggcctgacacgggtgccagtttgcctagttggcgggacactggtaattaaaacccgt

SEQ ID NO: 90880 - DNA, 583 bp, Glycine max
  Clone ID: PAT_MRT3847_53076C.1
cagcatcatcttttttgttcttttcttttgtggcgccaccaccacatactacccatcttccatcgttgatgacttgctgcataatgaaggaggccaccttgtagaagatggcgcatcatataatatgttagacatcataacatcctgtggagtaacaacagcccccccggcaaaagatgaaagatcccttactgttgtggagccttgcactaatctgctcaaaagaaggggagcaacaatcatctcccccccatatctcctctgtatcatcgacggccgccatccttgccgtcagaacgactcatcagcagcagtaatgctgcggggtggagtaactaccacccggtgtgttgttgtggatctaccaccaggacgagctgctgatactggtgatgacaacaatgcagctgtgggcggtcgtatactacttagaatagctgctgatgaagaacacaacaattagcttgtggtctgctcaccacacgcagctgatgacgactgatgcgatgatagtgtgagtattgatcatgatgatgataccactcgtcgtgtggtggtgtatcacaacacaccggtgctgcat

SEQ ID NO: 90881 - DNA, 642 bp, Glycine max
  Clone ID: PAT_MRT3847_53077C.1
aggtgggaaattaacactatcagattcaatattactaaaggaaatcaaagattaaagttaacacttcaaagtagtgttgaagatgaccaagcagcaaagtgctttcttgcaatatttgagagaattacaacccaacatcacataaagatgccaactgggaagcaaaaaaggcctatctatataaatattgtataaataaataagcttaatagctggggggaattaagatgtactccgtaattatatagttcacgttctttggtcctcttcaaaaaagtctattctcattgctttgaactccacatgttactggggctttagctctcactttcttcaagtaccaaataccagctccaattccaaatgcccctgcagctgaaacaccgctaactgtccctgcaatcacatggacctttctgttgtgccgtgttgcatcataatctttaccatgggtaggggaatttccttccttacaaaggcacatgaaactctgagtcccagtgtcaaatccacaagttccacctcctttgtaaggatcctggcactgaaggcagcgcctagttacgggaatgtcaaaatcaattctgatcccatattcaggaacttgatcataaggctgaggagcaccaacgtttctccaat

SEQ ID NO: 90882 - DNA, 2699 bp, Glycine max
  Clone ID: PAT_MRT3847_53078C.1
gtttatatgatcacaagaaaaacagtttttcatcagttctcaatttcaaatcagacgttaaaccttcaatccttcatgtcattatctgctttgtcttctacctctatcactgctgcaaaataaggttgtacttttaaattcaaagcttataaagaaagggtattgattttgacattatgcttatttgtgtattttgcagggagtagcttcttctttctaagttgacatatgcacatggcttctcttggggatataggacttgcagcagcaataaacatccttagtgcatttgccttcttactggcttttgccatacttcgaattcaacctataaacgatagggtgtattttccaaaatggtatttgaagggtttaaggagcagtccattgcaagcagggatatttgtgagcaagtttgtcaatttggacttcaagtcatatataaggttcttgagctggatgcctgcagcattgcaaatgccagaacctgaactaattgaccatgcaggcttggactctgctgtgtacttgaggatctacttacttgggctgaaaatatttgtcccaattgcagtcctagcattttctgttatggttcctgtcaattggacaaatagcaccttggagcgttcaaatttgacttatagtcagatagataagctttctatttcaaatattccaaccggatcaaatagattctggactcatttggtaatggcatatgctttttaccttctggacatgctatatcttgaaaagggagtatcagatagttgcaacaatgagattgcattttcttgcatcagaacgacgccgtcctgaccaatttacagtacttgttagaaatgtaccacctgatcctgatgaatcggtcagtgagctagtggaacatttctttttggtcaaccatccagatcactatctcactcagcaggttgtttacaatgcaaagaaactttctagtcttgtttcaaagaagaagaaaaggcagaattggcttgactactatgaacttaaatattctagaaatcaatccacaaggccatctaaaaagactggttttcttggcctttgtggtaatagagtcgatgcaattgatttttatactgatgaaatcaagagactatcagaagaaatagaattggagaaacataaggtgatgaagaattctaaatatacaatgccagctgcttttgtttccttccgaactcgttggggtgcagctgtttgtgcacagactcaacaatctagaaatccaaccgtatggttgactgaatgggctccagaacctcgtgatgtgtattgggataacatggcaataccatatgtttcactaacaataaggaagcttataattgctgtagctttcttctttttgacattctttttcatgattcccatagcattcgtacagtcactggctaacattgaaggcattgaaaaagcagcacctttcctaaaatcttttattgaaatgcaattcataaaatcctttatacaaggtttccttcctgggattgctttgaagatatttctcatatttctgccagcaatattgatgataatgtccaagttcgaagggtttataagcacgtctgctctagaaaggagagcagccacaagatattacatcttccagttcattaatgtatttcttgggagcataattactgggactgcattccaacagctagataaatttatccatcagtcagcaaatgaaattccaaaaacaattggtgtctcaattccaatgaaggcaactttcttcataacttacataatggtggatgggtgggctggatgtgctggtgagattttaaggttgaagccattgatattttatcacttgaaaaacttcttcttagtgaagactgaaaaggaccgtgaagaagcaatggatccagggacatttggtttcaatacaggcgaacctcaaatacaactgtatttcttacttggccttgtgtatgctgtagtcacaccatttctacttccatacatcatagtgttctttggcttggcatatgtcgtctaccgtcatcagattattaatgtctacaaccaagagtatgagagtgctgcagcattctggcctgatgtccatggacgtattatatttgcgttagtgatctcacagctgctgttaatggggttattgagtacaaaagaagctgctaactcaactccattgctcattactctcccaattctgacaatatcattccatctgtattgcaagggacgatatgaacctgctttcgttaagcatccattacaggaagcaatgatgaaggacacattggagcgcgcaagagagccaaacttcaatttgaaagagttccttcagaatgcatatatccatccggtgtttaagggtgatgatgacagtgacagtgatgtaatgagcgaaaactgggaggagcaagaacctgtacttgtacaaacaaagcgccagtcccggaaaaacacaccattgcctagcaaacatagcggttcattatcatcttgaatgccacttcttatgagcataaaactagagcaatagatagtttgaagttcactattggtggcactgctgcatgatatacccaaactctactctcttttttttctgtatataaatcagaatctagataatctttcaatgaagtatataacagaagtatgcaggtcaaattttgacagtctgatccgtg

SEQ ID NO: 90883 - DNA, 1083 bp, Glycine max
  Clone ID: PAT_MRT3847_53079C.1
ggctcgagcatgacttgagttctcattttccgttccccgcgacactcgacacactaaataaataacataacataaaatactatacacccctttcttggtgttcgtttctcatcacttcgtaaccaagatcatggaggaaaggaagcaatcgcgttacgtgaagctgactaaggacaatgtttctatggaagatatcacgcctggtgaactcaatcagccaattgaggttcctcagttggctgttcacaagtgcatggaatgtgggcagccattacctgaaagctatacacctcctgctgatgaaccttggatgactgggatctttggatgcactgaagatagggaaaattgcttgacagggctgttatgtccttgtgtattatttgggcgcaatgtagaaaccttgcatgaagaaactccttggactggaggagggccatgcatttgtcatgccatttgtattgaaggtggcatttctctggcaatagcaactgctgctgcaacttccatctttcctgctattgagccagggactgtatgtctcattattgagggtttattgtttacatggtggatgtgtggcattcacactggtcaagtgcgccaatctttacagaagaaatatcacttgaagaattcaccgtgtaatgcatgttgtgtgcactgctgctttcactggtgcgccctgtgtcaagaacacagggagatgaatggacggctctcggacaacattttttcagaaatgaccgttgtaaaccctcctcccgttcaagagatgaaatctaccgatgacaaggaaactcctgaaacgtcttcacctaacaacatcgagcatactgagttggagatagaggctgtataaggaaggaaggaatactatgcttttttaatagagaattttttcttttgacctttgactggagttctttcttcctgtttcattgggcgtgtcatatgtaggagtaccacatattactttcctcggctatagagagccaaattataccgtatccttaattttgaaatgttttccggcttcaaccattaatcctctctgcaagagtctatcttttcattttggtg

SEQ ID NO: 90884 - DNA, 355 bp, Glycine max
  Clone ID: PAT_MRT3847_5307C.1
agaagtgaggaagcagtcatggctagcaacgtctttaatatctgtatctatgctaaattatgcccgacaaattatatctgttatgtttgtggtgcatcacggacaatcgcctctctctggtgcttcaatggctacttcttttgcctctgacactggattgagcttattggtgggaatggctagtgcttcctatactttctgtgcgcaatcatatggagcaatgcagcaccatatgttatgcatacacgtgcagagggctatgcttgttcttatgattgtcagcataaaccttgcatttatttgggcacatacaagatccattctggttgcccttgtacaacaccctgagatatct

SEQ ID NO: 90885 - DNA, 1576 bp, Glycine max
  unsure (1)..(1576): unsure at all n locations
  Clone ID: PAT_MRT3847_53080C.1
atcggctgcgagaagacgacagaagggggataaaagataggcatagccaagggtgacgttttgaagttgatgactggtggctcaagtaagcagcgttgcaacgctgtttcctttctgtttcttttcttcttccttccgacgagatctacaacgttgttgttgtttagatcttgaatagtgttttggtgttcggtgagatggaagaaaggaagcaatcacgttatgtgaagttgactaaagatcagacacctctcgaagacattacccctggcgaactcaaccagccaattcaggttcctcagttggacgttcgcaagtgccctgaatgtagacagccgctacctgaaagctatgctcctcctgcagatgaaccttggatgactgggatctttggatgtgctgaagacagagaaagctgcttgaccggactgttttgtccttgtgtattatttgggcgcaatgtagaaagattgaaggaagacactccttggactgggccatgcatttgtcatgccatttgtattgaaggtggcatttctctggcaatagcaactgctgctgcaacttccatctttcctgctattgagccagggactgtatgtctcattattgagggtttattgtttacatggtggatgtgtggcattcacactggtcaagtgcgccaatctttacagaagaaatatcacttgaagaattcaccgtgtaatgcatgttgtgtgcactgctgctttcactggtgcgccctgtgtcaagaacacagggagatgaatggacggctctcggacaacattttttcagaaatgaccgttgtaaaccctcctcccgttcaagagatgaaatctaccgatgacaaggaaactcctgaaacgtcttcacctaacaacatcgagcatactgagttggagatagaggctgtataaggaaggaaggaatactattgcttttttaataaagaattttttcttttgacgtttgactggagttcgtttcttcctgtttcattagggcgtgtcatatgtagtgagtaacacatattattttcctcggttatatagagtcgaaattttcccgtatgcttatattggactattttcctgcatcaatcattaatcattgaagatcttaatcattgattttactctaccggagtttccttatattgttcctgcttcagggaccgatcataccatggtaaatatgagaaacttggaggattatgtttctcttattgtcgatgcaactggacgtctggagtttcaagacaagtggaagcttttaaatctggctttaaccaggttttctccattgatcatcttcggattttcaatgaagaagaacttgagcatgcttggagatacatagtttgatcatggggggggtatactatgcttttttaatagagaatttttttctttttatctttgactagagttctttctccctgtttcattggacgtgttatatgtaggagtgtctcataactttccttggctatagagagcctaacaaattgtaccgaatccttaattttttaatgttttccggcttcaaccattaaaaaagaaaantaaaa

SEQ ID NO: 90886 - DNA, 401 bp, Glycine max
  Clone ID: PAT_MRT3847_53081C.1
caaatttaaaccatagacccttcctaagagttaatgatgactttgaatgacccaccccaacccaatattctatatcctcacctcatacaatatttttatacatctaaaaaatgaaaaaaagttcaagaaaatgatctctaatgaataacacccgacaatttcgattcatccacacttactacaccaattgatgaagaaaatgtttatatccttgaacatcaaacctctaataaatctaacctctattaaattaacactgttctctgaaccaaacgaaaccaatcctagtctaccttactttaattgaaacatatcactccatttttccatgttcatctttccaaaaaagacacacttacattcacattcttttataataccaccacaaaattttcataaat

SEQ ID NO: 90887 - DNA, 553 bp, Glycine max
  Clone ID: PAT_MRT3847_53082C.1
aaaaaagggaaaaaacccctttttttttttttttcccccctaaaaaaaaaaatttttttttataacaaattaaaaaaacccctttaaaaaaaaataatgtaaaaaaagggccccagttttaaaaaaaaaaattttttttggaaaaaaaaattttttccattcaatttatttattcccccccaacctaagggcccccctttttttaagtgtgaaaccaaaccccccccctttttagggagaaacaatggggggcccccccccttgttaaaaaaacccccccccccccctcgggttctcactaaccggggggggaaacaacccctacaaagggttagacggctttttttggaaaaaaagctcttttggggggaaacaatccttaaaaaaccaaacccaaaaaacctgggcctttccattccgaggggttttaaccccccccgaaaaacctgattttttcgggggggtggacccttccccaaaaaaaaaaaatgggggggttaccatttttcctctcaccaaaaaaatttttggaggaaaaaaaaaactccccccc

SEQ ID NO: 90888 - DNA, 537 bp, Glycine max
  Clone ID: PAT_MRT3847_53083C.1
tgatttttgtgttcttgcatgtgttatttgctttgcctattaggctttcactatttaattaacaaattagtatttctaaatgaatatttccaattaaaataaaattatcattttgattcggcgttgcactgcatcgaataagtagctagtgctttacacaagtgtgtatgagtgttttgaaattggatgcaattttgaattttaaacatcattgtatagttatggttcaagttgagtgtgagaggattacaccattcaaatatcaggttgaactaactaaatttgtttttgcatcttattagttgaaattgtatatcttttgatcaagtaattgttaacaagtatttggcaaaattgtataatcactagttaccaatttttataactcctaggtttggataggttttgaagccaatcagctttttagacattcctaagctttgcattccttccggtaattaatcatacaacttctagtgatgacattcatcagacaatatttttgtcattgtccatttggtttaaactgttttttgt

SEQ ID NO: 90889 - DNA, 502 bp, Glycine max
  Clone ID: PAT_MRT3847_53084C.1
ggctcgagatttccttggcggtgcaagggtgtttgttttgaacatacaagaataattggccatggctaccgtaattagcgtctatgtggaacacatggtcgtgtgatcactcgctgccactgggaagggggagagggcttgctacttggtccactccctcagactcttacagagatatcatcacatgcccctttgtgaatgtagccctagggtcaaaagatagaacatcggacggccgtgaatacggtgggtaggtatctgagaactgtgtggcccatatgctatccgctgggacttacagcgatgacgcggctgaagctactgaggtagtcagctatgcggtccaggatcaagatgtccctcgctgctccactggtttgtacaagcatcacccactggcacatggcggcttagcttctcgaatgacgagacgctaccatagcacgagcatgctgtgattgacaacatgccactttctgatgagtgctggagaccatgatcg

SEQ ID NO: 90890 - DNA, 1274 bp, Glycine max
  unsure (1)..(1274): unsure at all n locations
  Clone ID: PAT_MRT3847_53085C.1
cccaagcgtccacccacgcgtccggaagacgacagaaggggaagacacattgattgcactaagggcatagaaatagacaatagaaggtggtttatgtttatccgcctccacttggatatctccgtcctctgtcccaaataacaaactaaactgctccaaaccaaacacaataatcaacataactcattttcgcagatctttctgttccttcaaaatgcaatcttccatttcactctcttcttcctacgctcccaccatttcgggaccacgccactcttttcccctctccggtcgcactctcgcgccttcgaatctccgtttctgcggcctccggcgacaggcattcacttccactcccctcaaccaccacttccgcctccgccgacgccgcctcccgcattccgccgcggtatccgccgcgctttgcgacaacggtactcttcccacctcgtccgtctagcgctcgcgcattatcagcgccggcgctggtgcccccggcgacgcgctttcacttccactcccctaaaccaccacttccgtctccgcccacgcgcctcccgcgttccgccgcggtatccgccgcgctttccgccaacggtaactgagggttttgaagtgagtggtgcctaagcaagttttaaagctaacacaaaggccttagctgaaaacgaaggggagggtcttgccaagttgatatacaggcctgacactggagagatactgggagttcatatatttgggttgcatgctgctgatctcatccacgaggcatccaatgcaatagcattaggaacacgtattcaggatataaaatttgcagtacatgctcatccaactttgtctgaggtgcttgatgagctatttacacgccgtcgagaagggtttgaaaacggccattgttgagggagacgtggttggagggacatgtgtgaacagaggatgtgttccttctaaggctcttttggctgtgagtggtcgaatgcgagagctgcggaatgatcatcacttgaagtcgctgggtttgcaggtttctgctgctgagtatgacagacaagcagttgctgaccatgctaataatcttgcttcgaaaattcgtggcaacttgaccaactccttaaaagcacttggagtggacattctcactggttttggaactattttaggtcctcaaaaagtgaaagttgtctcttccaacaatgtggtgactgccaaagacatcatcattgccactggttcagttccttttgttccaaaggggcattganggttgatgg

SEQ ID NO: 90891 - DNA, 365 bp, Glycine max
  unsure (1)..(365): unsure at all n locations
  Clone ID: PAT_MRT3847_53086C.1
anantctaagtnaacaacnnncngaccatatntanccagacncnacacantcatnctacanaatngacnananctctangagcacancacanaaccaatnacagggtccacatcangncngttncagcnaaatnatnngattacagagcnnnncngaangnnntcatacaatnanncngacngtgnggtnttcnttctcaggggaggntccgncttntanggaacggaccngttttanantcctcacggggctgggatgtngaaaactccggtgatgacttnggtgatcaatccagtngaagaggtcnntagaaattttaaaactggcaacaacnggtctccgagcagcatnaaaagcattngcn

SEQ ID NO: 90892 - DNA, 252 bp, Glycine max
  unsure (1)..(252): unsure at all n locations
  Clone ID: PAT_MRT3847_53087C.1
ggctaagcgactactgacagacccaaatccagctctacgtgaacgncctcatacaggtnagtaattctgttcaaaatgcataagctttttngcatataaattttattctgtataatctacattcctcaattaaaagagggcncatttttngtgatatatatttaaaatttggaatcaacgtcaagaagtatcatatgtcgggtaaganattttacaagggcaggtttcccttgtnganganggggggggaca

SEQ ID NO: 90893 - DNA, 338 bp, Glycine max
  unsure (1)..(338): unsure at all n locations
  Clone ID: PAT_MRT3847_53088C.1
cgcggcaccggnccggaaanccagggccgacctaagcaaccggtgacacacgggaaaagaacgggcgacgggggaaggcaatgacgcacgagcccccgcaggaccgacaaaaagggacacggcaaccacaaggggggaaacagggaagcaaaaagaaagagggggaaaagcggagcacaaaggaaggaaggcanacgaagcagaaaacaagaaaaaccccccaagagaaagaaaagaaggagggaaaaggcgcccaagaaaaaaaaacaggacaagacaggaaaaaggggacaacacaaaagcacaaaaaaggcaggggaaagacccaaaaaaaagac

SEQ ID NO: 90894 - DNA, 682 bp, Glycine max
  Clone ID: PAT_MRT3847_53089C.1
tactgctgcgagaagacgacagaaggggaggtgaaggtggggtggaagaataaggataagttattgaaagaaaggtgaaagaatccattggtatgtgcgatcgatcatctcctctgcgaaatacaatggagctgacagcccagcagctgagccaatacaacggcactgacccatcgaagccgatctacgtggcggtgaaaggccgagtctacgacgttacctccggaaaatccttctacggccccggcggcccctacgccatgttcgccggcaaagacgccggcagggccctcgccaagatgagcaagaacgacgatgacatctccccctccctcgacggcctctccgacaaggagatcggcgttctcaacgactgggagaacaaattccaagctaagtaccctgtcgttgctcgtcttctcaattaatcatatgataacctaagtgtattttgtactctatcatgtgagtggcatgatctctttctgtaaccgaactcaatcaccctttaatccctaataatattaataaaattcctctatccaaattctggatacgggattggatttctctttcaaaaaaaaaaaaataataaaacaataaatcgatccttggaagcaaggccattttatgggtgcgcaatttatctgtggacactgcctatcagaccaacattgtggct

SEQ ID NO: 90895 - DNA, 266 bp, Glycine max
  Clone ID: PAT_MRT3847_5308C.1
ggctcgagggaacaacctgcagtatgctacttgggatttttgagatttccatgctcctaccctcatgaaagggatgaactgcttctaggtatggaaactctctcatccggatcagcaccatgctgccaagccgtgatctgaaagtggatattcggcgtagagagctcgagatcacggcactcaaaaacctcctctataagaagaacttggagtgcattacacaaggactattgctgcctgtgcgcctgtgatattgtatgtgctgg

SEQ ID NO: 90896 - DNA, 206 bp, Glycine max
  unsure (1)..(206): unsure at all n locations
  Clone ID: PAT_MRT3847_53090C.1
ctatcatgcacctgaaccggccgcntgttttaaaagttcttagccgtttccaaacctcgagagcttacgtcgttcaatggcgagcgtcttgatatattatgcgcctgaatcggctattcgagagaaacgttatgaccttttgtaattcttcgagagcttcccgttgatcaaattctgagccgtctcgacatattatgccgccctaa

SEQ ID NO: 90897 - DNA, 338 bp, Glycine max
  Clone ID: PAT_MRT3847_53091C.1
gctcgagccaagcacctacgggaagcaattgttaagtctgagctcccaacatttccgaccacgaggcacacctctgtgtctaacaccacgtactatcagttcaattctgatactgctacaccgcatgagaagcgagaccaacagcagcaacggagcggggggtgtgaaactcagggaccactgattgtaaaagaaaggctctccaccgcatattatcgactggagaagatggcaatgacgtaccacataggactcctagatgaccggaaatgatctatgctgcacttgatgaccttgactgcggctaaagactgtttccctctgaatcaggagcggaa

SEQ ID NO: 90898 - DNA, 573 bp, Glycine max
  Clone ID: PAT_MRT3847_53092C.1
tttttttttaatgttaatcaagaaattaataataatgctctcataaaagcatagtggtagataatgaagacaatcgtatatatccaaatactgtagtttttgtctccgcattatggacaccctggaagaggcgcaataacaaggtttgagatgataaagagaaaccattaaatatgtgcctgcagcaatcaacccaacaagtctttgagtggcagagcctccatgacagcagcacctcagctcgagttcgaacaacgaaagtctgcaaagtgaaatcctcctccttttgggttcgtgaaatgtaatattgatgctgcaatatttcaggaactatatactactggaaaaaaaaggcctttttcccaaaaaatattattagttaatacatacccgtgtatatactatgataaaaaaacaactttaaagatgcataattttatgaattttattaaaaaaacaaggtatatttcttatataaataaaaaatacaacttaaaaaatctattctacttattaaggaacccgtttgaaaaagggaaagagtatttttcaatttgcaagaacatttcctgg

SEQ ID NO: 90899 - DNA, 493 bp, Glycine max
  Clone ID: PAT_MRT3847_53093C.1
ggcagagaacctattgcaattgcaacaccgcacccagaagtgcaccctgggctgtcccgtactcgatcgctgcctcgccggcggcgtcccctgcgcctccgtcaccgagttcgtcggcgagagcggttgcggcaagacgcagctctgcctccaactcgccctctccgcccagctccccccctctcacggcggtctctccgcctcctccatcttcatccacaccgagttccccttccccttccgccgcctccgccacctctcacgcgccttccgcgcctcccaccccgacctcccttgctccgacccctgcgaccgcgtcttcctacgcgccgtccactccgcgcacgaattactcaacctaatcccaaccatcgagactttcctcttgcactcgaaatccccgtggcggccggtgagaatcatcgtgatcgattccatcgccgcgcttttccactccgatttccagaacaccggatcggattttcggcggagg

SEQ ID NO: 90900 - DNA, 289 bp, Glycine max
  Clone ID: PAT_MRT3847_53094C.1
ccttgtctaccacaccaattttaattacatatataatcataaaatcacaaggacacgtttaatttcaaagatgggacatccttaagtcatatttgcacactttattaaatgctgtcgtcccttgttacttatgcttgttgttctaataccttccctgttcttaaaaacaactccctaactattcacacttaaagttcttataccacaccttttcaattttccctactctttcctcaaataaaatttattgtctactcctctcattttcctttcatggaaaactcacttt

SEQ ID NO: 90901 - DNA, 599 bp, Glycine max
  Clone ID: PAT_MRT3847_53095C.1
ctaggtataagataggatatgggatatttatgaaacattttcccaagctatattaacttgcaaactaacaaagctcctcacattaataacataagttaaggcgtttatcaggataattaaaactgtaattacaacattactataatgccttttaataatgatataaatccatttaatgaattgattatttacactttttttcatgattttattctttctataaaggtgaggtagatttgatattatatacttcacttttatataaagaacaaaattcataaaaaaaaaattgtattaaaaaatatttcaaaaaaatcatctcttaaatttattgacataatacaaaaaaaaaatgttttgataatttacgcaagtgacaaaagctagcttaatgtaagcatgatttcacccaaaaaatagagaaaaggaaaacttacactgaaagtcttctatgactgaatataccaacagtattgcgtccacttgcgcactccaaatcaacctgtccattagataagaaaaaagatttttggggggtaaacgtaaataattagtttatatacgcactttacaaacatcacaacaactgcgtaacttgg

SEQ ID NO: 90902 - DNA, 1370 bp, Glycine max
  unsure (1)..(1370): unsure at all n locations
  Clone ID: PAT_MRT3847_53096C.1
atctagtttgcnttgtgttgtgttgttagtttgccttggagtttcatgttcttatccagatgatgagagcttacagatcaggtttctagttccacgcgtccggtggttatgtagatatgagtctttgtgatgaggttcatggtcttggtgctttggtgtttttctttatggggtggttctagctagctagggtttgggtagtgagtgtaataaagttgcaaagtttttggttaggttacgttttgaccttattattatagttcaaagggaaacattaattaaaggggattatgaagtggagctccttgaagtccaattgaggatcttactgggtgaattgagctgcttagctatggatcccacagttctacccatcaataagtgcttttgtggtagtcttgtggcttccatatctggggagcttcatttgcctttatagtattaaccttctttggattgaagggagctctacacccttctcttcttttctctcataataatttaaatttgttatagactctaaactttaaatgttttttttttaagtttttccatttttctcttttgccatgatcccgttcttgctgtggagtaaccttgtccgaggtatgtgcatgattagatccatacttaatttgtgtgcatcacgaaggtgaggttgaaatgaactttgcttttttgaccttttaggaaagttcttttgttgcagtaatcaattttaattagttttaattgacactattacttttattgtcatctttgttagttttattgttgaattgagtgcatatttcctaggaaattctcttacctaacattttttatacagatctatgctcttggctcttgcccttattcttggccttgtgttggttatttgtctacatatttattgactggtcgatgagacatgtcacaattcttgggcttatttgttggtctaataaaaggagtgcttattgaaagatcaagacggagattcggttttatataaataaactaaagatgacatattagtgttttgatgtctcttcaggataatttttgtttgaaataatatggtaatgtcttgtctaaatttgtatacataattcttactgattttttggattgttggattttcataaataaatcttcaattcgttggcaattgtaaaatcgtttaagtttttttgttttttgattgtttattatagggtgtataggttctacaggaaggacttctgaaaatacttaatttttctgtaagggagattgatttttgcgaaacattatagtcgataggatttttgtattcctaaaattgcagactgggatatattctcatgccctaaatcgatttgtgaagaatattatcgtgttttacactc

SEQ ID NO: 90903 - DNA, 414 bp, Glycine max
  unsure (1)..(414): unsure at all n locations
  Clone ID: PAT_MRT3847_53097C.1
ccgcccttttttttnnttttttttttggagaacagattcaaatgggaaatcttaattattaacagggaggttaccgggatcattttaaagcttttgactaagcgccgaccgtccttgacctttttttttttttatggaccgatttaattatttaattttttggggaccgacctttttttggcgaaggcgccctttgcaaaagggtttttggctttaaggtggtggccgatgggatttttatattaaggtttggaaggttattaaaattttaccccccttccttgatggtttggcctaagataatattatatgggggaccacctatttgaatgaattttggcccacccctaggtttggtggtcaattttctccaaacttaaaacaagtaaaagaagttggttcaatctatttaac

SEQ ID NO: 90904 - DNA, 232 bp, Glycine max
  Clone ID: PAT_MRT3847_53098C.1
gatcttgagaaaagtgttcctacattggttggcattgaatgtcccaagggtgagaaacttcctcgtcggaaaatttttgacaaacctaagacgcagtggttgactattctccctatgtggtttgatcttgtggttcgtcgaagattttacattttgtgaggttcagtatgaggatagggggctagcttaactgtcacggtgggatcaccccgtactccatggaattgactgg

SEQ ID NO: 90905 - DNA, 397 bp, Glycine max
  unsure (1)..(397): unsure at all n locations
  Clone ID: PAT_MRT3847_53099C.1
atttttaccaaagagggaagatctgatctgcgtagatgacatcatggtacaacaagaggagagagaaaatgatccaaatatgggggaaaggaaactaaatcacgagccattaacctggaaactgatgaaggatggggtcatcaagcacgattcggatagacccaaatttgacatgatgcgtagatgtgtttggaagaggatggcacattaaggtcgagtcagatagaccaaagttgatcgtgatgcattgacacgtgtgagggatgccgcatgagcatgcaaaaccatgtatgcccaagaatagtatgtgtaagggcatcttaactacgatggacctgagattttgaggactaataaattgacatatacagnagttttgatgtgatcttgctggaaa

SEQ ID NO: 90906 - DNA, 400 bp, Glycine max
  Clone ID: PAT_MRT3847_5309C.1
ctccacttttaccattctcttctcgctcgcgcaggaaagagacatgcccgtgcatgcctccctgccggagattatatggtagggtggttggtcggacactccctttccctctgcctggccagagctaccttcgcctctccctgcctgcgtgggaatcgatcaactccctccctaaattgatggttcatactccccacccacattcttccttctataagaactaccttcatgcaaaacaatgaatgtacaattcacccagcgtgcctatgcacgaacttacggagggtgtacatgcatggcggacatttatgacacccccctctaaagatagatatttgtatagatatgcatccatcaagaaacgattgagggaggaaaaaagatatgtgcgagctccatg

SEQ ID NO: 90907 - DNA, 900 bp, Glycine max
  Clone ID: PAT_MRT3847_530C.1
cccacgcgtccgagagttttgaggaagaagcatagcgatgatggcatgcagtagtagcacaatgcagagtgtgtacccgagggtgagtggagcgaatttccacgttccgctatcttccccttctctcgttcctatttacaacaacaacctctccttttcaaagctacgcaattcaattcatctcgcggcggtgccattgccgccgttaaccaaagcctctgcggggaacggcggccccaccgacgagggagtgtctttagggacgatgaagcttcctttggacactgacctccagagattcgattccttgctctttcagtgggcaaacagcctttgccagggagccaatctgccccttcccgtgcctctcaaggtggacaaaatacctggtggagctagactgggttttatcaccattggagatgggaaaactgaagttcttgtgcatattgattgcttggtttttccacctactgagaattctgctccaatttttcgtgccattagaaatggtcccttgaaggataaggcaccaccaggtgagcccagaatcatgagaagccttcttcaagctcttcagaagtccgttgaaatcgccagattgtgaatattttgtttgtctctaacttactcttgtaaggttttgacttttgaaccaaaaaatttaacttgaagtttgaatttggtgtatatatatttattcctatttatttatcccatattatgtctatataaaaattactcaaaaaagagatcaatgttcgtttaaactgtctaagtgtcaagagatgtctggaatctctaacttcagttctgttttgtacatgagaaataatatttacatttacattacatatatgaaatgcatgcttttttaaaaaaaaaaaaaaaaaactcgag

SEQ ID NO: 90908 - DNA, 454 bp, Glycine max
  Clone ID: PAT_MRT3847_53100C.1
acggctgctagaagacgacagaagggctacaaacaaatgtattcgtccatttagttatctagtatttgtttattctaatatcaaaccatttcaactggaatttaaagcattgagaagatgagacatatgtaatcaattttgagtaccacatcaaataaatttgaaacgtataaaattgcaaaatcatgaaacacatatctgagcaggctttccaaaatcagaaccaaatgaaacaaagtgaatattagaaattactcaaaataagtaattttggaacaatatttaagtgaaatcaacactttcgcggccccacatatagaacactacatattctctcatctctcgatagttgatagtgaaaatgcagttctcatcgattgtggttaactgtccccaattctgaattaatattcactcgcattaagaaacatcaaccttaaccaacccacacaac

SEQ ID NO: 90909 - DNA, 468 bp, Glycine max
  Clone ID: PAT_MRT3847_53101C.1
aattcggctcgagagaagaagcagatcacaggctgaatgtgataactgttttagtatggtttatgctctcgaacatgtgtgttatgtaatcgatactactagagagtaaaaacctgccaccaagcccagcttatgctttgccactcatagggcatacacatgtgataaaagaaccccttcacactaaggctacacaaactcacagacaaatatgggcccaacatatttaatatgtcttggcacacgcagggtcactcgttgtgacctaacctatcagcagtcgaagagatgcttacatagaacgacatcagttttgcaaaccagtctcacacgcttgggggccagcatcttaattacaacaaaaacaccataaggcgcgattcctatggtcactattggcgaaacctaccgtgtctaaccaccgcggagctagaagctaccactcgccttgccatgctcactagcgct

SEQ ID NO: 90910 - DNA, 536 bp, Glycine max
  Clone ID: PAT_MRT3847_53102C.1
gcttagattgatttgtgaatttcgcaaagtgtagaatagcaccagctcgataagctagagattgagctagcccaccgagcaaaccttcagagttataactagctagctaattaagccagtagcacccctaccaagcgacacattcatagcttctctttaggtttgtattcaacaaaatccatggctaagttagaggctattataaataaactcaggcgagtaaccagaatttattttagagactagctatagcaaggcttgtggctaagccagttaccttcctgagagtgaacttgagaaagtacagaggctagctaagcggattgggatggcaagcacagacacagctccacccaaggttgattttgactcccacaaagctcagatgtgcgcaaatctgatttcaacgaagtgaagagttttgttgtgctttattcgagaattagaatacaacacttggtggcacaaaagggaaaagagaatgaaagatgtatggggatgagaagacatgaagtaatggtggcatgacaggggcg

SEQ ID NO: 90911 - DNA, 268 bp, Glycine max
  Clone ID: PAT_MRT3847_53103C.1
aaaaaaaaaacttttttttcacatgaagagttttttaaaaacacctcaccccaaaaacatccctattccatatccctaacattcaaactacaataatacatattcaaatccactaatctattataactacaattctacatcaatacaccaccccaccatatacattcatctcttatttacttcccaactaaactagtatccaaaaccaaccttacaacttttaactatctttatttaactaaatcttcaacatctcaaccctcaaaaa

SEQ ID NO: 90912 - DNA, 399 bp, Glycine max
  Clone ID: PAT_MRT3847_53104C.1
ttctcttcacgcgtccgggtcttccaatggggccatattttgttggagatctcacctttgaagtttctaagatgacttgtccctacaataaatgtacagcgtctttctggactgcatttggaagtaaggatgatgacgccattgactgcgaggctactgcgcacatgctggtgcatttcgcagagattcaagaaaaagttgacttgaacatttcacataaggaatctcttacagcttggacaactcatgtgcgtcctgcaacaactctgttagctgaagggtgtccatatttgaatgctatggtgcatgatacaccatcgtctacaataccagacgatttgggcattggtgtttagttgtggaccataaacaatttgtgtgcctttgggcttaatcctg

SEQ ID NO: 90913 - DNA, 1028 bp, Glycine max
  Clone ID: PAT_MRT3847_53105C.1
gcacgagtgtcagtctctgccttccattccctgtcgtattcttccccaatcaagctctctactctttactacccatttcccttcctttaaagtaactcgaaacggtttcccttttccatatgcctgacgccaaagattcctccatagtatactccaaatccaaatcagcctcgatcagcctcacaacaacaacataggattatactaactattttcttgatggctcaagacatcctcagaatcatacccactctcctctctgcagcttcaatcgccgtcatggtcaccaacaaccaaaccgttctcatcttcgctatccgcttccaagcccacttttattactcaccctccttcaagttttttgttgcagcaaatggtgtagtcgttgccttgtctttgctgacactggtactgaactttctcatgaaacgtcaagcatcaccaagataccatttcttcctattcttgcatgacattgtgatgatggtgttgttgatagctggatgtgcagcggcaactgcaataggttacgtggggcagtttggagaggatcatgtgggttggcagccaatatgcgaccatgtgcgcaagttctgcacaacaaacttggtttcccttttgctctcttattttgctttcatttcctatttcggaatcactcttttatcagcctacaaaatcgtctcttcttctcccaagaactaataatcaaatcaagtcaatataccaccaacaacaacaacaacaactaccgttaccaacaacttgtctagctagctacaatgatgagggccatgagggggattaattaatttatactatataatcccatgttactataaatgttgtgcatgtattttttgttacaaaattgttagtttggtgtgtgtttatcaatgctttttttggtatggttataaatgctataacatgtaaagtaggagttaaagaaaatatttaccaataataatcaagctttgttttaagataaaaaaaaaaaaaaaaaaaaactcgagactagttctctc

SEQ ID NO: 90914 - DNA, 448 bp, Glycine max
  Clone ID: PAT_MRT3847_53106C.1
tttttttttgtgaaaaaaaaaaccccccctttcaccattattaccaccattaaaagagggggggaaattttcaaatcggcagaaccttctcaacaaggggggcatgcctaatttcctttattggaataaaccaaccaaccagcgaaaaaaaaccctaattccacaacatgccgagggttccctattttcaaaaaaacttgcagaagcctggggaacaaaaaaaggtggcataaaaatattacccaccatttcaaaatcttggaaaattccccaaaaaattaccaaaaccggacccctgttgggattggcaattaagaaacctaaaccccctggaggttgaattgcccccttaaaacctccccttttaaaaccatttttaagacccccttccctttttgggaaaaatcattcccaaaaaagggggtctgattttcgccccctaccatcc

SEQ ID NO: 90915 - DNA, 408 bp, Glycine max
  Clone ID: PAT_MRT3847_53107C.1
atataggtgtgtggttttttttttgaaaataacacacacttgacacataatgggcgacaaataaaagaggggaggaaattttcaaattggccaatcctactcaacaaaagggtcatgcctaattccctttattgaattttcaaacgaacaagcgaaagaaaacacaaatgccagatcatgcagaggatcccgcattttcaaaaaatctggcaaaagccggaggaacagaaaaagctggcataagagtattaccagcaatttcaaaatcgtgagagactcccaagaaaatatcaaaaaccgcacactgtgagggatcgccgactatgaaactcaaacgccatcaattttgattggcccactcagaactccacattgcaaaacccttattaggaccacatacctctattg

SEQ ID NO: 90916 - DNA, 337 bp, Glycine max
  unsure (1)..(337): unsure at all n locations
  Clone ID: PAT_MRT3847_53108C.1
ctgctttggtctagtctagcagctttacaatttaattttacaaacattcttcttgaaagcctggaaacttatgtgcgtttcaatgccatacntaccatattttacactctccataaaacaattactattatgcccctactaagaaccttatttcgcaaaatgtatgctttatcttcaagtacacaataaatgcatctttgaaacaatacacaatgactgcactcaaacaacctatgaatacatcctcttcggacattatagatgtgactcatgctcattgatacaacattcttacttttatcataaactcctcgctatgcatccttactactcattt

SEQ ID NO: 90917 - DNA, 259 bp, Glycine max
  Clone ID: PAT_MRT3847_53109C.1
cggccatgtcctcatttcctagactattttttttgctggtcctttggcatcattgactagttagcatgccatgcgtcgcgtacgaaataactttcccattcatcctacaacagacttacttctcacatcaaggcctgttagcttatactcaaagatattgctcccttgaaccatacacatttacccgcttcaaacgaaacctccatgcatgcctttataattttgtataaacgtcccaacatactcgattgctctgtag

SEQ ID NO: 90918 - DNA, 411 bp, Glycine max
  Clone ID: PAT_MRT3847_5310C.1
cacgcgtccattccaaagcccttatttcactttatccaatccgatatgtcacgcctctacacggctttctccaatctgggggccgtcgcaaccttgcctcgtcttctctctccgactttcgttcgttgacaaatggcacaaacacatcatatgtacggaacaagtgatcaaacttgtctcggtcattcatttcaaaacctacttataaagacgtcattgaaattgatctgagtactaccaattcatgtactttctgttatcaaatgaaagaatcccaaatatattgacaattcttaatgagctcaaacaacaccatcagtcgttgccttcaaccagaaatcagatctacttgttattacaccagccaagcgtcacaccttttacaaacccaacaaacactctttttggaac

SEQ ID NO: 90919 - DNA, 250 bp, Glycine max
  unsure (1)..(250): unsure at all n locations
  Clone ID: PAT_MRT3847_53110C.1
agtaatttgttatgaccaaaggaggaccatntgctgaagctgcatagaagattccctaagagcaggcaaaataaacacactgagaaagaaatcatggatgacttagctgagaataattctcatctgctgcatagaactcctaaaaggaagcaagctaaatgcatggaagaagatgataagccagaagtggtggaaaggggtagcaaggatgaaaaacacaaggaagatgatcaagaggaggggaagggtg

SEQ ID NO: 90920 - DNA, 887 bp, Glycine max
  Clone ID: PAT_MRT3847_53111C.1
cccgcgtccgatctgccagcagttcctgaagacccgacttgagataacttctctctgtttcttcttttctctttgtctgaggtccatttttgagcaatggcgagaaaactaagcattgttgtactttgcattgttcaaatgctgcttcttcttgtggaaaacgatgctgagattgttgtgtccaccgtggaggctccagctccgcagcctcacaagaacaccacccacaccctgtccagcgctccagctccgctgcctcacacaaacaccaccaagtcccatgttcccaatttgcagcatggcatcaccgaaggcagtcttaaaccacaagaatgtgggccacgttgcaccgctagatgctcaaacacacaatacaagaaaccgtgcctattcttctgccaaaagtgctgtgccaagtgcttgtgtgtgcctcctggaacttttggcaacaagcaagtttgcccttgctacaacaactggaagacaaaaagaggaggaccaaaatgcccctgaaactttaaattttacctattaagtctcttaatgcccttgctagttgctaccaccactccatgtatttatatatgtacccaccagattgaaattaagtaccttaatttaatcttttttgtctttgtgtgctttcataatccttagggaataagacagaacacttctgttctggcattgaacttgtagtcaaattcctccctagaaattgttaaacaaggcacaaggaagacacacaatgcaaatatgtgtcctctcgttatgaaaatttaaatattattagtatgttataagtttgcattagtatatgcttagaagctaccaatgaggtctaatttagttggttgaataagatgcgtgataggtgagttattgag

SEQ ID NO: 90921 - DNA, 266 bp, Glycine max
  Clone ID: PAT_MRT3847_53112C.1
ccacgctttcacacaaaccttctctccctctatccccattctcttttctaactctttttttgaacctttctaaatcacctccttaatctcatcaccaccaccatcatcatcatcatcttctccaatctctataaccttcaatcactcaaaaccttaccattaaaccaaattaatttacccatttattaaaacaattctccctaaaaaaaaatcaaaaacttcaactttttcttaaccaatctcacaacatttttcaaccttttttc

SEQ ID NO: 90922 - DNA, 1189 bp, Glycine max
  unsure (1)..(1189): unsure at all n locations
  Clone ID: PAT_MRT3847_53113C.1
cccacgcgtccgcccacgcgtccgtacggctgcgagaagacgacagaaggggacgccaaaaccactgtatcagtgtgtccttccattccaggtttttccaccacactagaaagtaactttaaggttactatgatcttttttcaacatgattcatcacattttcaagcacacactgcattaagaagcgagaaatcataactcatacatatatatggtcacttataaataattcttatagcaaaacggatggcatggaaagcgtagggaagaatgtgcctgtaattgtctttgtctaagtagagtctgtaattgtctttttgagaaaacaacagctaaggtaattacatagagccatatttcatctataaaatagcctgaaatctcatctgccactagttcttgaagaccacacttgagctaacttctctctatttcttcttttctctgtgtgaggtccatttttgagcaatggcgagaaaactaagcattgttgtactctgccttgttcaaatgctgcttcttctcgtggaagtttgccctggctacgacgtgttggaagacaaaaagaggaggacgcagcctcacaagaacaccacccacaccctgtcccacgctccagctccgcagcctcacaaaaacaccaagtcccctgttcccaatttgcagcatggcatcaccgaaggcagtcttaaaccacaagaatgtgggccacgttgcaccgctagatgctcaaacacacaatacaagaaaccgtgcctgtttttctgccaaaagtgctgtgccaagtgcttatgtgtgcctcctggaacttatggcaacaagcaagtttgcccttgctacaacaactggaagaccaaaaggggagggccaaaatgcccctgaaactataaattttacctattaagtctcttaattaatgccttgctagttgctaccagcactccatgtatttatatatgtacccaccagattgaaattaagtatcttaattttaatttaaaaaaaaaaaaanaaaaagaaaaaaaaaaaaaaaaaaaaaaaaaaaaaaaaaaaaaaatgggaaaaaaaaaaaaaaaaaaaaaataaaaaagcggccgttttaaagaatccaagtttacatccgcgggcttgcaaagtaaaagtttttttataggggccccaaaattaaattaatggcccggggtttaaa

SEQ ID NO: 90923 - DNA, 272 bp, Glycine max
  unsure (1)..(272): unsure at all n locations
  Clone ID: PAT_MRT3847_53114C.1
gccatttttagaaaatatcataaacatatgagcatggatttgtggaacacaatgaatgctttggattgacggtttgacaagaggggggatgagcaaaagaagatggcatggcataggggagaccgcgtattgttgaggggcgtagaactaagaaaggaagacggtggaagaaaaccagcgggcgtaagttgacgctggagagtgttatactatttttccagagtagtgtttgtggaaagagtgtacgaagattngtgggggtttgaaagcag

SEQ ID NO: 90924 - DNA, 244 bp, Glycine max
  unsure (1)..(244): unsure at all n locations
  Clone ID: PAT_MRT3847_53115C.1
aacaccacacaatcatggacaaacctcggggcgnggctcgctttaaactctaacattaacatggccattccctacccctatttcatcgccaccgacaaagtcgccatggacgcaggtctcctgcaccccctctccctctccgttatcctcacccacgaccatttgatgaaaatccagcgcccacaaggccccgctgtaccaaaagtccggtctggccctcggcctaggcaccggcttcaccgcc

SEQ ID NO: 90925 - DNA, 116 bp, Glycine max
  unsure (1)..(116): unsure at all n locations
  Clone ID: PAT_MRT3847_53116C.1
gaactcatcacttactggaagccttgttgacgagtaagananaaggnttcctgcancgngnacaccaacttgatacctctgatctcttctntgttagaattccanagannatggag

SEQ ID NO: 90926 - DNA, 420 bp, Glycine max
  Clone ID: PAT_MRT3847_53117C.1
acatggtaaatttaaaaacactacttctcaggttctatttccaaattttaaacgatcctaccctaaaattttcaccacattaaagtcaacaactttctgcccaacaaattgttttaaagatcacttcggttcccaaattcgttggcccaaatatggcacaccacaaatcctggaggggacagcgccacaaggcaaaccgttgctcccaaaacaaaccaacaaacaacgggcacaacccctcgaccatgaatccaacccaccccctcaaaggaagcccttgaaacaaaagcattttcttaatcaacatgaccattggttccaaaaacccactgactactacaagggcccgttgtctgctaaaaaagcactccctgaggaactcccggaatccgaatttgacaagcgcggacgcggggttca

SEQ ID NO: 90927 - DNA, 390 bp, Glycine max
  unsure (1)..(390): unsure at all n locations
  Clone ID: PAT_MRT3847_53118C.1
ggaagatccacaaatagaatacaccttttcattatgactgagtaagttgctcataccaacatccttccattgaaccttggtatcatgcgtgcactttctatgttttatctttagtccttccatccatccaaagatgacctgatgaagaagcttctctttgggaattattgtgcacaagcaactaagcagaccttgatactcatcagatgatatatatgaagcaagccagggaagaaattctgccatcattttgaccggtatgctacaaagaaattgccataccaatgacccctgctcttcagatgaaaatttctcaataaccaaagggaagacctgttccttttccttaaacatatgctggcanattgatgttcgaagggctccaatgca

SEQ ID NO: 90928 - DNA, 367 bp, Glycine max
  Clone ID: PAT_MRT3847_53119C.1
gggactaacattaaggaactttggtcccaaaaagagggaagagcatggtggttcatcaagattcagttttggaagcagctttcggaaaacgggaaagtacgtcaaggaagaagaattcctcattgaaaaaggagcagaagatagtgatggtaatcagaagggatatcacaaacacaaccacaggattactatatctgatgttgtgttcaagcacaggtggagcaacgtgagttcttcagaccttatgtttctgaattcggagatgctgaacgatgcatcaagcaacagattcagcaacttggaatcaaatgctgacatgatgtctagtacaagaagggtggtggaaaatgagcaaattatgaatatt

SEQ ID NO: 90929 - DNA, 456 bp, Glycine max
  Clone ID: PAT_MRT3847_5311C.1
cggaacacatgcacaatcaatggcatgcaacaaataccctttctcattcagcaattggtcataatttgagaatctgtaaacaataataaacacttcctaaacaaacaagtcaccactcaggaattaatccgaaaacaaaatatccaaattccaacccactcctaaataccgtttaaacttaattagccatttggccaagccacccttctccttgaccatgcccacatccaaacttacgtgatcaccaccgaacaaaacggtcaaaaccaaaaccttgatgatgacgtctaaggggcaaatttggaagaccggattagtagaaccagcaccaaatcctgctgggggtgttggctccctcataggcatacttgagcttgccttcttctcttctttttcttgaggaggtgctggacccctaaaaccagcaaccacaaacccagcacctaacaggggacc

SEQ ID NO: 90930 - DNA, 368 bp, Glycine max
  unsure (1)..(368): unsure at all n locations
  Clone ID: PAT_MRT3847_53120C.1
ttttgttgcctttggttgatttagagccagcgtttggtcaattgaatgttgtgatttctgctggttaagcatcttggatatacttctgtgattttgggatcacagatatgaccaaaagtgcagaattgtctcagggaaatggtggtgtttctattcccactcctatttcccagtctgggccacaagaacaaaatcagcgttttcaaggtggaagcggcaatatgattttcaagagtggaccacttttaatatcttctaaaggaattggatggacatccttgaaganaaggtggtttattttaacacagacttcacttgttttttcagaagtgatcaaatgcttgccctcagagggaaatgaaagtgaa

SEQ ID NO: 90931 - DNA, 523 bp, Glycine max
  Clone ID: PAT_MRT3847_53121C.1
gttgaaacatgcgtgattgcctttattgctttcttttcaatctgccatttttccggaatacagggggcacaaaaccattcaggcacccctaatgtgccttgaccattcttacgtggaagaaggaataatattccccctatttcaggttatggaaaaacaggcggagaaacacactttcctttatgagagagcccttagataaaaataccgctggtaaggcctctcaaagtgaatccctcctcactacaaggattgggcagagcgtatggcattttacctggaccaaagcgggtacccatggtttcatccttgttcttacgcctaagctcatggtcaaacctttgaagcttctttccaaacctaaaaaaggcctctattggggcgggattaaaaattcataagtcaccaccatatatctccccaagggccaactcaaaacatgcgtgacttggccgggtttctgtaattgtagggaaaatgaggggctccttcttgcctgaaagggtttttaaaaactccttct

SEQ ID NO: 90932 - DNA, 739 bp, Glycine max
  unsure (1)..(739): unsure at all n locations
  Clone ID: PAT_MRT3847_53122C.1
aaattccaaattaagaaattcttcattttataattgcatcttaaggtacatttgtcaataaactgaataaagtatcaagcaaaccatgacaaagtatatacacattttaattggaaacaccgaataatagaagctactaatttctcacctaccttaaatcgctatccttctctctataaaatacttcttgtttccctaaacatgtatataaaaaagttacagaacgaaggatcagaaaatctgcatgtatacccccatttgccaatgctctgttgtggccaattgaaagggaaaatggaagctgcattcctcttacacgtcagtctgttttgttcagtgccagcaactctttaatttcttattcccttgtgatgttttacttgctaactctgcagaatcacacacttcttgcgggttatctggtttaacttttatttttaccggattcccaatctttgatttatcttccattctagcaatttctaaagcttttgtacaaactggaaaacttctgatcatcccagaactccaaaatcacaccagaacctantgcatgnttcttccctcatagaatgccgcanactgcccagctgctaggcctttgatcatcttcagatatgcggacaaagncagagtgacattggccatcagcttcgacttccatttgtaagctacaatcataaaatccaggaccatgtctcaccttgcatttgaacctgagntgtctggcctgggggca

SEQ ID NO: 90933 - DNA, 276 bp, Glycine max
  Clone ID: PAT_MRT3847_53123C.1
tttttctttttcttacatctcccaaagtccaaaccacataatatataaattaaaccatggcttctgattttccgagtactaaagctaaattcatctaggccataacacacaacaaccacttaaccacaatacacgtacacataaatgttaaatatattaataataaattaaaaataagtgacgggaggtttaaaaaactagtataaacgctaagaacgaaaacaatgaagatgatctaagaaattggcctccctccatcattccttgaaaactaaa

SEQ ID NO: 90934 - DNA, 185 bp, Glycine max
  Clone ID: PAT_MRT3847_53124C.1
ctatgcccaccatgggtatttcaaggaggcaattaatctatttaatgaaatgcaagaattaggtgtttgtgctaatgatgtcacctttgttggacttctgacggcttgcattcatactggtttagttgaggaggggtttaaatactttgatgaaattctgaaaaacagatcgatacaactcagag

SEQ ID NO: 90935 - DNA, 732 bp, Glycine max
  unsure (1)..(732): unsure at all n locations
  Clone ID: PAT_MRT3847_53125C.1
gccggaattcccgggtcgacccacgcgtccgcggacgcgtgttttaatttttaacccatccaaatatgaaaaatattaagtttcttctttattgttctcttctctaattccatctccctaattaccacatccaaataagttgttaaagcaaagggaaatatcctaaacattacacagcttttttaaacttaattagaagaatatatgtaactaacggagaaaacagaaaattctataaaaaaaaaataatgatttaagaatttaaaattttaatgttactaatttgcaatataaaaataaattaatgtaaaagaaaattataaattcacaaaaatgaaaaatgtaagctcaatttaaccaggatatattgcttcctgcaccttcaattttgctacctgcatcctcttaagattccgaaacacttattctagattacattttgaaaacgccttttgaaatgtaattttaaattccagattagatgcaggaactaattgcctatatatagacgcaaaaattgtgctcatgttttgtccaaaatatcatttcggcgagtgtttttttatgcacttctggaatatcttccgnaatggtaattccggaaggaatatgggaataggggaagtgtaggaagtaatctccctttttcgctaagatgttatttcagcaggcccaaattgaaaaatttgttaacccaatcatgataggctttagctgcacctaaccactata

SEQ ID NO: 90936 - DNA, 612 bp, Glycine max
  Clone ID: PAT_MRT3847_53126C.1
gtaggtttgcataggtcttgatttttcttttgacttggtatgcagaaacataactaaagcaacacacaaaagatgtctgggaaatttaagctattattaatgtctttttattttctagtttcctaaaaaaaaaaaaaaaaaaaaaaaaaaaaaaaaaaaaaaaaaaaaaaaaaaaaaaaaaaaaaaaaaaaaaaaaaaaaaaaaaaaaaaaaaaaaaaaaaaaaaaaaaaaaaaaaaaaaaaaaaaaaaaaaaaaaaaaaaaaaaaaaggggggggcccttttagggaacaaagttttacttcccggggcttgcaaaaaaaaactttttttttgggggcccaaaattaaattccctgggcggggttttaaaaagggggggtggggaaaaacctgggggtacccaaattaattcctttggaaaaaatcccccttttgccaggttgggaaataagaaaaagggcccacccaattgccttttccaaaaattggccaaccctaaagggaaaggggcccccccctttaagggcccattaaaccgcgggggtggggggggttccccccagggtaccggtaatttttgcaggggcctataacccccttttttttttttt

SEQ ID NO: 90937 - DNA, 168 bp, Glycine max
  unsure (1)..(168): unsure at all n locations
  Clone ID: PAT_MRT3847_53127C.1
tcggaacctgatcagaacaataacagtttactacaaccatcaganacttcgtccatgcgcagaagaggagtattccaaagagaatcgcgcacatgatgtgtggctgcggagatgatcctaattcactttccggaagcgtggctcttatggaggacatcgttgtggagt

SEQ ID NO: 90938 - DNA, 277 bp, Glycine max
  Clone ID: PAT_MRT3847_53128C.1
ctatttttcaagtaacttaaggtttcaaacctaggaagttggaagtcatggcagcaacatttatggcagcaacaacaagttctggtactcttaaagcaactcctttccttggccaaggcaagggtgccaatgccaatgctcttagggatgttgtctccatgggaactgggaagtacaccatggtactcttcttcttccttttttatgttttactatcacaaaagttttatggtgttgattacgtagtgtggttgatatgttatgtgggtctgtgttt

SEQ ID NO: 90939 - DNA, 205 bp, Glycine max
  Clone ID: PAT_MRT3847_53129C.1
ttccgctggcggccactccctatccgccgcgcatccatcccgcattccctgattctcgcttttctctaaataaaattaaaaatttctctgaagaccgtgttatcattaccggtccctgagttacgttatctgttatctctagggtgtctttattgtgtccaataacaagaggaggggtaggagagtcatgctgtaagaagatgaa

SEQ ID NO: 90940 - DNA, 569 bp, Glycine max
  unsure (1)..(569): unsure at all n locations
  Clone ID: PAT_MRT3847_5312C.1
ccacgcgtccggagatcctctgaaggtttgaacaggcaaagagggttccaagttactgaaagttctttctgggttccttttgtaagaggccctgtactatctattttggatgtttctcctcttgatttaataagaagatatgtagatgacattaattctgctgcccaagagtttcgaaagagatatattgagtctgggagtagtgattcacctgttcaaaaggaacctctctttcctgtttcttcaccaggtgctgaagctaatggtgaaatttcaaggggaaccatctctagagcagttaatgcagtctcaccttcaactgggaaacaacgacctaagaaaacattggctgctatgcttgttgaaagtacaaagaagcagtcaattgctttggtgcagaaggaggttgcaaagttggctcanagatttttggccttattcaatccagcattattccctcataagccaccccctgctgcagttgtaaataggatacttttcactgattcagaggacgaattactggccttngggagtatggaatatantacagactggaaagcaattca

SEQ ID NO: 90941 - DNA, 275 bp, Glycine max
  Clone ID: PAT_MRT3847_53130C.1
tggggggggggggagggctggggaaggggaggggccgaggaccaggtataacagcccccataggagtgcaacgatggaattaagtataaagtgaaagatgtgtaaaaggtagggttggtggccgtctgtaaggggtccgagtcatggggggttaagcctaaaaactccccaaaaatttggggtaaccgggcccaaacgtgatgggtcacccaaaaattggggtaagtatttgcgggacaaccaacaacttttatcgacacagtagccataaggcg

SEQ ID NO: 90942 - DNA, 505 bp, Glycine max
  Clone ID: PAT_MRT3847_53131C.1
tgttattggataatagtgtaaaaacactttacactgttaacagatagcctatttactctttaaaaaattattagttttgatttttatggaagaaaaagaaaaaaaaaaagattttcttaaaaaacaaggtgaaggagcttttagaaaagaagttgacttctctgagctctttccctcctctctctctcccattctcttttggacatttctttttagttaaaaaagaaattaagagtgtgtttggtttcatggtggaaataatgagaattgattttgactgcaatcaaacttgatttcataaacatatgcgtgtttggttttccttcgtgtcatatgttatgtgcgtctaccagaagcatcatggtatagcttttgagtatattgacccaaattggcgtggtttttgggctatacatgcatgttggatttatccaaacatacatagatgtttggtttttggttattgataggcaaaattgattttgccgcaacctctgtttgacta

SEQ ID NO: 90943 - DNA, 254 bp, Glycine max
  Clone ID: PAT_MRT3847_53132C.1
gtgttttcctttttgtatttttttttttttttttttcccccaaaaactctaaacatataagggatggtcacaacatacagtgctttttcacggcggatattgcacgaacatataaaacacccttaaattcttccatccatccattttttttttttgcaccgaaaacgtacccgtatcctatttattcacattcataacaccaatctttattgcccagaacccttatgccccatatttattaaaaaacagaatta

SEQ ID NO: 90944 - DNA, 894 bp, Glycine max
  unsure (1)..(894): unsure at all n locations
  Clone ID: PAT_MRT3847_53133C.1
ttcggctcgagccttgatataggaatggctcaaatgtaaagggatattatgtatggtctttgttcgacaattttgaatggtcttccggttttacatcaagatttggaatgatttatgtagattacaaaaatgatttgaagagatacaagaaattctctgcattatggtttgagaattttctgaagaaagaaaccaaactatatggttctagcaaatagtattatgaaatttgtttacaaaatagttatatatatttgtaaataattatttgatttgtatttggtcattcttttattctatcgaggtcctattggacttagaggggaaatagagatgtagatctattgataattgctactattttgttacattaagaatgaaagaaattttttgttatgaaaaaaaacagacatnctaagatcccatgaataaagttttttaagtatttgaaaagtcactgatggtatcctgaagcgttcttacccaggtgtaaattccaaggcttgtagagtactaggcctggcgttcttaaaattgcccaaatttggtgaatcagaagcatatgttgtagagtaatagtattgtgaagttagtttatcaaatgattatattggtaaattgattattgatttttatttattattcttttattcaaaagaggtcctattggacttattggggaaatagagatttgttagattttttttttctctaaagaggtcctatcggacttagaaggaaatagagatatatttgatcattctttcattctaaagaggtcctattagccttagaagggaaatagagatgtagatttgttgatagttgctgctaatgttacagtaataagaaggaaagaaacgttatgaatgttatgataaatatgtcattcac

SEQ ID NO: 90945 - DNA, 663 bp, Glycine max
  Clone ID: PAT_MRT3847_53134C.1
ctgcgagaagacgacagatcggggcgagtgagtgagatttgtatgggagaaaccgggatcattgtcagcttccagggtaacttagacccgagagcagaggagttcagacccctcaatcttcaatgccaatggtatcctcttcctcttcccacacccctctccacctcctccacccgctccctcctcctcactccgctcccattcgcctcccactccgccctccgcgcagaactccaggccttcggcgacatcagagccctccaaaccgactccctccgccacggcatcctcaccgtccacttcttcgacctccgccatgcagagtccgccttcgccgccatccgctccatgcacctccatttccctcaattcctcctctcggcccaccccatctccgcccactacgtcctcccttcctccaacgccttccccgacgcccacaaccaaggcaccctcgtcatcttcaacctccaccccaacctctccaccgtccaactccgtcgtctcttccaacctttcggtcccataaaggaattgagagataccccatggaaaaagaatcagagatttgtggagttcttcgacataagagacgccgccaaggccttgaagcacatgaacggcaaggaaattcacggcaaacaggttgtgattgagttcagt

SEQ ID NO: 90946 - DNA, 2030 bp, Glycine max
  Clone ID: PAT_MRT3847_53135C.1
ctgcgcgcctacggcagcggtccgaattcccggtcgacttggcgtccgcctctgtccttcagcttccttgagagaaagagaggagagaatgggagaaaccggtatcattctcagcttccccggaaacttagacccgagagcagaagagttcagacccaacaccataaatattcaatgccaatggtaccctcttcctcctcctcttcctcttcctcttcccatacccctccctcctcctaacctcaccacctcctccacccgctccctcctcctcaccccggtccctctcacctcccactccgccctccgagccgagctccaggccttcggagacatcagagccctccaaaccgaagccctccgccacggcattctcaccgtccacttcttcgacctccgccatgcacaatccgccttcgccgccatccgctccatgcaactccacttccaccccaaccctggcctcctctctgcccactacgtcctccctaactccaactccctccccgactcccacaaccaaggcaccctcgtcatcttcaacctccaccccaacctctcctccgaccaactccgtcgtctcttccaacctttcggtcccataaaggaattgagagataccccatggaaaaagaatcaaagattcgtggagttcttcgacataagagacgccgccaaggccttgaaacacatgaacggcaaggaaattgacggcaaacaggttgttattgagttcagtagacccggtggtcacacccgtaagttcttccatcatcattccaaaaccacagtacctcctctcaatttcaatgctcctcgcttgcattcctctcagaagaaatcaccgggaagtcccagcaatagtacgggatctattgatgcggaaatggggtcaatgagtttgaccggaggagaagttgaagagcagcattcttcttcacaaggccccacgcggaggaatcttggcagaaagcacaccacactagtagtaggaaacaccaagcaacaacaagtacctagaagtaggcactggaagggaaaacaagcgaagaaacacgaaactcggtttctaatcaaagaggacgccattgtagaatctggtcccaaagatactagaactactgtcatgatcaaaaacattcccaacaagtacagccagaagttgctattaaacatgctggataaccattgcagacactgcaacgagcagattgcagacggcgatgagcagcagcctctgtcctcctacgacttcgtgtaccttcccattgatttcaacaacaagtgcaacgtgggatatggttttgtgaacatgacttccacggaggcaacactcaggctccacaaggccttccatcttcaacattgggaggttttcaattcaagaaaaatctgcgaagtcacctatgctagagttcagggattggaagcattgaaagagcacttcaagaactcaaagttcccatgcgagatggagcattacttaccagtggtgttttcgccgcctcgagatgggaaagaactgacggagccacttccaatagtggggaacaagcaacaacaacaagccatatcaagtggcggcggcggcagcggcagcgtaggtgatgatgatgagacaaatgaagaagtgggtagtagtgttgtgattctgaaagacagcatttaaggtggttgagcaacgagccacacctgtgttcgtcttcgtgccttaaccagccaaccaacctacctacaactacagcaaccatttctctatctctcaactgaacctgttgctgctcactgctcacctttcctccaatatctcttcactttttttttttttataaatattttcgtttcctgcttttgtctagtgaaattgaatttgtcgctttttttcttttttcttttcaatcacttgtttgtagacttgtagttgtaggttctgctgcttcagatgtactgtagtagtatttagtttgcctatttaattttcaagaatttcgatgtatcattttttttatagatagaaaactttaaagaga

SEQ ID NO: 90947 - DNA, 1347 bp, Glycine max
  Clone ID: PAT_MRT3847_53136C.1
cattcctcttggctcccttaaactctctttctctctttgtgtgtctctttctctatttctgagtctcagtgttaggggggttattcattattcataataacttggctttatagcattttcccttttgatataaaatgggaaggcaaccttgttgtgacaaagttgggttgaagaaggggccatggactgcagaggaggataagaagctcataagcttcatcctcactaatggccaatgttgctggagagctgtccctaagctagcagggcttttaaggtgtgggaagagttgcaggctcaggtggacaaattacttgaggccagacttaaagagaggtcttttatcagaatacgaagaaaaaatggtcattgatcttcatgctcaacttggcaatagatggtctaagattgcttctcatctccctggaagaactgataatgagataaaaaatcattggaacacacacataaagaaaaagctcaagaaaatgggcattgatcctgccacacataaaccacttcctaatgcaaatgaacaaaaccaaaatcaaaccagacaagatcaacaactacaccaccaaccagtagaattagaagagcctaaccaacaacctttgcaagttgactttgaccccaaagttgacccaaataaggagccagagaagccagagacttcattggaatcatcaaccatcactgaagaagccaaagaggaagaccaaatcataacacccttatttgacacaatggagctaatgaatggtttctgcacagatgaagttccaataattgaacctcatgagattctaatgccttgtgctccttcctcttcatccaccacctcttcatcatcttcttcaaattcaaccaattttcttgaagacttgcagctaccagattttgaatggtcttgtaattacaatgataataacactattactaacaataacaacaatgaagacaaagacgacgacaacaacaacaatagcagcatggccttgtgggatgatgacattattggcaaccgttattggctgattaatgaagatgatgatagtgatgaaaaccaagtgtttgatgcttctctcactcaattctcaaaaatgttcatggaatcagaatcttggggatatggcttattttgatttgaattttctccccattatttgcgatttgcttctaagtttttacgaagaataaacggttaataatttattaggaagaacacaactgttgtttagcattaccaacttttcactttatcatttacacaaattacatgtaatatgttaatggaaataataagtttctttttttgcagtaaaaaaaaaaaaaaaaaaaccccac

SEQ ID NO: 90948 - DNA, 571 bp, Glycine max
  Clone ID: PAT_MRT3847_53137C.1
caaaaagaagcctggttaaaagagaaggcggcaggaggtggctatgagtcgtgcgcgtgtgtattgcgacgtgaacgaaacgcgcccacgcgagtactgggactatgagacgctgaatgtagcctgggggtacgtttctcgtctcttttttcctccctccttcgcccctattgccctttgctgccccatcgaaatctttcgctcgataagggggaatggcgttggtttctgcgcatttgaacacagctccagcattatttggatggatcaatgtcattgccgctgtgtttttgtagggaaggctcacagacgtcttgttgtgaatacacagggatcaggacaattacgaggtgatccgcaagatcggccgaggcaaatatagtgaagtattcgagggttataacgtagccagcaactctcgctgcgttatcaagattctcaagccagtcaagaagaaaaaaatcaaacggtacgtatgtttgtagagtttattgaccatgtactggctgtctactttttggttatcacgcttgttgttgatgcttcgtagtgagatcaagatcttgcaaaa

SEQ ID NO: 90949 - DNA, 313 bp, Glycine max
  Clone ID: PAT_MRT3847_53138C.1
tggcttggaacctttgggctgatttatgtgcttgtttatgtgcttgtttatgtgcttgcatggtcgtgagaagatgatagaaggggatatatataaaggtagataaatacaaaaaaaaaaaataatatatatatatctctacatatatgccgctgtgtatataccttcctaccttgtagtaataaataaatactccccattccaaataataacggttgacgttgaggacacctaattttctgcccgtgacaacggaattggaacggctaaggtcggccccgtcggagacgacgtattgaaggtcgcgcctttc

SEQ ID NO: 90950 - DNA, 336 bp, Glycine max
  Clone ID: PAT_MRT3847_53139C.1
gggggggggttttggaaatacggtccatattgttacaactttcctttattaaatacaaggaccggttccaatcaatgcaaggccccccccccataaaaaaacaaggagaaaacccgcaaaaaaaattccggggcccataattaaacaaagaactggccacttttaccacaaacaaaaatgagcgttcgaaaaaattgacggaggggaaatttcacaatataagaaaaacataatcctcaaccaaatcaaacctagtgcccgaggcgttggaacccccctgggggaggggaagtacaatactcggtgaggggaaaaaaaaaacattggttcccaaaa

SEQ ID NO: 90951 - DNA, 146 bp, Glycine max
  Clone ID: PAT_MRT3847_5313C.1
cttgctatgatggcattggatatgataggtgttgttgccatgaacggtgattgagtaagctgcttccgctggattatagagcatggagcatctcattcgactccgttctccaacctcttataatgccaattctgcttcgtgcgcct

SEQ ID NO: 90952 - DNA, 370 bp, Glycine max
  Clone ID: PAT_MRT3847_53140C.1
tgcttttttttgtggcacgcgtgggataaggatttacatatcattcaaaacatgggaactttgggcacaattaataaaatcacatgctgggtggctaacgtgcccaacacactgacggatttacggggtgcttattctagcaacgctttttcagtttaacggcctttacataacctttgtaaacactgagtataaccacaaacgccttataaaagtagacgccctgatttgcttactggcctttattgattatgctttgagaccattccggatgcgactaccttagaaagaactgtatgccgcacaggatagtcctttcctgtgagaggccactagaagaacttggtcttcctcactagaaaaaccctct

SEQ ID NO: 90953 - DNA, 326 bp, Glycine max
  Clone ID: PAT_MRT3847_53141C.1
gcttcggaattttaaaaataggctttcaatttaaattttgggatattatattcctctgataatacaccgacaaattattaaatgaagttgtctatgagactataaaactagttttttaaaagcactctcaacacatgattcacggtgaaaaaaacttctaacaaggatcaaaattagactcaaactttggctatggattcagaatcttttaacatagtccaaaatgtaaggttccagtcttttattgaccaaggagacgaggacacaaaaccaagtacccacaacctagttatcctcaagaatacggacctcacattaaaacgaag

SEQ ID NO: 90954 - DNA, 361 bp, Glycine max
  Clone ID: PAT_MRT3847_53142C.1
cttgttcagtcctatggttttgttttttctttcgctgttgctgtttctctgagtcctcagaaaacaaagagattatctgccagggtgatgtttgcttgctcacacaaggaacattacaaagtctaccattacaccaacagcaaccttcacacaagaaggcggtatgcaagggacaactatgtgtactctgcataccgcctgattgtgtacagctagctgcggttggatggtaaaacctttaacgttgtgcttggtttgaacgagaaaacttctccatggaggaaaaactgtttggattcgggggccccaaaaaaaccgcccccgcgaaagaaaaacaaacccctggactggtcgggcgggc

SEQ ID NO: 90955 - DNA, 248 bp, Glycine max
  Clone ID: PAT_MRT3847_53143C.1
ggaagtgattacaccattgcgaagcgcggctcttaacccacgctagaaaatcccatgcaagcggatctgcaaaacctccatctgctcgcagacggctaggcctttaccggtttagacctcacctacagacgacctattcatggggtttagccaagtgggaagcacatctgccctatgtgccaccggtgaggagaaactatggctgcgagcccactctgcaacaagcagcgttgatgatgggggatgct

SEQ ID NO: 90956 - DNA, 421 bp, Glycine max
  Clone ID: PAT_MRT3847_53144C.1
tgccttttcaagtatcagtaagaatagaagggaggaggagtctttcatatttaaaaatgtaagcataaaatgtactgaaaggctgattgtttctcagtatgttctttatgacaggtcaaatgctatatgaagcaattgctatctggccttgagcattgccacagcagaggtgttttgcaccgtgatattaagggttcaaatctgcttattgacaatgaaggaatacttaaaattgcagattttggactggcaactttctttgatcctaagcaaaagcatcccatgactagtagagtcgtgaccctttggtaccgtccacctgagcttcttctggggtctacgtcttatggtgttggtgttgacctttggagtgttggctgcattttggccgagctacttactggaaagccaatcatgcctg

SEQ ID NO: 90957 - DNA, 361 bp, Glycine max
  Clone ID: PAT_MRT3847_53145C.1
gtcctgaaaatatgaaaatgcttttttttctggtttaaaagacaaactgtagccactagcaacatgtccattatgttcttttccaaagttacttatacgctattttttgatcacttcttcatttcacgtcagcctttcactagctacaaccaaaaccaacaacattatctttatgcctatataaaatattatgtacaaaaattcgtatagatacaagtcttagcagctactgacgggcttgtatcactttagcttattcctagcttctcattcaactttcctatgataccttgctgtttttatcaagctgtgaagtgcttgtaccaactttgaagagaccagccccaataactttcgaatg

SEQ ID NO: 90958 - DNA, 364 bp, Glycine max
  Clone ID: PAT_MRT3847_53146C.1
tcgcccactcgtccgatgactcgtgtgaacaaataaacctaaatttattgcattgcataatgccatgtcaatgaagatgtatgcttacctcaccctatacagagtggcttttcatggccacattatacaagagcccaataccttattgacacacatggttaacccgttgacaatgaagatgagtattacatcatgccagccataacctacaacggatggcccttcactttaatcaaccgaaacgggtaaaaccctgtctacccgatcttaaaaacaccgatacacaactcggttatccaatgagatttacccattaaggggtcaacgctcaagatgatgacataaaggtgaacagccactttgg

SEQ ID NO: 90959 - DNA, 381 bp, Glycine max
  Clone ID: PAT_MRT3847_53147C.1
atctgcaggatcatctactacactttctgagggagaatgctatccagaattggtatcatcatactcattctcggaagatggacccttgggattatcctctaactgttgatgtagaagaggagaaacagccgaggactctttcgagggacttgatttatgcggtgaggctattgctgggagggctgtgctaatgtcagatcatgggcactggcgctgatgctgatgaaccgttaaatgtggaggggtggacactgtttgtagatgggctacatgataggaggagcgaagttgacatgagagctgcgggctgctgctgcaatgtaaaacatgggaatgtttgttgatgaaaggagcagagacgctatgcagctgatagggatg

SEQ ID NO: 90960 - DNA, 456 bp, Glycine max
  Clone ID: PAT_MRT3847_53148C.1
cgcacagttcatgcttagcatgactgttatctcacgattctgccactaattcatttgaaacactcactttcatattggctcccgtatcccaacacttgacgtgttgacacgtttccaatcaaaaacgaagctaatttcctttcttaccaggtagcagaagaatcacgatcatctcccgttccgtggacagaaattatccatgacctggcgatgttgtttttctgaataattaacgccaacttaccaatgtatctcatcgagatggattttatgctcaaccaccgtgattagaactccgagtaggcatgggccttcttatggactaaatgccatgaatagccttatactactgtaccactgaccactgcgcagctatacgtttgttgaaaaaggctacgaatatcacctcataagcaaagcttgggtacaattgacctattggatgggaaggagacc

SEQ ID NO: 90961 - DNA, 429 bp, Glycine max
  Clone ID: PAT_MRT3847_53149C.1
atcactcatgactccccattgtctgacgattcatctcacgattacgcatacacaatcatgaatgagggctataaccacacgagcgcttcaccccactaggacccaaccgattgatcaatgctttgcatccgcagtgtgtacatgctctgtggacgcgcgcacgtgctacgaaccatccattggagaatggtcaacgactgtgcgccgcatacaggcggcggcggcagtcatggcggtggcgcgccgatgagctcactgacgcctacagctggaggcacgacatcgacaactcttcggcgaggcaggatcgtatcttctacactctggccgtactctactgtatcttggacaccgtagctttagttcaactggctcggatacaattgatagtgcccgagtacggttggaccacgcagaaggtccttcact

SEQ ID NO: 90962 - DNA, 325 bp, Glycine max
  unsure (1)..(325): unsure at all n locations
  Clone ID: PAT_MRT3847_5314C.1
gggaaagcacgaactatatttcnnnttttcttgtttcggctgttcagattctaacattaacaaattacagagggtttacctataagcacattgtctttaccgggcgcttaatatgagaagggacttttatatatatttggactgccttgatattggggggaaaatctatttaagaagcatgttgacatgtatcccacttttacattgaacatttttttacaccgacaaaacgcaacaactgcgtaaatgaccttgtgtatttactgctggttggactttggagggggcttacccttgtgggcatcaccaagctgtgttctttcac

SEQ ID NO: 90963 - DNA, 608 bp, Glycine max
  Clone ID: PAT_MRT3847_53150C.1
cacgcggcgtaaaattcggctcgaggtaacatactaacatgttaatgcagatatttgtcagttgtaccatcttttagtttatgaactcgagcaggttgtccttgcatttggtgctgaaagtgatagaagtcttggtattccaggggagaacttgaaagggatacattcagctagagagtttgtttggtggtataatgggcacccatatggacaaaatcttgagccagacctaaagagcactgatacagctgtaatccttggccagggaaatgttgctttagatgttgcaaggattcttttatgacctactacagagttagcaacaactaatattgtcagtcatgctttggctacaagatgagagaagattaatttcttaaacaggtgtttcatctaattattttcacaactatttttcctttttatgcttctgccgttggctaaccaaatgatcaaatatttccaagacctctgtcatattggccaattattttaatattggaaaaaatgtgatattcataatcaactccttgaagtctttttttttttacctataggtaatgaacaattaaacatatcttatttaagttaaaatttattcataaaaa

SEQ ID NO: 90964 - DNA, 269 bp, Glycine max
  Clone ID: PAT_MRT3847_53151C.1
tccgtcgctccgcaccagtttcatcgcacgaatatcttgttgtgtggagcgatccgagaaaaactctgtaaacatgttggattaccaggacctccttacaagtgatgatcttctctcggactccttccgtgacaaggaaattcagaatggaatgctgtgggaagttgacgggaagtgggttgtcataggagcagtttatgtagacactggtgcaaacccttctgctgacggtcgaggcgaagatgatggagttgatgacgcagctgtta

SEQ ID NO: 90965 - DNA, 132 bp, Glycine max
  Clone ID: PAT_MRT3847_53152C.1
ggctgaataagtactatagtcaagataaggggctgtacaataataaatttttcagaaatcaggagagatatacttgcgttagaataaacgtagatcaaactaatcgtgattctgaagatacagaaaccatag

SEQ ID NO: 90966 - DNA, 370 bp, Glycine max
  Clone ID: PAT_MRT3847_53153C.1
cccacgcgtccgcttaaaccctctctttcacttcactcatcgcattaacaaaccaagtaaccggcaatgaaatgaacaacaacggcaatgattcttcaacttcaccgaaccttcttctcctccaccaccacctcctcctcctccgtaccttcctcacaccccctctctttctgccacttcatgttgcagttcagggcgatccagactccaccaatcgctctcgcgccgcacgccacgtcatctctcaccggcgccaccgtccaatttcgaactcgtcttctcttccctccaagagttaccgcgaagtgccacgcgacgtcgtttggtaatttccgtttgcagtttgctttgaactccacgacgcccgttg

SEQ ID NO: 90967 - DNA, 421 bp, Glycine max
  Clone ID: PAT_MRT3847_53154C.1
cttatgatctctatcttgagcgatttgtttctattattctaccatacttggtgtgtacttattggatggggatctgtatcaatttatagagtagattgataacttgttttaccacaaggacccgaaccgcgccatgggaagacatgtgttcctaacaagggaagggatccaagggaaaaaaaccgcccatcaaagcattgactgaaaaccagaattaaggcaagggaagcacacatacaaaaaacaccccaccaaacacaaaaaaaaaaactggcagaagatgtaaatgaaggacctgaaggacagctcaaaagaccacccagaccccccggggacaaatctttcttagacaagaaaaaacaagagtgggattggtgcccccaggaagctaaccccatggaggacggaaccccaaagggcc

SEQ ID NO: 90968 - DNA, 227 bp, Glycine max
  Clone ID: PAT_MRT3847_53155C.1
atatttgggggaagaccgtttttctttgttttttaggcaaggtgctttaataatatccctttgatgaaaaagaatatgaaggcccgcccttttatttttacagaaaatatatggaacagcattggggataaacaaaaaagcgagtgaggtgagaactttaccgtgagaggttaaaactctctgacgcatgctttttatttgatgaaaaaaatagagctatggaccac

SEQ ID NO: 90969 - DNA, 219 bp, Glycine max
  Clone ID: PAT_MRT3847_53156C.1
gaattcggcacgagggcaagacaacgatacaatctctatcgatcagtgtttgctttggattctattttagtttctctttataacagtatttgtgttgatttaccagttagtttctgtgccttgttttgtccttttaatcgttgggttatgtctaaagctagtttgtttacttcgatctatttatgtaagaccctctttttacttgattctagtgctaat

SEQ ID NO: 90970 - DNA, 423 bp, Glycine max
  Clone ID: PAT_MRT3847_53157C.1
actcgagccgaatcggctcgagacggctgcgagaagacgacagaaggggacaccataagaacacatgagcattgttagatagagaatatctttttagcatcaggcacctattaggaagaccaacatgtcctctacttgtttatacacatcatttctcttgcgtgattttctttctttttgcatagatagtctatatacctgttcatattcacacttacatttacacacaccagacacctatttgctgaaatagcttaccaaataacacaagttcctcgagtgttcaatactcggttcttaccgttttatactacttgtgcgatccggtgcacttgccggaagccgtacagtaacatattaaagaatacttatagtgcaatattcattccaagcattttcattctcaactgcgatcatgtgctt

SEQ ID NO: 90971 - DNA, 314 bp, Glycine max
  Clone ID: PAT_MRT3847_53158C.1
ggaagaaggctcgagaagcaatcccaaccaccggtacataccgcggaagaacagaccagagacggggggagctggaacgaaaggccccccagactcaccccaaaacggacaggccaggaacacgccggatgagacacgagccgacggaaacacgaaacaaccgccaaccaaagaaaacaccaccggcaccaagacatacactggggaggcacaagacctcacgaagggagcaaaacacgaacagacggaactggctatactgcaggaacaggaagaaaaaaatggatagatcatggaacaacaaaacaatacca

SEQ ID NO: 90972 - DNA, 522 bp, Glycine max
  unsure (1)..(522): unsure at all n locations
  Clone ID: PAT_MRT3847_53159C.1
ataagctggtgtagacacttggctcaagatggtnacattttagaacttgtggatgagagattggcacgagattacaacaaggaacaagcaagtctgtgtatcaacttggcactcatttgcttacagaaaattccagagctgcggccagatattggggatattgttaagattttgaagggggagatggagcttccaccacttccatttgaattctccccttctccaccttccaaattatacagcagatcaaggagaaaaccgaagggcactgcagaataggttttgtaattctcaagtcatctgctcaccatggtagatcaggtatgatgagtgcagtacgggatggatcattgaatatgtttgcatttggggcctgaattcactcctatcgttagatttatgttgaattcttatcagataagttatttgttctttctgttggctcaatttccgccgagcgtgccggggtggcttcggtgacggcctgggtcgccggtctccttgatggcgcatggttgcaat

SEQ ID NO: 90973 - DNA, 633 bp, Glycine max
  Clone ID: PAT_MRT3847_5315C.1
cggacgcgtgggaaaaaagatcactctgaagaagaaaccaagaataccacgtttcttcatcatttttcattcctttcttgatcatcatattcatcctcgagccgaatcggctcgagaaaaactttctcaaagattctgtaaccaacatcgacatcactgttaactatggcaacactcgctcccgggattttgttgaagctcctcaacggattgaacaccggcgtgaaacccacgaacgagcaccgcagctcgctcctgcaagtgaccgacatcgtccccgccgatctcgacgaaaaaaacctaatcccaaaacaagggtttttcataaaggtctccgattcctctcactctatctacgcgagtcttccctcggaccaagacgacatcgttctcagcaacaagatgcagctcgggcagttcatctacgtcgaccggctcgaaccgggctcgccggttccggttctcaaaggggccaagcctctccccggaagacaccctctgatcggcacgccagagcccttaatgggcctcagagaccaaaaccaaaagcccaattctgttcccataagaaggtctggcggaaccgatcgcgacggagagttgaatgataagccggtgaatctggactttgac

SEQ ID NO: 90974 - DNA, 1059 bp, Glycine max
  Clone ID: PAT_MRT3847_53160C.1
gagaaaagaaagagaaagagcgatgtcaggaccattattaaggcctcagtttgttatgttcggttcttccattgttcagtatggtctttatgatgaaggttggatggctgatctttctcacttgtatgctcgcaaggttgatatagttttgcgaggatatgctggttggaattcaaggcgtgctctgcaggttctggataaaatctttcctaaggatgcccctgtacaaccttcattggtcattgcctactttggtggtaatgattcttctactccccactcatcaggcctaggtcctcatgtgcctctccaagaatacattgaaaatttgaggaagattgttaaccatctcaagagcctctcagagaacactcgcattctacttctcagtgctcctcccatcaatgatgcaacaattaccccaaacagtgatgggaagccatcaaggacaaatgaagcttgtcgaatatattcagaggcatgtttggatgtgtgccgtgagatgaatatcaaggccattgatctgtggtctgctattaagaaaagagataattggcaagatgtctgcttcattgatggaattcacttgtcatccgagggaagcaagatagtgttgaaagagatactgaaggtcctcaaagatgcagaatgggaaccaagtctatattggaaatcaatgccaagtgagtttgatgaagattcaccatatgatccaattgcacctgatggaaagtcaactattaatatttccaactgggccttccctggcaatgacaaatgggagtagactactttattatgtgcattgaaaactatataggcttgcctccaattcattgaattctttgtaacagtctcaaaatagaagtcttgtgcctgaagatatgtgttgcttatagtttctgtatgttcaatcataaatggggattcaattctccatggtttttcagcataagagtaacttttgaattagttttacatctgttctttaatgtcttaccatatggttttatctcttcattcgtgcggttatatatacatgttttctttgtttagaat

SEQ ID NO: 90975 - DNA, 1764 bp, Glycine max
  Clone ID: PAT_MRT3847_53161C.1
tctgagtttaagtatagatccgtatgggctcttgctctacacagccaacttgatgcgttttctctctttattttcgggcttttgctagcacgctcagctttagccttaagcagaggacacaccaatcaaaacaatgagccacaggtgatgctctgattgcacgcccgcaagaagcttcgtaaggtgatagatcctgagatggctcgaaattcttacaccattcagtctcatagtcatgtttgccaatctggcatcaagatgtgtccgtactgagagtaatgaaagaccttcaatggcagaatgtataaaagaactcctaatgattatctatacaaattcgaaaggcttgggaatggttatgcatagtttgagaatgatctagtgaaatcacaagtttagacattggaattatgatgatatcttgatgagaataaaaagtgaactccaaaagtgatcagcacaaagcataacaagtttggctgattttataagatgaggaactcaatccattatggacaaagcagaaagagcattgccatttcttttctccaccctcattcatgccctcgtgctactcaaactcctttctggtcacatgacaggagtacctaagagaccatggccaaaaatataccaactccccggaaaatgttccctaacctactaacattaatattttataagggcatatgattggggcatggttcaacagattccatatgtcacattcaaatttcgagaatgataaataagccatagaacatatatgcatatataaatcgttgttttgattatattgaagaaatacagagttaatatgatttgtattttccatgcatcagtaatgtttctcctaggttcttcaataaagaaccatgtatctgacttggtatttgatcacgtgtgaccacctttacaatcttattcgtcacttggctgtctaggccagacaacaaaataaaaaatttagagaacagtatgtcgtaatttacctgtaacatattcagtctctgtcctacagataagagaaataaataaggatgcctgataccactctctactctccagtcaaactgaaaaccaccatgatcatcttgctatcattgcggaagcaaatattccacaacttgacaaaatattttgcaacccttgcacacattcacatagtcttttactcatcagaaactgacagatccgtttctggaggcgtgcttaaaagtggaagtttcttgcacatcaggtgcttacgtctctgcaatgtcagcaggacgaaaatactatctgtcttcacaattttgtaatcagcttttgtatacatgttaaatggagcttcatcaattattctgcaatgcaagtaaacctctcttgaggaactcatctgagaaattaattcctcactagcctttagaagatgccagccaatgcccctcctcctgagagacttttggacggccatgttacaaatgtagggcttatccctgggaggggcgggcgaggggatggaagcattggcgcctcttttgtcgaaacagagctccaccatcccagccaagcacgcttcttcttcttcttgatcagcgccggcggctgttgtttgggtgtagaatgcgacgagggtggcggtgtggggcatgagggacctgcggtcgaggaggtactgtttgacaaggaaggcgaggaatttgacgtagggttgggggaggagcatggactcggcgaaggactcggcgaggaggaggacggtggggtcggtctcgtggggcc

SEQ ID NO: 90976 - DNA, 757 bp, Glycine max
  Clone ID: PAT_MRT3847_53162C.1
ccacgcgtccgttcaacttctctcccttttcctttctttaatttcgtgtttccctctctctctttctctccctctttcttttcctccattgaagcatcctctccaagcttcttatccaagactcatcttggtgatgaagctctttcttccatggcttattccctagtggatgacgccgcctcttacctcttctcctttgtcttccgctgcatcttcatagtggaaaatcaccattaaaagacctgattaaaactcaaagatccagcctccatagaagctccacaagcaagcttcctttttctttctttttttattctttttccttcaaactaaccttataactttctactgcactatgttattgggtttgcatgtcaactatgggaggcaaaaatccttcgatttagagcaaatccatatccacactgatttaaccatgtattctcctttatctactttccatactcatttgtccagtccattcgctaaaacagtgacagaaatggccttgttctgcacacggcgcagaataaggaaaactcatgtgtacaatctttcttttgtttctttagaggtctgtgttgtttttttagtagtatttaattatataaattttcaattttatggtgtttttcttcgtatttcagtatatgcatccaactagggtgcagtggactttggttgaacgtatttgtgcgtcgtgtaaacccaacaagatggaaaacaaatgcgtgaaaaaaagtggatacatatgaag

SEQ ID NO: 90977 - DNA, 485 bp, Glycine max
  Clone ID: PAT_MRT3847_53163C.1
gggacacgccccgcgtacgcttgagggatacaacttttaaataactgccaaaggcactaaagcaagaatggcgcgcggcgtcacgaccaataggaacactgacataagccctgatccacaagcagtagaaactgacaacagtgctaacccacagctacgaacagagagacaaagaagagatgcaaccaaaacaccaagacacggatgagggaacatgccgactcacaatacctgcagcagagggtaaagacatactaccttctaccaccaatctaaataagggcgcacacacaacatgagcatctccaacacgacaaacaaagtgctccacacatcaggcatgagtgaggagagatgtgaagcactcaaggaagactgaccgaatgcaagaaaacacacttacaataggcagacatgagcaaccacgtgaagaagatctaaattacgaaccaaatcagtggatgaacacaactgaggggcctact

SEQ ID NO: 90978 - DNA, 397 bp, Glycine max
  Clone ID: PAT_MRT3847_53164C.1
ggttgaccaaaccgatgaagcttttctgaatgctccttgattggttctcaactctaagaagactggtaatggaaagagacctggagaaagagggaaccgcttatgcaaaaccattgcgcttggatttcatactcccatggaatgcatctgatgaacctatattgacaagaagggccccttcactggcaatgtttccatcctcggacgaatcttgtatggaacatgtccccgtgatcagatgaacaggactattagtgttcgaaggaattatctccagaatagccctatctaccagaggaacaatgagaggtcctcaagtatttctgctcctatatgaccagccctccgagagaatgtatgagatcgacctcttattgcatgatgctcgtctctctca

SEQ ID NO: 90979 - DNA, 190 bp, Glycine max
  Clone ID: PAT_MRT3847_53165C.1
cgaacggtggagtttctgcttgcggaggagcatgacccacaccctctgttgcaggtgtggccggctggacttaaaacgggggaagtgacaatgctgtgcgtgcgctatcgataggtgcccacacgaggaaggattactggagcgtgaaggtcattcagaaaaacaccacctgaactgcgacgatgaagaa

SEQ ID NO: 90980 - DNA, 432 bp, Glycine max
  Clone ID: PAT_MRT3847_53166C.1
ataaaaaataaagttcctctcaagattttcaacttaaagttgatacgaaagttgcacaaaaattacaaaagatatagaaccataagaatacaaaacctaaaagtaacaaagaaagaaattaccaaagtacaacaatcaatccatattatatattgctctttgctgaagtcggattgacatgatgtaacagtctgctgaaggctatatatatcttaagatgttatttctcttaccagcctctggatcgtagggtatgcaaagtacaagacgaggaatgatggtatagcaaaaacaatagtgactagaaagtataggactagaataacagagctgcagggaactaagaaaagggcattcagaaggaaaatgacaaccaatgggaacttggatgtaagtggaaggaagaaatcgaggggatttatgaagggaaaa

SEQ ID NO: 90981 - DNA, 345 bp, Glycine max
  Clone ID: PAT_MRT3847_53167C.1
ggtgcactacaaacgcctacatacaggtgcagtagataaatctctaaaatataccaaacataacacacaggaaaatagcgcctaagaccctaacagacacgacacgtaagggagacgtaaaggacacatcaatgctactatcagacatatacccctcaacacgatctcaccacgggctgctggcgaaccggacgaccaagcgcaggagggccaatctctagcccaggatcatactacgggccgagactacaaacaaacccacccccctaggcaacgcagcatcctgtagccccagaacctcgacactctcgaaccactaatcaaacgaagcgcacagcccaaagg

SEQ ID NO: 90982 - DNA, 831 bp, Glycine max
  Clone ID: PAT_MRT3847_53168C.1
ggagaaattcaactttatatcactttcccattattctttgtatgagaaagctgcaaaccaccaaattcttatatggttgtgctgttggtgcctcaatacttaaagttgattggattactgattgtgttgcatctagaactattttgcaacctgaaaaatacatgattcttccaaatcgaaaagacatgaagtggaccaggattgggacaacaattcatcacagaaaccaaaaagatatttttgaaagagtaggaattctgctccatgggaagcctagtttctgcaccaaattggcatgtatcatcaagcatggaggtggacatgtgttcaaaactcttcaagggttagaatggagcactgatgaggaaaggactttggttggagctattgtagttgaagataaggctacaatatcacgtcatctgaagcactgtgccaaggagcggaacatccccatcatgccttttagctggatcattaagagcttgtattcaggaaagttacttcctttcacggaagaaaagaatacactttctttgccatttgttaacgttaaagtctctgaagttccaagttcttcagatatgagtgaagaaatataaaatattctctcagcaactatctattaacccacactatcagtgatggcttctggagcaatttgaagatcttattttgatttatagaaggggctcacacaatggcagattcagaaattttaagtttttacggagacattattcatgtatgtaattctgtgagggcaatatgcatattatgtattgattttttttactacatttaaaagtatggagacaatttgtaaatata

SEQ ID NO: 90983 - DNA, 223 bp, Glycine max
  unsure (1)..(223): unsure at all n locations
  Clone ID: PAT_MRT3847_53169C.1
tgcaagtgcaggggtggcaagancangggggtccacatttacaaccatcgttctcaacgggcacacccatgtcagcaccctcaaattgaaccttaacaggtgccactccgatgaccaaagtctcagtggtgggtaactcangatagctcgaatctagatacatgtggcgagctgcncgaccattaccacacttncaagaactggcnggaccacgatgaccacc

SEQ ID NO: 90984 - DNA, 227 bp, Glycine max
  Clone ID: PAT_MRT3847_5316C.1
cgataagacaacacaacgggacacaagtgagtatgttgatcgatatagctagaggcagtgtgatgaatatgaaggtgcttgtaatattcgttgctacaatattgggagcatgggaatgccatgcgtacgatatgttccctctccgaatgaacactggctatggtgcccgtactcctgaagtgaaatgcgcacgttagaagcttgctgaggaagcacacaacatcttt

SEQ ID NO: 90985 - DNA, 460 bp, Glycine max
  Clone ID: PAT_MRT3847_53170C.1
tggctgcgagaagacgacagaagggatctatattgataatcatttgtacaatattaagtggcaaaaacaaacttctgtaacatttgtagtcctagcattttgtaaaagtaaattcaaagtcatttcacacagtttactaaacaataacaaataaaacttagtagcatattgtgtcttattttatttgttttcttctgattttaaatctctgctattacatttctaaaaacaattagcgcaccctatcaagtgcttcaatttcttcgtaaaaggaatgtaaccacacatgcatacacagtctagcagtttcaaggagactaaagtattcagtacagtgagttcaattctgaccataaattggagaaaatttgttaatttggcaacaattctgagcaggctcctagctaggtaactagccacgattatgacatgtacttaaaaagacatgtttaatgaacac

SEQ ID NO: 90986 - DNA, 420 bp, Glycine max
  Clone ID: PAT_MRT3847_53171C.1
ctctttttttttttttttcgacagagaacaaggcatccgattattttttaaaaaataatatgaaaaggcacaacaaaaccatagcacatatcctaaatgtataattgtcgtaaaaaaccaaaaaaaaaaaaaactttttttaaaagtacaaaaacagggggggggagggaattttttttaaagatgaaaacccacaatcacaaaaccatccaaccatacttgcagaccaccccacaaacagtactcaacagatacacagcccatcacatttccttactgcgggccaaccattatattttctgaggtggcaacctaggttaccaaccttttatgcatatcagccaccctacgaggagaacaaatcattcaccagccgcacataaatactatgctggggggggcgggtgcatcttatgatcc

SEQ ID NO: 90987 - DNA, 718 bp, Glycine max
  Clone ID: PAT_MRT3847_53172C.1
ccacgcgtccgctaaatctttgttctttcttgttccattttcccaaacttccttcactctctgtttgctttctcaattttggaaaatgataacgtcgatagtggttaggaaggccgccggaaagcttgaaaagaggccagccgaggcgcccaaaacattgatggacacagttcttacgttagcagaagccataaggttcggttacgccgagacactgggcaaatggcacctcttggacttgccaagagccatcctttactctgtcatggacaagggtaagaaaacagttgcagttgaatgcgctgaaagaagtgactgtgtacaactgaaagaccccgaattattaaaggagttatatgagctcaaaaaatgcttgacacagaccatgcttttcagcaaaaaacgttttcgtgcctttttatttgctgctggatttgccaaggaggatgtcctcctaaggaagagaagagctcggattctgaagcccgctttcacagttatacttaataaagaatcaaaatgtttgccttgtgttcatccgaggaactcgtagcataaaagacacgctgacagatgcaatcggtgctcccgtttccttcagtcacttcatttgcagtgatggtgagctgaagaagagagacacgtttcaggacatggacaccgtgttatgggtgctgcagctcgttggattaaaagcactgcaccactatattacttg

SEQ ID NO: 90988 - DNA, 351 bp, Glycine max
  Clone ID: PAT_MRT3847_53173C.1
cccttgcgtctttggacgcgtgggttttgttgcatgtaagtggacaaaatcggaaccacattcctgggaatggatcttcccaattgaggtatgtggtcctaatcttggttttgaaatgtggagttctgagtggacaattcaaacttgatggcatttgagtttttttattgactgtcgctagcagactacatttattggatttctctggggaatatcttcagattatgcacatgctgattgttctctgatggcgactttttatggatcccaagttcctggcggatcttgttaagatgcaaactcctctgcatgaactgtaatttgatgatgttgtaacttgtatcggtgtca

SEQ ID NO: 90989 - DNA, 503 bp, Glycine max
  Clone ID: PAT_MRT3847_53174C.1
aatctttgttctttcttgttccattttcccaaacttccttcactctctgtttgctttctcaattttggaaaatgataacgtcgatagtggttaggaaggccgccggaaagcttgaaaagaggccagccgaggcgcccaaaacattgatggacacagttcttacgttagcagaagccataaggttcggttacgccgagacactgggcaaatggcacctcttggacttgccaagagccatcctttactctgtcatggacaaggtccattttccaacttcttaatacttttccatttttcccttcaaatttttcctcttgtcattgtatatgctacattgaatttgaaagtggagtgcccttattgggtgtgacgtagttgtagggtaagaaaacagttgcagttgaatgcgctgaaagaagtgactgtgtacaactgaaagaccccgaattattaaaggagttatatgagctcaaaaaatgcttgacacagaccatgcttttcag

SEQ ID NO: 90990 - DNA, 516 bp, Glycine max
  Clone ID: PAT_MRT3847_53175C.1
aaaaggaacaaattaggttcaagtttttcttcaccccatttttgaaaaagaatcataatccaattccgctggggaaacaaccctcaaatcaaatggtcattaataccacaatcttttttacgggactttggaaaattttcaccccccaaaccaaaaatatagacgggccttcactttctttttaaaaagggaagtaaaattgctggactggaaacaaacctgcgcccttccccaaaaaaaaaggggggaacagggaatcccccagattaaatcccagaaatcctttccccgtaacaggttccagatagcaagactgacacccccctcccccagaggcaacagtcggaaagtctgaaaatagaaagaaataatgcatcggggggaattgctaaactaaaaggccctccaattatcaaatcctcgtctgggagtttgattatccgatgaagtcctaaacgggccagagccaaggggatccgagtcatcaaaagctggaaacccatgagcatgggcaaa

SEQ ID NO: 90991 - DNA, 206 bp, Glycine max
  Clone ID: PAT_MRT3847_53176C.1
tccacctaataacagcttatggtggatacctcagcacccagagacgacgaaaggcctactatgcgacaaaatgcctctgggacttgtacctattcgtagatctagggaatcccgattctacgtcaacccttcgtcactgctgctaagtccactcgccacgcaagatacaacctggtgaactgatacatcttatctagccacaggaa

SEQ ID NO: 90992 - DNA, 334 bp, Glycine max
  Clone ID: PAT_MRT3847_53177C.1
gcctaaacctgtctcaagaaggccacattacgcccttctggggggcaacgcgacacactcccatcgtctccttcttcatcttcgtcttctgactcaccttctctcattcaagacaggcctggctatgctgaccctgccctcatcatcaccccaactgatgcagaggatatggcgaaggaatacgagcaagctattggataactacagaacttgttgtgcggaaagagtgaacatctagccacaactgctcgaaaaggggaacagatgacatcttctctgggaacatcatcatctgatggcataccatcattagaagcctgagacaggatccaag

SEQ ID NO: 90993 - DNA, 478 bp, Glycine max
  Clone ID: PAT_MRT3847_53178C.1
aaaagggttggtaaatgttatatatttatttttattaatatttttttactttttttaatgtctttttttatttggagggggggggaaaaaataaaatggaacccagaaaaaaaactttttaaatttttaaaaataaaccggaaaaatggggagacccatggttttacccaagggttcccgggaaaaaaaaaacccaaaaaattttttttttaaaccgagaccgatggaaagccccttgatttaccccgaaaaatttgccccggtgccaaaggggatccccgttttccttttagaagagataaaaaacgctggcctaaaatggggaaaatggggttcctttggaaaaagatgattcccattaaaagcccaaaaaaaaatggccgctgaataaaaaagaaaaaaagcgggggcgccaaatgaaggaatccccccacatttgtgggggggcgcttactggcctgttttcaaaggggaaact

SEQ ID NO: 90994 - DNA, 783 bp, Glycine max
  Clone ID: PAT_MRT3847_53179C.1
gcgctctggcaagtttgtggctttgtcttatcattggttaccatttgttgtcatctctgattccaccgtccacgtcatcaccgccaccgccaccgccactgctatctactgattcgttttttgctccttcctcaggaaaatgggattgtggaccttacttgaggggttcctgcttcttgcaaacgcactagcaatactaaatgaggaccgctttctcacacctagaggatggggcttatcagatttttcagctggccagacaaaatcttttaaaggccagcttataggtctcatttatgcaactcagtacctaagatttcctcttatacttctcaactctgtcttcattatcgtgaagttagtttctggatgatgcctgaaaaggttccaagagttatcatcaggttatttcaatttgttttaaggtaggaaaatttgacagtagttatctaccaaaaaaatgatcaaagtattgtagaaatattcattaaaagtattttttttgagatattgaatcattgtcctaaaatcatgtttgccattgtgacataactagtcagaaaatgagattcattgtgattgtgatattagttgtgcgggtgttgtattcattttttaagaattaattacgtctgctgatgttcctattgtagattctcaaaactcagataaactctcctggattgcctgaattactactttgtttgccacacacaattcaccctaataaaaccgttacttctcacttcaaaaccccctcattctccccaacctaaacacttt

SEQ ID NO: 90995 - DNA, 208 bp, Glycine max
  Clone ID: PAT_MRT3847_5317C.1
tttcttgtgcggcgggactttgctttggggtggttttatttaatattctctacaacaattctttggtcagaagaaaccttactttgttggctgttccaaacctgctactggttacatatgattactgcggtcatgttgatgttttctctatgactgctgccgttattacgtattacgatgccctccgaaaagcgctgacgaggagatg

SEQ ID NO: 90996 - DNA, 365 bp, Glycine max
  Clone ID: PAT_MRT3847_53180C.1
ggtggacatccctactcctttgtgttcccaattaacatatgagttgctacttcacgagtttctgcgcatcaacagctgtcctgtagagagtgatgcatctattatggctcttcatcacgataggaagaaaactaatgtgtccacttaattcaagtgacacgcgctttaaggagatacgagatctcaactttgaaggtgttagccacattttgcgccaaaaaactacttccatgatgcaagactacacagaaatgacaacttctacgcatacaacttccaagttgcaagactttttgaaaaacctgaactcattgtcagagatgaccaggcacattaatctttctcattttttttaacattcacat

SEQ ID NO: 90997 - DNA, 304 bp, Glycine max
  Clone ID: PAT_MRT3847_53181C.1
ccacgcgtccggctgtgtctagcagggcctgggtgaaagctgtaatgttagatcgcaccccacagggtggagcacacagtccggggaatcgcgcgtatataggacgtaggcaaggctatcccacaactgatgttcgcaaaggactctgtactggttgcacgttctgtggtatggtgagccgttgtatagagggaccggtccgttgaggacgatcacatgagatgtgccgatgtgccctcgctgtacaagaccatgttattgttcgatcgacatggaagacagagggaacttattctcatgagac

SEQ ID NO: 90998 - DNA, 224 bp, Glycine max
  Clone ID: PAT_MRT3847_53182C.1
tcgatttaccattgccaacagtactagttgtaattgtttctctcttcttccttcaatccaggcaagattataaggcccgtcgccatataatttccctatctttgaaagccttaattaattcatacatataatgttgtacataatatacatacatccctgataaaattgtatgaaaaggttccttccaaattagtccttccaatttaagttatatttccaaattg

SEQ ID NO: 90999 - DNA, 337 bp, Glycine max
  Clone ID: PAT_MRT3847_53183C.1
gcgcccacgcgtccaatgattccaaagtttgatcgtttttcacttgatctcatcataatggtcatctgcaatattttaaaatgcccatcagcaacatcgccgtcagaaggcctgaaaaggcgactcaccccgacacgtttaacgctgctttggctgatttcatctcaaccttcatcttcgtgttcgccggctcatgctccagcatcgcctacaacaagctcacctacaactgccctgccaccccttctctccttatctcctccttcatcgcccattcattccccctcttcgtctccatctccgtcggcgccaacatcttcggctgtcacattaaccc

SEQ ID NO: 91000 - DNA, 251 bp, Glycine max
  Clone ID: PAT_MRT3847_53184C.1
gggtttggtttttttaatttttttgtatgaagaagatgagagtggtgtatgcagcgttagaccggcgtgaccaaggtccttgggcgaactggcagaccgaggagaaaaggcgcatattacagagccgacaagcaaggggggccaattcctccttaaggggggtggaaccccaaaaaaggcaggtttagggacctttatagggaaatgggggagaagagggggggggtaaaaactccagaccggattccgac

SEQ ID NO: 91001 - DNA, 409 bp, Glycine max
  Clone ID: PAT_MRT3847_53185C.1
tttatatttttttttcttttaattttttttttcattttttttttcggggggcaaaaaaaccgtttaagagaaaagttatatttcaatttgctaaggactaacaatatattttgtacttaaaaatgtcttttggcacaaaactttaccttaaattgtcccaacttctttttaaacccacttaagcctttttaaaattttggaaacacttaatttaagctgcaccctttcccttttttttctggagtttttctatgtaaaactccaacttctttccttccaaaatttagccctcatctcttcctcattttccaggcctttatgaaattttttcaagctaatttccaccaccaaactgtttctctatgttagcatttttctctccattttttttggcgtcttttcaaatttt

SEQ ID NO: 91002 - DNA, 275 bp, Glycine max
  Clone ID: PAT_MRT3847_53186C.1
ggggggttttttttttttttttttttttatgtaagaactgctttaagcacctaaccatatacaaaaaaaaggccccctattataatctacagacatttgcgtgagatctatttagaccttgcaaaaccactacttgttaaccattaatgggtgcaaaaaggcgggggcactccatacttagaaaaacttgtaacattaaattctgcccccataatttgtcaactaaaatttccctacatggaggaaggtcctagtagaaaaaaaaagccattgag

SEQ ID NO: 91003 - DNA, 445 bp, Glycine max
  Clone ID: PAT_MRT3847_53187C.1
ctataaaactatgatcctgccctctaccgatcgtgagaacgattggactccatttatctggtgagcttcagactgtacacattggctgccctcgtgatcattactctattcagggctttatagaaccaggtccaggacatacattgtgccggactccccggcttattgagtctaaacagtaacgtgcttatccagaagaggctgaggcgtcaaatgaattctgctactatgaataaggatactgtcatacatgccgcgtgcattgcagtacaatcatctccggtggaaagcgcggattatagaaaacaactaactcaagactacctgctcaggcaagttgcaaaaccgcttccagtatatggaactttaaaggatgccatacattgccttcctaaagaggtctttgagactgatgatgtgaaagcatggcaatctgttctgatat

SEQ ID NO: 91004 - DNA, 1651 bp, Glycine max
  unsure (1)..(1651): unsure at all n locations
  Clone ID: PAT_MRT3847_53188C.1
acgaggccattctcaatttctcaatatgttcttcccagagaaagccacaattcttgctgttgatattcttaatgaacttgttgaggtgctgaaaatcaggccttgccccattgtttttgcatccttttcaggcggtgcaaaagcttgtatgcagaaggttcttcagataattagtggcaactctgaagctcataatatggatgactaccagatagttagagactgtatttctggctatatttatgattcaagcccagttgattttaccagtgattngggtgttcgatttcttctacaaccaagtgttttaaaagtgtcccaccctccaagatttgcttcatggattgcaaatggcatagcttctggtcttgattctcttttcctcagtagatttgaatcacagcgtgcagaatattggtggacactttactccaccattaatatgcaggtcccgtatctcattttatgttcagaaaatgataatcttgctccttttcaagttatttcaaattttttccaggactaaaagaccttggtggagatgtcaaattgttaaaatggagtgcttctcctcatgtaggtcattttcggcatcatccaattgattacaaggctgctatcactgagatccttggcaaggcagttgcaatttatcattccaaaaatagtcgaattgaagacgagaaacagggtatagaaggaacaaaagatgagatcacagatccgttctctgaattgaggaaagcagcaatgttctcaactagttttcagggttttgctcttgctccaagtgataatttgtcttctagttcaacggagtattatgtgggtaaaggtgttggcaccatagcagatgaacgcaaaggagggtttattcatctcccgagccgtcctagcatcaatgcaaatggggttcttggccaaatattgtttgatgtttgtgtgcccaagaatgttgaggattggtgtatcaggtcaaattccaagaatgcactagtagcaggtacaaggaagcatgttccatttaatccgataaaatgcattcggcgttcaaggttgtaagattgttgtgttgactgacagaagctgcgtgaggaatatgcttggaaggttgtgttgtcttcaaggttcaaaatttttagggagatctaatgggcaaaagagatgtgtagtagtattaatacctgaaataagaggctaacggactatataggttaccacctaagctgttcttttagcactgtggacttggtaatgtgattgagcagtttgcctttttcttaatgtaaaattgtacagatacttcaacaacaacaacaacgccttatcccactaggtggggataaaaacaatgttttgactgagatcaccttgataagattatagggggaattataattgtagccccaaattctgatcgtaaagaaagtactaatgactgcttctgagctcaatatcaacctcgctcgttcagaatcaagggtggttgtttgacgtgttgaataaatggaatgctcctcggtcttgtactgtaggttttttttttttttgctgaattttcttgtacagtagttagtacaacttattaatagcacatgtgaatagtattgttcctcatatatatttttgattatattttagtatattaaaa

SEQ ID NO: 91005 - DNA, 411 bp, Glycine max
  Clone ID: PAT_MRT3847_53189C.1
aattcggctcgagtgagcattcaccacgcaaatcaaaaaaccaaatctcaaacccagatcagaccaaccctcaaaaccaataacaaaatctgggttctcgctgacaacgccactcctcatgactccggcagccaccgtgaacacaggatgttgtcgtgtgagatcgcagttgtcggtgtcatctggaaggaggcgcaggatggagtaccagtcatggggggtaatgtagtcgtcatcactttcatatctgagtggatgatggaatctctgaggatgacgtcgttttgaagcgccgaagctcccaaatttgccaccaacacgcgcactgcaaccaccgcgtgccgccagcgaaccatcccatcaccccctcagcccagatctgcattccagcacctcactaaacgcacgatg

SEQ ID NO: 91006 - DNA, 140 bp, Glycine max
  Clone ID: PAT_MRT3847_5318C.1
ttaagattttatctaaaagcaattatggtgaccaagatgcagttgcatggactgatttagcagcaactttagactgatcggcagcgtacatagataaatggggtaccatacgactgcatctacaacaaattctggcgtgt

SEQ ID NO: 91007 - DNA, 520 bp, Glycine max
  Clone ID: PAT_MRT3847_53190C.1
gaaaagataatgacactaacattttggtttgtattaaaatttcagctgatctggaaatttgtttttaaaaaggatattgaagacaatagttttattctgatagattaaaaaggaacaagctgctattggactggctggccaatattgagtttaaaccggtgataattgagattgttaccattgttcaacggaattgttaatgaaatttgatttgctcagatgatgttactatccactagggggaaactaacaagtgcgtgaacaaaaggaaaccttaattacacacgtgtactccattgcttactctcttttcgtttccttaaacactgcctgagatatttataacatggggaaaaggctcttggatgatgacggatccagcatgcaggggtatatggctacatacactattagctacgggcttatactacaggactttgaatagaattcaaactatttaaactgctgtgaatggcacctgagtaaaggggccacgggaatagggcaccccacaccctag

SEQ ID NO: 91008 - DNA, 207 bp, Glycine max
  Clone ID: PAT_MRT3847_53191C.1
ggcagccaaaagaaaacacaagggggtacacctccggctgctacaattcaaatctaccagtacgcatagctcaactgtcaagacatctcactccagcctcagttcatcgactagcgcgattacctttcaccaagcccgatgaatcagcctgttacaatcagaggaagacaaagtgaacctgcggaaaatgcaagtagaaggtcaact

SEQ ID NO: 91009 - DNA, 963 bp, Glycine max
  Clone ID: PAT_MRT3847_53192C.1
ggctcgttaaaaaacttgtcttttaagttttaactctaagccatggctcttcccctgttcctcctctgcttcatgctctgcatttcactcacacaccaaacgattatgttacccctaacacactcaatttcgaaaacccatttcaacagtacccaccagcttctcaaatctacctccactcgctcagcctcacgcttccaccgccaaactcatcataactccgtagtctctctcccactttcttcaggaagcgactacaccctttccttcaacttaggctcacacccttctcaatccataaccctttacatggacacaggcagcgacctcgtgtggttcccatgcgctcccttcgaatgcattctctgcgaaggcaaattcaacgccacgaagcctcttaacatcacgcgctcccaccgcgtctcgtgccagtcccctgcatgttccacagcacactcctccgtctcctcccacgacctctgcgcaatcgcacgttgtcctttggacaacattgaaacctccgattgctcttctgccacgtgtcctcccttctactatgcttacggcgacggaagcttcatcgcgcacctccaccgcgatacactctccatgtctcagctttttcttaagaacttcaccttcggctgcgcccacactgcgctcgccgaacccaccggcgtcgcaggtttcggtcggggattactgtccctccctgcgcaacttgcgaccttatctccgaacctcggtaaccgtttctcttattgcttggtctctcactctttcgacaaagaacgagttcgcaaaccgagtccactcattctcggccactacgatgattattccagcgagcgtgttgagtttgtttacacctccatgcttcggaatccgaagcattcttatttctactgcgtcggactcaccggaatctctgtagggaagaggactattctggccccggaatgc

SEQ ID NO: 91010 - DNA, 4575 bp, Glycine max
  Clone ID: PAT_MRT3847_53193C.1
ccatattattactattaatattttttggggttgtttttatgcccatgatcttaaaggcccagttagtaacaggccgtttctatggtatcacgaaatgtttatggattttgttgggctgggcctggctgggatggaccgagccttgtctggcccaatctatcaactgaattcatgctcacttctgatgagttgcggacttgttaacacaaacaggcccattgagcattaccacgctaggcatatgtgtgtgcctaaaaaaaattgtctctattgtttaggacagggtcttaaattgtagtggcattgctcttctggttagtaaaattgctgaaaattactgaggtaaatggattgtggtcacaatcccttacactatcgtttcactttgatcagaaaaaaaacaaaaacactaagtgacacgagcagtcatattcatcactgtgccacgttttactgattgcattggtagtaggtatctgttaatgtcattgccaaatgaccaattcctatcaataattgaaggcttatgtttgtatatatgttctgtcgctctgacgtgtcgacattcaggtggtgcaaaattagagatgtgacaaccaggtttgtctttaactatatatgctgatcaaggtcttctgtgtttacacatgctttgaaagggtcctgttcattagagaagtaatgtatctatcgtaatgtttattgatacataatgtttattttagaactgagttataggtgaggggcataatctataaacaattatctttgtttcaaaactctatggcaagtggcatgatctatctataatgatgcttattttaaaatcctttgacagagaagattagcataatctatcgatgactatgtttgttttaaaactatgtgataaaatcaggaaatcgttgtggtttgagtgatagtaaactcaagtttaagtcttataaaagaaaaaaaaaagccctccaaaagctttagcaaaataaattaattaaacattagatattaaagtgatgttttaataaaatacagcaaacatatttgtttaaattgaagtcgagaaagccccacctcaatcataaaatctgtaatataaaagatagttcacattttcaaacaaaataataattattattattatacacaaaataaatatcacaaaattaaaatataaaaaaatctaaacctgtagttcacgttttagttttgacctagtgtcaattacatacacatgatcgtggaattggggaacggagcctgaacccaaacccaaacccgtcaacttattttccatttacaagatccgacccgacccactggcatgggggcagtgatccagtggtaaacagaacacagtaacactagtttttgtcacggttgagactatcccaaagcgacgcgcattgcctcttagcaaaacccacgcgctggttttccaagtcatacacgacctcaaatccttgctgttgatagttcccaagtatggccccgggcccaccgctcagttcagtgtcatcaccaccgttcattagcatcagacagcccaccttcctcctagcctcatcctcaccgtccaagaactcgtaaaaataattcatcctaggcagcatcacattggaattattccccaaaaaatgccacgtcaccgtgggcacctccaccaacccctccaaaaaataacacggcccgaggccagttttttcctccacctcactcgcgcgcttgtgaactcgcccgactcgccggtcgaactcagcaacaaccgagttatacaaactcgccggcagcatcgtgaaagtgggttccgctgtcaacaaccacgcctccgtcccctagagaactagtctcgagtttttttaacccaaagcaagacctttaatttcgctttattcaacaaacatttaattaataacaaggacaagtttacatttttttttccaccttacatatgtacaattgcaagcaatcgcacggcttgagagtcatatattcacccctccattcttcttcatgctacaaactatattatatttaattcccacatttttgttttccttttttttctattgccactgttacgtacactttgcaataaaaggaacaacaataattatgaaagcctagagccaattaagattgatttttctctaactagcccaaagcatatgtttaatcttaatcacttgcagccaccagcaccaaacccaattcttccaccaccaacatcatacacaacctctattgttttctgctgcacgttcccatatatagtaacatcactatcgtcaccatttgcagcaaaagccaagcaaacttgcttggcactggccacgtagagtatcccttgcggcggaagctgcaccgtgacgccgccggcgaaggaaaaatctatcttgggaatagaaaagacctcgtagccgctgagatcataacacgtgtcgagtatggagagttccccggcggaggggtatttggacatgccttgcctgaaggcggagcggagggcggtgtaggcggtgggggggaggcgggtgatcacggtgccggagtcgatgattgcaccgccggtggagaaggtggaggaggagactgggagtttggcgccgcccacggagatgccggtgatgtcgaggccgtagaaggaggagccgcgggagatggtggagaagggggtgtacttgacgtaggaagtggtggtggtgccgaaggagaggcggccggtggagctggaggtggcggggaggcagtaggagaagattttacgatatacggcggcggtttgttggacgaaggagatggggtggcggccgaggccgatgaggccggcggagccaccaaagaggccctggttgttttggccgcaaccgaagaggaagttgtcgacgatgtcggtggcggtcacggagagccgctcgcggctgaagtagccaacggagaacgaactgtcaccgtactggatgccgtatatgcatgcttttgtggaggctgaacatcccggctcattccctgtagcagtagagagctgggtgcagagcgtagatgtgcatgtaatattggaatatgatgtagactttgatggatcaaagatagcatcttgttgcttgtagcaagaacgagcacatggttcacactgagtccaagtgagatcactgccagtgtcaaagatgagtgacaagtccctcttgggtgttccaagaccaacaaccacaaagtaattcccagacccaataaggctaccagacttggctggtagtgtaactgagtccaattcactcacactactatcttggcccaagttctttgagatccttgagttaatgtacttaaccctttctttgtcttggttcagaatctcactgtgtggtgttgtagactttgctttgccatcatgattattcagttgggagcatggcccatgtttgtgtaccacttctaatgatgcttttcttttgggacctttggcagaagagctgcaggaagatgaaggaaggagtgagctgaggtgaacaagatgagtatattgatgaagattgttgctttctgtgtcctcctttgttgtttgaaaggcaaaactcttctccaaggaagagaagcaaaataaaattgtaagagaaacaaagacaaaagaagacatttgaatggccatgccaagaggtaagaaatagccaagcctagcctaaagccgcattcagccgggatgcggtccagcctccgtagcatttccggggccagaatagtcctcttccctacagagattccggtgagtccgacgcagtagaaataagaatgcttcggattccgaagcatggaggtgtaaacaaactcaacacgctcgctggaataatcatcgtagtggccgagaatgagtggactcggtttgcgaactcgttctttgtcgaaagagtgagagaccaagcaataagagaaacggttaccgaggttcggagataaggtcgcaagttgcgcagggagggacagtaatccccgaccgaaacctgcgacgccggtgggttcggcgagcgcagtgtgggcgcagccgaaggtgaagttcttaagaaaaagctgagacatggagagtgtatcgcggtgggagcgcgtgatgttaagaggcttcgtggcgttgaatttgccttcgcagagaatgcattcgaattttttttttttttttttatttgttctaaatgaatgggactaatgaactagccactaaaggactaaatccgcgtggcgcgagggagcgcatgggaaccacacgaggtcgctgcctgtgtccatgtaaagggttatggattgagaagggtgtgagcctaagttgaaggaaagggtgtagtcgcttcctgaagaaagtgggagagagactacggagttatgatgagtttggcggtggaagcgtgaggctgagcgagtggaggtagatttgagaagctggtgggtactgttgaaatgggttttcgaaattgagtgtgttaggggtaacataatcgtttggtgtgtgagtgaaatgcagagcatgaagcagaggaggaacaggggaagagccatggcttagagttaaaacttaaaagacaagttttt

SEQ ID NO: 91011 - DNA, 292 bp, Glycine max
  Clone ID: PAT_MRT3847_53194C.1
aaacatcaacccccaaaaacaaaatttcctttgaaccgcccattacaaaacgcactgggggatacattctgggccagcaggggtgccccattcggccaggtttggggttcaacaacacagggggcctacaataacctttttggggaataaagaacctgccccaattaagtaaacattaggcacggggaaggggggaaaaattatttttcctggggtttgggttttgccctttgaagccaattaaggaaggggggggcattcttcaaaatcttagaggttttggttttgccct

SEQ ID NO: 91012 - DNA, 122 bp, Glycine max
  unsure (1)..(122): unsure at all n locations
  Clone ID: PAT_MRT3847_53195C.1
gcgaccattttcanctctccgtattcgcagaagtttcactttcaanaattaatcggaagnncaacgtgaaatgcatatcaataatcaagatgtgattaattaattagtaananntagcacaa

SEQ ID NO: 91013 - DNA, 561 bp, Glycine max
  Clone ID: PAT_MRT3847_53196C.1
agcgctttaattcaagctcaaaatctctctcccttcaaattgattcaattcaaccatatcaaagagagagagagagagatgactgagttgcaaaggtcagtaacatcattcagaagacaagggtcttcgggattggtgtgggatgacaaattcatcgctgggattgagaatgaaaacaaacaagagagtggtgatggatcaagagccacgttgcagcgaccttatcggacggtcaacgttgcaccacaagccatggaccctccttctcccaagctagcaacttgtggcttctgtgctctctttcggaaaccagtttctgccaaacccaccaaatctaaaagacgtactaggtgatgatcatatttctttcttattttctccaacttgtaaattagtgccgcttcttgtttgtctctgttttaattttgtggttttggattatttgtaaattccttagacatgtgatatgtatctcggtatgtaataattaagcatactcgaattacacctaaacagggttggagattctacactacaacataatcccaatggttaattttg

SEQ ID NO: 91014 - DNA, 313 bp, Glycine max
  unsure (1)..(313): unsure at all n locations
  Clone ID: PAT_MRT3847_53197C.1
nnaatacccgggccgacgagcaacctataggcggccgcccgaccnnnnnnnngggggaaaaaaaagagcggnnaccggccganaaccaaaanngcagnagagncnnnacgagggaccaacncaacanggagaaaagcaaagnggaaaaacccgcacagaggcncgcgaaaaaacccaccagagagaagccccgccagcagaccaaacagaccccacgaggacggaccaggcnaaagcacaccanaanncacagancgcaaaccngagcacgccnggngcaaaccaccccgagagcaccaacccccacaggaaa

SEQ ID NO: 91015 - DNA, 187 bp, Glycine max
  Clone ID: PAT_MRT3847_53198C.1
gaataatgaatccgggattttgtttttatttggaaactaacaaaaggaagaggttttctatcttggctccaaatggaaataggagcaagtctgtgcaccagaggtagaacaaaattttcaaaacatttagagcaccgatgctctgattaaagatcaccaccctaaaacaacgtgggttatgatctac

SEQ ID NO: 91016 - DNA, 373 bp, Glycine max
  Clone ID: PAT_MRT3847_53199C.1
gcacgaggcagtgcctactttcacagatttagtctctcccatttccccgacaaaacaaaatttttttttttaaaaaaaagcttcggctacaacaattgcatatatatacataattcattccttcactgcaattttttcgggggatacgtttggaatttgaatcatgtggggcaccattgccaatttgaaggagaacctcaacaagatcgccctcgatgttcatgacgacgacgacgacgacgaaattttccgagtgtacggtgccggaagcccatccaatggcggcagctctgccgtctccgatcgccggagctcccacggctccgtccgttccagatcggggattaggtcgccgctcgcaaacggcatcgat

SEQ ID NO: 91017 - DNA, 1633 bp, Glycine max
  Clone ID: PAT_MRT3847_5319C.1
gcgggattagggttttgcactccagagtccaaactcacctgcttcttcctctttttttcatttctcttcaacttcctcttctttcaattctcttcagtctctctccgccttcccaaaatggtgaaccctagatgcttcctcgacgtcagcatcggcggcgagttagaaggccggatcgttgtggagctcttccacgacgtcgttcccaaaactgccgagaatttccgcgccctctgcaccggcgaaaagggcatcggtcccaacaccggcgtccccctccactacaaaggcgtgtgtttccaccgcgtgatcaaaggtttcatgatccagggcggcgacatctccgccggggacggaaccggcggtgaatcaatctacggcgccaagttcgaggatgaaaacttggaggtgaagcacgagaggaaggggatgctctccatggccaatgcgggacccaacaccaacggctcccagttcttcatcaccaccacccgcacccctcacttggacggaaagcacgtcgtgttcggtaaggttctgaaagggatgggcatcgttcgttccgcggaacatgttgttaccggggaaaacgaccgtcccactcaggatgttgtgatagttaattgtggggaaattgctgaaggggaagatgatggagttgttaacttctttaaggatggtgacacctatcctgattggcccgctgatctcgatgtcaaacccgatgaactttcttggtggatgagtgccgtggacgctatcaaaacccttgggaatgagcagtataagaagcaagattataagatggctctcagaaagtatcgaaaagctttgcgctatttggatgtgtgttgggagaaggaggacattgaccaagagaatagcgctgccttaaggaagacaaaatctcaaatctttaccaacagttctgcttgtaaattgaaattaggtgatctacaaggagcgttactggattcagactttgcgatgcatgatggagataatgcgaaagctctgtttcgcaaaggccaggcatatatgttactcaacgacctagatgctgctgttgaaagtttcaagaaagcgttagagttggagccgaatgatggagggattaaaaaagagtatgccactgccaggaggaaggttgctgatagacgtgatctagagaaaaaagcttattctagaatgttcaaatagagtttttgcagtaatggtacatgtggctgaaaaatcagatatttgtggggggcatgtctattacatagtgaacaatttctgatttttctgtcagtagttatgaaaacatccgatatagtgcatgtttttgagtttatgctttctagattgtgaagttgtgatagtattcatatcatcatacttcttttcttctgtcaaactctttgatcatcaaaggttaactggtgattttttgtaaaagagcaggcagattgagacttcccaactcactttccctgattttctttgcctttatcgtccacaatcagaagtgtttatgccagcaagttaatctcaagacagaacaactcagtaaaattcaacttttgttgatttgaatttaagtaaaattagctttattaaaaaaaaaaaaaaaaaaaaaaaaaaaaaaaaa

SEQ ID NO: 91018 - DNA, 341 bp, Glycine max
  Clone ID: PAT_MRT3847_531C.1
agtgtacaataatgacttatatatgcaacacgataacagagatgcgcgtaggagtcgtatgtccataataatcgtagacagagcgtgccatctgcaaccttaatcgaccacaattgcatcatagcctcgaacaatctacttctgcatctcgtttccaagtcgaccagccttaaacttcgagagagatgtccaatcgatacgttgttgagtaataggaagagcacgtcgaagagccttgaatgtggttcctcccatgacttgataactgtcaacaagggattggtggaatgcttgttcagctttagtgatagccttaacagcagcagaagcaatagcatcag

SEQ ID NO: 91019 - DNA, 259 bp, Glycine max
  Clone ID: PAT_MRT3847_53200C.1
cgagaagacacagatgggactctggagcagcacttttgatcgccaagacatttatccaatctccgaatcccttcagcgcttttttatcacgtcgatacgacttgtgttccatcgtcatgatcttcgtctgacttgggccctctccgttgcacatctggctcatgtgtccgtactccgtaggtgatgtgcgccctttgctggcttgcctgttccagtacactttttcttttgctttgccactcttcctgcttagtgcctt

SEQ ID NO: 91020 - DNA, 503 bp, Glycine max
  Clone ID: PAT_MRT3847_53201C.1
gtaaagcctttgatgataggtccattagtttcatagatgcagatgcactggatttagtaagctactctcagacaaatggatttggatttttacgtagtggcttgtgatagtagtttgttgttctctagggtgcatttgttctagtcaaaatacgaaggtcctccagtttggcaagtatttggcagtaggactgaatataaacttcactaaccttaactgtttctacaatgtacttacaaatgaaattgaaactactaattactccattttcactcatacatatattacacctcatcacatcaaattttacctctccttcctaccattaccaatcacaccatcacgaggcatatgtagaatttgcatacctttgcattttttttttgaaactgttacaagtggagatccgaggcattaagtagtcattaaatgacttgtgcactactatttaacaacagaagagaggaaggtacaagaaaatgatcctgcaacacatggacttt

SEQ ID NO: 91021 - DNA, 512 bp, Glycine max
  unsure (1)..(512): unsure at all n locations
  Clone ID: PAT_MRT3847_53202C.1
cgccgcgacgctcttcaaggtctctcgacaaggtcantcacctggcttcgncgccgtctccganccgccgtcacatcactcaccaacagcggcnaccaaagctcgagcctctccgagtttcgacgaggtggatcccgtgaangtcgacgtctcgatcccgacggcaacgatccgctacgatggatttcatctgccagaatgtgtcgccaagtaaccgccgattcccattctctcttttccagcggtattttcctcttctttctttcgctctttggttgttttgctttttcagggggacccaattaatagaattaaatcaatttggcctggcgcttaactttttaattttaatggtgtggtggctaaaccgaagggtgggttttaaggaaaacgggtgggctagcctactccaattttgcccctaattggcttttggggttttatttcgcattatttatgaggatctgaatcctgagcctagtctatattatgcatgctggaaattcagaacc

SEQ ID NO: 91022 - DNA, 354 bp, Glycine max
  Clone ID: PAT_MRT3847_53203C.1
gtcaaaaagagctgtaagtacgacaactcatattttacatatacatagtatccatagaaagaggttctaggcattacaaaactgtacagctcatccgtagattcgatatacctatttgatataacgcgggaaatgtccagaggctgaagattgtgggcatctatgatctataaggatatgaggaagccccacaatattccgctattacacaatgacatgggtaccatttttacatgagagaccatagcaacggggcacttcatcagtgaagatctcaggagggtacgctggtccagagtatgcatagaacatgatgccaccataccttgagagggggttgaaggaacactgcac

SEQ ID NO: 91023 - DNA, 416 bp, Glycine max
  Clone ID: PAT_MRT3847_53204C.1
aaaggaccaaacctaatattcaacaaaaggttaaaaaaattttagagagggaaaaacggggggaaaaaaaaccccaaaaaaaaaactggggacaggtggcccacttgggccacttggaatgggaccagggggaaaattaggccttcgggggaggacatttaaagaaattcgaaaatggggttggaaacaaacccaaaactcattcaaagggaaaagctttgtttatggccattttaacccgggtccagggaaaaaggcaaataacaaaaaaaaagggggggaataatctacccaaaacaaatcttgaaatactaaaagggccccctctaattggaaaaacttcaattttacagaggaaggggcaaaccctatgttgaaaaaaagggatttcacgagatccccaaacaaaggggggg

SEQ ID NO: 91024 - DNA, 1065 bp, Glycine max
  unsure (1)..(1065): unsure at all n locations
  Clone ID: PAT_MRT3847_53205C.1
gagagagagacctagtctcgagcttttttttttttttttttttttttttttttttaaaccacattaaagtaatctgcgttatatcacattaaatgatcaaattctaatccaactaaagatgaaagttaagaaagaaaaaaacaaaaatcaattcccttcttcctagaatttacatagccaaatttttgtactcaaggaaaaaggaagcagagaatcatttgtattttctcagcactatcacagccaattgtaaagacaaaatttcaaatggccagggaatgaaggacggggaaataaaaagggactaacagtgatttaaaatttcaagttagatgttacaactttacaccaccttgcaatgaaggtgaaacatgtgtaaaatattatgacgggataattaacttttaacatatggctacaggactcttgtgcaatcaaaatttacatacctatcaaacagccattagaggaataatctaataaaattttcttcacggacctagctggcactcgccaaggccgtgatcgtcagcttctttctacaggtcttgtccacgcacttgaaattcttaccgatgggaatgtcggacagataaaaagaaatatataaaaatcatatcaaagcctctcttctagaacaaccaaaccacataatcagaatgctgtccttatagcataaatgtcataccatatgcacaaatactcaacttccaagccttccatttgctaacatttagttgcattgatttcagtttcatatccactgtagcagaccgatgataatgataataataattttagttcttttaaaatagattacctcctagtgggataagactgtttttgttagattacctcnnncaagtccactgcaataaggtaattcaatctggaggggtacattaatatggctattggctgcataagncatctgatcttnnnnnnaatatatnnnangattcagaaccatannnnacacgngnnntcaacatcctccagttgccagcnnaagcatnnngnatatcctattnnnatgtaaaccattgaaacaactcattgtcgtnt

SEQ ID NO: 91025 - DNA, 517 bp, Glycine max
  Clone ID: PAT_MRT3847_53206C.1
ccacgcgtccgcccacgcgtccgcccacgcgtccgcccacgcgtccgattgttctttcacaaactctgacattccaaaaaggagacacttgttagttcttacattacatggctcatttggtttatggtgaaactccgtcttttggagcctcacaccatggacaggctcagcaaattgttccatttcaaaccacttcgagctccttaaggatcctgctcttacatggcaacttagaaatatgggtcaacgaggccagaaaccttcccaacatggacatgttccacaagaaaacgggagaaatggtttccatgttgtcccgaaaacttggcggcaaaatcgaaggtcacatgtccaaagctggaaccagtgatccctatgttacggtatctgtggccggtgctgtgattgccagaacttttgtcatcagaaacagtgagaaccctgtttggacacagcatttcaatgtccccgttgcacatcttgcttctgaagttcactttgttgtcaaggacagtga

SEQ ID NO: 91026 - DNA, 142 bp, Glycine max
  unsure (1)..(142): unsure at all n locations
  Clone ID: PAT_MRT3847_53207C.1
natacggctgcgagaagacgacagatgggggcacaagtatactgaggtagctagaaactgctagatggaagtgaaggcgcatcaatggaccaactgctacactcatggtagcatatgtctgccacagctcagagtagcagaa

SEQ ID NO: 91027 - DNA, 468 bp, Glycine max
  Clone ID: PAT_MRT3847_53208C.1
gcatttccaaaaacatcatacatatgtcttttctaagatccaccatgtcaaatgatcattctaaattaacctttgatgagctcagatgggtgattaacatccgcaaaactcttgaagaagaggttgaggaggatggtgaatttgctgtgtccatcttcagcgtgccaaagctccttatggcaagtgatccagactcttatgtccctcaacaggttgcaattggtccctaccattattggcgtccagagctatatgagatgcaaaggtacaagattgctgcagcaaaaagattccagaaacaccaacaaagctgcaagttagagaatctagttgaccagttgaacaagttggagcaaagggttcgagcatgctaccacaagttcttggacttcaacggggaaacgttggtgtggatgatgacagttgatgccgcattcttgcttgagttccttcaagtttttgccatgc

SEQ ID NO: 91028 - DNA, 566 bp, Glycine max
  Clone ID: PAT_MRT3847_53209C.1
gtagccaatagtagcttgcctactcaagacaattcacaagttgatttgaattctgaaacagctacgtcattggtaggtatcaattctccagcggctcgagataatattagaatggaggaacccacttcagtggcttcgatcaatccgtccagtgctgtaagtacagcaccaaatgagacctctatctcttccggtgattccacttcaactgctgttccagcatcagtagagaagccaaataacacaccctctgctggctgtgatctgtaccgtggaaattggatacatgatccattgggaccgttatacacaaacaattcgtgccctgtattgacacagatgcagaattgccagggtaatgggaggcctgataaggattatgaaaattggcgatggaagccctttcaatgtgacctcccacgatttgatcccaaaaagttcttggagctgatgagagggaagaccttggctttcattggagattcagtagcccgaaaccagatggaatcaatgctatgtattctgtggcaggtagagacaccaaagaatcggggaaatcgtaacat

SEQ ID NO: 91029 - DNA, 212 bp, Glycine max
  Clone ID: PAT_MRT3847_5320C.1
cccacgcgtccgaaaaaaaaaagcaaataaaaaaaaagataacaaaaaataagtgcgctactctggtgtaaaaagagcgcacctccatgtacggcagatcaacgcttaccttaacgttcatgcaacgtcaattctattcaatggagtgcccgaacttgaataaagtgcgggatgaaaaaaacatcacgactcctaaataaattggcttgaca

SEQ ID NO: 91030 - DNA, 1075 bp, Glycine max
  Clone ID: PAT_MRT3847_53210C.1
agacggctgcgagaagacgacagaagggggagaagagaagtgaactgaagggtgggtggtgtgattgagtatgagcatgaattctctcctagcaagcacgcgtgcttcttcttctccattataccaacactcttccaccttgacactcagacaaccccattttcttttcatctcctccaattccaagtcgtctgcctttccattggttgcatattgttcctctgccccttcacccaatgaatcagaccaaaccattcttctaaacgaaacctttcattctcaagtcacaacccccaaaatccctccctttgtatctcctgtccccaagcttagcttcagcgaccaagctttctttctcctcgctttcatcgcctccacgacgtcagtggcattcactagccttgtttttgctgctgttcccaccctatttgcaatgagaaatgctgcattatccctttcaaagctggcagatacagctcgtgaggagctccctagtaccatggctgctattaggctttcggggatggagataagtgatctaacactagaactaagtgatctaagccaggaaatagcagatggagtcaacaagtcagctcaagctttgcaagctgcagaagctggaatccgacagattggttcagtggcacaacaacaaaccgtatctatgattcaagagagggcaagtttgcccgtaatttctttgcaacctgctgttgctggagctgctagaaagacttctagagcagttggccgagccacaaagagcttgttgaacatcatttcaggaaggcaagacgcaacagcagaatatgatgatgacgtaacttacatgtgagagatcagttaaaatggttctactgcgtgaatattcattctctttgctcaatgctcacgacccaaatatagtgtaggaggaggatactgtaaattatgaaaggatttgaatatcttgtgtcgtaatgtataagcttgacctttttacgcacgactcacaaataaaggtgcggttataattgcagccctcagttggcatttacaaacacatgccatattcattgccctgctgagaacc

SEQ ID NO: 91031 - DNA, 190 bp, Glycine max
  Clone ID: PAT_MRT3847_53211C.1
caaaatcctattccgaggcaggatcagggcttcaccgatacagtgcatcatggcagatccaaagcgagtctgtctgcagtatcatggcgctgctcctcttgatttccacgctcatcgtttcagcttctccgcgcttacgacgacgccgatgatgatagcgatcttctatgattcggacgacgaggatttt

SEQ ID NO: 91032 - DNA, 381 bp, Glycine max
  Clone ID: PAT_MRT3847_53212C.1
aagaaatttaaccggaccacagaacaaggacggatagaagaacgggagagaacatggcgttgttcatggacgaaaaagagatttggaagtgtccgaagcatccatcatagagaagacgaagcggagtttgccctacttgtcttcgagaccgtatcggaactctatgccctgactgtgctaacgtgcgcccctgttacctgctacgcaaccagctgctcctgactgttgtcgtcttcctactccttatcgcgtgtgtctggcgccagcgatagcgtctgatgcgtcaggcgcgtacacaacctgatcgagcaagagcctgcgctacgacgatcgcgctgcatggcgataccgattctcaggtcacggtcgcggatctatggc

SEQ ID NO: 91033 - DNA, 213 bp, Glycine max
  Clone ID: PAT_MRT3847_53213C.1
aatgatatgaattatagtggtgattggagaagatataatgcattgagaacttaaatcaaaaccttaatgaccaaaactccaaactagaataaaggttaaacatttaacaaaaatacaaattgtaaaattctcagcaaacaatacttaatttttccttgatgcattatatcttctccaatcaccattatatattgaatgatatgaattatagtg

SEQ ID NO: 91034 - DNA, 512 bp, Glycine max
  Clone ID: PAT_MRT3847_53214C.1
tttttccagtagacctgtaagaactactcgaactatcctaacttcagacagctttatatataccatggatggcctgagtgcgtgaagcatctcatctattcacaatcacattactgcgcgtggtttggcactgctcttgcacggcccctctgaatctctatcagaccagctggttctctgtactcgatcactatttgaggctacgaagccggctgaacagagatacacatgcgatgtataacagttgcctcctttggagtttacattcagaattattcgccgtgaggggctataaaggctgttgaacttgcttgaaagtgagggcgggtaaagagagatcgttatctcccaagttttcataggatctggagaggctttatgaaaaccctggcctgaaccaaattttaatatgcccttactgggaggccgttcgctctgtttacagggctaacttaacgtccttgcgggtgttaaaatgcgcaccgggggcacccaaaggggagacctttgga

SEQ ID NO: 91035 - DNA, 324 bp, Glycine max
  unsure (1)..(324): unsure at all n locations
  Clone ID: PAT_MRT3847_53215C.1
gggaacccttttttttttttttttttcttttttttttttttttttttgaacccaagggaatagttttaccctaatttaattaactgaagaccaaccccaacaggaaaacaaatccaaggctaaggcccccacccccttgaaaattccctccnntcnggggggggtgtccaaaaaaaaaaaaaaanncnnnnaaaaataccccacatcggggcgttgggggatcacaaatggtttaaaaaatcccttgggcattataccataccttgccttaccgaaaggcatggcaaatatcctgatatggctgggaaaaaacaaaaatttctc

SEQ ID NO: 91036 - DNA, 486 bp, Glycine max
  Clone ID: PAT_MRT3847_53216C.1
cttcctgaaaggtgttatctcagaaggtcaaaatgtgtatagcttagtgacttggacgagaaggaaaaaactagtaaggacagtaaagtctaagtgatgggaacataagcgtttcagacacttggacgaaaagtcaaaaactagcttattaggtttgaccaaatcttacccgactgcttgagctaattaagtatattgcttcaatttagaaccaacccaatgaatgaactctagtattgagcatcaagtggacgcggcagagatgggaatatagcgtttcagacacttttttctcttattaatgaagggtttcttgacctaaaaaaaccaacaatggtattagtagtatgtggcagagcttgatataaaaatgtaagggggctaaaatagttaagtttataatatgtattagaatggagatatctcattttgatgtacacataattgctcattgtcatgttttatttaacttcttttcttttcttc

SEQ ID NO: 91037 - DNA, 335 bp, Glycine max
  Clone ID: PAT_MRT3847_53217C.1
ctcgagccgatttttttttatagttttgttggaaaattaaaagagaagtgtttttccctttgaaaagtatttatatggctatttccttcaggtgtggtgagggagtgatgggtagatattgtttagaattttttacctttcctgagcccgaagtgggacggaggattttaaactttgagaaaaattgtaggaaaatggaaggaggaggaattttgattggtcttaggttttgttgatttccctattttctgtgttttttttttcatttgattttgtagggaagtttagctagttgtctattaatttctgattcccttttgtgttttcaagatgat

SEQ ID NO: 91038 - DNA, 429 bp, Glycine max
  Clone ID: PAT_MRT3847_53218C.1
cccacgcgtccgtccttgcgccgcagtagtgttcctattcgttcatattcctcagacactagtaacagagagattcgaagaagatgctaaacaatgtcgtttatgcgaggggattttctttctcgaacgaggaagctcgtgaagggtttggccaaggcgcaacccgcgtggctcaaagccatggaacagttaatctctctaatttctgattcattctcttcaatctttgtcttttgcattctgattttgcatttttcctttgccatttgagaatcccccttctgggtttttatcacttttgaaaaaatggcacctttttcggtttcatgatttcactttttaaaaattcatttttttatttatgtgtgctgactccaattaagggttatgggtgtgatattcatttttcaggtattggtctagatttca

SEQ ID NO: 91039 - DNA, 645 bp, Glycine max
  Clone ID: PAT_MRT3847_53219C.1
gggtgagcggcgtgataacacgccgttgacctggccgtggatgcttgtggataagtaatccgcagaacccaccaaggccttgacgctctggtcgcggctgtcgatcaggatcgctgtggcgttttccacacctgtactgcgccgttcggcaataaagcctgtgatcaggcgttcgagcaattgctgtaagggcaagttaagcgtggtgttgagttcgttgccggcctgggacgccaacagttgttcgctcaggtgtggcgccagaaaaggaatttgctggcggttgcgcgcctccaggggcaagtcgagcaaactggcgttgcgcgggtcctgtggataagtttcgcgccattcagtcatcaatcgcagccgtgcatgttgcagcgatggcccgaagcgcgcacgccgacccggctgttgcggaatcaccgccaacgccaatgcttcggacaacgatagctgtgccggcgacttgccgaaataaatgcgactggccgcctcagcgccttcgatattgccgaccatgggcgccagggtcagataggcctcaaggatgtcgtgcttgctgtagcgcgctatcagccacagcgacaatgccatcttgtgcaacttggccggtacttggcgagtgttgagttccacaag

SEQ ID NO: 91040 - DNA, 716 bp, Glycine max
  unsure (1)..(716): unsure at all n locations
  Clone ID: PAT_MRT3847_5321C.1
gnncnncgcnnncgcnaatcncgnnantcctaaaaccaacagcaaacatagaaatggaacattagaacccaatcatgtcaacatggtctctgaaaattggcgtagttgggtttggttccttcgggcaatttctggcaaagactatgatcaaacaaggccacactctaagggcaacttctcgtactgactactccctcttatgcctcccaatgggtatccaattcttcagggatgttgctgcattccttgaggctgacaacgatgtcatactcgtatgtacgtccatcctatctctctccgaggttctcagctctatgccactcacttgtctcaaaaagatcaacactctttgttgatgtcctttcagttaaagagcacccaagaaatcttctaattaaggtattgccagaggagtcagacatactgtgcacacacccaatgtttggaccagatagtgggaaggatgggtggcaagatctagcattcgtatatgataaagttcgaatccgagatgaagctatctgctctagcttcctccacatttttgcaagtgagggctgcaggatgctacaaatgtcttgtgaggaacatgataaaatagctgccaagagtcaatttattacacacactatangcaggacattggcagaaatggatatcaagtccacacctattgatacaaaanngctttcattcacttgttcaattgaaggaca

SEQ ID NO: 91041 - DNA, 1034 bp, Glycine max
  Clone ID: PAT_MRT3847_53220C.1
cccacgcgtccgtacggctgcgagaagacgacagaagggggccaccacaaattacatagtaactctttttctcgaatccacagagtgagactcatcgtgtgaacaacgataacggcatgtttgagcgtacttgaaaaatttgagcggccatggacgaaaccgccgtaacgacgaagcctgattggctcaacaaccgcgcgagggtcgccggagagagaaccgaagaatttttctgtggcggcgacgacgaagaggaatgcgacgacgaggcttgggacatgttgactcggagcttctggcaggcgcagactgtgctggacgagaaccgtgcgctgatcgacgaagtgaacagcaaccacgagtcgaagattcctgacaacatggcgaagaacgttggcctcattactcagatccacggtaacatctccaaggttcgctctatttactccgatttatctgtaaatttccccaacattattcgccagcgcggcgtcgccgccgtcaaccaccgcaatcgcgacggcgacgtcgaagaggatgaagatgaggcggagaactcggaggagaattccgcggagcacgtgctggataaatcggagtaattctttgtttccttacatatgttatatgattgttgttgccttgtccaatgcatcctagggtatcatgtgatgtagttggtgaaatttgaaatagaatgattcggtttgtgctagtgcctgttttagtgtgaggttgtttgagaaatctatctgtgcttattcctggttgtgcttttgtgttgtttttctttgttgtaaggatggttgaattgatggctgtgggaatgcgtagcacattatccgcccacagatattaggtatttatgtcaatgtttgattttgtttattggttgtttaagttgatgagaattcagaattcatatgtatgaagagctttaatgcaagcaaatccagtagaagctagtttacttggaggtttctgttaactgaataatggtctttgttttaaatgatctgcttctgatctttaaa

SEQ ID NO: 91042 - DNA, 185 bp, Glycine max
  Clone ID: PAT_MRT3847_53221C.1
atcatcaaatgcttttcaaaaaaaaaaaaaaaaaaaaaaaaaaaacagccgccccacaagatgatcccatcctaactcctccttgatacgacatcacacctctacaatatcgtcaactatcatctcatcagtggtcgtcttataacaacgtcattactaagaaaatcctgttattaaacataata

SEQ ID NO: 91043 - DNA, 383 bp, Glycine max
  Clone ID: PAT_MRT3847_53222C.1
agaagggttgggaagttaatgcgcaagtttgtgctgcctgagaatgccaacactgatgcaatctttgctgtgtgccaagatggtgtgcttagtgtaaccgtgcagaaattgcctccacctgagcctaagaaacctaggactattcaggttaaggttgcttgaacaacttgtggaacgaagtttaataaatgattgttttccctttctggcagaagcagggcaagaagtaatgttgtttgaaggataagatggatcttatcttttagttgtttcaaggtttttctgttcttattgcaatggttctatggtgttttcagtttgtgatgttgtaatcagatgatgctattgctatatcagttgttcagcatttcttgatcttagtt

SEQ ID NO: 91044 - DNA, 120 bp, Glycine max
  unsure (1)..(120): unsure at all n locations
  Clone ID: PAT_MRT3847_53223C.1
gatagatgtctttgtgagttagagatgtttatagaggatggtgaggatcgggantatnnnaagaggaagagtgnnattaatgagggaatggaggagtttgtgagtgatcctttggcggtt

SEQ ID NO: 91045 - DNA, 189 bp, Glycine max
  Clone ID: PAT_MRT3847_53224C.1
ctaatcttttctacaaatcaaggagctcagctatgactaccacagaaatcctgcatagatgcatgcaaaatttggtttgggctcatcacaccctgattcaaggaaaggaaagaccacgatgtcacagaacataactcatggctttcatttcgtgataggaaaatcatatcatgacatggaggattacgt

SEQ ID NO: 91046 - DNA, 456 bp, Glycine max
  Clone ID: PAT_MRT3847_53225C.1
ggggattggaattttgaattttaagatttttaaagacgggaccccggaaacatatggggggtctaaaaacctcccttaatttaaccggggtcccagctccaacttttccaggcctaaactttaatccgccaaaaaaaagcccccgttttttttaggggaaaccctcccttaggaaaacccaaagggtaaaaaggtcaaggggggataggggcccccaggggtcactaaattctgaaaacgagaaacaaaagggggggcaacccacatggaactttggggttatatatcccaagaaaaaaaaagctcctttaaaagcccaacttttccttgggctgggccaacttttccttggtctggcggggcaggtttatcccgggttttttcgaggaaatctaagagggcttcccgggccccaccgccgggggattgggaaaactttccacttgctgacctgaa

SEQ ID NO: 91047 - DNA, 1014 bp, Glycine max
  Clone ID: PAT_MRT3847_53226C.1
gggatcttttaaatgggccgccctcttttttttttttagaaaatctcaagccaaaagcatatattttattgtattagaaagcgcaactgtacatgagaaacacaaaatcctaactaatgaacaccataataaactcttccaccagtcgcactcttgtcatagtcatcattaacattatttacatgacccctcatgcatgccttatcgttataagcacataaatgcattactccattaatgcatcacacggtactctatttgaaaatgaatcttctactctgtggctgcaagaacagttgatccttccacctgataattcatcacatcaaataaacaaaatatatcataagatataagtatctaagttcataaatggagagagccacacagacaaaataaacaaactaaccatgaacgcaaaaataaatgttgaaagtcaatttgtaagtaactaagtaaataatgtcactattatctgtagtggagctttccaatttttgcacctaacactcaattttcctaacactcgattttcttgttaaccaaggccaaagaccttgtacccaaacaagacttgtcaaccacttggaggcaaattaaacttgcatagattctaattttgctattaggaatgagttacgaacaagtataagtatagtttacaatgttattacctcagtgaaattgttgcaactggcaatcctagttacataacggatgttcaattctaaaatcttaagctctaaggttaccttcaaaagagatatggacattaagcttaaattagtctaacccattcattttggacactacaccttccatttagtgaaatgtcgttttattcatggcctttttatgcactcctgttctattgttctattgtctctgaccttacacttttcctttgtacctaatgcagtcttaactgacattaaccttccattactgtggggactgatcactgattctctattctaaacagaagaaaataactcgagccgaattccgagctta

SEQ ID NO: 91048 - DNA, 211 bp, Glycine max
  Clone ID: PAT_MRT3847_53227C.1
ctaccaaaggttccctcttccaatgaaaactggatatggtgagcgtgcttccaaggtcaaatgcgcaggaattatgctcgctgtggaagcacacaacatccaagcctataaaaccatacctgaagagtgcgttgaaccaacaacaggactacattctatggaagaacaattaaaatcatactctaaaacacaaaccaacaagctatctttt

SEQ ID NO: 91049 - DNA, 392 bp, Glycine max
  Clone ID: PAT_MRT3847_53228C.1
gctatgaacgtcgcatcgcacccgcgtacgataatgtcttgggattccttctagtagcggcgcgccctctttttttttttctttttgtttgatgatgctagaatgccgcattatgacgcagagtgaaactcactaatatcaaactcggaagagagcgctaagggggcgcactagagtaataatcgcttttaccaatacctaaaatagaagcatcagtagtccggtcgtaatcccaccaactggttaataaggctcttgtttttcttgaactgacgaacgttctgcctgctcatgaaagcttgacaaaactcaccctatggatgaaataggagtatccagttgtcacagggcagcaaaggtggcccaaagatctctgggagaagctacaatgt

SEQ ID NO: 91050 - DNA, 342 bp, Glycine max
  Clone ID: PAT_MRT3847_53229C.1
atggatgaattgaaattgcatccaaatttaaggaatcaaccagaaagagttatcacaaaacaaagtttaagaacagaaaaccctttatatgcaaaatttaggaacaagagacttccatttactcacaagttgactaaagtttttaagaatgtaattgctaatggagaatttcaacgatcaccctcatctagaattttgccggttggtgttgaggttgatatgaataatgtgtatcgcccaagtcttgatggcattggcataaatgtagaggaaagtttaggggatagtgaagatgcaagtgttagtgcaaccaatgggatgcattggtccttacagatgtga

SEQ ID NO: 91051 - DNA, 483 bp, Glycine max
  unsure (1)..(483): unsure at all n locations
  Clone ID: PAT_MRT3847_5322C.1
ggagagagagaactagttgtacaattttagatgctgtaaatccaacaaatgttatatatcgacaaaatggctcaatcatgtcaccagagctagattgggaacaagatatttatcttacaagtattgtacctgatccatatggatgtccttcaaatgttggagacattattggaccaaattttgttggcaatgctgaatgctttattggagtttatggaatttatgaaattggtgcagttcgggttgttgcaagttggattgatgatatctcttcaacaactacatcttctgatacctgtgtggatattgatagtacatgtggttcatacatttcaaattgtttacttttctcttatcaaccacttatgtgcaaatattgccaaaaaacatgcaatttatgcaacaatccaaaatgtaacaattgaataatatttgtgtttcttattattattattgcttgaaaaaataaacatttaaaanttt

SEQ ID NO: 91052 - DNA, 1792 bp, Glycine max
  Clone ID: PAT_MRT3847_53230C.1
ggctcgagctcctatcttcttctcaatctttgatttcatcatccttttgaaatttaaaaaaaaaaaaaaaaaagaacacaggcattcacacaatgccttatagcctatagcgttgttagtagattaaatttaagtattgaataagcaagcaagcactctgagaggccacccttttcccggaaaactaagctttccgtggtgttttctgggaaaatatataaaagaagcatcatgagaagtgcaaaggaatgtgtcagctttttttctccatgtggggtgactgaaaaaaattgagctttgaaccagccttttccttttgaggtagctgatgatgctgatggacaattagagcttgcagaattcatatccagtggagtgtttttgaggtgattatcatcaatgtctggagctccaagattgaggtctatgaatgttgctgattcagaggcaaggcctgtgcttggaccagctggaaacaagactggctctttgagttcaaggaaaacagcttcaaagccactgaggaagaaggttgataagttgctggatgagattgcatcagtcaaagagaagaaaccccatcaagtgttgttgtcttcagttgccacttcctctccacagtcacattcagccagtgtttctttgctgctcccccggcatgagcagttactgcattctaatctgtccctgaatgcttcatgttcatctgatgcctctacagattcatttcatagcagagcatctaccgggagattgactcggtcttatagcctaggtagcagaaggaagccctatgtgtcaaagccaagaagtgttgcctctgatggtgtgctggaatctcccactgatggatcacaatccaacaagaggtgtgcttgggtcactcctaatactgaaccatgttatgctactttccacgatgaagaatggggggttccagtacatgatgacaagaaactatttgagcttcttgtactttcaagtgttctggctgaacacacttggccagccattctaagcaaaagacatatttttagggaagtttttgtagactttgagccagttgctgtgtcaaaactgaatgagaagaagataatgacaccaggaacaattgcgagctccctactttctgaagttctcgtgcgtgctataatcgagaatgctcgtcaaatatcaaaggttgtcaaatatcaaaggtcatagatgagtttgggtcctttgacaagtatatttggagttttgtgaaccacaagcctatagttagcagattcaggtatccaagacaggttcctgtgaaaacaccaaaggctgatgttattagcaaagacctggtgaggagaggtttccgaggcgttggccccacagtggtatattccttcatgcaggttgctggtttaaccattgaccatcttatcagttgcttcagattcgaggagtgtatagccgcagcagaagggaaggaagagaatggcatcatggacaatcatgctgatcagaaagagagtgaaaacatcatggaatcagatctgtctattgccatggaggacttgagcttcgcctctgaatgatgtcttagatttagtaatgacggaggagaatctgtataaatatcatccagtccctaaacatgatgaattcttagattgtagtttgctaaaagcacaagtaaattaaatcaatatcgtaccctttctgctgtaccaggcttctgccttagaaattggtgtacaattttttgtacagtttaaaggatcagtaattagaattttctttgaagccagtggcagcaggc

SEQ ID NO: 91053 - DNA, 1758 bp, Glycine max
  Clone ID: PAT_MRT3847_53231C.1
aattcggctcgagaaaaataatatgatcattgatcatcacatcgtaccacaagaaattataaggtaagcacaaccatatggaccaaatatatggtttgactaccacaaaaacgatgacaaagaggaaaccggtctgcattatctaccattgggtcactgttaaggagaaggggaggccccatatttctatcttactaaagaaaactgggcccaataaacttgaaaaccctcgatggtgaatgaggagcaaatgagcaatccctatctatatctacttatcgtctaagctcagtgatcagaacctacgccgagtgaaaccccaatcccaatacactcccaactcacaaagccatgtctccaggtcctgttgtcgacgcttcccctgaggttgaagcagagcaacaacttccctccgtcgatgacgcaacccagttgaagaaatcccaaccgcaggaggatgatgctcccgttgtcgaggacgtgagggatgatgacaaggacgacgacgatgaggacgacgacgacgatgatgaagatgacaaggaagacgatgctctaggtggtgctgagggttcaaagcagagcagaagtgagaagaagagtcgaaaagcaatgttgaagctgggactaaaacctgtcaaccggtgttagtagggtcacaatcaagagaacaaaaaatattcttttcttcatcctccaaacctgatgtcttcaagaggtccaaattctgagacctatgtcatatttggtgaggcgaaaatagaggacttgagcctctcagttgcagacacaggctgctcaacagttcaggatgccagatatgggatctgtaacggcaaaacaagaagatgctgcagctgcagcagtgcaacctgaagaagaggaggaggttgatgaaactggtgtggagccccatgacattgaagttggtgatgacgcaggcaggagtgtcaagaagcaaggctgtcaaggctctcaagactcacaacggggacattgttggagccatcatggaactcactacttaattgggggttttatgttctatttgtatgtttttttgggaatgatatttagaactagtgccgtttctatgttataaaccgaatcaacataaccggttttatgtttgggatttgggttttaccctttacatcataattttgttgcgttctcaaaaagttctaaatgcttttgacgtatataagtaaagccgaagaatcagaagcctgaactatcaggtataagtgtagtcaccaacaaggttgttccaaaggttaagattaatgaatacttctataacccaccaaggtatggcatggaggtgtatgcatatcctgcacaccctgcgtatttccattcctaccctccccagatgttcagcgatgagaacccaaatgcctgcactgtcatgtagtcaaaattgagggtgtcagggtgatatgggaattggggaaaaattgtgaagtttggtgggtgacatgaaatgatgcccattcctgtgttacctgtactgtgaaagtacaatgtatgcataagctatagaattttgtaagactttttggttccgtgtttaagtagaatatactatatcactttaaaaacacagaacaaaatagtgctttgggtgagtgcacctctatggttaaaaataagataaaaatatgtttttaatttttatgaatataataaaatttgattttagttttttaaaaaaaaaaaaaaaaaaaaaaaaaaaaaagcggccgctctagagga

SEQ ID NO: 91054 - DNA, 269 bp, Glycine max
  unsure (1)..(269): unsure at all n locations
  Clone ID: PAT_MRT3847_53232C.1
cgtnnccattctcatccncttctnncnctctctaccattgccatggatccctaacaagcatcaacnnnaacaacgccttcaatnctcccttctggactacaaattctgntgtacctatttggnacaacaactcctctttaaccgttggaggtagaggtccaattctgctggagggattatcatcttgtggagangcttnncnaattttgattagggaacgtatcccaaaacgtgttgttcctgnccannggcgcttagtgcaaanngtt

SEQ ID NO: 91055 - DNA, 952 bp, Glycine max
  Clone ID: PAT_MRT3847_53233C.1
ggaaaggataaacgaaggaagttgggcctttgaaaatggtttggcactttcctacggaaagatagagatgggtggggacgtatcatatggccttatgaggagctacctcacctcacacaccaatagcatatgaagagagagaagaagtgaagataagcacagagagtgtcatctactcacctctactaccataaaaaaagaaaaacaaaaagccttcagagtcgactattcatcctttcttattcttaattaccgtgccttatccacccccaactatatttcagccagccgcggcgacacaacaacgccgacaccctcatttccactaccaactattctctctcgttctctgatttctgaaatccctcacccatggcttcctcttccctctctctctcactctctctcaccctttgccttgtttccactctctgctacgctcacacatcttccctaaccctacctgtgacaaaagaccattcaacacaccaatacctaacaatcctctcttatggcacccctgttgagtctgcaaaatttgtgcttgatctcggaggctcactcctctgggctgattgtgcatccagaaccaccccatcttccaccctcgcccccattttccaccgttcaattcgctgcctcacagcaaagggtcctgaaattgagacccacaggtggctctcgagtcttgcaaatcctatagatcaagatcagccatgtcaaattacagcagagaacagcatcacggggaaaagggtcaccgaaggagagcttgtggaagacctagtgattcatcgttctcacgagcttctcttcacgtgctcgcccacttttcttttgaatggtttagccactgatgctaaaggcattataggtcttgataaatctcgtatttctttctcatcacaaagttttcactcacttaaaatccagagaaaaatcactctgtgcc

SEQ ID NO: 91056 - DNA, 410 bp, Glycine max
  Clone ID: PAT_MRT3847_53234C.1
ctctctcgtccgcggacgcgtgggtaaaatttctaatgttcatttaatgcgcatgtaaatttaaataataaattttgtgacaattaattttgataaatcatacgaattatttaatccgtatattttttttataaataaaaaaaattttaatgcacaaatgataatttaacatactttttgggcattaataaaaaatgatgggtgcacctagcaacacccttcatcttactgcaaattcttcatagccagatggaggaagagagtaaagaaaatccaataccagtagacaggtgattaaagaggaaaatgacaatgaatgaaaagcgaaatagttcctcatgaatggcaaaacaaaactattagcttcctactacacttggagttgctatttcttttaaaaaatgcatttt

SEQ ID NO: 91057 - DNA, 331 bp, Glycine max
  unsure (1)..(331): unsure at all n locations
  Clone ID: PAT_MRT3847_53235C.1
gcacgcccacgcgttcgcaaaaaagaggcaaacattttatgtgaaatanntgttcaacaaactgcacaagcgtagagtgtctcttgagcagtaataagaccagctgtcgaagggatggctccaaccgatgtaatatcgtacagcagaggcatataacatgcatggagaattcaagctacatttcgagggggtctggttatttattaaattatattgtggaccatttgcgaattatgatcggattatctcaatggtgtatgggagatcaatttttctcttccctattggcaaagagacgtggaacatcttgacgagaattannaatactttt

SEQ ID NO: 91058 - DNA, 1531 bp, Glycine max
  unsure (1)..(1531): unsure at all n locations
  Clone ID: PAT_MRT3847_53236C.1
agcccacgcgtccgcggacgcgtgggcccaagtagtattgcagtttattctatcatatccttgttcaaataattttcttttcaattacaataccccaatcccagaaacttatgttcatgaccatcctcaaggtcccaataacatttacttgaagacaattttgagttgaccttacagcctagttccacctacaaacacccttgatccttcaaagcctctcatagttccaatactggcaacaataatactcttgggcatctaaactatctccattcttttttccccctttctttgcagtggatttgcgaggttttaaagaaattaaatgcgtttttatgtgctaaagagctaggtaattatagaattcatctcacacatacttctttttactaccttttatcttttagattttatttttgaattatccttgtttaatggagtaatttaattcgttgaggggttgtggaatttgtgtagaagattttcctataagaatttttaattcgctaaagaaatcctcttgttgaattagattattatgagattaaattcttcacaaaattccacaactcctcaacaaattaaagatctttgttgaacaaagttaatttaagagtaaaatctagaagatagaggttgtaaagagaagtggtgtgaaatgaaatccataattagctagttgtttagcgcatgaaaaaaagtgtttaatttttttaaaatctcacaaaccctgcaaggaataaaaaagaaaagaaagatcggagatagatcatatgccctaatagtatatgaagaaatctttcccgtaaaacaaatataaatgatatacatgtatacatacaacattgtcacaactcctgagttaagcatttttattggtgaaaacatttttattttgtataaattgttgcagtttcgttattagatatattaaatgataaaaggctagtctttattcctaattttggccatttgtttggttttcaggtgtgatatttttttctgctgaaaaagttcacttcagagagattgttcaaagttcaaacgtgtacgagtggaagaatgacttccaaaacaccatggtcgaactactctttagaaaagtacaatgttaatgtaaacatcttgcttgattctgtgaagtaactatgaaatgccttgcatgggactgttgatatgtcttagtatgatttattagctgtttctgaaataaaataaagtataatcaagtaagattataatttattaaaaaacgacacattgaaaaatatagagagaatttttttannaatcttgcaaattcctgtgaagaagttcnncaagcccaagtgtgaattattttacttcggtannaactgaagaatgtcgaagaagaagcaatttnncattttaataaatcatactaagttagggttcaatcattacatnatttannacctaaataaaatattgaaccctatatattgatagctttgcaatgaatactnaaatgtgttgccatgtacaanntctcattgagtttaaaggtaaa

SEQ ID NO: 91059 - DNA, 511 bp, Glycine max
  Clone ID: PAT_MRT3847_53237C.1
agcaaataaaataaaaaagtgaagaaagaaattagaaaataaggagagatatggcgccaccttggggtccaccggcagggccttccggcggtatctgcagctgtatatgtaacctttttgtattgtctgtgttgctgctgtctcctggagagttgttgcggcccaatgtttggtggacctcctcctcctgggccccctggtccaggtttctgatccattccaggatgaatcgaggaaataaaaaaacatgaatctgtgctgagtgtgatggttgttgtggctagtggcaacccctttagtttctgttacatttgttttaatgctgttaataagggattgtattatgttctgttgtctgaggcctgttcttttgtttccctgagtatttcgtcttatttaaatatcaggttttctttaggctgaactgaaactgaatgtaaaatgcataactgtttgattttatgagttgacgtgtgaaattaatgcagaaaaaaaatcatgatatttctac

SEQ ID NO: 91060 - DNA, 514 bp, Glycine max
  Clone ID: PAT_MRT3847_53238C.1
aaaaaaaaaaacctttaaagaaaactttttgatcctccccccccccccgttttaaaacaaagggacccagcccccccctcgaaggggatttgggaaaaaacccccgggggggaaacccctcccccaaaaaaaattcccaaaaaattcaattaccccccttttttttttttttttttttttccccccctttaaaaaacaggggggggaacccccccgggggggggggttaaaaaaacaccctttaaaacagggcccgggtttccccccccgataaagggccccccccaaaaaaccccggggggggtccaggtccccctaacaacagggggcccaaatgttacaggggggtttagggcccctccaaaaaaggccccccccaaaaaaatgtttccccccccaataaaccccaggggggggggggcaataattcccaaattcccctttttggggaaaaggggagttgcgaaaaccgggtcccccaaaccgggggtttttccgatctccaaccccaggg

SEQ ID NO: 91061 - DNA, 265 bp, Glycine max
  Clone ID: PAT_MRT3847_53239C.1
cgcatttggccgcctccctaccgctccaagcccagccctcagccatggcatgccccctggatcaggccattggcctcctcgtggccatcttccacaagtactccggcagggagggtgacaagcacaccctgagcaagaaggagctgaaggagctgatccagaaggagctcaccattggctcgaagctgcaggatgctgaaattgcaaggctgatggaagacttggaccggaacaaggaccaggaggtgaacttccaggagtatgt

SEQ ID NO: 91062 - DNA, 238 bp, Glycine max
  Clone ID: PAT_MRT3847_5323C.1
aacagaacagaaaggggtagtccgtacgtctacgcactaacctcgcacattccctcagtactggcatcgctggaaaattcaatctgggactcaactgaactgatcactcatgattcaccatggatgcattggatctcaacggtgtgccactctgaattctaagtcacgcaactatggcatacctaaatactctgcctttcgttgcgcctcgctaatgactcccaaggttgccgtcact

SEQ ID NO: 91063 - DNA, 337 bp, Glycine max
  Clone ID: PAT_MRT3847_53240C.1
ataacttgaaaaaataacatcaggaaaatgtttaacagacaatactcacatcaaccaaatctagggcacttttctcaatcataacccccctgaaagtgacgaacactgaaaacaaggcagcgctaatattcacatttaaacccatcggccaccctcccgaacatgcacttagagccaacgacgatgcgttatccgcaacagatattggcaatcaacccttgtcttttctcaggcaaaggccatgttacacgggtccactgataacaaccgcctcatgagaaaaaaggggggggaaaaccactgagtcatagagggggacaccccgacatgtcacggg

SEQ ID NO: 91064 - DNA, 138 bp, Glycine max
  Clone ID: PAT_MRT3847_53241C.1
tcaactataccgtcggagcagcgcgcagctatgagaagctcgtcgcccacgcatgcggcgcagcgcgcatagcccagccaagcgcgccaagccaccaagcacaatcgatcgacgcgctttggtgactgcgcacttcgg

SEQ ID NO: 91065 - DNA, 276 bp, Glycine max
  unsure (1)..(276): unsure at all n locations
  Clone ID: PAT_MRT3847_53242C.1
cttcgtcacgacatcgccggtcccgacggctccgccagcatcgtccaggccgtcgtcaatctggcggccgcccgccgcatgaccaccaccgctgagggcgtcgagaccgaggagcagcagcgcctgctccgcacgctcggctgctccgaaatgcaggggtatctgttcagcgccgcaaagccggcggacaaggtgctggagctgttcgcactgcatcgcagccggctcgcccagcgcggcggcaacgcgagncgccgccgcgaggcaggctaggag

SEQ ID NO: 91066 - DNA, 760 bp, Glycine max
  unsure (1)..(760): unsure at all n locations
  Clone ID: PAT_MRT3847_53243C.1
aaaagacaagttgaaattgtagatgtaaattgtaaagtgtaaatctaatacaaccaaaagcaatagacatttcaattatcttcaaaaaaaattaaaaaaaatgcatattaagataacctccttgcttttgtgcttctgcaatcacatgcaaagcaagagttgttttcccagaagcctctggaccaattatttccacaacacgcccctacagacatcacagttaagttacatataatgatcagaatatagcagtagcataatgatataatagaaaccccagaaaaattccagtctgattgtactacttgaattaggaaacggagctgatacagctcttatggacaaggaaaaacagtaaaccagagcctatagctcctccagagagaaactctcataactgcccaatactatacccccaatgactccctccttctctcaccatcttcctatatccaatattctaacagaattccccctaacgtggtacccactgccatgtcacaaactaattctcccttgggctcaaatccatcaactgatccaattcctccctatcaatctgtgatctgcaggtcctatcgtgactgaacatatgattgnttatctcattgcttttttctcatatacacacactanactattgaaaccacatctcataaccagaaacatactttgcaaagtaaactattgaaacccaaacaacctgttaagaacattaacaagagatatttggccttataaactgaaacatacactgata

SEQ ID NO: 91067 - DNA, 372 bp, Glycine max
  Clone ID: PAT_MRT3847_53244C.1
attattgtgtaaaagaattgtatcaaaacaaagaaaggaggaaaggaggaaaaaaaaaaggcattgggaataatgggcttgaagaagaaggaaaaaaagtaatacatactatatattgcaaagggcaaatgcgggaagaaccaaaatcggcataatcttgggcgctaataaagagtaccgaaaagagggcggacaagctggcggcaatgagaagccggggtgagctaacgggagctgggacagaagatcttccatggtaaaccaacgttgggaatttgcacgaagaccaattttttttgactcaaccacactcaatttcatgaagaacacaaggcatattgagacgggaaaaaaacccaaaaaaagggggct

SEQ ID NO: 91068 - DNA, 1690 bp, Glycine max
  Clone ID: PAT_MRT3847_53245C.1
cttctgaatgtgctcgttgtttagaaaaccctaatctgattcaattccagcatggctcaaaaacaaaagctgcgcccttctcctctggacgagccacccaccgcttcctcttccgattccgaggaagaagaggagcaacaacaacaacaaccatcctctcagcaacacgaagaagaggaagaagaagtttcctccggagaagaagaggaagcttcctccgaagaagaggaagacgaaaatctccccccaccacccatctccaaaaaccctccaccccctcctccctcaaaccctcagccccaacccacttcctccgaatccgaaaccgaatcgggttccgaaaccgaatcagaaccccaccccactcccgttaaggtcaaacccctagcctccaagcccatggaccaggcccaaaagcccaaagctcaaccctccccggcgccgccgccgccaaaatcggcatccaagcgccccgccgagaacaacaacaacaacgcccgtgtcgccgaccccaaacgcgcgaagaaaaaagccaccgaatcttcttctgccgccgccatctccgacgacgagatggaggaggacgggaagaagtccggcgataactcgaagaagtttcagagactgtggagcgaggaggacgaactcgccattctgaagggcgtggttgagttcacatcgaaaacagggctggaccctcttaagtttcccaatgccaacgctttccacgatttcatgaagaagtcgcttcacgtggaattttccagcaaccagctgaaggagaagctccgaaggctcaagaagaagtttgagacccaggcaggaaaagggaagaatggagatgcccctaagttttccaaaccgcacgatcagaaattctttgaattgtccaaaaaggcttggggaagtgaggatggtggtgtagccaatggctccgtggagaagcccaagtccaatgggaatgctgccaagagtccgaatccgaagaagaaggaatccggtagcaggaatgtggcttctgctaagaaaccgaagcctgaaacaaatccggagccggcgccggtgccgtccttggagtttaaggagtctgaaaggatggagattgatcaaaagcctgatggtggtgatgcatgtttgtttttgcgcgaattggttcgatacaaagagggtgccaatgtttctaggctggatgaggatgatgtgaagagggggttggagttgattgaggaatcaaagagggcagagttgagggggaagtggaagaaattacatcatgctgagatggaactgtttgcgaatcgctcagaactgattggggagcagactaagttgatactcgaggcgcttcggtcatccaatcattaggattctcaattttgtttggcggccttttcggtactctgggccatatattttgtgatctatcctctatgcattgtaaccttgtggttatggtatagtcttttaattcagtagcagtagcagtgtttagttattgacattgtcaaaatatcttgcttcagaagttcctaggaattttgtgacaaatgtttctctataatttataatttatttggaattggaacttttgtggtagtatacccttttgggtttttattttacttcccaagtgattggtagtaatatcttacttaggtatctaatttattagttaaatgatttgttgtcc

SEQ ID NO: 91069 - DNA, 1137 bp, Glycine max
  Clone ID: PAT_MRT3847_53246C.1
gcatggcttcatgtgacttacacttcacttcaactctctagtgacagagaaggaattaagagcctcaagaagtggtcctaaacacagtacagaatctgtcaacgcacatagtttttattctttcgcctcgattcatctgatatggtcctttagacgataacatagtcacatcactagaagggtacaattctttagaggggttagtgctatttaatttgcagaattatcacacatgggagtggtaactgttggtgaattgaagcccagcatttcaggaaaaaggacatttcgtccaagttcaagcataagacatgccactgaatggccgatatctgacgtctctagtgatcttaccatcgaagtaggagcatcaaccttcgcacttcacaagtttcctctggtttctcggagtgggagaattcggaagctgctgttagatgcaaaagattcaaaagttttacgcataagtctcccaaatgtgccaggtggtgcagaggcatttgagctagcttccaagtttgctatggaatcaatgttgagttcacactctcaattgtggccttgctacgttgcacggcccattttcttgaaatgaccgaagaaggctcgagaaaaaacttggaggccagagctgaagcatatctaagggacacagtgctccctaacatatcaagcacagtacatgttcttcactgttgtgaggctcttcgtcccatatctgaacaaataaaccttgtcaacaagctaatcaacgcaattgcgaacaacgcgtgcaaagaacagcttacaactggtctactaaaactagatcacactttcccttctaaaaccacaccaaccatggagccagaaacaccctcagattggtgggggaagtctttcaatgttcttagtcttgagttcttccaacgagttgtgtctgttgtgaagtcaaagggactaaaacaagacatgatcagcaagattttgatgaactatgcccatggttctcttcaagggattggtgttagagaccctcaagtggtgaagggaagtcttcatgacttggaatttcaaaagaaacaaagggtggttgatgaaaccattgttggtttactcccaacttactcgaggaaaaagcccggttccaatgggatt

SEQ ID NO: 91070 - DNA, 424 bp, Glycine max
  Clone ID: PAT_MRT3847_53247C.1
aaagcttaagcttttgaccaaagccttttcctggatgtaacatggaaagtccccactctgtgaacagtccaagaagaaccctcagcctatcgaaaaagcagagggcaactgtatccttttttgaccccgatgacataacctctggctttggattgtctggcgatcatggccctaagccttctgaagtttatggttttgtaggttctattaccactgttgatgctacagttattttcttggtatgggcatatgctccagaatcatggctacaatctgttggcatctcttactatcctagcagatattgcgctctagcagtaccaacttatgtgatggtgaccattgtattggtgctgggattctacattggccttaacttcatttcaacaccttcccctgcatctttaaacacttgtttcgatga

SEQ ID NO: 91071 - DNA, 372 bp, Glycine max
  Clone ID: PAT_MRT3847_53248C.1
tgcatttattattttgggtttcattatactaacacagctttctttattaatgacaaatacaatatacatttagttcacttcatatacttgatttaatcatacacatctgatttaggaacctggttccttcaatttcacattgatttaaaaccaggaacagtacttaagcaatcatagggttcttagatagagatactgttgggaatttctctgaaagtgaatccctcttctctataaggatagagcttagtgtaatgcattttagctggcccatagcggtatttcaatgtctgatctttggtcttttctataagcttctttttaatctcttcaagcttttttcccgaaccgttcaaatgcctctaatggacc

SEQ ID NO: 91072 - DNA, 174 bp, Glycine max
  Clone ID: PAT_MRT3847_53249C.1
cacaaatccaaggtctttatctgacgattatattaccgccaaaagaagaaccaagtgcggctttataagaacaggaggccccccaacaacagggacctacaatacaatcctggcttcaacctctcatccttctacatttacaaaacactctaacgcatatatgcatcgactatg

SEQ ID NO: 91073 - DNA, 970 bp, Glycine max
  Clone ID: PAT_MRT3847_5324C.1
caaatcctacttcaacagctccacttgattgatcttctatgagccctgaactgtgaacctcaaatctgcatacaggtatcgcagaagtgctccaaaaattagcatctgggtaagatatatgattagactcatttttggagggaagtacttttcgctcaaatcagacgttttccgtcgcccaactgggtcctcttccctgccttccgctttagcacgagaaaatcgaaatgatgaagcatggtctgtataacctgagaacctttccacaccaacaatttctattcgctcattatatgcaatacccttgggcatttcagaacttatcctttgaaaatagtgaacgatgcaccaaatcttattttcctgtttttgactgtaatcatcatacagactcccaaacaatacatcgaagttaatcattggaagatgtatcacaggtctgtcactgactgggaatagacaaaataatgagcagctaagaagagcagcaatcaactcctgggtaaggaagactatccctggttgctgtgaatccaacaagcgaagagcagtagtgagcatagctcctgcctctccatctatagccatattatcagtgttttgatagtgtgattccaacaaagagggtaacctcaaaagcaaattccccaatgcgggaagcacctcctgaaaccacttgctagattcctctccagacataacctcgtcgaagaagagggcatagccatgcggagcggaaggggctaagggttcggaagagagagaaagggcgtttctgaggtcagaaatggcttggaaaaagtggtggcccgagttgactcgccctcctccgagttctctcagtgtttccaccgcttgggacggccaaaacggagaggaacaacgcatgaccacgggtagatatgccagaatcgattgcaactcctctctttcttccattctcaaaccaactttgtaaaaccaattagtg

SEQ ID NO: 91074 - DNA, 378 bp, Glycine max
  unsure (1)..(378): unsure at all n locations
  Clone ID: PAT_MRT3847_53250C.1
cnnnttagaaaactatcaaactgtgtaatttattatctttaaaaaacaaaacaccttttataaccaataattttcaaaaacaatatatttctataaatacaatttatacatttctaaattactaccttaattaaggcttaaactatctacacttcaaactaaacacctataaactaactaagactttccgtattaaacattttaaaattccaccaactaaaactactccacatccttattttacacatccttttttttttctgccaaaataatatttttttccccttcttttaaaacaaaaaattcatctttccccctttctttttttttttttttacttttactataaaaaactctctttctaattaaaatttttta

SEQ ID NO: 91075 - DNA, 532 bp, Glycine max
  Clone ID: PAT_MRT3847_53251C.1
cgacccacgcgtccgcgcatttttaagttaaaaccccacactaacaaccgaccaccgccttcagatacgacggtgaatctctctctctctctctctctctctctctctctctctctattcacaagattttttgtgcaaatcccttatcaccaatccctgcatttgcgataccatgttccctttgaatcgcatagaccgacccaccaaacctaactccaaaaagacctaatttttgcactcgttatagctacccaatagctttttgcaatctgggtcgaacccatttcgttttgtgctctctgggtcgaacccatttcgttttgtgctctctgggatcttatggtggagaaagcatggaggagattgaaggggtgaattgttgtagcgaaagcgaaagcaggagctccagtgtgactcgacctcccaatcccaacccaccttcgtgtcgccaatgcaaacttggtcgccacgcttctctcaagatgaacacgaagttgtctgatgtatctgctgacccggagcatgtcactga

SEQ ID NO: 91076 - DNA, 257 bp, Glycine max
  unsure (1)..(257): unsure at all n locations
  Clone ID: PAT_MRT3847_53252C.1
aacngnaaaattactttgggtttttggggaaaaactataaaaaccgctttaaatctcgtaaaatctataccctaggggcccaaaaaaaaacattacaattccccatcgttaacccaccaaaatcaaaaaacatgcatactgggttgccccaggagcgcataatgaaaaacccaccccaaaccagttgccgggtttctccaaagggggaaacacaaaaaaaaaccattccctttaaaccttgtgcttttcccgagcca

SEQ ID NO: 91077 - DNA, 558 bp, Glycine max
  unsure (1)..(558): unsure at all n locations
  Clone ID: PAT_MRT3847_53253C.1
cgtaagnctcggnaattnncggctcgaggaaaatttaaacactcatgggttctgaaacttttctcgaagtgatattggcaatcctgctacctcctgttggtgttttcctccgttatggctgtggcgtggagctctggatagatctggtgctgaccatactgggatacatacctgggattatatatgcaatttatgtattgattggatgactctcatgtaccataatgtgtatatttctgtgttatttataatatgtgcatttgtttttatttatagcatctgtttctaccttttcattttcaatttcctttatatatcgcatcgcacagattaaaaggcttggggtgccattttaaagtatgaatctaaattcaacgtggttcagatcgaaataagtgtatgcatgttattttgtttttacttttaattttattatcatctgaagttgttctagtttgatgatcaaatggaaaagttttatttgtttagggacgagaaatctcacatcccactttgcttttgctatataaaatgaatagttttctttgaaaacaaaaa

SEQ ID NO: 91078 - DNA, 501 bp, Glycine max
  unsure (1)..(501): unsure at all n locations
  Clone ID: PAT_MRT3847_53254C.1
tttttttttttttttttttttttttttttttttttttttttttttttttttttttttttttttttttttttttttttttttttttgtttttttgggtggatggggaggaaggggtggaaaaaaaaaagaaaaaaaaaaaaagaaaaaaaaagaaaaaaaaaaaaaaaaaattggggtcgcttaaaaaaaaaaaaaaaaaaaaaaaaaaaaaaaagggggggggaaaaaaaaccccccacaaaaaaaaaaaaaaaaaaagaaagacagtggcaccaagggctgaaaccaaaaaaaaaaataggaagaaaaagacaaaagggacccttaggaagggggaacaaacaagaaagaaaagaaatataacccttaacggcaaccaacctaaggggggtagggccgggaaccaagccccccccactaagggaaacaccaaaactnncggggggggacttggcaaggagcgcgtgggggaaaacggcaaaaaatttctggggaagcaac

SEQ ID NO: 91079 - DNA, 1013 bp, Glycine max
  Clone ID: PAT_MRT3847_53255C.1
gcactatatttttttttttgagacagttactctattaaaatttattttttatgtatgaggctgcaaattgctgcggctcgagccagcccaaacacccatccattatcaccataaacccaccatcggacacaagagcacaattcaaggccagcgaaaacagtacttgttccctgaaacccaaaccagtatccacaataaactatagagttccttcgctcacacaatattcgcccttttcaatttgaaattgaggggaagacgcacaaccttcccttgactagaagaacctcaatcttcaacaatctgccaattaattgagtaaataactcaggaataaatatggctactagacgtgttcgttactcccctcttgccacggatgaggatgattatattggtgataggaatagaccttttgacccacgatttgattatacaccgaaagccttggataaagttccctggaaatcaattgctctggcactgttcctgttattccttggtacaggacttttgttcctttcatactttatcttcactggtcatatggggggagaaaagtctcaagcatatggccttttagccctagggttccttagctttctcccaggtttttatgagactcgaattgcatattatgcatggaggggtgctaaaggataccgcttttctgccatccctgattattagagtgtgacggtaaatgagaaatagagctatctataccgtgaaaacatagtaatgatcaaattcggttgcaacttgtatgcttcaatggcaaagatggaacaaaatggtagaaaagtgtaatcgtacttgatacttaagtagttaattaggtaacaaaatttagaaaaatgatgcattaaagtttgaggttagaaaaataagcttaaattgtatcgtgaaattgtttcttttaggcaatattattgcctttgtgcctgttttgttcccttaaactcgtgattgacgtttggttgtgacaaggtttgctaaggatagtcttttag

SEQ ID NO: 91080 - DNA, 161 bp, Glycine max
  unsure (1)..(161): unsure at all n locations
  Clone ID: PAT_MRT3847_53256C.1
angtctgcagagcacgcgtacgtaaagctacggaattcggactcgaggaannatgcantggngtgagnctttgatgncncanggttttacttnaacgncatgnantcnctacaggagcananacggcgcatgntgaaaagttacnacactngccagacaat

SEQ ID NO: 91081 - DNA, 185 bp, Glycine max
  Clone ID: PAT_MRT3847_53257C.1
ttaccactaaaacaacccgctcaaagaaaattgagtatatactctgctaatcgtaagcaaccatactgttcactcggagggaaacgcacaagaggggagactaggccttcgcagaattcattatacctgctaggacaaccctaccactggggtagtgcaaagaacaccaccaatatcacaccgag

SEQ ID NO: 91082 - DNA, 267 bp, Glycine max
  unsure (1)..(267): unsure at all n locations
  Clone ID: PAT_MRT3847_53258C.1
ccacgcacgcgggaaccggaagcagaacgagcacaaaagngcaacagacgaagcaacaagcgcaggcggccggccaccacaagggcgaccaacgccagaacgcacaacaagagacagagaaaggcacagcggngaacangaccggggcagggaacaaggcancgagggccaaaacagccgcaaacgaggacgagaagagcaaggccagggccaaggaccacgaggccaaaaacgccanacaaggcgaagaccgcaacaaggcggaag

SEQ ID NO: 91083 - DNA, 463 bp, Glycine max
  Clone ID: PAT_MRT3847_53259C.1
gacaattcgcagtttgttacctcactttgttttttttctctgcagtaatagaaaaaaaagaaagaaagaagaagaagaagaagaagaagaagaagatgttgagggttgcagctagaaggctctcttctctctcctcctcctctccgtggcggcccaaccacgccgcttccgcttatgtctctcgaaacgcagtcgttgatgaccgcagatccgatccttcctcccatcccctttttcccttcagaggttttgctactgaatccctgatccacccaatagaaaacagcattattcctgagattcctgcaactgttactgctgttaagaaccctacttctaagattgtctatgatgagcacaaccatgaaagatttcccccaggtgacccaagcaagagggcatttgcctacttcgtccttacaggtggtaggtttgcttatgcctctttggtccgtctccttgt

SEQ ID NO: 91084 - DNA, 438 bp, Glycine max
  Clone ID: PAT_MRT3847_5325C.1
acatggagatacaaaaatatatagctaaagttttctcacccaaacaatacatcgaagttaatcattggaagatgtatcacaggtctgtcactgactgggaatagacaaaataatgagcagctaagaagagcagcaatcaactcctgaaaggccagaatctgataatgttaactataaccatctttagcatgcatcatacaataaaaatggtagtagaagcagcatcaacagttgtgatagcagtagcagtcaagttttactataattgtgtaatttatttagtagttttgatgctgttggagtaaatgcacataaagaagaaagtaacctgggtaaggaagactatccctggttgctgtgaatccaacaagcgaagagcagtagtgagcatagctccggcctctccatctatagccatattatcagtgttttgatagt

SEQ ID NO: 91085 - DNA, 453 bp, Glycine max
  Clone ID: PAT_MRT3847_53260C.1
aaaaaaaaaaaaaaaaaaaaaaaaaaaaaaaaaaaaaaaaaaaaaaaaaaaaaaaaaaaaaaaaaaaaaaaaaaaaaaaaaaaaaaaaaaaaaaaaaaaaaaaaaaaaaaaaaaaaaaaaaaaaaaataaaaaaaaaaaaaaaaaaaaaaaaaaaaaaaaaaaaaaaaaggggggggcccctctttggtcttttttcccccccgaattttttttgtaccctgacttcttgtgggcaccattttttttttaatggggttaattaaattgtttgggtaaattgggttatcctgttctttttgagaaaaattttttctgttaaaattttcaacaaaataaacttcctgaattttaaaggtataagcctggggggctcatgggggcggcctcattatattatttggttgggctatactcggctttttttttgctgaaaacctctcgggccctttttt

SEQ ID NO: 91086 - DNA, 1537 bp, Glycine max
  unsure (1)..(1537): unsure at all n locations
  Clone ID: PAT_MRT3847_53261C.1
gatccccgtcgggctcccgttcccctcactttgttttttttctctgcagtagtagaaaaaaaagaaagaaagaagaagaagtagaagaagaagaagaagatgttgagggttgcagctagaaggctctcttctcctctcccttttctctgaaaaaacatgttgagggttgcagctagaaggctctcttcttctctctcatcttcttctccgttgcggcccaatcacgccgcttccgcttttctctctcgaaacgacgtcgtcgtcgatgaccgcagatctgctccttcctcccatccccttcttcccttcagaggttatgctactgaatccctgatccacacaaaagaaaacagcattactcctgagattccgccaactgttactgctgttaagaaccctacttctaagattgtctatgatgatcacaaccatgaaagatttcccccaggtgacccaagcaagagggcatttgcctacttcgtacttacaggtggtaggtttgcttatgcctctgtggtccgtctccttgtcctcaagtttgtgctaagcatgtctgccagtaaggatgcgacggtccccttcttggcttcacttgaggttgagctctccagcattgagcctggcactacagtgactgttaagtggcgtggaaagcctgtgttcatcaggcgccgaactgaggacgatatcaagcttgcaaatagtgttgatgttggatctcttcgcgatccccagccggatgctgatagagtcaaggacccagaatggctcattgttattggggtttgtacacatttgggttgcattccattgccaaatgctggtgactttgggggatggttttgtccatgccatggatcacattatgatatttctggcagaattaggaagggaccagcaccatacaatctggaggttcctacgtacaccttcttggaagaaaacaagttgatgattggttgaaaataaaagtggttctgcattcaagtgggatgagtttacaatttatttttttaaaatttatttggacaatgttacaatgctccttttggacgtcgtttgccctcaagttcttgtcgggtatgtttagcaagtgatttatgtagcttcgaaattgtaactgttaccctttggcgagcttatatcaataatcgcctgacttttagttagcatattgtcgacgagttcaagaatattgaagtttgcaccatgtataaacattttaaaattttgcttataaagttcgtatcttggaattgcccaaaaaaaaaaaaaaaaaaaaaaaaaaaaannaaaaaaaaaaaaaaaaaaaaanaaaaaaaaaaaaaaatttnnnaattttaaaagaagtttaaaaaaaaaaaaaaaggggggcttggggctccggtttttttttgctttttggggggggtaattgggggtttgggggtttttggggttttgttttttttgggggaaaattggtttccgtaaaaatttgccaaaaataatataaggggggggtgtaaatggtaaaggttgggggccctaaaggggg

SEQ ID NO: 91087 - DNA, 747 bp, Glycine max
  Clone ID: PAT_MRT3847_53262C.1
gtgatttctatgggaagttttccgacagagatagaagtaaccctagaggttctagggatcagagaggttttagaagttcacgaggacgggaaggaggccaagactctaatgatgagtttggacgaggtggtagaagtttcagatctggcaacaacaggtctcgaacaacgggaaaaagcagcggcaatgattggctaattggaggcagtagtagatcaagcaggttttcatcatccaacagagatgggggccatggaggggcctgttttaattgtggaaaacctggccatcgggcatcagattgtatcacccaaaaacgagtctttttctagtttggacatttttcgctttgacaccacctagtccaagaattgagctcccactggtgatgccctaattagttcaagaaattgaaagatgctatccccgaaagaattacagaatgtgcactacgttacatatctcttgtttttttagtattctatagaggtctcccccttctgtcttagggttttgtttttctttacccttgttgtaatttttttatttatcatttacattgcggattcaagatagtattttttttttgcaagaacagtaactatacgatgctgttttgtcagcttaacaatcatgtttctttacccttgttttatgaaaatggcagaataggctaatagccttatatgtagaatacgcttccatctgctcatgatattacaacaatacaaattagtccttcgccac

SEQ ID NO: 91088 - DNA, 475 bp, Glycine max
  unsure (1)..(475): unsure at all n locations
  Clone ID: PAT_MRT3847_53263C.1
ggcatctggacatatttatcttgtctcgtcttttgtgctttctttcatgtgaactggaaccgaaatcatcaaatgtattgcatgcaaggatacaangttcattatctcttgtccattggttaaagtatggttatgcattaagagactcagtattgcaggaaatgtattaaagtcttctttttattaaagcaaaaatgtggagctttgtttcttgaattttgaagttaagcttcctctatactgtttgtagtcaaaaaatattatgcagtatgtactatttactcaagagcataactcgatggctcaactgctcttgtatttttgaagatgcttgatcctaagattgaatccctgacccctatgtcactctacctcactttggcttaccgttcccctccccaaacaccccttttgttaccaccaaagaaaaatgttaaataagatttgttctttactatttatccagtgtaacaat

SEQ ID NO: 91089 - DNA, 385 bp, Glycine max
  Clone ID: PAT_MRT3847_53264C.1
ccccaagagaatgagatataaaattcctagaaggaaaagggaaaggaactgagagagtaaagacaaaaatggaatccacacacgtaatagccattacaaatggagaagagaatatgattcgttcatcaaaagagaataaaacattccaatttcaacttccacccattatttcccatcttgggaaaaatgaagtccactgtgtctccattacttcttccaatcccagacacaagcaggtgcaaagtggtggccatgacacgaggaagataatccactgcatcaaaatgggaatctccttggttttggtttcactcctatacctcttgaaccctctctttaagcaagttggagaaaatgcaatgtgggctatcatgacagttgtagt

SEQ ID NO: 91090 - DNA, 564 bp, Glycine max
  Clone ID: PAT_MRT3847_53265C.1
ttattatttttttttttcacacgaaaaaatttatatttatttatgtaccataaatgagttatataaaatcaaattctacctcgtacataacaaaaatccatatttcaaactacctagcaatgtaatagtgactaatgtccgcctcgaatctaccagatattttgaactctatggcatacaaattctaagggtatgtttggatgaggggaagaaaaagagaaatggatggaaaattaaaaaactttaaggtgtgttttataattttttacattctattttaattcaaaatttaccttaaatttaattattttctctttagggatatgcaataggacgaggagcgaacacacacactaggcatgaatcaagagaggaaccaatcaaccatgtcgttttgcatctgagtatctgtctctcccaaatttttgctttggctttcccaagcatcgtcctcccacggccaagtgagcggtttttcttgttgctcccaattattacaagcttcggactcgacaacgttattaaactctatgacactctcccaatcccagtgttgcctcgtgc

SEQ ID NO: 91091 - DNA, 638 bp, Glycine max
  Clone ID: PAT_MRT3847_53266C.1
ggggaaaccccttttagggggttttacccaatcctttgggggaaacaaaaaagaacccccgggggaaaggggccccatacaatttttttggggggggcaattccggggttttcttccccaaggggggcataggagattttttttttttgggaacaaaggccttttgggggatttcccttttcccaaagggggggggtgtcacatgtggggggggcaccttcacaaagggggggggaaattttttaaaaaacagttttgggggtggagggaacggggtcacgatttcctggggttggggggggcccgggatggccggggcaaaagggaacccttctgggggggttaggggggggggggaatacaggggggggaacttgggggggggtttcacggccaaattaacggggggggggggctcgggttgggggcccggttcttttaaagggggggtgaaattgggggcgatggggggggccctttcaggggggctgttccctggggggggccggggggggcccccgggggggggggccccggggaggggggccccctggggggggggggaaccttttttgggggaatcctttaaaaaaactgggggttggaaaaagggggcggggtgggggcccggggggggg

SEQ ID NO: 91092 - DNA, 495 bp, Glycine max
  Clone ID: PAT_MRT3847_53267C.1
tctcttcctcccaagctgttgatgtttctctctctatcttgagtgctgaaggcagctgctatgtgaaaactgacacttctcacggatcctgacacaggtatagacggaccaacaaccaatgtgtcgtgtccaaacaagcgggtagaagaggacttaaataaactgatgatgagtgactacaaagcgtcgatgtttaacgatgcaacgcaaggagttctatgtgcactgccatggacccagcgagagtccttatcatggaagcgacaggaacgtacgagcggcgctgacagatgctaatccctataaatctgctgccatatgctttataaagaagatatatcacccagacgttaataacacgctaagagcagtttgaccggatgccatcaatcctaccaggagtcccatgcttgctcttgcaaatgtgttagaggtgtctttaccagaacttcttctgtgtctctatccctcagaccccatgaaccgagaaactgg

SEQ ID NO: 91093 - DNA, 252 bp, Glycine max
  Clone ID: PAT_MRT3847_53268C.1
ggtcagcacgcgtccgtatagacgacgacagaatgggacagcagaaacaattaataaagatgagtttgaataacaacatggtggcgctaaaggtgtgtttgttgcatcgtttccttgtgggggttacagctgcaggcatggaactgagcttcctcaaaagtgattactcatcacgttatgattatgattagtattcacaaccatacggtgatctccgccactacagacgcacattgactcctcaatgcagct

SEQ ID NO: 91094 - DNA, 357 bp, Glycine max
  Clone ID: PAT_MRT3847_53269C.1
gcacaagtgagtttgttgatcgagatacctagaaagagtgtgatgaaaatgaaggtccttgttttcttcgttgctacaattttggtagcatgggaatgccatgcgtacgatatgttccctctccgaatgaacactggctatggtgcccgtactccggaggtgagatgcgcatgttggaagcttgctgtggaagcacacaacatctttggctttgagaccattcctgaatagtgcgttgtagcagcatacgaatacatccatggggatgcaaatagatcagactccagcacagttgacgtacaatcatacgtttatgccagagacctcgaagtctatcccagaggcacatttgtgttc

SEQ ID NO: 91095 - DNA, 532 bp, Glycine max
  Clone ID: PAT_MRT3847_5326C.1
attctttttttttcacatggtccaggtgccatgtatgtcaaacagaccaaaataggggggacatgaggttactgatcttcaatcataatacatacacgtttcataggttatatccgataattgactagttaaacttgtaatcattctgatgtaccacttgtagtgcatcaaaagaaggaaaaattggctactagatgcatcggacagtactgattagaagatgccattgttgaagactcatagggatggattgctatttaacaagcgttgctggatgctgatacaatgaaggtcacatccatcaaacaggtaccagttggtttcctacctaaggcggcatatcaattgtggggggatcaagagtgcgaactgtatggtgggcattactggagatgaagcgagacgccgaccactgagcgatgaccagacgcagttgatactatgaggcataccacacttatctagtctcaggggaatccatactgtactccatattgggagcctgtgtaagcagatatacatggacgcagga

SEQ ID NO: 91096 - DNA, 313 bp, Glycine max
  Clone ID: PAT_MRT3847_53270C.1
acagaaagagggagatagatgggagtaaagacagggaggaggacatagacatactggacgagaggtgaaacgataaatgctgcagatagttactaacactcggaatactatgaatgcacataaaaggatggatatgataggtacacaggaactatctgagcgcgatcacttgaccataagaagacaagcatgcactatatcataatatatgctcatgcagcttcacagatgctcttaatgggttgtatgtgggatacaagctgactacagataactcataccaagttatcttattgatacagatgactagata

SEQ ID NO: 91097 - DNA, 222 bp, Glycine max
  Clone ID: PAT_MRT3847_53271C.1
aaagcctcttcttgctttcgtcaactccatcctcctccttttttcctttactttcttctggtattccccttagtgcgattcaacctccaccttctccctaaagacccatcaaactttacaaaaaaaaaaaaaaggaggaaaaaaacaaaaacaaacacaaagggattgaggcaccagggtttacccttctattccagtctattcagatccccccaattggca

SEQ ID NO: 91098 - DNA, 229 bp, Glycine max
  Clone ID: PAT_MRT3847_53272C.1
tagagattatgggattttgaataagggttagcttaacatcactgacacacacgtggcacatcacttgttttccacaatgcctcattatcatgcaatgggggctactaaggctataaaaccaattttgcgagagttttatcactttgctgagactcctatttatacggcaatgtggagagaggcaaaggagtgcatgtatgctgagcctgataacgggtcttatgggaaa

SEQ ID NO: 91099 - DNA, 792 bp, Glycine max
  Clone ID: PAT_MRT3847_53273C.1
ggcaggggaatattagtcaaaacataggaatttcaactctacattgatgaatgatgacacaactcaacaccctcgaaaagatggtcacaaaaaaattaaaggatacgatttgcttgcccactatcctctttacttctccttgcaatagtaatcatagttttaatcttcacaatatttcgtgtcaagggccccatgatcacaatgaacaccatcaacaacacaaagttccaacttgacaacaccaccatgatacctcaacccggtaccaacatgtccttagttgcatcgtttaggtatgccaacaccaccacgagtttgtactatcatggtgtcttggtggaggaggctagaggaccacctgaggagggccaaagccagaacaatattgaggatgaatgtcacaattgatgtcatcatggatcgcgtcgtttctagcccggttcttgcaacggatttaggttcggggctgttgactatgtgcagcttctctaggaatcctgggcaggtgaagttcttgaacttgattagacagaacattgattgtgaaaatgaattgcaccaccacttttaatatttccacacaggctattaaattaatttagtgtaagcggcaacccaaactttatggatcatgtgtactatggactcccacattctttcctctgaactgtatcatctaaaagagctactatagctgtcatttctgccatagttttcctcctccactctggctcatccactcaagttaatatattagtttagtttatcttagtttccttgaatatacttgca

SEQ ID NO: 91100 - DNA, 150 bp, Glycine max
  Clone ID: PAT_MRT3847_53274C.1
gtcgtacggctgcgagaagacgacagaagggggggcaattggagaagcatacccgctgattccccacaacagcggacacgggagaggaccggccaggccaaacgatggcaggaacgacaaaccgaagcggaaaagcccggggaatcccgg

SEQ ID NO: 91101 - DNA, 509 bp, Glycine max
  Clone ID: PAT_MRT3847_53275C.1
tggtgattgtgtgtgtagacttttaaactgtaacttttgattatcaattatgaatatcttttttttgggttttctttagcattcatgtgtatacactatgcagtataaattatttatcttgtatccataattttcagtataacggctatcttgctatctactaactgctatagtgtttttggggttggctgctccacgcctctgagattgatgagtacatgctcaacagtgggttatgtatcatagagcagtgaaaagtaaaatcataagcaccattactgtcctcccctcattgtttatcttttcttcaagctttaactattatgagccatctttagctaaagtttgcatttagttttgaatggtttagccatcagtgtatgtagacatagattttatcttgttttgcttcttcagagttttaatttggttctcattgtaagattctcttaaactaggataatgggatgaactcttgtttttttactacttctttggttgattgaagt

SEQ ID NO: 91102 - DNA, 535 bp, Glycine max
  Clone ID: PAT_MRT3847_53276C.1
ccggtccggattccgggtcgacccagcgtccggccaaacgaacacagggacattcactgcgcctgcctcgacctaacatatgtgtgtatgctgagacatgatgagcgcagccaccatctacctacggctggttacgttgtcatctcgcgccatgctaccggcaacgtagaccacttagtgatgtcgactaaacacgatgattcaatagtcccacaaacaagcaactgcatacgtactagattgctatgcaatccccacacaatgttaatgtcactacctgtgacatgcctgccactggcttgaaatgagaatgaaccttcattgaccatattaccttttttgaagatatgtaatagatgttatacgagaattgaatagttatagtgcgaaaagaggcctacttgcatcgtgattctgcagaaaggatgactgaaaaataggatactgaagctgatagcaacattaatgaccttctgtctgagtaccaacaataccaagatgcgactgctgatgacgaggactatgagtatgaaca

SEQ ID NO: 91103 - DNA, 510 bp, Glycine max
  Clone ID: PAT_MRT3847_53277C.1
ctcctttgaattctctttaccctaatttcttcatatatcaaaagctcaaaccctaaaatgaatgacttgttctctggctccttctcccgcaacaacgaccaagtcttgcctgaccaccaccaccatgtgatcgagatggcggccgcgtcatcaccaacagccgagggcagcgcgaaccttgaaaagttctttcaagaagttgagcaggtgaaagaggacctgaaggagctggagcgtctccatgagaatctacgtgggaaccacgagaagagcaagacccttcacagcgcgaaggctgtgaaggagcttcgctcacgcatggatgctgatgtggcactcgctttaaagaaagcgaagctcgtcaaggtccggctcgagacgctggaccggtccaatcaggtgagccgaaacttgcctggtttggaacctggttcgtcctcggaccggaccagaacgtctgtggtgagcggactgaggaagaagctgaaggactctatggacagcttcaac

SEQ ID NO: 91104 - DNA, 185 bp, Glycine max
  Clone ID: PAT_MRT3847_53278C.1
cccacgcgtccgagcacttacaaactgcatttagagattcagtcaccaatggatcgcaacggcgttcggtctattgcattcatctgcattgtagtcacctacgtctgaggacagtctaccccctcatctccatcaaacactccgtcaacttccgacgtcgtcactccctgccaaacacctttcac

SEQ ID NO: 91105 - DNA, 552 bp, Glycine max
  Clone ID: PAT_MRT3847_53279C.1
gagtcccttgggtatctcaggtttggctcatttgtttggcatcttagccttcatcctcttgctcgtttggttgttgcattaccgtgaaggaattgactatgattcagacaatggatttcgcgtcttcaatgctcaccctttattgatgtactcgtgcttcattttccttgctggagaagtggctttttggtttcgttgtgttcatgcttcaaggagcttcagctacaacaagagctaaagtgctaccatggcacaaagttggtggtagagcactgttgttcatggcagtgtgtgctgctgaaacaggattgatggagaagtctagtttcttaacaaatttaaaattgttacacgagagagaatccaatttaatcaacttcacgggtcttgcgattctcttgtttggagtttttgtaaacttttctgttggtttctcttagtttgccataaaattactctcattcgtgcacttgattccacatcataaattggattgattccactgtttattgattttgtaataaataaattatttgattcgtggaatgcttt

SEQ ID NO: 91106 - DNA, 521 bp, Glycine max
  Clone ID: PAT_MRT3847_5327C.1
ctgtgacaaaccaaagctcctcgctcacctatctagctttgttgtctgaagttgagactagaacatccacagaagctcatgtcttctcaacgactgataggcgttttcgtttggatgtattatgatgttgatgagctagcgatacctaggtccatcgacgctaaaaatttcttcttatgtgtgtggttagaacattcggaagatcctgcggaagaaggatttggctcccttacgaccccaagcctgcccttagaagcttggccccggcccacgagctgggccatctgcgacaccacctgccctacccttctcagaccgccccccccccctccccccttctctctcccctccctaccccacatatcacccatcccccccccccccccctccccccctccccacctcctccccccctcctcctcgtccccaccccccccgcccctccccccccacactaccccccaccccgcctccctccccccccccccctccctccaccccccccctgccccccccccccc

SEQ ID NO: 91107 - DNA, 459 bp, Glycine max
  Clone ID: PAT_MRT3847_53280C.1
ggaccttgagtgacacaatattagtttgaaccacaaaaaattaaatttagaacccaaacatccatgcagaaacattgcagaacagaaagaggcaagcctaagactaagacctgactttaatactaggagtaccgaggtgtaacaacaggccctcacacccaaaggagcaccaaagaactcagagtagatttccatgaagaatttatccacaatttcaagattaaccgggcaagtgagtcgagaatagtaatgaagaacctcttcaatgtccagtgcataatccacatcgctcatgtccagcatctccagttctttaagcttcttttctgtcatgcaatttccatttcccttcctaccctttgtatgatccaatttctgtttctccctatgatgggttaggcccatcttgttcttgttctttttcttgcaacattcctaacttttttaaatctgatcatg

SEQ ID NO: 91108 - DNA, 815 bp, Glycine max
  Clone ID: PAT_MRT3847_53281C.1
gagtcccttgaactgtgacacgatgagtcccttgggtatctcaggtttggctcatttgtttggcatcttagccttcatcctcttgctcgtttggttgttgcattaccgtgaaggaattgactatgattcagacaatggatttcgcgtcttcaatgctcaccctttattgatgtactcgtgcttcattttccttgctggagaagctatgatggtattccaaacaataccaagcgaaaggaaagtcaagaagtttgttcacatgacactgcatttgattgctatagttcttggcattgttggtttgaatgccgttttcaagttccatgatatgcaaaacattcccaacgtttacagcctccattcatggattggcattggcaccttctgcttgtttgcattgcagtggctttttggtttcgttgtgttcatgcttcaaggagcttcagctacaacaagagctaaagtgctaccatggcacaaagttggtggtagagcactgttgttcatggcagtgtgtgctgctgaaacaggattgatggagaagtctagtttcttaacaaatttaaaattgttacacgagagagaatccaatttaatcaacttcacgggtcttgcgattctcttgtttggagtttttgtaaacttttctgttggtttctcttagtttgccataaaattactctcattcgtgcacttgattccacatcataaattggattgattccactggttattgattttgtaataataaattatttgattcgtggaatgctttatattgattttttctcgaaaaaaaaaaaaaaaaagcccct

SEQ ID NO: 91109 - DNA, 359 bp, Glycine max
  Clone ID: PAT_MRT3847_53282C.1
tttttataaacataaactaaagccatttattaaggggagaagtcgatagataaatttacaaaattaatgctaacccaaacacattaggatgaaatatttggactattacaaaccaaaatcactacatatcaactaaccgtcgacaaacctactaactcgaataattttacatatatatatatataaaaacatttatatagcccacataaagagtacagtgaccttaataagaaaaccaacgttcttaattataggcataatcccacacctgctctgctatatatacatctaagccaaggttgataagaacatatacaaaacctaacaagccttacccttcaataatgaaaatgaattta

SEQ ID NO: 91110 - DNA, 371 bp, Glycine max
  unsure (1)..(371): unsure at all n locations
  Clone ID: PAT_MRT3847_53283C.1
gggcagctcaattacttaatttgttcgacaacaaaagctgacttaagtcagaatgaacttgtacacttgacagaaagaaaggagtttatctactaatttttaaaatgtaaacaaattttatatagggatgtaactatctgaatacatacattgccatttctctgctatatagtaacatttcttgacaccaatggtaacctgtttattcctccctcagtaccaaatgtgtccatatctatttaaacagtaggagcttcatttctaaagtgatctatgctaggacatatataagccagttattattaaggttaactaaagttttagaactttagaaaattctcagttntaaaataattttgactcattcatcg

SEQ ID NO: 91111 - DNA, 357 bp, Glycine max
  Clone ID: PAT_MRT3847_53284C.1
ctccctcaattttctctttcttcatctttctcttttgcatcatcatcccttttccttttattcgttagggatcttcattcatgcatgcgattccagctccatgcacgcaagttgctgaagacgaatttttatcgcaacatattcatctcaagtaattccttcttatttttctttcacgacagctttgtaactaattttttttaaccttcagtttctctgcgagtattttccgcaatggccgaagaaattgtgaatgaatttgttcaccaaaacggcatcgctgtcataacacacaatccccccaaaagtaatttcgttttcctcaaaatcttcttctcttttccttttaatcctttt

SEQ ID NO: 91112 - DNA, 1918 bp, Glycine max
  Clone ID: PAT_MRT3847_53285C.1
ccgttcagttggcgcccgacgccgtaccccggtctctcctccctcgattggacaccggcaccatggaggcgcctctgttattatcggagaagagaactggatcgattgaagaagagagtggaaaatggagctcgtatcagtatgtgggtggaaccggttctgtgaggccaacttcttcattggctggaactgaggtgagtgtggatgaaattcgatctgctgctgctgcttctggttactatcccccttcccttcatggagccttggttggttcacctgagcctgatcctacagagcaagctcttgtttatcagggtggatatggaggagattatggtggacccacaccccaattccagaggaaaatcttggatgaagtggagatacgagagttgctcattgatcatgttggtcatcgttgctgttggggtagtcgtcctgctcgaacatggaggattcatgcagtggaagactgtaatgtatatgtaggaactctggatacatttatagaggaaagagaaatcataagagagacagaaccataccttggtggcagtattgacggaaaggataatggacctgaacttggtatttgggaattggatctaagatctcagttccctgttctatttgaaccctataaagaagtgcgggaaaagattccccattctgaagttatagaaaagtgcacagtttgtgcaggacggggaagtacagtctgtgctacatgcaatgcagaccaagaacctggattttataaggaaaatcagatgactcagtgtgcaacttgttatggaaggggtttaatcgctcataaagatggttctgacactgtatgtgtgaaatgtaatggcaagggaaagattccttgtgtaacatgtggatctcgtgtactaattgactgcagaagatgtaatggaagtggttctcttctagcacgcaatctggccattattcgatggaagacactttcaactcggaaagtaaatgcaacaagtggagcagcatcagtaccggatgaagttttccatagatccaaaggggttcaattgtgcaacactcaagcataccaatgcactccagccttttttgctgattcttattttctcaacaaattctcttctgatgtcattgcagaaagagctcaagtgcctgccactgcaagggtcatatgtgaaaggcatgcaatctcagttgtgccagtaactcgtgtcaccatggctcatcgtcgacaatccttcagtttctacattatagaatatggcagagaggtgtatttgaaggattattaccctgctagatattgttggggcctgtgtccttgtttggagtggttgaagttgtaatgttgaaactgttcttcctggcagcattgggcagttgtaaaggtttcatctacacatttgtgagttctgtgtttgttcagtttgataataacaccagcagatttcagggtttgagggctgagcagatgaactttatgatatgaggaaataggttatgcattgataatgtaaaataattttacactgtcatccaattactaatcactatgtattgtaagtttgttaacttttacgataactattttaaaagtcttatcaatggtgatttctaattggttggttgtagtgtaaagattttataccaacagcgcataactattaaactgttatcatttaatccattggctttatggatcactgctgtgaggttatatttatgaaataaggtcagattcaagttgagtgttaattgtgaattcttgatgttactgtgaattatttaaataaaagacaatccctatcagttttgtcttaatcacccattagcttgtttgtatcattttccttacgcctaagagtagtagtatctcaaacagaaaattcattacaaaatagagaacgatgtattttct

SEQ ID NO: 91113 - DNA, 453 bp, Glycine max
  Clone ID: PAT_MRT3847_53286C.1
attttcagtttgtgcaggacggggaagtacagtctgtgctacatgcaatgcagaccaagaacctggattttataaggaaaatcagatgactcagtgtgcaacttgttatggaaggggtttaatcgctcataaagatggttctgacactgtgtaagtagtttgtttgtttatataatagtggatgttgaattcaagcttaagtcacaaatgtcttggcctcattgctttctgtcaaggtggaagtttatactttatacttgtaattcacttaagttacattttcttgcagatgtgtgaaatgtaatggcaagggaaagattccttgtgtaacatgtggatctcgtggactaattcagtgtgcaacatgtaatggaagtggttctcttctagcacgcaatctggccattattcgatggtatgtcaatttggctgtgtctaatgactctaatcata

SEQ ID NO: 91114 - DNA, 351 bp, Glycine max
  Clone ID: PAT_MRT3847_53287C.1
cccccccaaatttttaaaccccaaaaaaaaaaaatttttttaatacccaaccttttttcccaaagggaacccaaaaatcccccggggaaaaatttcatccttaaaaactcccccagggccaaacaaaaaactaatttttttttttctaaaagccaagccaacctttttaatactttatccccaaaaaccccaacaactttttttgggggcccatttttaacatttgcctttaacataacccctttttaagggcatttaaaaccaaatccttccaccccaggcccttagggctcaaccccagaccaattcttttggactaaaacgggaccccatttcaacattttttttaaa

SEQ ID NO: 91115 - DNA, 446 bp, Glycine max
  Clone ID: PAT_MRT3847_53288C.1
ggctcgagctgctgcaataaaggatcgctcaattgattttggcgacttgtttaagggcccactgtgagggaagtctatcaagcttttagggtttgttgccttggcaaggctcggagagtacatacccctacgtggatttaatagcgaggctttcgttggaaaacatgatcataacagcttattaagcactttgcactcgatgaccggaggtggtactgcctgactaggagtgtgctacattggtattgcactgttcataactgcacagattgctttccagctacttgcacagcgtatataccatattgagagagcttcaaaaggagagaaagggaagctgcaagaatgaaagttctgcccgacactccatatgctggatacggattagtcattgcgcaggcaattggtctaggactgctactacgtacctatgacaatgactcttc

SEQ ID NO: 91116 - DNA, 392 bp, Glycine max
  Clone ID: PAT_MRT3847_53289C.1
ggagacttcatgcaatttggaagcaactaataaggtgatgtgatctttctgggacacagctatataatttttagcaataattacactaccaaccaacatgcagaggtctgctcgatcgctttgatcctaatatcagttcctatggaaatattttccattcatctactactcttcagttcatacgttaccaatatcaaaattaagttaattaattaactcacaaactaagcccactcacattaattattattgttcaaacacactaacacaataataatatccattaattcattagggatgataataagggaccccaggccaatagggtactggcactgtgttgtaatgatcttccaaagtgaaggaacagtttccttctccaatattattat

SEQ ID NO: 91117 - DNA, 128 bp, Glycine max
  Clone ID: PAT_MRT3847_5328C.1
gcgaacagtcaactggaatgcggctttagctacacagggtgtgtctggccaacaagggtagtaaaagcctctccctctacttggccatacaccagtgtgtgtactgctgcggcgtggccacaacagga

SEQ ID NO: 91118 - DNA, 415 bp, Glycine max
  Clone ID: PAT_MRT3847_53290C.1
cacatcttgacactattcttacaccgtctctttcctctgctctcatatttcggtggagaaactccaaagccgcgcgctcagcatccaagaactcaggggttgcaatcctgcatgcatttactctgaagcaagaatgcgacaacgcctcactcctctcatatatccgacgcgatctcctacatcttcaccaaaagacgcaatgcagagtcttccttgacagattcgactttcgcaggatcaccatgactatggctacaaatgtcagacccccttcacggattactaacgagatgcatgtgaagagcggaaagatgcaaacatgcaatgtggaagctaacatatgatgctgcagttgaagcattcggtttaaaattacctaccatgaaccctggttcactaatacgagattatactc

SEQ ID NO: 91119 - DNA, 942 bp, Glycine max
  unsure (1)..(942): unsure at all n locations
  Clone ID: PAT_MRT3847_53291C.1
taccccgcccatcagggtcttgctcgtgtgtgctatatcaaggcccttaaaatccagcacacccgagcccatcagggtcttgctcgtgttcattttctaaaaaatgataaggctgccgcttacaaggaaatgaccaaccttattgagaaggcaagaaacaatgcatcattttatgagaagaggtctgagtatggtgatcgtgaaatcacataggcagatctggagatggtgactagattagatccacttcgggtgtatccttacagatatcgagttgatagttctgatggacagccataaggaagaggaagccatttcaatagacacgagccatgagctgaaaacatggaattgcactttgaaaacttggctgcactgaaaaagttacagtcatgcatgccatgaagaatggatattggagtgaaccatgcaccattgcagctgccatcagctcagtcatgaaaatcaaatttgtaacatagaaagtatagttaaattatcatcctgtctatagtaatgaacatgtgaatttattaccattcttttgccccgggggagtggtcccaattttgtaattgttaatcttgattttttggggtatattatgagtgtcaaatgtgttgtttaaaaaaaaaaaaaaaaaaaaaaaaaaaaaaaaaaaaaaaaaaaaaaaaaaaaaaaaaaaaagggcggacccccaacaaaaaacccccaccaaccccaaaaaaaaatcccccaacccaaacccaccaggcccaccaccctttccccctacagaaaagccccaatcaacaccccccgccacaacccaacgcccacaccctccttccccccgcgccaaaaccggcccccccccccnacaaaaacaaccccccaaaaaaaaacaccaaccccaaaaaacccaccaaannnnnnnnnnnnnnnnnnnnnnnnnnnnnnnnn

SEQ ID NO: 91120 - DNA, 369 bp, Glycine max
  Clone ID: PAT_MRT3847_53292C.1
gcaaatggttgtccacgatctggaactgattccagtgggaatcatgaggcccgctgggccggatcatcagaggaaccctttacccgaggactcatgctcaccgacatcgacatccactcaactacactgttatatatcgactgtgtgtccacattcacgaggtctgcgttcttaccgtgcccttcttcggctacaacaccaccctcgaagatgacttcttcccgaaagatggctgggactccctgccctgcactaggatcgccgcactgatacagacctgccccgggtacatctgccgctacgtcgcggggacctatgacaacgagggcgtaatgaacgtagggctgttgctaaccttttacctaatag

SEQ ID NO: 91121 - DNA, 401 bp, Glycine max
  Clone ID: PAT_MRT3847_53293C.1
taatttatctaacccaccacctacacaactttctcttacaacaacaaccactcctcttctgtgtggacccaaaaacacgctttccttacaccccctttttatcttccttatacaaactcattaaaatgtttcgagataaaaacaaaacataaaaaaaattcacttaattattaaatttttttatgactttccactaccatcttcatcacaagataaccttccctcctttcaccgatgatcaaaatcttaaccataatagatacattcaacatatgcttccaccttctacatttctctacaactttaacgtttacccctctttaacataaatttccttctcaatctaaaaaatcttttttttttatccctaacccagaaccaattttcaaatcccatttttt

SEQ ID NO: 91122 - DNA, 469 bp, Glycine max
  Clone ID: PAT_MRT3847_53294C.1
aaaaaaagaggaagaagaaaaagaaaatacacttttaactgagttgatatcatcactaagaaaaaagtgtactaattcctgaagtccccatttcaagctttcaaccattttgctctttcattcctcttatcttctcttagagattaatttgaaaacagaagttccttttctttttttcattttttgtgtttttggttttgtacatgatcaatggcttctttagtgtcttctccatttaccttacccaattctaaggttgatcaactctcttctcttgcccagagacacctttttcttcattctttccttcccaagaaggccaatggctatgctagcagctcaaaagcttccctgagagtgaaatgtgctgctatgggcaatggtcttttcactcaaaccacgccggaagtgcgtcggatagttcccgagaagaaacaaggccgccaaatgttaaaattgtgtatgttgc

SEQ ID NO: 91123 - DNA, 463 bp, Glycine max
  Clone ID: PAT_MRT3847_53295C.1
gaggtataatcataatttaataaataaaaatcaataataatgaatggggtcattttgtcaagaagctgaagtcacagcttctacaacatcatctgactcgtcaaccatcatttcatttctgaaaagcaatttcaaatatggaagagccttggcaagcacggacaaatcagctacattgacactcatcatgtcaaatgcaatacatgttttatgcatgtgtgtttcatcgaatacaggaattttaggatatctttggctgaaatgagtcagtatggttcgatatgcattggcagactgtcccatttctatggcttcatatgaggtgctgtgatttcatgctatagcctcctcaaccatagcatcctggaaagttgcctcatgtatgagaactgttgcaccaccagatgcttctattagtacggggcagggccttgtgtcaccagaataaacaatcttccagtca

SEQ ID NO: 91124 - DNA, 210 bp, Glycine max
  Clone ID: PAT_MRT3847_53296C.1
gttttaagtagctatgactatgccaatttcatcaactaaaaacagttttcttatcttgttcgtatttatgatctgtggaggagtgattgcaactcctccagaggatccaattcagtgctcttcaaagaacacagactgcaccatcaccaacacctatggcgtctttcctgaccgaagcatttgccacgccgctgaggttatttaccccaa

SEQ ID NO: 91125 - DNA, 204 bp, Glycine max
  Clone ID: PAT_MRT3847_53297C.1
gcggctctcaatctcttctttctaccctttacctttctttcataccaaccccctcctcaaaccctaagccagccatttccttctccttgttcttcatccccaaaccccattcacgcttttccaaatccccaccaaggtgctgtcttacgcctgcctcgccaatcccttccaaaaacacaaacttatgtttcccagttttttaac

SEQ ID NO: 91126 - DNA, 158 bp, Glycine max
  Clone ID: PAT_MRT3847_53298C.1
atcgtcatgacaatttaggctgttatggcacttatgattttgaggactactcactatgggagcgtcactcttgacttaatttgctatactggtcctagtcctggtcgattactagtgactgtgggttaagttgttatatttaatgtgttgtggtatca

SEQ ID NO: 91127 - DNA, 366 bp, Glycine max
  unsure (1)..(366): unsure at all n locations
  Clone ID: PAT_MRT3847_53299C.1
acagaaggggacagcaaaaacaaggaagaaagaagagggggaagaacaacnaaggaggagctatttgtgtgtttgttgcttcttttccttgtgggggttacagctgcacgcatgagaacactgnatctncaggtgtgancagncancaagggaggaggaggaagaaaaggcacaaccaggcggggagcgcgggaagcacacacgctcaaagccgccgcaaagcagcggagaagagaggaggcggaaggcaggccacgcagagaggaagagcgggaggggcacacgcgcacagccaggacagnggcgngggcgagacaccaacgacggcggcgacaaaccgggcaaggccagagaggacgagaaaaa

SEQ ID NO: 91128 - DNA, 609 bp, Glycine max
  Clone ID: PAT_MRT3847_5329C.1
ccacgcgtccggtatctccctccctagtttgatgaggctctagtggaacagaacagaacagagacaagaacaacaaccgcccaagattccatttcctctatactcgctcggtgcttctgcttctgacccctctctcggatctcagattcattcattcattcattccactacctcaatggctgctcccgcttccaacgccgtgcttctcggggacgttcacttcgacgacgtctccaccaagccttgcggcgttcacttccgcgaaagaacgcgcagagtggcgctacgagccaacgtgaatctccgaaagccgaaaccgttgaacggtggtattctgaatttcgggtgttccacgtcggatgcaagttggaggagttggaatccgagttcgctctacaagaattcgtccttctttgctcgctgctccgccgagacaacgccgcatgttcagcacctcgcaacctccaccttctcgattgaccagactaattttggtggcgagaggttgaagctgttttccgggtcatgttaccttccacatccggataaggaggacaccggtggagaggatgcacattttatttgcacagatgaacaagcaatttggtg

SEQ ID NO: 91129 - DNA, 105 bp, Glycine max
  Clone ID: PAT_MRT3847_532C.1
gtaagcacggaataaggctcgatgcagaactgaaattgttattggaagaggagctggggatggatacaagcaccatcgcaccacctgacaagaccaaggatgata

SEQ ID NO: 91130 - DNA, 411 bp, Glycine max
  unsure (1)..(411): unsure at all n locations
  Clone ID: PAT_MRT3847_53300C.1
tagggaatttggccctcgaggccaagaattcaagcccgcattggtgtttgcaccggaattttccgcactgatggtattcctgaacaggacattgtcaagcttgttgacaccttccctggccaatccattgatttctttggtgcactgagggccagagtatatgatgatgaagtgaggaagtggatttctggtgttggtgttnacantattanaaaaaancttnttaactcaaaaaataaacctccaacctttaaacatcccaaaataactcttaaaaanctctttctatattttaacatacttatccaaaaacaaaaaaatatcaaaaaaatccaatttcctaacaactacttaaacaaaactactcttaaaaatactaacaaanattctattcacaaaaaaactttcttc

SEQ ID NO: 91131 - DNA, 2045 bp, Glycine max
  Clone ID: PAT_MRT3847_53301C.1
cacagttcaggaggcacacatgtgacacctgattgttgttctaacaatccgaggaagattgttcgagaatagactagaaaggaaaaaacatggtggtgctgttgtcggaggaggatgaattcgacgaggagcccggcgaggtagtggattcagcgccgccgcagaaggtcggcgaagagagagaattcagtggtttcaagaagaagcttttcaaacccggacagggattggaattccccaacttcgacgacgtcgtaactttcgctgtgttggaattggaacattgctcgatggaacaacgtttgattccactagggagagggatcaacctaggacgtttgctcttggaaaagatgacattggtgctggtttggaccgtgccattatcactatgaagaaaggggaggtggcattgttcacgttgcccggagatggtggtgatggcgatgtttcgcttgattccgacgactcttcggctgtgcggtttgaggtggagctcgtttcgtggatcacggtggtggatgtttgcaaagatggtggagttgtcaagaaaattctggagaaggggagtggcattgagcgccctggtgatcttgatgaagtgcttgtaaagtatcgggtggtgcttggtgatggcactgttgttgtggagacgctggaaggaggagttgagtttcacatgaaggatggtcatctttttcctatattgccaaaagtaatcatgactatgacaaggggagagaaggctgaattaattctccaaccccagtatgcctttggggagaaggggagagaagctggcagtgggctctgttcaattcctccgaattcagtgctgcatgttaatattgaattggtgtccttcaagcctgtcataaatgttactggtgactccaaggtgattaaaaagattttgaaagaaggggagggtgctttcacagccaatgaaggtgcaaatgttactgtgagcttcacagctatgctagaagatggcactgtatttgagaaaagaggaattggtgaaacactacccttggaattcataactgatgaggaacaagtgattactggtctagaccgagctgtggcaacaatgaagaagggtgagagggcgataattagcatacatcctgattatgcatttggagatgttgaagtgagacgagatattgctattgtgccaccgggctcaaatgtagtctatgacattgagatgatggattttattaaggagaaagcaccatgggaattgaatagtaaggagaaaattgaggtgggttgggagaagacgacagaagggaatgtattatttaaagttggcaattatcagcgagcaggaaagaaatatgaaaaggctgctgattttgttgatgaagacggatcctttgggtttgatgagcaaaagcaagctcagacactgaaagtgtcatgctggttgaatagtgcagcttgtagccttaaacttgatgactttcctggagcaatcaagctatgttcacaggtgcttgatgttgaattttacaatgtgaaagctttttacagacgagcacaagcatatatagaaactggagattatcttttagcagatgtagacatcaagaaagctcttgtggtggacccacaaaacagagatgttaaggtaattcagaagaaattgaagcaacttcaagctgacagtgacaaaaaagatgctaagctatatgaaaacatgcttgcacgtaaaacaaaggacccatctatggctataaagagattgaaggtagagaaagatcagggggaaaatgaagaggttgcaagaatggaaattgacgaagttgctgatagcgcagtgattcaatagttgattcttgttgaacatgtatagattataatataaagcttctattaacaaaatatgtaaactagtagatggaagttgcaaattggattcggatgaaaacctacatgttccaatagagtacatttatgtattccatcaacttgtaatcttgccacatttcagatgaacattatacatactacattcgcatgcaaaaaaaaaaaaa

SEQ ID NO: 91132 - DNA, 561 bp, Glycine max
  Clone ID: PAT_MRT3847_53302C.1
gtcatcccagttgagaagcaccctttgagatcaaactcatctggcttgaactcaagcattgattttgatttctgtgttcatgaaagcttagagcttgagtcctcttcagcagatgagcttttctcacatggggttctccttcccacacaaatcaagaacaataacatcaacagcaatgctattttgaagccaatttgccaactagcaccgccaccacctcaacctcaacctcaattaccacctcccccaaaagctatttgtgacaatgcttcttccaccaccagaaaaagctcaaagaaagagaggcacaaagttggcaaggagttgaaggatgaaggggatgagaagcaaagttccaagtcattttggaggttcaagagaagtagtagttgtggaagtggatatgggagtagcttgtgtcctttgccacttttatctagaagcaattcaactgggtcttcaccaagtgttaaaaggataccactttcaaaagaggttaagcaaaattctcagaaacgttcttcttccagcacaaggttttctcagtctcaccccttggct

SEQ ID NO: 91133 - DNA, 369 bp, Glycine max
  Clone ID: PAT_MRT3847_53303C.1
gtccggaaatcacgggtcgactcacgcgtccggttgtttgagtcatttgattttcttaaataagcataaaaaaatgataaatgtaaataatatgataataaaaagaaattacgcctctcataagtcttaatataaaataataatgaattgaaccactcagccaagccaggttgtgttcttgagatataaaccctttttattaactcacatgtgagtgggggtaggattaccttttacttttcgtgtatacttcataagagcatatgatggctagtgggtgcctccttttctttcccccatcatttcggtgcgatctcaggagctcatgctcggggcctcttgcactgctttgctaggcgccccctcctc

SEQ ID NO: 91134 - DNA, 160 bp, Glycine max
  Clone ID: PAT_MRT3847_53304C.1
tgtacttgcagatgccaaagacatggaattggtgaaaatgttgaatatggccacatcggaggggatggccgaggccctcccacgcagaaaggctccaacacgcgacaacagatttgtttctggggcagggggatagatgacaaggattccacgaaccagt

SEQ ID NO: 91135 - DNA, 302 bp, Glycine max
  Clone ID: PAT_MRT3847_53305C.1
ggacaaactgcataagagtactttgcggtactcaacagtttaatacagatttacaacggttgatgattcccacatttgtgaaaaatgggcctttgaagaaaaaaacatatgaggaaaaaaaaacacacggaaaacctgtgtagggcaagatattggcgccctttatcaagaagtttaaaatctgagaagggttatattacggtggataaaaagaatggtaaccccttaccggcacttggtatttttggcaaaaacttctaaaaaaaaatgagcttggaaaaggttaattttggtgaaggggg

SEQ ID NO: 91136 - DNA, 267 bp, Glycine max
  Clone ID: PAT_MRT3847_53306C.1
tactgctgcgagaagactacataaggggccacatgctaggcacaacaaaaccaccgcctgagttagttttgagagaagactccctttgtttgtttgaaattaattaataaagatttttggaatcatctcttgaaaccattgtcacaccttaaaggagaactttttgattatgcgaaagaatttgttgtatatcaacagcatcttcattgctaacggtgtcattgcaacccccatttacattattggacctttcttccacaccttttc

SEQ ID NO: 91137 - DNA, 1332 bp, Glycine max
  Clone ID: PAT_MRT3847_53307C.1
accacgcgtccggtacacactacatcttcaagacgcacaatcactcactctacattcttctatttcctctatccctaatttcccaattcgtccctaattctgcattttgcagacacttaattacccgcaatggcagagattcagccgccggagggccaaataaacggtgccgtgggaaccctaattcttcactcctcggagccttccatcggatcgaagcggcagcggcggccgagcgtccgattgggcgacatcggcggcgaccagccctacgtcccccacgcccgccgcaacccgaagccgtggaaactcgccttcgacagtcaccaccaccaccaccaccaccaccgcagcaaggacaaggacccaggtaaaccctccaagactcgtcctttaacgaacctgagcgagtttaacgaaaccctagaaccttgcaacgaccgagaaccggggaacatcgacaccgtcgcaattggcagctggaaggtcaaggagtccaagaagagaggctccgtcgccaccaagagggtcagatcgaattgggttttgcgaatcgacgatggcggtggcgacaacggtggcgacgagggagagggagagaagtataataacggggaagaagatggggatgacgatgatgggtatcgggaatttgaggtagagaattcggagagccctttgaaggaccaaagccctattcatagtatggagaatttgggggttgatgggcataggagggtttttaagggtagggaaagggaacagcatcatgatggggttgagctatctgcaccgtctgatactgatgtgagggattggaagtgtggggataggaacaatgagaatggtggtgggagggttaggggtgttgaagatggggttagggtttggcttaatggattggggttaggtcgctatgcgcctgtgtttgaagtgcatgaggtggatgatgaggttttgcccatgttgactctagaggatctcaaggatatggggattagtgctgttgggtcaaggagaaaaatgtacactgccattcagaagcttggaaagggcttctcctgagctgagcttgtttttggtgatgctgccagaggccggatgtagattctcagctttagcgaattattcagatgcgtgtgtttgagctcaactgaactgaactgagttttagtatgttctttcatgactctttttttgtttagggttgaaaaagttaggacctcacatgttattatttaagaaacaaatatccttcttgaaatccagtgcaagtaaatataactcagcgaattttgttggagctattcattgaattgtttatttttcctg

SEQ ID NO: 91138 - DNA, 181 bp, Glycine max
  Clone ID: PAT_MRT3847_53308C.1
gggaaaaaattgcgttatattttccggctttttcaggatcaaaaacacaaagcggggcctaatacttggagcgtcgaaccttaaacttaacgacctccctgctccttttgattttaaccgacccggcatccttcctcccggcccgccgaaggaaatccctaatccccgggatctgctcggg

SEQ ID NO: 91139 - DNA, 341 bp, Glycine max
  Clone ID: PAT_MRT3847_53309C.1
catttctaataataggcgggaaccaaggtgtctatggcaaccatggcatgatttacattgcaggattgaaggccctgctgcatatgatatactcactaattttgagcagcgctggagaaaagccaccaaatggtctgagttgggtcggaaactcaagagagtatctcactggaacgatgattctttgatcaaggtagaacgcatcttttgtattcttagtccttcggaatcaactccagttgatgatcctgaactatgggtttcgaaggaagacgatcctgaaaattggcatgttcaagtttttcgatccataaattctggttctttgaaaggattcccta

SEQ ID NO: 91140 - DNA, 343 bp, Glycine max
  unsure (1)..(343): unsure at all n locations
  Clone ID: PAT_MRT3847_5330C.1
gtttttttttttttttattgtactttttgtttttttaaacattaagaggaatagttttctttttttgtcctgggcgaaaaaaacattttggaagggagggaacccgaaacaaaaaatgggagtggcccaacaaaaaacaattttttggtgtgtgctaaaccaaaaattggggattccctccccccccattgggggggggggggaaaagatgccacaatttttctcaaggaaaccccatgggcccctcttgttggggggggaggggcaaaaaagaagcgggacttggttttattncctttaaaaagagaaaaataaatccctaagccacaaagttttttggaat

SEQ ID NO: 91141 - DNA, 401 bp, Glycine max
  unsure (1)..(401): unsure at all n locations
  Clone ID: PAT_MRT3847_53310C.1
gggggggcctttttttttttttttttttttttttttaagcacataagaaaaaagtcacttgcatatagaacgtttaattggccacagttttccacacgagtaatagagaaaaggacagacacatatttttttttgaaagaaaagtattgattgcttttggaggggggggcaggtgtctttctccttttagaccagncancactaaagggggggcaaaagaaggagggggggnccacgacccccgcggagcagaaancacnnganccgacgggcagaagggannccancaccaaccgggagcaagcaaancccgacccggggggccacagggagggcnngggggagccccagcacgaagncccgggaggacccaacanaccnccaaagaggagcaccagggg

SEQ ID NO: 91142 - DNA, 490 bp, Glycine max
  Clone ID: PAT_MRT3847_53311C.1
attgtgtttaaacattctccaataagttgctcctttaaagcttagtggtctagacgcaattcaagcttacgaatacccaaggaccaagccaactataatccatccaaggcaccccagaattttgccacatatactgaagtaaaaacccttaaacattctccatcattaagccactacaacctgccacatgcttatgagtctttttggcagcattagtattgatacagatccaaagatgagaattgaggagggggaatctggctagactttaaagcacagaaggcaatttgtatgatgcggagaaagagcttcacaggaagtataaacaaagagatgaactacaaaaataaataagatctgaatgggaacaaagaagaaatagatgtgatgattccacgtatgaggaccgagacagcaaacctatgttctgtattttcctggagtcaggccaagaacacctttgcacaaggagcagatagtgcttttagag

SEQ ID NO: 91143 - DNA, 218 bp, Glycine max
  Clone ID: PAT_MRT3847_53312C.1
aatacgacagctcctaactggatcaagatctcaactgaagttgtcgaaggcaatatccgcaatttgcgaagaaaggtctgaccccgtctcagattggtgtcattctcagagattctcacggtaatgctcacgtctatagcgtcactggcatcgagatccttcgcatcctcaaaggtcacggacttgcgcctgatgttcccgaggacctgtaccagttg

SEQ ID NO: 91144 - DNA, 466 bp, Glycine max
  Clone ID: PAT_MRT3847_53313C.1
cataaccctccgacgctgtcatctggatttgtttcaaacaggaatacgcattttttcttaaagcctaaacaattgcttcgattggataacaaagaggagaaacgctccaaaaaactccggaaagtccgagataaatccaaactaaggcttgaccaaaaacaaaccttctgcggggcccattcatgatcctgtggggaattacgagttcccatacttagggggctgagtgacgacataatcagggccaccaaaatcgcacgtgccggatgcacatccctttttctaatactacctggagaaggcctacgaagaaggtgccttcaaagcgttaagattgacccactagccccctggctgatttggagccgtaatccgcccgaccctttcccttagcgtacctaaaagcgatatgaagtttcttttacgaagaactggaaatagctcacgccccatgtatgggccctta

SEQ ID NO: 91145 - DNA, 395 bp, Glycine max
  Clone ID: PAT_MRT3847_53314C.1
taccgaattatcatacccttcaagatgaaaccgtacctacgtccaatattcctattattccttatccttctcgaccaatccatttcggcgagtgctgctataaatattaatggtctgagaaacaaaattagagaagttctaaacaagcacccgagcatcaatcttccggcagataaactgaagaaggtgaagagaccactgaaggcactggattatctgcttggcgaatgtaatgaccggcctgcattacaggtggatcatgtaaggactatttctgacatcgactatcaacaaaattgcccgaatgccgcgtatgaagcagtttgcccgttactgaagcaagcgattcaaatatgttgccagaaacacgcataactctgcaagccacggtgggc

SEQ ID NO: 91146 - DNA, 399 bp, Glycine max
  Clone ID: PAT_MRT3847_53315C.1
tagagaattatcatacccttcaagatgaaaccgttcctacgtccaatattcctattattcggtatgcttctttaccaatccatttcggccagtgctgctataaatattaatggtctgagaaacaaaattagagaagttctaaacaagcacccgagcatcaatcttccggcagataaactgaagaaggtgaagagaccactgaaggcactggattatctgcttggcgaatgtaaggacaggccgcctcaagaatttcaagaatttttgcccgaaatttaagaacgattatcaacaacattgcccgaaatgccgcgtatgaagcattttgccccgttactgaagcaagcgattcacatatgtcgccagaaacacgcataactctgcaagccacggtgggcg

SEQ ID NO: 91147 - DNA, 312 bp, Glycine max
  Clone ID: PAT_MRT3847_53316C.1
aggaaaacaaaatcttcaattctttattcgtcataatcaaagacaactttatattataacttaaataagttaaagaagatattacaagttgttgcatcaagccccatccgaaaggtccaaatacaattggagtgggcttaattattccaagaagaaaacaaaacaacaaagcacacataattttattactgtcttattgatagagatttgattggaagaagcaagtgcctaggaaattaataggtgttggggggttcattatagaattagaccccctttgctgaccactgaaatttgtgggggctgggattc

SEQ ID NO: 91148 - DNA, 158 bp, Glycine max
  unsure (1)..(158): unsure at all n locations
  Clone ID: PAT_MRT3847_53317C.1
cgcgtgcncgcgtacgtnagcncggtgcaagagtgangntgtatccttcnagaacnccgaanantatatatanntatatnnatatanatatatanatntatatntggnggagtgtntgtagggggtagagagcatggngnggcgtgacnctananagn

SEQ ID NO: 91149 - DNA, 205 bp, Glycine max
  unsure (1)..(205): unsure at all n locations
  Clone ID: PAT_MRT3847_53318C.1
catgcacgcgtacgtnagctcggaattcggctcgaggtcccctcagagaataccgatatacacatggctaaggacccaggagacttcacgggaggcctcattaggtgaaaggacgatgttctgggctgtacatgaaattggatctgtagacactgtgtttccttcactgacttgtaatgtcacgcagctggagttgatgcnaccc

SEQ ID NO: 91150 - DNA, 235 bp, Glycine max
  Clone ID: PAT_MRT3847_53319C.1
gaaggtgcaagaatgtctagtgagctataaactaggatagcgtgaggagaatatgaagctgactgttttccctgttgcggcactaacattagtagcatggtcatgccatggctcttgctaccaaaggagccctctccgaatgaaaacaggctatggtgagcggtcttcggaggaaaaatgctcacgttttatagctagctgcggaagcacacaacatacgagcctttaaaaccat

SEQ ID NO: 91151 - DNA, 2000 bp, Glycine max
  Clone ID: PAT_MRT3847_5331C.1
cacttccgcaccttcgcggtataacacgacacaacaaactacaacacatcaccctctaactccatcaaaaccacacacacaaacaccctttgagttcattaacctcttcagaaaaaacaacaacaacaacaaaaaaaaacatcatcatcaaaaaaacttccgagagtttaatggcaacacgcgtgatccctccaagaatcctcaagaagctccgttacaacacaacaaccaagccactcaacgctgcccacccctcaatctctccagtcatcgccccaccgtcactcttcgagaggtcgccgtcccctgtcgcggatgctgtttcaacaacatccacgactatggagacggcgaatctcaacctcgacgacgcggagcggcttttcgcgtcagtatcgacggaaaagctgctccggtcgtccgcggttttgcatgcgacggcggtggggcccatggtagacctgggaatgtggttgatgaagtctccggtgttccagaccgggctgccgaaggatctcatcatggccgccacgaaggagacgttcttctcgcacttctgcgccggcgaggacgccgccgccgccggacggagcatcagcgcgctcaaggaggccggcttacgtggcatgctggtgtacggtgtggaagacgcgcatgaaaacgatgggtgtgatagcactgcaatatgcctcatggcaactgtttagaaagaatgagtgacccttcttagatggcaacaaaaagacccttcattcgttttgctatggaagcaacgattcccttccaattttcgctgagtctagtcctttgtaccacacacagaagagaccggagcctctaaccccagaagaagagagtgatcttcaacttgccaaccagagactccttgaactttgccaaaaatgtgaggaagccaatatgcctttgttggttgatgcataacacaccacggctaaacccgctattgattacttcacatactcgacgtacccaaggcgcctctggggggtgatgcagaacacaccacagttcaaccggctatcgattacttcacatactcttcttccataaggcacaataaggatgacaaccccattgtgtttggaaccattcagacttatttgaaagatgccaaggagaggttgttgctcacaacaaaggcagcagaaaaaatgggagttccattggggttcaaattggttagaggtgcctacatgtccacagagagtaaattggctgagtcatttgggtatgcatccccaattcacaataccattcaagaaacacacaattgcttcaatggctgctcatcatttcttcttgagaagattgctaatggacccggttcaatttcagttgttcttgcaactcacaatattgaatcagggaaattggctgcagcaaaagcatatgaattgggggttggaaaggtaaaccacaagctagaatttgcacaactgtatggaatgtcagaggcactttcctttggtttgagcaatgcagggtttcaagttagcaagtatatgccatttgggccggtagatatggttatgccttaccttctgagaagggctgaagaaaatagagggcttttggctgcatcaggttttgataggcaattgatgagaaaggagttgggaagaagattaaaagctgcaatgttctaaatttgtcagaaatcaggattcattgactttttgtacaaattagagagttttgtaatgtgaagaaattgtgcattcaatcaaatgaaattctgctttgttatgtaggttttgttggaaatgcaacggatcttttgtgttgagcaataaacttatgcttaaattgggaaagtgtaaaaccaggttagaaaaatgagtaagaaaaacaagaatagtttttaagtcatgggttgtccaagtttctcaatgtagctttaagtcaagttaattaattagttccgttcatttaatttttaaaaaaaaaaaaaaaaaaaaaaaaaaagaatttaaccaacc

SEQ ID NO: 91152 - DNA, 439 bp, Glycine max
  Clone ID: PAT_MRT3847_53320C.1
aacatatcttcaatctaatgaggaacaggctcagatggaaacaaatttgatctaaattgtctcttgatgatcctgcaactcctaaaggtttcatgtaggatcttaaaactgctcaatctaacagagcactccccaaaaacacaggcctgggctccatattgcgtattgatctattggcacattttttgacagacgacaattttatagcaagacgtgtgatttgctgcagcactcattcgatcaaaggaaagactaaaatggttggccacagtacgcattccttataatacagatcttgcatttgcctatgctatccatagttcattgagagatcatgccagttctgatattgactctatctgctctcaagactgtgaattatgcaattctgcttgcacaaaagcgatgactatgtgattccatccacacccgtgtgctg

SEQ ID NO: 91153 - DNA, 371 bp, Glycine max
  Clone ID: PAT_MRT3847_53321C.1
aaaaaacaccccattctcacttttttttgggttctgatcccaaaaattagtctttaattggcccatccttccccaaacaagaaaataaacattctgattagaaaatcaacctggactttgaaagccaatttttgaaaaaaacaaaaaaatttttttagactcccattttacaacataccctgtccaatggtggctttgacaacctacaaagtttcagttccttcttttttcatttaaggggagggggccaaaatcagttttaaatttttgccatcaaaaccttgatttttatgcacgttgttttagaatctcgtaaaaaaaaaaagttttttgctttgtttgcatccgaaagggcaatttttcattttttt

SEQ ID NO: 91154 - DNA, 483 bp, Glycine max
  Clone ID: PAT_MRT3847_53322C.1
catgcccataatagaatgaaaaagaggatcccctatataaaccctttgaatattttgccaatgataagaccgggcacctcccaatggaagagttggaatctccccttgagaaatataatatgggtgatgagaacccaataaaggagatcactgctgaagttgattcacccaatgatggaagaattacctatgatgagtttgtacccatgatgaggaaaggcaccccagatataactcacataacccatagacgtcgcaaataacccctgcattgctttgttgggttcagagtgtctacacgttttatagtataacggcctgctatttgattcattaggcacttgcatgatatttgtgggtctagcccctagttggaaaagtttatttctactgcttgagcagacacgaacgtgtacaaatcaaagaaaaaaacagatcaatccttttttcataagtgaggtaaaaaaaaagttagattttatt

SEQ ID NO: 91155 - DNA, 296 bp, Glycine max
  unsure (1)..(296): unsure at all n locations
  Clone ID: PAT_MRT3847_53323C.1
taagctttcaattgggttcgaggtaaaaatttaaaaaatgtttttnataattttttaataattgatgatgaaataatgggggaataataaggtgagggggtaaataaataaaatatatttgaagattggaaaggtaaggatgttgggtaaaagaaggtaatttattgttgaagtgaaaaattgaagagatattatgtatgaaatgttaataaaagatatagagaaaaatattaataaaatgaagaataaaatggttatggttaaaaatgtaaattttgttgttaatgatggaagta

SEQ ID NO: 91156 - DNA, 339 bp, Glycine max
  Clone ID: PAT_MRT3847_53324C.1
gagttggtttaactgccctgactatggcggaatattttcgagatgtcaatgaacaagatgtacttctatttatcgacaatatctttcgcttcgtccaagcaggatctgacgtatctgccttattgggtcgaatgccttctgctgtgggttatcaacccactcttagtactgagacgggttctttacaagaaagaatcacttctaccaaagaggggtccataacttctattcaagcagtttatgtacccgcagacgatttaaccgatcctgcgcctgctacgacatttgcacatttagatgctactactgtactatcaagaggattagcggccaaaggta

SEQ ID NO: 91157 - DNA, 337 bp, Glycine max
  Clone ID: PAT_MRT3847_53325C.1
accggcccggactgccttggttgtccttcgcgtccgtttggtttcgacaagacgacagaagggggaatctggccaatttatcataagaacacggcttctgctggaaaggtattgttcaaagtcacactcacctcccatccaaatttaccctttaaagagtttatcgttccataggcggcaccttttactgccgttctcaaattgcgtcgccttataattcaaagttcctccccagaccagtgctatcattaccaactacggctttggcatattttcccattttaccgtattctccatctcccctatgcatggttcagatcttgacctgattccctat

SEQ ID NO: 91158 - DNA, 366 bp, Glycine max
  Clone ID: PAT_MRT3847_53326C.1
tttttgaaacgttaataaaatcagatataactcgaaatatattacacttgttaatcatgtaatactgtggagtaccctatgatcagtatcctcaaataaaactttacagcgtctaaacactaatgcattaaagcaccttggacttggaactttgacttacaataacagaacaatccaccggtaaagacaaggatggaactactattgggtcattgtagccggaaggaggcaactatcccatctttagtctttaacgagcaattccccacatttactcaccacaatagtgtttataaccaatgcttactgatttaacaatggcaattgctctcgagacacattatcacatttcatctcaacataaat

SEQ ID NO: 91159 - DNA, 268 bp, Glycine max
  Clone ID: PAT_MRT3847_53327C.1
gttttttttttttttttttgttttttttgtttttttttattgtaagctgcctgtggggtctgattagcggtggagaatggattattgggaatcagtaatatattttaaaattcccaagatcttttcctctcttctgtggtaaagtacatagtgctagttagtgatccttttcttctgtcaacaaaatacactttttttaagaaaaattctcagctttctgcaatttcattttcctttcagtcatcaacattgtgctggtttttcttca

SEQ ID NO: 91160 - DNA, 227 bp, Glycine max
  Clone ID: PAT_MRT3847_53328C.1
cgatctttatttattgttctcttggtttttcctgttttttttggaccgggacctgcaggcgtcccaccttttggggagtgagtcttttgagagctgggcgaatcacggacaaaactcccccccctgaggggggggacccgctggcaacgccacacaagcaaaggaaccggaagcaaaccgcggataggggggcgcgcctattgagagaactaactaaaattaatcgc

SEQ ID NO: 91161 - DNA, 138 bp, Glycine max
  Clone ID: PAT_MRT3847_53329C.1
gttgctcctgcaattatcatttacaagtactctgctctgttcaccggatttttacactatacgtgggtgctttttgatcttatgtgtacaacattcttaacatgtaaatcaacatatacatttctttatccatacttc

SEQ ID NO: 91162 - DNA, 188 bp, Glycine max
  unsure (1)..(188): unsure at all n locations
  Clone ID: PAT_MRT3847_5332C.1
gctaaaaccttgacccagtctgaggtcaagaatggtaggttgtctntccagttcctaggaaagcttgcagagagatttttcgctcgtatggtctactcagcggtccctcctggtcatactatgcgtgtcatgcttggtcttggtgttgcatggaagtcctgatccatctatagggggatgtcgaggcg

SEQ ID NO: 91163 - DNA, 417 bp, Glycine max
  Clone ID: PAT_MRT3847_53330C.1
gtcaaggtttaggctgaaaatgaaacagttgaggagaaatggtggtgcaaggcttacgattctattggcaaaccgcttaaactccgtgagataatcattcacgaatccacgttgttggagtttgaaaagagcgtcgtgaggatcgtcttaaaaggatggggtgaaacacgactccaaggcatgaagcattgccgaccatgtggtgaggaagccattccaggacatccatcggtaccagcagagggctggaccttccatgttgaatgagccgacaatgaggtgctccacattaggtatgccttgatagttggaaaactgtgtaatcttgaaaatccaacctagaggatcctgaccatcaaaccagggaacctcaagtttcatatgagtgcaaggatgagggaagatggtgggatttgg

SEQ ID NO: 91164 - DNA, 150 bp, Glycine max
  Clone ID: PAT_MRT3847_53331C.1
ccataactcattatattttggaatgaagctcttactctatttattacacacacacaaaacttttcaatgaaggaaaaatagccctttggggagatttcataacaaaaaacaccattcatcctaggccactttccaacacggaatggccaa

SEQ ID NO: 91165 - DNA, 1271 bp, Glycine max
  Clone ID: PAT_MRT3847_53332C.1
ggggtggtgggtgcgcaccgcacacctcgtcactcccccctcttcgtcgcctgcttcggagggttacctacctttcccgccagatttgaattgtgaatggagcgattttattcttctcaacgagagagccttcttttagggtacaataatgactatattaattctctgattccgaggtcgtcgtccagcgattcgaactcggaggttgatttcaccgacgtgtttggggggccgccgcggcggtcttcggtgaacgaaccccggcacaccgtcggcgatgggagtgttgcggcagggggatgaggtccgtgccggcggccgccggtgccgcaggagccggcgttcgcgggcgcttgtggtaacccgggccggcgtcccactatcaagcacagcgtctccttcggtgatgttttccctggtgctagtaatggccagttccatttctcaatatacaaatgggcaagtaaaggggtgccaatggtgatgcctctcagccctctgcctctccctccggccaaagataaggctaaacttgagagatgctcaagtgctaaggaatggatagtcagtgaaattaccacacagaatcctatagaatacaatagaacacaagattccaatcagagtgtagaacaagtagtttctgccaaaactcaattagatacatcaaccagccctcaaactgttagtaaagatgttcctgctagttctatctcacgtgacactagagaagtagaatcaagtattcgttctacaagtgataagaagcttgagcccaaaccattacagtttctgttcaaagaaagtgataagaaacaagataatgatgagatgattacaagggagagagaagaaaacaggatgatgaaaagcacaaaaaagtcgtctgctgtttttgatgttaccgtgaatccaatgaaacaagaagaaaaggcagttcccttgagagatgtaggacgtagcaaagccacttcccagggttcggtaagcttaggcgaaaattttggggaaaggcctagtgaaaggaaaggtcaaagaatttgctcgaattttcaaccaagaagctgtaaataaacccaaagttgactccaaatctcaacctcagggttctacatacaagaagagagatgctttaaggacaaagaatgaagtggaagctggtccagaacaacccaagaaggataactccgtcacagagaccaccaacatctctgctaataatttgtttcatcaagatgatatatcagaaccagaaattcctgatatatcat

SEQ ID NO: 91166 - DNA, 461 bp, Glycine max
  Clone ID: PAT_MRT3847_53333C.1
ctccagactcagccagtgccacgtggaagttaaagcagattatctggaagatatggttattatatggtggggttaaaattgcagccatggttccagttttgtcgtgttcctttatattacaggaaattgttgataaatgtggttgatgcagccacaattgtagtcgtggacaacaaaaccttgacattgcagtcatggttgtggactgttctctaaaaccttgttgtatgtggaattgaaagaatagacatgtgaaagtagcacatggatttgatctgtcagttcttcccacaaaaaaattagattttcattcccaaaaataatgaaattgctccaaaatgctcacgttacgaatcagcaccgcattatgtgtgacaactatgggtttcttatgttcattgccagcatttctcccatattgcttgctctgctagtttgaacttgagagggtttgacaatgt

SEQ ID NO: 91167 - DNA, 379 bp, Glycine max
  Clone ID: PAT_MRT3847_53334C.1
gtgacagaaaaaataggggctaccttcatcttgcaataatattaaacatcaaaagccaaggcaagcttgccccatatttgtatcaaggggtttgaccaaccaaaaaatttttaacccaacaaataccagttgaattattcccagacatgccttggaaaaaactttttcttacggggatgcaaacactcggctgggggaaagttgaccaataaagtttattcttgcttatctccatagctttgatcaaaaaggggttttaaaaaaccctgcccctttttgatacatgggacatccactggcattaagtcccaccccaacactgggtttttttcctaaatttcaacacattaaatttttccccttctcccaacaggatttt

SEQ ID NO: 91168 - DNA, 1148 bp, Glycine max
  Clone ID: PAT_MRT3847_53335C.1
ggctcgagtgatttcactgtagttttttacattttccatggcaccaacgcagaaaaagcagccctccaatcccgtgcgctgaatttggaccaattcaaagatgaaactgcgaacccaaacgcaaaaaagcaacgcgatttcaccccaccgtgaaaggagcacgtggcttcttcatgtcgttgttgctactgttgcgattctgtatggcatttgcgtagctgaaagcaatgaaggagtcgaacacgtcagaggaggccccgattctgtggtttgggtggttcagctttccgatcttcatttcagcgttcaccatccaaacagagccctcgatttcgctaaactcgtgggccccgctctttccgtcatcaacccctccctcgtcctcatcactggcgacctcacagatggtaaaagcaaggatttgctgacaatgaagcagaatgaggatgaatgggtggaataccggactgtactggacactgttattaagagaagtagactccataagagcttgttttttgacctcagaggcaaccatgacagttttggtgtaccggttgttggtggttcctttgatttcttttctaaatacagcatcaatgggcagttaggaagaaatgggagtatcaatagtgtcacccttgagaattgcagaactcttctaaaagcttacgagatgaacccagtactccatctcctaggctatggtatttcaattcccttgttgctggcatatgcaatcagcaaaaccagaagtgctgaatgaaatttgttccaaaggttcacatgtacctagtctccctgttttgaatgcaaccaaaggatacacttgtggttgtgtgatcggtgttaaaattcgtttaagctagccggattcaacaaatattgaagacccatcaagtggcaagagaatgctgcttgttttcaattctcatcaatcccgaagatatttgtgttgtctgtattctttaagcttgcaggggcaagaaaagagtatattagttttttcacttatgtcctaatctaagtgttatattagttttttttaatgtaatattaataatagtgtcagctttgtaaaattacttgtcatttctctaattatttctttgatctataaaaatattcataagtcatcttgtatcact

SEQ ID NO: 91169 - DNA, 288 bp, Glycine max
  Clone ID: PAT_MRT3847_53336C.1
ttggttcttttttttagcgccggcctttttcccagttttgtgctcccccaaaagcgctgggtggcctttaatagggcgcgcctaatgcccttccgaaagcaccggacaaagccatacctttgcctttctagcccgaggccggggtcaacctgttgcccccccgggaccggaattacctgaaccccctcctcgagccggttgaccaaaccctaaccccctggggaagcccgttgaccccttccttaggaaagcggttcgtcccgcttgcccaaccgttaatcttccaaa

SEQ ID NO: 91170 - DNA, 293 bp, Glycine max
  Clone ID: PAT_MRT3847_53337C.1
ccacgcgtccgggggctcccaaacatccgctgaaacttgagcttcagcagctaattgggaacaaacattttccaagaccctgccgtgtggtttcctccgcgctgttgcttaatataattacgcatctaatttagggtctacaactacgagttatttttttttctgcctgttgtttttgacaccatgacttgctgtttccttgctatattgagtagtaccttgcagttattttattgctggcataaaaaaaaaaaaaaaaaaaaaaaaaaaaaaggggcggccgctctagagga

SEQ ID NO: 91171 - DNA, 1312 bp, Glycine max
  Clone ID: PAT_MRT3847_53338C.1
cccacgcgtccgcccacgcgtccggtgactttgttagaagctaatcactgccctggtgcagctttgattcactttaacctaccaaatggccaacgctatttgcacactggagattttagagcatgtaaactaatgcaagcttaccatcttcttgtaaatcaacgtgtgaatgtactttatttggataccacatattgcaacccaaaatacaggttcccttccaaggaagaagtactcaattatgttgtcaaaatcacaaagaaccacctcaaaattcatcctagaactttagtggttgttggggcatacagtattggcaaagaatgtgtatatcttgcaatttctaaggctcttggggttaaaatttatgcaaatgcttcaagaagacggattttgcaagcttttggttggcctgacctttcagataaactctgtacaaacggaaacaacacacttctccatgttctgccgatgtcatctttaagagttgagaccttaaaggattacttgaagacctacaaggagcaattcacagcaattttggcatttcgtcctacaggttggactttcagtgagaagataagcaacgatctggaactaattaaacctgtttctaaaggaaatattacgatatatggggttccctatagtgagcactccagcttctcagaactgcaagattttgttcaggttttgaggcctgacaagataattccaactgtgaatgttggaaatgctgctaatcgagaaaagatgcaatcctactttcgagattggttgaagggctaaattctctgggtctctgctattcctgaaagagattgaactttttatctgagattaccattataaaaccaatttgcaaggactcaacatttcttgctgtgcgctgaaggttgagccccggtatggttcccatttgttgccactaaaaatatccctgcaaggtcctaatgcagggcatgccacaattttatgacaaccaaaatagggaaaaatagaaggagattccgtgccttctgatattgtcttctgtgtaccttagcaactgcccattttgaacattgatgtttaacaaatagcagtgaagtttcctattttttatcccgcttataaatcaagtaattattgttgttttattccgtaggacttggttatatcgagtagagggcttttgctaaagcttcatgtaggtatttttattccttcctttgtagtatgttggtagtagttaagctacctgtacgttggagaaaaatatcgtacgattataacacatttcaaaaaaaaaaaaaaaaaaaaaaaaaaaaaa

SEQ ID NO: 91172 - DNA, 350 bp, Glycine max
  Clone ID: PAT_MRT3847_53339C.1
tttcttctttttttttttttggagacaaatcacgcacatagattaattgcagggggtcccaaatcatgaacaggccaattgttcattgttgaaagaaattaatgcgatattcaacgttgagtgagtctgtgtctaagggtcgaaaaatcattattttaaaccaaacatttatttcttgtaccctttggaaacatcggacgcgagtttggatgctattgcggtgtggtacatgatgttatgaaactgtgtcgtttccacagtcttttttcttaggttttttcgcctttttcttcgtgatgcaccccgttgtgtacttggatctggtccggcccaagttcaggcccactttc

SEQ ID NO: 91173 - DNA, 400 bp, Glycine max
  Clone ID: PAT_MRT3847_5333C.1
gaaccggaatggggggggacggggggggggcggggtcccaaggagggcggcgggggagaggaggttcgacaaagggatgggaggaaggaggggcaacacggatattcctgctggaaacttcaagaaggaggctgtagaagagaagaaagagatcgaacagacccaggagaccgacaaggacagatggaagggtcttggctatggtatctcagacgaccaacaggacatcacgagaggaaagggtttggttgactcccttttccaagctccacaggcagctggaactcactatgctgacatgagcgcctacgaggaccttagaactggacctcgccagtactgggacgaccacagggatggatcttacattgatccaagccgttatgggacaaaacttgtg

SEQ ID NO: 91174 - DNA, 301 bp, Glycine max
  Clone ID: PAT_MRT3847_53340C.1
tctgttctatcagatcctctccacccaccaaatcaactccagcattgttaactccatcaaatttttcacctcgagaaagaacagccacgtaaacgggtatgccggtaaccttaggcaaatcaactgtagctattaatagatgagcgacatatgtaaggtcaacgatgaggctgaaatgggcacctactgtagctacaaacttggtttatactgtttctttaaccaaagatattgctgccttcaacgcatactctatcttacactccctaaattgctgaaatgccaataacctctcatatct

SEQ ID NO: 91175 - DNA, 656 bp, Glycine max
  unsure (1)..(656): unsure at all n locations
  Clone ID: PAT_MRT3847_53341C.1
gggtcgaggacgcgtcaggttggttttggcgttttgatttgtgcagccacatggattccaatgctggggtttttgtcctatttgtttgagatttggtgtgacttgaatccttcgatgttaagttgttgaatttggagagcttgtgctgtgtggaagttggagttagaaattagttgcatttgagggaaaagggtcagtttttttgttgatcctattcttccatatgagtggacaattttgtgttcgttttctgtggcagtgctggacgaattgaagtttgaattgtcttgttatgaaaatcctgtgggacaagggcaaatcttgttgctagaaaaggccatgtggtgaatttgttttgcggtcattgttttttttttataggtcgtaatgaaggctccatccaacggttacttgcctaattctggcgaaggggaaaggaagacaatcaattcagagttatggcacgcttgtgctggacctttggtttctttgcctcctgttggtagtcttgtggtttacttcccccaaggacacagtgaacaagttgcagcttccatgcaaaaggaggctgacttcataccaagttacccttaccttnncatccagntgatttgcatgcttcacaatgntgcggtgcatgctgatcctngaactga

SEQ ID NO: 91176 - DNA, 1589 bp, Glycine max
  Clone ID: PAT_MRT3847_53342C.1
tggaaggcctcaattaggaacaagtggatatgaaagcaactatgtgactccaaatcctgtaattcggcctccactcgagcatggctggaactggcaatccagacctggtgcaattcagtccaatgtaagggatgaaatttcaccagaggaccttcaaaagaattatggtgttgatgatgatggggaggaggaggaatctgatgatttggaagatactgatgatgatctgatgagtgatgacgatgattctgatgctagtcaaaagagtcatgagacacgtaagaaaagcaaatggtataagaagttctttgagattttggatggcttgactgttgaacagataaacgaaccagaaagacagtggcattgtccagcttgccaaggtggtcctggagctattgattggtacagaggactgcagcccttggtgacacatgccaaaacaaagggatcaaaaagggtgaagattcacagggagcttgctatacttttggatgaggaattacgcagaaggggctctgcagtaattccacctgcggaagtatttggtaagtggaacggtttaaaagtgcagcagaaagagaacaaggaagagatgtccatgcaagaagaattttttaaggaacagatcagaatcattcatgattcaagggctgcaaaggaagaagagtttgagaggatgcagcaggagaaacgagagaaggtgaagccgtcaagtactagccctttaaatgaagaggaagggagagttaaggtggacgaatatctaaaatttgttgagtttcaagataaagaaatggaaaactttgttgctgaagaggagaaactccgtcaagctcataaagacaatgttgatgcaatgacgcggaggcactgggaggaaaaggtgcagttggaggaaaggtttaatgaggagctagccaagctcatggaaaagtattccctatctcacccagaaaagtccaatggtatctgatgacagtgtgttgcacatcgcagacaaaaagataaatacagcattataaacagaagataaatggatagagtgattgttctaagttgaagaccctcagatatctgcacttttgtacttgaatacaaggacatgcctagagaatggagatagaaagcttgctaaaatacaaatgacattgcttattttctcctttggtattagtggcttgaacttttgatgtaattgcttttatgcaaattttttgaatagcagcaatttggatggagtgaaatacaccactttaggttatctctggctttggtgaatcgtatgaatggaagcctgatagctctgctgtaagagaagtgttagcgacacactccctaacacacttcctattattattagtgaaaatttattggaaattacaaagtttgagtgaaactcattaaatagttaagacttaccaataaatttcagtcactaataagtgtgttaagtatgttgttaacatttttcttactgtattcatctgtgaagcctgcttctgtattcatctgtcaagcctgcctctgttgcttcaaaactcaaaaggcctgaattcaacgttgtaataaatattgaattttgtttt

SEQ ID NO: 91177 - DNA, 1377 bp, Glycine max
  Clone ID: PAT_MRT3847_53343C.1
tggaaggcctcaattaggaacaagtggatatgaaagcaactatgtgactccaaatcctgtaattcggcctccactcgagcatggctggaactggcaatccagacctggtgcaattcagtccaatgtaagggatgaaatttcaccagaggaccttcaaaagaattatggtgttgatgatgatggggaggaggaggaatctgatgatttggaagatactgatgatgatctgatgagtgatgacgatgattctgatgctagtcaaaagagtcatgagacacgtaagaaaagcaaatggtataagaagttctttgagattttggatggcttgactgttgaacagataaacgaaccagaaagacagtggcattgtccagcttgccaaggtggtcctggagctattgattggtacagaggactgcagcccttggtgacacatgccaaaacaaagggatcaaaaagggtgaagattcacagggagcttgctatacttttggatgaggaattacgcaaaaggggtacttcagtaattccagctggggaagtatttggaaagtggaaaggtttgaaagaagaagaaaggaccatgagatagtttggcctccaatggttgtcattcagaatacaaagcttgaacaggatgaaaatgataagcggataattcatgtacattaatacttctagtatattttagaacatatgctgctggatttatccctcaaatcaagccaataaaaaaatttatacactaaaggtttggtaactcatctttgtctacagatatatcgagtaaaaataaattatacttgtgtttagatgaccccaaaaaaagtaggaactatgaactagttttaagaaaggggaaaatgccagatactcacctagacccagtagctaccgagttaaaaagttgacagttagctttccaggtgaaggaggattttgatttagtaaagaaggtaatggtccagctctggccaaggaatcgacatccgctgcagataaaatttccacaccttctagacctatctgtctcttgatcaagtccaagttttcgttaagaacctcaatttcaccaaatgacaatctcaaatccagggcttttcttctgaggtaggagggaggccattcatgatttaccaatagacagcaaccctccctatttcaaacttagcccatgatggaagcttgaacttgtaaacaatgattgtagataatggtattgtaataatgttatccaaaattaacttttattctggagaaacaaaaaaattttaaagcacaaacactccaacttgaatatcatccccaccacctattcattatttaatttccatgctcttttttcccatttcacatgctttttcttcacaaggtaac

SEQ ID NO: 91178 - DNA, 258 bp, Glycine max
  Clone ID: PAT_MRT3847_53344C.1
ggagagagaaggggatattcactccacatcgtgtgctcactctctcttctcctaggtgtcgctctcaacgatagaaactaaggtacacatgcacactaattcaaagctctacaactatgtcaccaaatttaaattcacatgggcttctttttaccccttcttgaaagttagaagtctagagtatcacaactagatcaccttgcactacatgccccgttcgtgagatgacgttctaacgaatacgacacttacgatctg

SEQ ID NO: 91179 - DNA, 364 bp, Glycine max
  Clone ID: PAT_MRT3847_53345C.1
cgtatccctttcttgtttgtttttctttttatttcgttaccgcgggctgttctgacaataaaacaaagatcagtacaccttcaagtaaaaattctacgcaaaaaggaccctaaaaaacgtttttttaaaggcggaccctaatgtagaaaaatcttaaaaggacccttgtgtccccctctcccaaccaaaccgggaagttggggggtgggacccctacaaaaaagtcgttttctcggagaagtacgggaatgaaggctaatcgcaggcgttccatactgttgggtctcgcaaacgttccctgacgccgtcttatagaaaaaaaaccgttctgtcctatattggaagacaaaccctggggtcgggg

SEQ ID NO: 91180 - DNA, 424 bp, Glycine max
  unsure (1)..(424): unsure at all n locations
  Clone ID: PAT_MRT3847_53346C.1
cccaagcccggccattattaacttggaacaagttccaggccatacccacaacactactataaggggggattaaacaaaacccggggggggggggggaaaaatccaacaaacaataaactaaaggaagcgaaaaccaagacaaacnaaaggtaagaacaaaaaaacataaaagggagccacaaaaaaaaaaaaaggtaacagggnaccaacggaaaggacagggctcaaaatagaaggcaaaaanacaagaaaaagaaccctaaattcttcccactttgaaggagncaaaaacaccaaaagccccccttcgggggcgcnagggctnaaaaccccctaaacgcccacccccntccctttttcttcggaaaggaacccaaaaaaaacccggcgaaaccctttttaacaaaaggggggtccataaaag

SEQ ID NO: 91181 - DNA, 439 bp, Glycine max
  Clone ID: PAT_MRT3847_53347C.1
catgctgcagctcgtgcaattggtggatgtcctatttatgttagtgacaagccaggcaatcacaattttgatcttcttaagaagctggttctcccggatggttcggttctccgtgctcagttacctggcaggccaactcgtgattctctatttgtggatccagccagagataggactagcttgctcaaaatatggaacctgaacaaatgctctggagttgttggtgtatttaactgccaaggtgctggatggtgcaagatagagaagaaaacccgcatccatgatacatctcctggtacactcaccgcctctgtctgcgcctctgatgttgacctcatcacacaagtagcaggtgctgaatggcttggagatacaattgtttatgcttacggggttgttgatcctaatagctagacaaggcatgttgtagtagtcatgg

SEQ ID NO: 91182 - DNA, 316 bp, Glycine max
  Clone ID: PAT_MRT3847_53348C.1
aaaaaagagatcgagctactaaaataagctggaagcacactaagattaaggaagaagattagaaaaaaaaacgatcttgggaaataactagagaagtaagaaaataagttagaaagaaaggttctattataaatagaataatcaatgaaggcaataaaagacatgactcacaagtacaaagaaaaatagaaataacaagattaagtaacttaaggaatgaattaaacagaaataaggtggggttgaaaaagataaaaaaataagaagaagacaaagacagaagatatgagaaaatgaaaaaaaaaataaaactgaa

SEQ ID NO: 91183 - DNA, 183 bp, Glycine max
  Clone ID: PAT_MRT3847_53349C.1
agacatcgtatgcaatctctgacagatttctttatatacatagtatcgctcattacggggcgactttccttaatccataggcagatgctccttgtcaaccactataccattccagaactcattcttctgtataactatatcacagctactacttatgtactgagtgatatcttctactatgac

SEQ ID NO: 91184 - DNA, 314 bp, Glycine max
  Clone ID: PAT_MRT3847_5334C.1
acgagatcggagcacatattattaactgataaccactagaaatgcctgtagcaccatagcggtacaatacatagaccttgaagtagcagcccttgaacaccaaggacttaatatcaactcacaaagagtacaattaaagaaaaacaagatggagcaccacttacacttattaatacactataaagtataccacatgaacaccgcacatcatgaaacaaaagggtgattatcaagacacatgacatgactcggcacttaacattttcattgagcctagcaacagcctgaacttaagcggctaccccaccgggagg

SEQ ID NO: 91185 - DNA, 286 bp, Glycine max
  Clone ID: PAT_MRT3847_53350C.1
gcctgcaaaggttaattaaaaactgttttgcagccaacaagcgccgggcttcagtgatttaataatggaatatttattattctgttatgcaaatacatttattgggtaactgctttggttgagtatgtcttgctcagcgtggctactatgtatccttctagaaattttataagatgaaaagagattttttttaaatgaacatcgtgtcattttagacggtgctctaagcctccatcttttttttttcttccacagcaattgaacaagagaagcaagctggcgaatc

SEQ ID NO: 91186 - DNA, 3302 bp, Glycine max
  unsure (1)..(3302): unsure at all n locations
  Clone ID: PAT_MRT3847_53351C.1
ggctcgagcaaaatttcagaagctagtgatcaatcatcaacacagagctgagtgtgttgctctgtgaatccaccttcttcttccattggaggaccatttcctcctggaatagaaatactaccacacttttcttttttcacttctctaagttgctaagttaattgctccttcattttttcactcttcgttctcgcgtacccgtgtcacggtaactcgtggtgaagtgttcgaaaatgactgtcacacctaagatctcagttaacgatgggaaacttgttgtccatggtaagaccattctgactggagtgccagacaacgttgtgctgactccaggttctggaaggggtcttgtgactggtgcttttgttggtgccacagcttcacacagcaaaagtctccatgtgtttccaatgggtgttttagaggggctccggttcatgtgttgtttccggttcaagttatggtggatgactcagagaatgggaacttgtgggagggatgttcctctggagactcaattcatgcttattgagagcaaagagagtgaaactgatggggagaattctccaatcatctacactgtcttgcttcctctcctcgaaggtcaattccgagctgttcttcaaggcaatgacaagaacgagatagagatttgcctcgagagtggggataatgcagttgagactgaccaaggccttcacatggtttacatgcatgctgggaccaatccctttgaagtcatcaatcaagctgtcaaggctgtggaaaaacacatgcaaacttttcttcatcgtgagaagaaaaggttgccatcttgtcttgactggtttggatggtgcacatgggatgctttctatactgatgtcacagctgagggtgttgaggaaggcctgaaaagtctatcacagggaggtacacctccacgattcctcatcatagatgatggttggcaacagattgaaaatatagcaaaggatgctactgaatgtttggtacaagaaggagcacagtttgctactaggttgactggtattaaagagaatactaaatttcaaaagaaattacagaacaatgagcagatgtcaggtctgaagcatctagtacatggagcaaagcagcatcacaatgtgaaaaatgtatatgtatggcatgcactagctggttattggggtggagtgaagccagcagcaaccggcatggaacattatgacactgccttggcatatccagtgcagtcaccaggcgtgctaggaaaccaaccagacattgtcatggacagcttggctgtacatggccttggcctagtgcatccaaagaaggttttcaatttctacaacgagctccatgcttacttagcttcttgtggagtagatggagtgaaggttgatgtgcagaacattattgagacccttggtgcgggacatggtggccgagtgtcacttactcgcagctatcatcacgcgcttgaggcttccattgctagcaattttactgataacggatgcattgcgtgtatgtgtcacaacactgatggactttatagtgctaagcagactgctattgtgagagcttctgatgatttttaccctcgtgatcctgcttcccataccatccatatttcttctgttgcatacaactcactattccttggagaattcatgcaacctgactgggacatgtttcatagtttacacccagcagcagattatcatgctgcagctcgtgcaattggtggatgtcctatttatgttagtgacaagccaggcaatcacaattttgatcttcttaagaagctggttctcccggatggttcggttctccgtgctcagttacctggcaggccaactcgtgattctctatttgtggatccagccagagataggacttaggttcgttttcttaactcataatatgtgttattttttagagatatgttccataggaaagataaattggtgaagtggtgactcatttaattacttacaattntcagcttgctcaaaatatggaacctgaacaaatgctctggagttgttggtgtatttaactgccaaggtgctggatggtgcaagatagagaagaaaacccgcatccatgatacatctcctggtacactcaccgcctctgtctgcgcctctgatgttgacctcatcacacaagtagcaggtgctgaatggcttggagatacaattgtttatgcttacagatcaggtgaggtgattcggctaccaaaaggggtttcaattccagtgacactaaaagttctggagtttgagcttttccacttctgtccaatccaagaaatagctccaagtatatcatttgcagcaatagggctactggatatgttcaacactggaggagcagtggagcaggttgagattcataaccgagcagcaacgaaaacaatagctcttagtgtaaggggaagaggcagatttggagtttactcctcccagagaccactgaagtgtgtggtaggtggcgctgaaaccgacttcaactatgactcagagaccgggttgacaaccttctccattccagtttctccagaggagatgtacagatggtcaatagagatccaagtttgagtcctttttaagacttggtgtttgatgcattgttgtatcaggagaagggttttgttgtaattaagcattgagggaattgttggagtcaggcagagagagaggggggaggtttgttgtaagacacctagtattagtatcatgtagtggagaaaaagggttgttgatcctaatagctagacaaggcatgttgtagtagtcatggggtggggaagtccttttgttgtagcatgtaatttggtttagacttgtagtatgtcatcaattagatggataaagagagaatattgttatctacccgaggatgtaacaatgtttgtttctctgaataaaaagttcacatctgtcttttggaataaaactagtgaattactgtcttgtttcttgaaatgggaagaagagtaggaggaacgattaattggatcggtgtttctaatgtggctggaaacttctaaatctgaagggcactttttggagtctgaagggtgtctaatgttgctggacacttaatcaatttatgtttttgagtactctaggaaatttttggaataaaattttatttgttagtattattaaaaataactaatttaatcacttttttttttctaggtatcgtatccttcctctagtctttgctctaaggttcaaactgaaagtgtgacttgattcttttagagaaatgctaataatattctatatgacacttggtttctt

SEQ ID NO: 91187 - DNA, 181 bp, Glycine max
  Clone ID: PAT_MRT3847_53352C.1
gtacagctccatcacaatcaccactgtccggatcaaggcttaacctgtctcagagggaaaggcaccgcactcggtgcttggggtccccacccgctgggacttgatcataggaatctttggctggacacagaaatgatactctgtgggtgttactgagaatgtgcccaaagaatctccttta

SEQ ID NO: 91188 - DNA, 528 bp, Glycine max
  Clone ID: PAT_MRT3847_53353C.1
cacttgccgctcgagccgctcattgcttctgtgttttccaatctgattttcagttccccagagacgaagatgtctctccggcgtggagtccctctttctctgttggtcctcttcctcctcctggtatctccggcggcgaccttggccttccgcaagaagcacaagatcccggggccgatcaaaaccatagtggtgatagtgatggagaaccgctccttcgaccacgtcctcggctggctcaaatcctcccggcccgacatcgacggtctcaccggcagcgaatccaaccctctctccgtctcctccccctcctccgccacaatccccgtcactgacgacgccctcttcatcgacgccgaccccggccactccttccaggccattcgcgagcaaatcttcggttccaacgacacctctgcagtccctcccccaatgaacggcttcgcccagcaagccgagtcaatcctcctgggcatgtccaaaaccgtcatgagcggtgttaaaccccacacccttcccgtctacact

SEQ ID NO: 91189 - DNA, 257 bp, Glycine max
  Clone ID: PAT_MRT3847_53354C.1
ccgaacgaacagacaacggccaaagggaggaacagcaagcgaaaacccacggaacaagaagaacccaggaaaacaggcacgcgccagaccaaggtccaaaggacgcaaagaaacgggagaccggaccaaaggcccgccaagcgacaaaccaggcggcgaaggcagaagcagaagaagaccaacaacagagggacccaggaccaagccaaacaagcctccagaagcccaaggaggaaacggcggcacaaaggagggga

SEQ ID NO: 91190 - DNA, 290 bp, Glycine max
  Clone ID: PAT_MRT3847_53355C.1
gggggggaaaagaaacaacacccacccaattagaaaccggccatttttaagatccttttgtaaaatcctagaccatttttaaaaaataaggttttaaaaattcggccccatttaaaactttagcaggttaacccctttccttaacccctgtgggttaaataaacaagggcctaaaaccggaaccttaaattcaaataaaaggttattcttttttggaaggggtcccccttttaaatttttaattttaaaaaagggttggccttacttgaaattccatcatttaaaagggt

SEQ ID NO: 91191 - DNA, 505 bp, Glycine max
  Clone ID: PAT_MRT3847_53356C.1
ggccaagcgtgcggcttgtctattggattaaaccctgcatgtgtaagaacgaccttgtacatactgcggcactgagattgactcaccacactgatccttagccggttgatggcctctcttgctacaatctccacaatccttatagacctaactacccgccgcactgtcccaactcatggaaactatgcatgcattacatgtaaagcaaacacacgctgttcctgacgctgtgatgattcatgataaccgccgggatcgtactggctttgaacccgccacccatgaccaccttgcgtgccctatacactttgtacagcaggtgcgtggcctacaccaccttggacccgagcacgtcgaaccgaggtagcacccgataggtagaccgagacacggctaccagattctacgacggagaggcgctctcacattacccaattcttgctcacgcaggtgttgccaacagagatcaatacctctctcatggattgtgacactccgaatgacg

SEQ ID NO: 91192 - DNA, 312 bp, Glycine max
  Clone ID: PAT_MRT3847_53357C.1
gtgcatatggattcaatcctggtgtgcaaggggcttgaattttgggcaccattgctcaggccatttgacagcaaactgttaggaatcaaatggcaacagtgagaacaccattgaattttgattctaaccagcatagcttttgtcagttatctatcgaccttctcggcggaggaatattaatggacaaaactggagattggatcacacttatacaaaatactgcaattcactactagatgagagttgctgcttgaaagaaaggctagttaatggtcaaaatagagatgtctgggaatgcaacattgaaaagga

SEQ ID NO: 91193 - DNA, 759 bp, Glycine max
  Clone ID: PAT_MRT3847_53358C.1
taaacggtttaacctgaacactttattattcactcatgcaccgatacgtacactaattcgtgggagacagtggctagccggagagctagcaaatgcaacaccccgatactgcgaccgtgtgcgacgacgactgacggcgaggacgctatagtggactctaacacataagccacgcacccgcacggcggcgctcgatctggctgtctggctagttcttgaggaggtagtcgtcgaggtcgtggaaggtcttggcggcggtctccttgatgacgtccgggtcgggcacctcctcgctggccttgtcgaagtccatggtccagctcaccaccgcgccgtcggcggcgggggcggcggcgccgcccttgggggtcacctgcagcgtcaccctgaagttcttgtagaagctgaccagctcgccgtccaccacgctgtacgacaccaccttcttctcgtcgtccgccacctccaccttctccttcgcgaacgtcaccatcggcaccccttcggtgtacttgaggaggcggacggtgccggcggacttgccgtcgccctcgacggtctcgatgctcttgtactgctcggggaagatcttggggaacagctccgtcgagtcgcgcagcgccgtccacagcttgtccgccggcgacttcacctccaccaccagctcaaccttggacgccatgatctctctctctcccttaatctctagctcacactacctaccagctgatgaatgcgaatgttaattcggacgcgtgg

SEQ ID NO: 91194 - DNA, 231 bp, Glycine max
  Clone ID: PAT_MRT3847_53359C.1
aaataaactcgagtatggatattgtcaggaagactatttgtattacgttacaagtaactctttaaatatagtataaaaagagttacttgtaacgtaatacaaataaactcgagtatggatattgtcaggaagactatttgactttgttttttcaaccccccaataaattcgaatattatggttatgacactgtttttttcagcattcatttttctataatagagagttcta

SEQ ID NO: 91195 - DNA, 117 bp, Glycine max
  unsure (1)..(117): unsure at all n locations
  Clone ID: PAT_MRT3847_5335C.1
gttagtctcagctccagnggcggctaaaatggcttacaatctttgctacctaccccttacttnctnctcnttcccatggagctnccttccnnnncttccngcgtcctnccttcntgt

SEQ ID NO: 91196 - DNA, 244 bp, Glycine max
  Clone ID: PAT_MRT3847_53360C.1
cccatgcgttctcggacgcgtgggcggaaacgcagcactgattggtcgtgttaccgaaataatcttctggcagtggcggaactacccttggtctaacgccaacgggcattgcaaactgaatctcttcatgtggctcaacatgttggcagcgaatcacagaacgccgttggcggcaaagcacatctgcatagcgatggcgcctccgaagctctctgtatttgcgctttcagtaaccctgattttt

SEQ ID NO: 91197 - DNA, 783 bp, Glycine max
  Clone ID: PAT_MRT3847_53361C.1
ggcccctggtggtggggtccagagtttgagtgtgcaaggtggagggattggtggtatggttggtttggcacctggttctgttcatgtagctactggctctcctgctgctaaccagctgtcctccggtgataggattgggaagagcaatggtgatacctcgtccgtgtccccggttccttatgtctttaatggtggtctgcgagggaggaagagcgggggagctgtcgagaaggtgattgagaggaggcagagaaggatgataaagaatagagagtcagctgccaggtcgcgggctcgcaaacaggcttataccatggaattagaagcagaagttgcaaagttaaaagaggagaacgaagaacttcagaaaaaacaggcagaaattatggaaattcagaaaaatcaagttaaggaaatgatgaatttgcaacgagaagtgaagagaagacgcctaagacgaacacaaactggtccatggtagagtgaacactcgactacgattgaagcgttaaaatatatgtacataattataaaaacgtatccagttgtagattgaggctgtggtagtttttagattagcacttgaaaactttcacgtcttacttctcttttggacacatgttagggagggtatcacagtaccatgagaatatgtttcagcacacgtccaatttcttgccatcattggttagacaatcttcttttgcagtatagcactttcgctgaatttgattcggtgagattgtgtccaaaataagcactatattaacggtagtttagatc

SEQ ID NO: 91198 - DNA, 673 bp, Glycine max
  unsure (1)..(673): unsure at all n locations
  Clone ID: PAT_MRT3847_53362C.1
gtcatggtggtgtgtttccaatgctctcattgctgcattgaagagagctcaggctcaccagagaaggggatgcattgagcaacagcaacaacagcctcttctcaccatcaaggttgagcttgaacacctcatcatatcaatccttgatgacccttctgttagcagggtcatgagagaggctggtttctccagcactgctgttttctaccacatagaggactctaattcacctcaatattctgttttccagtgttacaatagttctggtggtgtgttctcttctccttgttcaccttctgccagtgagaacaacaaccatagggaaacagccaccaacaacaaccctaccaatttcagacaccctcatcatttcttaacttcttatgccttctgagttccacccttcacttgtcttttctccaccaaagaatgcaccagtgtgttccatcactggtgcagcttcttcttagtaaggatgatgtcaggcttgttctggatatcctcttgaggaagaagaaaaagaacaccgtgattgttggtgactcactgtcattaactgaaggccttgtgggagagataatgggaaggcttgaaagggcggaagtgcctgatgagttaaagtcaatntcatttatcaaattccaaatttcacatgtttctttgagttgcatga

SEQ ID NO: 91199 - DNA, 388 bp, Glycine max
  Clone ID: PAT_MRT3847_53363C.1
cgtcttttttttttttttttttgttgcatttttattctgggcaagggactttacttatgctgatcattgactgtgatgtaacgagttttgcacgaggagggcaccaccaaattttttttgtttaaaacctaccttgggggtcccggggtccccctttgggattttggcccccgtatgtttggggaggggtgtttcccctaagcttaaatcctagagaaaaccggaaccacagtgtggtttttattgggggctcttaattgaccccctggggcttgggggaggttactttccttttttcttcccaacggggtttgaaccccctttgccttttccgggtaaacccttttcttttgagggctttgggtaacgcgcccccttgggattggcc

SEQ ID NO: 91200 - DNA, 153 bp, Glycine max
  Clone ID: PAT_MRT3847_53364C.1
ctcgagccgctggagtacaggctggaaaacatatctttgtatagacatctgactgctcaaaccataagcatagaagtctaaggctctgacaccattgacaacgatcaggccgagatccagaacaaggagggaatccccccataccagcaacga

SEQ ID NO: 91201 - DNA, 529 bp, Glycine max
  Clone ID: PAT_MRT3847_53365C.1
ggagagagattctgtcctctggttttatttaaacataaaaaaagacaagactacaaaatgaatatctaaagctactactacattcacgattcatccagcatcaacctaacactgataaacttaaaatcacaggagaaaaaaaaaaacagtggcagaatcaaagcaatatctaaacaaacaacaataccagaatcttacttactgagaccttaacaaaggttaaggctgttgtggcgacgacacagtcttggccttcttcttcttttccgaaatggccttggcaaatgcctccacaatccgctgttgcgattctagaatcatctcagtgcgcttcatctccatctccatccgcatggtctcaatctccctcgccatctccatcttcatctgttccgttctcacaaacccatctcccaaaaccttaatcgcagccactaactcccccaccgggtccctctccctcttattcccgagaataagggttagggtttgattcaaatgggggctgaatttctgattcccaaacacc

SEQ ID NO: 91202 - DNA, 472 bp, Glycine max
  unsure (1)..(472): unsure at all n locations
  Clone ID: PAT_MRT3847_53366C.1
gtttgttagaaaaaggctacgaacttgtatctggtggaactgacaaccatttagtgttggtgaacttaagaaacaaggtaaatgatgtgatccttttctctgaaaatttcttggttatatttgtctcataaagaaacccagatagtgccaaattgtgtttacatgtcaaatagacctgttcagagcagcctttctatgcttggtttaaatcatacattgagtacttggtgagaatggaaaatcagctattagtatggataaattggcttcaaaagatatttattgtgtcaagcctccttcgttaagattttagtacggaacttggaatgttgtaacgtatagatacatggccgggatgttatttttaaataattatgttatgtaaagaaaattatattgagagctcactggaagataaaacccaatagacattgatagatntaatatgatagtgatgctatcttagtactta

SEQ ID NO: 91203 - DNA, 774 bp, Glycine max
  unsure (1)..(774): unsure at all n locations
  Clone ID: PAT_MRT3847_53367C.1
gaactctctatggtttgtcttaaatgttctacgtgttatataactgtccaccgtttatcctctcaaagcaacccacttgtttcttttgtcagcttttgcttctgtgcctggtaaagaaattatgagtccaaagaaatggtttaaggcgattattagattgaggaaaccgaaggaagataaatcgaaactagcaaaggtgcaatctacccctgaaaaaacaaatgcatcctccgaggagaaacaagaagacactcttgaagaggcacttagcattcctagtgaaggtttggcggtagaaaggacagttcccacgaggttgatagaagatattgctgctactcggattcaaaatgcatttcgtgcatttttggcaagaagaacattgcaccatctaagaggagcagtgaaatttgaggctttgattcaagatcacatggccagagaacaaacagtaactgctctaaactacatacatacttggagcagaatgcaggaccagattaaagctcgcagactctatatgataacagaagccaggattaagcaaaagagattggaaaaccagttaaaacttgaggccaagattcatgagctccaggtggaatggagtggaggctctgaaacaatggaagagatactttccaggttacatcagcgtgaagaagcagcggttaaacgagagcgagctatggcatatgcctactctcatcagtggaggcccaattgcagccagtacttgtgccatgctacttacagnctaaggaaggagagctg

SEQ ID NO: 91204 - DNA, 537 bp, Glycine max
  Clone ID: PAT_MRT3847_53368C.1
attaagaggggcttataaagagattacatgaaatccttgatatggtttatcctttgtataatcatgcaaagacagtggagaacaaataaaagtactactacgcaggggagaaaaaatgttctcttttaagaaacaaaaacaagcttgaaaaaggaaacaccgggggaggacgccaaggagaaacaagccaacggatgggaacaaaaaccccgacaaaaaaaaaggttcccatgaaccaaatgatcctagaagaatcctcagccccaaagggaattaagaacctcatttcaaaacaccactgaagggggattgcaaactccacaacagaagccaaaacacaaaacttcggagaaccaccccccggatacgacacaacctaaaagggttttccattaacaaaacaaatcacaggctaaacaacagaaacaggagccactcttgggaggatgttaagaacaccaccactttttgcaccactcacaaaaaaactctcactccaacacaaggaaggcggcgccggcaccaaagaaagggtta

SEQ ID NO: 91205 - DNA, 313 bp, Glycine max
  Clone ID: PAT_MRT3847_53369C.1
acgacctttttttttttttttttttttttttttttgttttcagtgtatttgcctctgtttttttttttttcgcagcagggaagccaaggggcaccgcaaacgaccgaaaacactgaggggtctactaagcaaccaagagggttggaaaagaggagagccaccaggaggcaaagcccccgaggccccacccgctcgagacagagagacgttataaaaactacgaggccgcagaggcaaaccctaacgacaaggtacattacccgccgagcataaacagtccacccgatagaagccacaaactgggcataacaaa

SEQ ID NO: 91206 - DNA, 304 bp, Glycine max
  Clone ID: PAT_MRT3847_5336C.1
aacggttccttgcgggctaacaacttttcctattgggaagccgaataaaacctggcctaaatatgggcataacctgtttccgggggaaaattgtattccgttaacatttccaaacaaattacaacccgaagccttaaggggtaaaccctgggggccttatgggtggaccaacccaaaattattggcgtgggcctaattgccggtttacaagccggaaaacctgtctggcaacttcattaaataaactgcccaaccgccgggagggggcggtttgggatttggggcccaggggggttttcttttt

SEQ ID NO: 91207 - DNA, 2076 bp, Glycine max
  unsure (1)..(2076): unsure at all n locations
  Clone ID: PAT_MRT3847_53370C.1
cttgggtacaaaccccggttctttggccggaattcccggctcgacccacgcgtccgctgattctagacgcgcttcacccgcgggagaagtttgattgtggacttgagcaaaataatactcgcctttcaacattgcatgaatctcatgagagtcatatgcttgcagagccagatgacacacacgaacctggtgctccgggttcgcttccgtcaggctcagtggccacacaaccagggacgatgacactagacattctggaactaaatcgcttgaggcgttctcttcatattggttcacatgtttgggatcaccgactatactcgttggactctctcattaaaagaagttttagctccaaggttaaacaagaagatgaattatgtgcagatgttaaagagttaagagttgtgtcacaaccagagagagttcattcttttgaggctcgagtaagagttcaggaaagaataagaaaaattttgccctcatctttacatttatcgacacttagatcttttcatgcttctggagattatgggaatatggttagagaccccctctctaacatattgcggtcttactttcaaatgttgccatgggagactcagaaactaaatctgattctgagctccacaccatcattcatttcctctgtgtcaggcatagctgaaggtgctcgattgctactttcccaaacatatcatggtgatagagttattgcggtctatgacaatgattactctagcataatatcctatgcccttagttccaaggaatatgaagattgggtgtctggtaagtcagatatgcaagagagtaactggattgctcgtgagagaagcaaaaaagatttagctacttctggcttttctgcatggggtagtctggacttggattatatcaattatggtagttatgggtctgaagatgttccatcttctgttggttctcttctcagggactccaaaaaatctttacacttgcaaatttcctttggcgatgattctgtgggagctggaggtaaagtgaatttttctgtcacttgctattttgcacagcagtttgaatcacttagaaaaaaatgctgccccaatgaggttgattttgtgcgatccatgagccgttgccggagatggagtgcacaaggagggaaaagtaatgtatatttcgctaaatcattggacgagaggtttattattaaacaagtgacaaagacagaattggagtcctttgaaaaatttgcacctcagtatttcaaatacctgatggatgccctcaactcaggagggcctacttgtcttgccaaaattcttggtatttatcaggtcactgtcaaatacccaaaaggtggcaaggaaacaaaaatagatctgatggtaatggaaaatctcttttacaagagaaacatatccagggtatatgatctcaagggctcagaaagatccaggtataatccagacacaaccgggacaaacaaagtgatgctagacatgaatttgttagaaacattgagaacaaaacccatatttcttgggagtagggctaagagaagactggaaagagctgtatggaatgacacatcctttttggcgtctgtttatgtgatggactattctttgctggttggggtggacgatgatagcaaagaactggttttggggatcattgatttcatgagacaatacacatgggacaagcatttagagacatgggtgaaggcatcagggatacttgggggtccaaaaaatgctgctcccacaatagtttctcctaagcaatacaagaaaagattcaggaaggccatgactacatactttctcaccttacctgatcaatggtcatcctgaaaatgtataatcatatattttttttccaaacaacacacaacaagggcagaggcagtggtcaaatgtacatgttagccatgtatccatattcgatactaagttgttgttttggatacaccttgctgtacttttttttttctttcccaatctattgttctaacttagaatattacaataatttgagaaatgaatattttgatatgttcataatgattaaaaanaaaaaaaaaaa

SEQ ID NO: 91208 - DNA, 975 bp, Glycine max
  unsure (1)..(975): unsure at all n locations
  Clone ID: PAT_MRT3847_53371C.1
attctggaactaaatcgcttgaggcgttctcttcatattggttcacatgtttgggatcaccgactatactcgttggactctctcattaaaagaagttttagctccaaggttaaacaagaagatgaattatgtgcagatgttaaagagttaagagttgactcacttcacaaggagcagaattttgattgtggacttgagcaaaataatactcgcctttcaaaattgcatgaatctcatgagagtcatatgcttgcagagccagatgacacacttgaaccttgtgcttcgggatcatttacatgttatcttgagggagagaaagtacattcagatggtgaacttaacagaacattatccgagtgtttcccatcaaatgagtccaatctttctgagagaatagattctgcatggactggaactgatcaacctcaagctaatgccgtcccagctggaagtattcagcggccgaatcaacatgatagtcctccttttagaagggtgtcacaaccagtgagagttcattcttttgattcagcagtaagagttcaggaaagaataagaaaaatcttgccctcatctttacatttatcgacacttagatcttttcatgcttctggagattacgggaatatggttagagaccccctctctaacatattgcggtcttactttcaaatgttgccatgggagacacagaaactaaatctgattctgagctccacaccatcattcatttcctctgtgtcaggcatagctgaaggtgctcgattgctactttcccaaacatatcatggtgatagagttattgcggtctatgacaatgattactctagcataatatcctatgcccttagttncaaggaatatgaagattgngtgtctggtaagtcagatatgcaagagagtaggattgctcgtgagagaagcaagaagatttagctactttctgctttctgcatgggtagtctggacttg

SEQ ID NO: 91209 - DNA, 301 bp, Glycine max
  Clone ID: PAT_MRT3847_53372C.1
attaatgattttgtttaaacttcctttaaacattattttataccattttattgaaacacctattaacaagaacttatatacccaaaaattaacctacagattccatacctgtcgggagcatctttgtttatcccaaccattgttctacaaaaaaacaggttaaaaaatattatggccatcgtacaaaatacaatctacctattcgctaccattaaaaaactttacattaaatgctgacaaattcttgccaagggccttgcaggctccaacggtgacctcttccagatgacacaccaaaggg

SEQ ID NO: 91210 - DNA, 577 bp, Glycine max
  unsure (1)..(577): unsure at all n locations
  Clone ID: PAT_MRT3847_53373C.1
atttagagtgagtcagcactcagcatagctgccaagaatagcagtggtgttttcttgtgaagatggtactgggattaagatcaaagagtagaaaacgtgtttcaatccaagttcactacatcatccatgttctggagatcaagccgtggccaccttcacaatcactgagatctgttcaatcagtatttctgcaatgggaaaatggtgataaaaattctgggtctctgccatccactgctggcaatgggaaaattgaatttaatgaatctttcaggctttcagtgcttatgtgtagagaagcatccaagaaaggcaaacaccctgaaagtttccagaagaactgcttagagttttacttgtatgacaagacagtaaagagtcaactgttgggatctgccatagtaaaccttgcagattttggaattattaaggaagctaaagccttaagcattgtgtttaactgcaagangagtttcaggaattcttcacaccatttctttatgntactattcagccatttgatatagagagttccagctcatcaccaagcagcagcttatcaaaagaattggcnctn

SEQ ID NO: 91211 - DNA, 578 bp, Glycine max
  Clone ID: PAT_MRT3847_53374C.1
ttattcccgcatatttgtgggagaaactcatgaattatcctcttctatctggaattgctttttctgccatcgtggcgatgggcggctctgcctgggccgacgtcgtggtcggtgtgggtgcccctctgaccggtcccaatgccgctttcggtgcacagatccagaagggtgctgaacaggctgcggccgacatcaacgctgctggcggcatcaacggcgagaagatcaagatcgttctcggtgatgacgtgtccgacccgaagcagggcgtttcggttgccaacaagttcgtggccgatggcgtgaagttcgtggtgggccacttcaattcgtcggtctccatcccggcagctgaagtctatgccgaaaacggcatcctgcaggtaacgccttcttccacaaacccgaagtataccgagcgcggcctgtgaaacgttccgcacctgcggccgtgacgaccagcagggcgaagtggctggcaagtacattgccgagaagttcaagagcgcgaaggtcgcggtcgttcacgacaagacgacctatggtcagggtcttgccgacgagatcaacaaggcgat

SEQ ID NO: 91212 - DNA, 219 bp, Glycine max
  unsure (1)..(219): unsure at all n locations
  Clone ID: PAT_MRT3847_53375C.1
ctnggaaccaccaaacaagggggttttttacaacgaaaccacatataacactagaaacccgataaacatttggttccaacatacaaaccattctaaacacaaccagaaactgcaaacaaaaagcttatcacacaaacaaaaaattacattgccgagatcaaactattaaaagccaagtcaaaaacaactccctttgctttacaaattacctaagtccac

SEQ ID NO: 91213 - DNA, 1220 bp, Glycine max
  Clone ID: PAT_MRT3847_53376C.1
ccgagtttaacggctgcgagaagacggcagaaagtgacacttctcagaatttatgttgtgaagtttgtttattctgagaaggaagagagaatagaacgccatggatgagatattgaacaaggtggggtcttactggttctccaagaaggccagcaaggaatttaactctgtcggcgatgatatcaactcactgtcaaccagtattgaagggggaaccaaatggttggtcaacaagttaaaaggaaagatgcaaaaggcattaacagagttgctaaaggagtatgatctacccataggaatctttcctcgcgatgcgacaaactacgaatttaacgaagagacaggaaagcttgttgtttacattcctcaagtgtgtgaggttggctacagggattcgtcagttctgcgtttctccaccagcgtgagtggctatttggagaaagggaagctagcagaaatagaaggaatcaagaccaaagtgctgatatgggtaaaagtgactgccatttcatccgagggaccaaagctccatttcacggccggcatgaagaaaacaaggaaaagggaagcatatgaggttactagagatggtgtaacggtagataagttctaatatattaacaaggagctccttttgttaagtagttttacaatttagtaaaataaattgtcccttcttgtggaccattttattctattagatttgaatgtagtgaaacctgagacttggtggaactcctcctgagtccttgttgatgatgtagtttcagtttttttctgcttgggtttattaagttctattcctaatgtcacatggcttgtattaaatactgaaacttatgggcaagtgatattgtcatagtattattttagctcattaattgactctaggatattgattcctcccctattattagaggctgccattaattgtgtagcgaatggttacaatgccaatggcacaattgaaacatagacactgtcggtgtgacattaacatcatactattatacggaataaatggtcgcctttaggaattgtcaaaaaaaaaaactaaaatttaaaaaaaatgcttaactttttaaaaagaaaaaaaaaaaaaacaaaaaaaaaaaaaaactgaaaaaaaaaagtacggagaacaaaaaaaggaaatggggggttatattaaacaaaaaaaaacggggccccccgggagggtgcccccagattgatttccc

SEQ ID NO: 91214 - DNA, 850 bp, Glycine max
  Clone ID: PAT_MRT3847_53377C.1
gtatgataagaacttttgattcaacgctaaaattttaagatgaaattatcttacataaatttattatatagtgtaagaattgatgtaatttaatgtgtaattgcaggctggacctcgtatctgcttatgggaggactttgcatacaggccgatgaaaatagtagcaatggctcttgttggtttcttcaggtttaaactggcaaatggaacaccaaatgtgacttacaaggtcatgtttacgcttcacatggacaagggtcttcatctgtgtgcaattccaaggtaatgaatagggtgacatatgaaccaaagcaaatcacttagcatagtatctctagtgtcgtttcagtttcagtttcagtttcagtttggtatatatatttctaagatcttatttgcaatgtgactctgccgtacgtgttgctaggtgaagaagagattatcttctggcgtgtttataaatgaatacatgtccatactccaaaagccttttatacctttgaggactaccatataatttgaattcaaagttgagttaggcgtatcatctatgtgtcaaattgtttgcattgcaaatgccattatatatttgatacattttatgaatgacatgtctaagagcagagcataaatcatttcaattgtttgtattgcagccacatagtataatcattaaaaaaattaacaatatcgattttattaaattgtttttataaaactgatgtaaaatctaaccttctaagacgatttataaattgtcatgaaaaatattaacttttcacgacatcgatttcaaagacgatcaacttcaaagaccatgtaaaaacattgtaaaatgcgttcaataacc

SEQ ID NO: 91215 - DNA, 442 bp, Glycine max
  Clone ID: PAT_MRT3847_53378C.1
accagatccagtttggtatatttcctgaaaagttgttctcacgaacattaaagatcaatagagagtggcaattttgcagcgcgagaggaatgtctccatagagcttattctcatgtagatgtaaggaggtaagattagataacaagctcattgatgtaggtatcttgcctgttagattattgcttccgaagttaacatgaaccaatgatttccaattcttccagcaatttgtaagccctccagatagatgattcagggatatgtccaagtattccaaattgtttttcccattcagcatcttgtgatcacacaaaagaggagaaatggttcctgataatgagttgtttgatatatcaagaaaggccacgttggatgatagttgaggcaggccacctttcagatcatttgatgacatatatatgaatgtagagttcaacaacac

SEQ ID NO: 91216 - DNA, 276 bp, Glycine max
  Clone ID: PAT_MRT3847_53379C.1
gaaaaattgatgcgtgaaaggacgttcctgctgtcggcttgttgatcaaggatggcacttcgtaagaaagatgtttggagagttgaatgtggaatcccttctggatttgcgctcacagctatttgcgataacattcctaatgagatgctcattaaatatagctatcacacattactgcgccaggcttaagctccacatttgtttttacaatccttcaaaaattgtgtttctatgagtgtgtatggtgatgataacttaattattgttcataaatat

SEQ ID NO: 91217 - DNA, 281 bp, Glycine max
  Clone ID: PAT_MRT3847_5337C.1
ctgtatgacgtcctccttctttgggggggggggggggggggggcagcataatcatagtaagtcaagaagaacccagtgcaaccgaataagcgaaagaaagcgaagcgcgatttaaaatacccgtaaaacaaaaacaaataaaaaaccaaaagaaagcagataagataacaagagaagaatactaataaagttgggtgacaacattaaaatacccgactttaatttaaattgaacttgttgacaattggtggtaagtatagcagccgtgtgctgttatgtgt

SEQ ID NO: 91218 - DNA, 142 bp, Glycine max
  Clone ID: PAT_MRT3847_53380C.1
aacaactataacaacatctgtctctgtcctttttgatcacactttggccacctcaatcgccaaatcagtccatgatttcaccgttaaagatgccaaggcaaatgacattaatctttttaaccacaaacgaaatgcccttatc

SEQ ID NO: 91219 - DNA, 335 bp, Glycine max
  unsure (1)..(335): unsure at all n locations
  Clone ID: PAT_MRT3847_53381C.1
anagtatanngannacgtangnanancncgnaattcanatcgcagnnagnncantctntatgggatanggnnanagagtnanagcaccaatnggnaataggatanaannnctagngnnagnncgnnatctagncagaggcnnacaannnntannnacgatacttnaatgnaacnncaancagncagtagnaggaaanaaanntntggcncganganaanagaaagtannagnnccaangtatggggannannncnaanccngannaagcaaganaacnaaccntncaagantatngacagnagannaangnnatgtnangtnatcgntaccagnc

SEQ ID NO: 91220 - DNA, 936 bp, Glycine max
  Clone ID: PAT_MRT3847_53382C.1
tgaaacgacagagatctttgataagtgatgctcaagacaatgatccgcgcgtccggtactttttctcattagtttgtgctgctagtgctcgcagcagttcgcccgcgcggggcgttcggggggctgaccccacaatggctcgcgcgcggatcggccccaacagaaaatcatcttctggtggagattttaccaagaattttgtttctgctgcttagaatagagtgaaacactgttttgtttttttgcaagatttggagttggtcacgttagtctctcaaatatgaaaattttctattttggtcactaaagattaaaaatgtcgatcaatcctaaattgatattgattgatttttattttttttccattttcaatcagggataaatgttaacaatgtactttttaactaacacttttgcttacaccttttattattgtttaaaatttattgaaaattataaaattttgtgggtctcaatttgaatttaacgagtctcactcttgattttatagtttttaaccagttttaatcaatagaaaaaaaagtagtagaaagtatcttactagcatttttcttccaagaaagaaaactgattttgatctttgaagactaatgtgactggtctcaaaatttccagggaacaaaatagtattaactcaattagaatacgaggggttgtcagaagtgtgattctctgtaacttttatggatgacacgttcttagctagcctctgaatcacaagtgaaactggcggaaaatgcacgtgctaatattgtacccggaattttaagataaaatgtttttaatgtatacccatgcttgggggttttgtagagttgttggcgtatgacaaaaatttctgggttcaattgattttaactcctcttaatgatgatgatgtgtggacaaatatgaaagcttttgtggattttttgg

SEQ ID NO: 91221 - DNA, 576 bp, Glycine max
  Clone ID: PAT_MRT3847_53383C.1
ttttttttttatatcatggcaagtctagttaaaatacttctaaacttttttttctttattgggaaacttatatctttgttcccaatggcatgtctttgttatttaatcattgactattaggaaattttgaaatgtcaaaattcaacaataaccctctttatgtttcagaggaaagaaaatgaggaaggaaatttttttttgaattggagagaaaatgagggaaatttttgaagttttttttctagaagtaaacttttttcttttgttcattttctcttcaaccaaaccaaagaaaatgtattgttttcgtattttctcctctattttttaccctttcatccaaacacatcataaaagaacctccaatgtccaatgtctgcccaattagcaattatttcattgataacttgtttgtatccacatgatataggagcagtaaacaaatagtaattataattaaaagttgggttatctttgagtttaatggtcatacattgacaatataaaacaatcttatgttggtatccaatcacaaattactatttatatgatttttaaattgtatagcataaaagt

SEQ ID NO: 91222 - DNA, 1632 bp, Glycine max
  Clone ID: PAT_MRT3847_53384C.1
ccacgcgaccggttccctgagaacccccaaagtaaattttcacttcggagaatcctagcgtcgtgttttttacacaaacaaaaacacagggaagagaacaacaacaaagcacaacgtatagcttgctgaatcgttgtttgaggaaccaccgaatctcaatggcttcttcggtgttcttcactcactcccattgctactcttcaaagccctcttctcttgttttccgccaagttggtgtgggtcccacctctctccgattctcttcttctcatgttgcctccgttgctgctatggctatggattcttctgctaaggtgattgatggaaaatccgttgccaagcaaatcagagatgagataacggctgaggtttccaggatgagagaatccattggtgtgattcctgggttggctgtaattcttgttggggataggaaagactcagcaacttatgtgcgtaacaagaagaaggcttgtgaatctgttggaatcaattctttggaagcaaatctgccagaggattccacagaagaagaagttttgaactatattgcaggctacaatgatgatccttcagttcatggcatccttgttcagttacccttaccttcgcatatgaatgagcagaacatcttgaacgctgtcaggattgagaaggatgtagatggttttcatccgttaaatattggtcgtcttgctatgcgtggaagagaacctctgtttgttccttgtacaccaaagggatgcatagagctactgcacagatacaatgtttctattaaaggaaagagggctgttgtgattggtcggagcaatattgttggaatgccagctgctctcttgctgcaaagggaagatgctactgtcagtattgtccattctagaaccagtaaccccgaagagatcataagacaggcagatattatcattgctgccgttgggcaagcaaacatggtgaggggaagctggataaagcctggtgcagtcattattgacgtcggaatcaacccagtagaggatccaaatagtccccgaggttacaaactggtgggagatgtttgttatgaagaagccataagaattgcctctgctgttacaccagttcctggaggagttggtccaatgaccatagcaatgcttctccaaaatacactcatttctgcaaagagggtgcaccattttgaataacactgtgaaaggatgtatactattatgagccatcaatttttgttttggggagtcttggattttaaggtagcattttttcaacattcgggggagggggtgtttgagtttcttcctcaagccaaaataagaagagaaaatgttcctttggatgataatataaaacatcttccatatatcgatggctacgaaatataaactgagtgggacgacatacagcaatcaatgcattaatctttaggcatacattagagactaaagtggatatgtctgtgggaggcattaaagtagactaaagtcagttgcaagtttcgggagtctagtatacattttaatttataaaaagattatgacccaaatcatttaatgcctttggtttgtcatgtttttgaatttgcaagtttgtcaaaatttggaaaaaaaaaaaaaaaaaaaaaaaaaaaaaacc

SEQ ID NO: 91223 - DNA, 482 bp, Glycine max
  Clone ID: PAT_MRT3847_53385C.1
ccacgcgtccgccgaaaactactgagggtcattatctacacattctctgggagagccatattctaaactctttcttgggggcgcactcaattctggctctgagaagggccatttggcaaaagagcctaaacgagtggtggcgtctgtgctaacaacaggggagaatcataatgagaatttccgcagccaggggagttaggaggaccatcattcttggagagtcagaatttttaatgcgcgcactggaaagtatgggaggatcgtcttccctgttctggggtttgaggaacactattgaggtttttgtggggacctattattgttatagtggacctgatgtgacttaattaccttctctgcaatctccacacctgggggcataaggagcttaaagggtttctatgggatgatgggtgtgcaccagacaattcaatgataaaggaggacaggttgtgagatcttactgtaaactttacggtcac

SEQ ID NO: 91224 - DNA, 319 bp, Glycine max
  Clone ID: PAT_MRT3847_53386C.1
cacaaaatgaaacccttttcaaccctggtaatttttagtcccacttgggaagcccactgaaagatcagcgctccacaagctgttttcataaaaatcatttgacaaaacgaaatcccaacttgcattgtggaatcctttttgggataataacagcttttcatcaccattcttttaaaaccaccattttttttttaaataacaagaccttttgatgaaaatttccttagactcaagggttcacaaaatggggggggggtttttttttccttccattaacaaaaattttagcaaatctcatccatcttttttggaattgggg

SEQ ID NO: 91225 - DNA, 603 bp, Glycine max
  unsure (1)..(603): unsure at all n locations
  Clone ID: PAT_MRT3847_53387C.1
ttnaaaggcannactcaattttattgataaaactatctatcaactgaataccaatttcatctcccaaatcctctcattgttcaaattaccggcttcagacaggattagaaataattaaataatgaaaaagaagcaggtaaacactgaaggagatttcagcacaaaataacaatgatttaagattgaacatgtcacttaaggacaagtccgttgactcctactgccattcctttcggatatcaaaagtgtagttaatctctaagtagcacttgttgtcatcatcaacaaacttacttcttgctgaatattgtcctctagcaaacatcccagatggtgttgtctcttcaggcatctcatgtgtgtaaggttctgcttgagggctgaaggttccaatcatttctttactgctgtcaactttgataccagttttccacacagtgttggtgtatttgagacctgaaactatgttattctcaacctggaaagtgaacattagcctataacgactaccctctttcaaagtaaaccataaacccttgggatttcctccctctggtattgcaagaacaatgtcaggtctatcagcagacttaattgcaaggc

SEQ ID NO: 91226 - DNA, 259 bp, Glycine max
  Clone ID: PAT_MRT3847_53388C.1
cattaacacctttaattagctattataaggggaaagtgctcacaggggggacccctaccatatttgcttgaacttataggatctataaacaatctaaactctaaactgatgattaatccaacaaatgggttgagtaccaaccctataaaatggcgttccaaacactaaaattatgcataactttcccagaaaagaagcctattcaaacgttcatcaacccaataaatggttttaacccccacacatcctaatcattacc

SEQ ID NO: 91227 - DNA, 270 bp, Glycine max
  Clone ID: PAT_MRT3847_53389C.1
gggaaacatctaaaatacattgaatagaaactattattacaaagttatagagaatacacacctactggcaaaaaaaaattttaatatttttaataaaacagaaaattatgacattctccaaattgctaacttttttaaataacttaaattgcgtgttggatagaaccccaatagtgggagttttctaggatgtttgacaccacttaaaaaataagcttcctattttgcaaatgtttttttataaaagcctttttttttttatgtcttttt

SEQ ID NO: 91228 - DNA, 311 bp, Glycine max
  Clone ID: PAT_MRT3847_5338C.1
tacattttatgttaaagaaaatgctccattaacaacaattcaatgcctgtttctgtcttagtcgatccagctttgaggagatcatgccctagcaagagcagctccatcattccttggccaaaatgcacggttgaccctagaactatatggagtgatctaagctatcctccttgcggccttgaagtgcgtgcccttgagcttaacgaaacatatcccgacacaagccatagaccatccattttgagcgcacctttacgctttaccatttgcttcttcgatcaagacctggacagatgccacgaatgaacccc

SEQ ID NO: 91229 - DNA, 209 bp, Glycine max
  Clone ID: PAT_MRT3847_53390C.1
ggctcgagcaaaaaaactcatttctggatgcttgtgaatatgccccactggccttctatatacatatggctcgctctcaatgcacaaaacattatggagcccatggaggaaatggggaaaaacttattcatgtttatgagaacgttttggataagcatgctgcatgatcggacacgaatcactacggtagtatttacacatccgagaca

SEQ ID NO: 91230 - DNA, 106 bp, Glycine max
  Clone ID: PAT_MRT3847_53391C.1
tgacgaggtttagacactgcatggcaggggtttcaagaacttctcattcaatgaaccaataactgattcaaggaactctagatgatatagttttgcggtccaaggt

SEQ ID NO: 91231 - DNA, 485 bp, Glycine max
  unsure (1)..(485): unsure at all n locations
  Clone ID: PAT_MRT3847_53392C.1
agtaatgtcatatgtggtggatcctgagttgaaacattttagatatgaagacctcaaagcaatatgtgaggtgataactctntgcatcaatcctgatcactctgtccgtccatcaatgcgtgaattatgcactatgttggagagcaaaatagacacaacaataaatttggagctaaaggcatcatcactggcttgggctgaactagcactttcgtcataattgagccaataatactcaactaactcaacatgcaccacaactgaagcatgcagacctataaccattaatacttctctgactacttttctttcttctcctctcttcccttgctttgcttttcattttaatctatttcattttatctctcacctgtaaataattgttcataaaaaaggagtgtgcaagggttaaggtatccttgtatagcggtgggttgacaactagaaattgataaatcaatggagacaaaaaaattgggttgaca

SEQ ID NO: 91232 - DNA, 277 bp, Glycine max
  Clone ID: PAT_MRT3847_53393C.1
accaacccttccgattaaaagaacatggaatccaatacctttttggacccccgagtctccatggccccttccaagggccggaaacccacttttaaattcaatgcaaggggcaatttgaaagatggctacgatacggcaaggtaatggggaactcggcgaatcacagcgtgaaaagctctcttgctggtgctattgttaaagggctagggggattcgatgaggggacttacatatcaaggttattacaagaatcaagaagaatttgatccaattgtga

SEQ ID NO: 91233 - DNA, 286 bp, Glycine max
  Clone ID: PAT_MRT3847_53394C.1
cttgttctgacccgcggaggacgcgaaggccgacgggcaccttttaggaaagagaccgcaccccccccacgggacggacagccaacccaaagcaggaacgaaaggtaacaaaagagagggaaaacccgccaaaggaacgggaccccagcaccaacagacggcgaaacccacaaaaacccagggcgaaaaacaggaggacggagaaaccagacctccaacacggcactcaccgaagagaaaaaagaacgcctcagtctctaaggggcggagccggagcaaacaatgc

SEQ ID NO: 91234 - DNA, 374 bp, Glycine max
  Clone ID: PAT_MRT3847_53395C.1
gacccccttgttttttttttttctccaagtccaaacccataacgtgtgcttaattggagcgtgaccctccgggctagagctaacaaaatagtttatacaagagggtcacagggtggttcaggtggagcagaatcttgatgttgaaggacagtcgctatatctatcagatgtgcgaagaggaggaccctttagggaaaaagccttttcttaacggtcatggcaacatctataaatctctgaggctcacatctcctcatgagatcatggggtcacactgactcatcttttctgggcaagaaggattaactcatgaggaggttccctacacacacgaagctgctcatgtgcttgacgaactttcgagaacattttgg

SEQ ID NO: 91235 - DNA, 392 bp, Glycine max
  Clone ID: PAT_MRT3847_53396C.1
aaacaaatattttttggagaatacaatattttttttttacacttcggacaggacatttgattggttttttaggggataacttttaaaacttagggaaaccaaagggggggggccaactttttaaaaaacttacggcccaaaaaatttggggccctacatggtacatcacctaaaaggaaaaatatttttttaaatttccttaagggcatagctaataaaaaacataattttttttaggggttgtttgggggtgagggaccattggagaaaaaaccataggggttatttcaaacatgccatgccctttggaaagcttggaaaaaccattttttccccatttttccccccacaaatttttgatgaaccaaaatgggttggtggcaaacctaaaa

SEQ ID NO: 91236 - DNA, 435 bp, Glycine max
  Clone ID: PAT_MRT3847_53397C.1
ctttttgggttaatgaagaacacccctgttttttatattcccagcctgcaactgagtctttaggcatgctaatgcttgaaactcctcaaaggtaaatgctaggaaaggaccgtttttctctggcatcaaaaaaagtgtcgcttccagagagttaattgcctccagcccagagctatgaaaccgtcatcatagtacacacactctggaagggttaccatgatacgttacatctgcttcttgaggactacaatttctgacagaccctgaattgacccccttacactaagaaaaggtgaagtctaacccattgaagtgctgcttccgttcaagtctgaagctggcgatagagttcatgccctgctgctatacaccgagcatgctttgtactgcagcctgagtgcatacttaactaccaagaaatggccatcaatatta

SEQ ID NO: 91237 - DNA, 376 bp, Glycine max
  Clone ID: PAT_MRT3847_53398C.1
cgatccttatccaagggatttggcttgtattatttagcttcgttttgaagagttcatttaattttcacaaaattttgaagcagcaccacactttttcttctactaccatttcatggaagagaagtagaaaggggaatgctttttgtccaagttggaaaacaaaattatatttttgaatatttctttgctcaatttcattctctacatgcaatgggatataaactacgtgtgataccctgttctgccccaccaccctcattttagggaatttcttatcctctcctttgttgtaattcttctcttttgtcaccaataaaatttctagttctatttggaagacaataccccattagtaaaatcgaaaaaagacaatact

SEQ ID NO: 91238 - DNA, 207 bp, Glycine max
  Clone ID: PAT_MRT3847_53399C.1
ccttacctaagcattgaattcgagtctagcatcaaatggttcaaaacgcgccgtccacactatcacgggtgtggttacaacctgttgcatggagtataatatggtactaaacagcacccgggattgtaccatgagctgtaatgtgcctaaatgtgcatacaaggcttgaaatatgaggacggctactgacttctcatacaccagaaa

SEQ ID NO: 91239 - DNA, 693 bp, Glycine max
  unsure (1)..(693): unsure at all n locations
  Clone ID: PAT_MRT3847_5339C.1
cggtccggaatacgcgtcgacccacgcgtccgcaaatatcagtttttaatttgttatgaattcttatatccatctaatattacatgtaagtatcatccacccaagaataaagttgtctagtttgcacttgtaaactgcaacatgcattgatttgtagttctcactataatgtaggttttatttttacatcactattggtataatggaattggatggcatttcattccttctggagattccacctgttctttgacaattatcacacgtctggacatattcataagcacccttccacaatgtaggccaatagaaactagactgcttgagttcaatcattcaggatgcttgttttatgaggatgatactttctcgtaagtcaaggtagtattgtgctagccagagataaccttttcagcatcgagtgaagaatttctttaatggatgatgaagtagtttctcagtgtttcccagtttccctttgttcttgtaagatcaaaattgggaaggtaggctaaagcctgagcttgaatgcttaaggtctttcatctnctttgtcagttgagttacttcataaccttttcttctgattctagttttaggaactttctctatctaaggtgttagcatcacacatatcatatagattgtgtaagtaangtgaaatttcccaaacaaaacatttaggaaatgatg

SEQ ID NO: 91240 - DNA, 647 bp, Glycine max
  Clone ID: PAT_MRT3847_533C.1
ggctcgagaaagtcgaagacgacacaaagaccagctaaacttcattttgaaacacagaaacaacccaaaaaaaaaaaacctctctactttctctctctacattctccgccatttcccgagaaaatctcgccaggtttggtatgctagctaaatctcatgctttccaaataattctcatggtggatgtatctgctttcaacacatgcttccaaaggatgatagttggtattgatatttgattatcagttacatagcagactaaaaagaaagaattgaatcttgcactgctaatcagtgaaagttttcctacagttatttctttgaatctgatataccatctgcatcccttttttttcttctatgtttgtttcctccataattaccacaagggattgtatgaaagataatgaccaatttagtagtagtttgacatccttgtgatctagtaccatgaagattcaggactattgactcgttcataggatcatcaaaatgaagaagttgtatggaggagttctgattgcctcactgtttacgttgtttatgcttatgatcctgcgatacggggtcatgaaaaatcctattggtgaaggtatctgactatacctgtcctcattaaagggactaatcctcttttatggataaaa

SEQ ID NO: 91241 - DNA, 395 bp, Glycine max
  unsure (1)..(395): unsure at all n locations
  Clone ID: PAT_MRT3847_53400C.1
ggcctaaagcgcaaagctgagtagctgttcataatatcacccttactgttggtatcgacaaaactcgagcaacttcgcaatatagaaagaaagcccaatgtgattctatcaagagaaactctcagcaaaggtctaatgcatagccggaggcatcctgaggacacaggcaagtcttatggncacaacgttcatctatgttgcagagtcataatctggaaacgcaagaagctcatcttgccaatcaaggaaatgtgtcacgagaattcattttgcacaagccacaggaagctcgccaactgagacggaaagctctctctcgaatacaatggatgcaaaaagctgatccgcctaccatagcacaaattgaaacattccattcgatgcataggatgatg

SEQ ID NO: 91242 - DNA, 478 bp, Glycine max
  Clone ID: PAT_MRT3847_53401C.1
cggtctcgtgggggcgagagtaaattttctaaaaagttttttcttacgacaattcagcagcgatggcgccaagcggcgattggctccattttaattttggtcggcatttttctgatctctgtgtccctttactttttactcggttcaatcatcgaaatttacataagaaagacttccgtcctcacagaagggaccatcattttgtctaaatggtccgacccgacgtatttcatccgcacccaaatgtacaccttcacggtgcgcaaccccgactaaatcacccatggggccatcccttcggtgaagcggcaagggccctattcgtttgaccaaattcaatagcggaaaatccaccaaattgtcaatggaactgtgcagttcgagacgctgcagtcctaccacttgaacgaggaggccagctgtgccgagtgctttttgtacatccgtatttggatccccaatttggtctatcagaaat

SEQ ID NO: 91243 - DNA, 428 bp, Glycine max
  Clone ID: PAT_MRT3847_53402C.1
aggacattgtgcactgtactgaatttgagcttgtacctgcagctgttaatgctgctttacagactattgccaatgtttctatttcctctgaattgcaagatgctttattgaaggctggtgttttatggtaccttttgcctctgctgcttcagtatgacttaactgcagaagaatctgatgcaacagaatctcatggtgtcggtgctagtgttcaaattgccaaaaacatgcatgccataaaagcatcacaccctttgtctaagctcaaaggtttgtgttgagatgagagtgcaaccccttacaatcaggcagctgcttgtgccgacagacgcttgctaactcccaagctctcatacatgcttaaaaatcaaatgtacaaagaattactgtgcatagttaatgcgcacctggagtcaccagagattatc

SEQ ID NO: 91244 - DNA, 185 bp, Glycine max
  Clone ID: PAT_MRT3847_53403C.1
ctctcagacactggctcgtccctcgttcgtcgtattaacaagagtgattctagccgtggtgggctccgacgaaagcgtaggctcaccaacgagattggcggcgctcctgaccatccggatggcgctgcgcgagatctaccatggtctcatccacaagcggaccgactacaacagctgccttgact

SEQ ID NO: 91245 - DNA, 424 bp, Glycine max
  Clone ID: PAT_MRT3847_53404C.1
caaaggcaggacgaccttgtctaaacatatattcaacttcggggcgaacttgctcccatttcccacgagcagtcttgaataatatattaatagaaaaatatacacttaaataaaataatgattaggcattgaaaaataattgtattgaaactaaagatacttaagaagcaacagtaacgaatattaaatgtcctacagcaaaagcttgaataggcaaatcttttcgaatattaggaagatttgtgggcacttcaatgactggcatctggaacatttttaagaactctttctcctgcaatgatatatatggtcatcaagaactcataatagcacaaattgtaatagtaatgacaactcaaatgaaatgtcaaaactatataaatctttacttctgttttggcagtcccagtcattcctgacaact

SEQ ID NO: 91246 - DNA, 278 bp, Glycine max
  unsure (1)..(278): unsure at all n locations
  Clone ID: PAT_MRT3847_53405C.1
ggtcctncttnctaagnaaggtccttnggntaaaaaaggtatggatatngtngtncgagaantgcnagatgcaaaggttaattggaatgtcactgttgcaaatattatcatgttggctatgtgaagatgaaagatttcaggcnttgaaaatttngcctatcctcagttgccnatcnaccgggtgcagctgatataatcncnantgggaattcctatttngatgccncctaggaatggcttttgnagggnagtggnngcctttagaaaacatgggngca

SEQ ID NO: 91247 - DNA, 854 bp, Glycine max
  Clone ID: PAT_MRT3847_53406C.1
tatgaagatgattataccaaattcattatttcattatcagtttttcaattaaaaacattcgcatttaatctaatgaaaatggaaaaacaaaagtgctgtctagtaatacctgaatatttggtttcagctaaaaattatttttactagaacacagcaggcattcaaatcagaacattttcaaatgaaataatggcaataacaaaggagagctcaagatatctaccctctataaccttttcagttttctctttggaggcagatttagttggtgttgccgtcttttgctttcctcctttctcatttttctttttccttgaaaagacctttggactttcatcactgtcatcatcagactttgagaggttggatgatggtttcttaggtgctctttttggtggtgagcgagatttatttgcaactgtaattttctcaattttacttttcttagcagattctttctttgtggatgatgttttagaaggttttttcttttcttttgtatcttcagattcactcccagaatcacttttgtcttcactttcagatttctctggtgtttcatcctcagatttgtcaggaacaccattttcattttcctcctcattttcttcatctttctcgtcttcctctgactcatctgtgtcacatgcactctttctccgcactactgaagaatcttcatttttcttctgactcttcacagaacgtcttgaagttgttgcagatcttgatgaaccctgttttacaacatgtttgcgctttttgcccttactggacttgtcttttcctgcaagtaacacagttgtggttgcatgaggggcaactaaaaagtctatcagcacagcaataatatc

SEQ ID NO: 91248 - DNA, 518 bp, Glycine max
  Clone ID: PAT_MRT3847_53407C.1
attgaatattttccatatattataacaagggtattttgattatctttgtgttgtttctagttttcaattttcattccatttgttggtttatttttaaatttaattagggatagttgtcttattttattagtgagcctggggttgtgtttttgatactacactaacacttgacctattcattagtatgaatacaaatttactttaatttattatggagaaatagtcatgtttccgacagctcatgagagagttttgaataaaaagagataatttcctccagaaaatattctctcaaaattgaagtaaataaataagtatgatcaatgagtttgtatattatagcacattcttactcatcatgtcaatgtaatattttattatttaaagcctcattctcttgtcaaaattgtagaatgtttttttagatggatggcattacactttggtcacacttaactgaaagtgtaaacttgatgttactaattactggattaagattaaatttctaatgtttacac

SEQ ID NO: 91249 - DNA, 1689 bp, Glycine max
  Clone ID: PAT_MRT3847_53408C.1
atcatcagctttatagatgccttaaacatagaaagatccatgtcactgaactatgtaaattatatttgaaggtcagtacatgtcgccgtattgaagtcaacttctttaagaatttcacagattgcatcacgtaactgattatcactgaggctggacttctctttcttctttccttttcctttagtgaccttttcagttctctctttggaggtagactttgttggtgttgacctcttctgctttcctcctttctcctttttttttcttgaaaagacctttggatttggactttcatcactatcatcatcaatcttcttctttcctcctttctcatttttcttcttccttgaaaatacctttggatttggactttcatcactatcatcaatcttctgctttcctcctttctcatttttcttcttccttgaaaagacctttggatttggactttcatcactgtcatcatcagactttgagaggttggatgatgatttcttaggtgttcttttttgtggtgagcgagatttagttgcaactttaattttctcaattttacttttcttagcagattctttctttgtggatgatgttttaggttttttcttttctttcgtatcttcagattcacttccagaatcacttttgtcttcactttcagatttctctggtgtttcatcctcagatttgtcaggaacaccattttcattttcctcctcattttcttcatctctctcttcttcctctgactcatcttctgcgtcacttgtactctttctccgcactactgaagaatcttcatttttcttctgactcttcacagaacgtcttgaagttgttgcagatcttgatgaaccccgttttacaacacgcttgcgctttgttcccttactgggcttctctttttccgcaagtaacacagttgtggttgcatgaggggcaactaaaaaatctataagcttagcaataatatcttccttccttgatgttgccttgttaattgttatgtcaagcacatcacagaattccagtaacttctctttattacacttgtcaagtttttcttttactttaatcatttgcttttcctcattgtcacgccacacaaaaccagaaaaccttgatatattactcttgatctcaactgccttccctctccttccaaagagaattgtatggagcaatttgaaggtatcatcagtcttccttctagataacttaaatgccacatttggtatatcttttaaaggtgtaccacgacccttttcaatgtgaaattcttttgttgcatctttatcaattgatgctaccaacctctcaactgatttcctttcccgcacagggcgatcaatagtaggagttcttggctctgttttcttcggttcctttcttttctccttcactttctccccattgatattccctctcccacgtttttttgatcttttctcacccttactatcttctgccttctcttcttcttttgacttatcaatattatccttaccctcatcttcatcctcctcctccatcgccacatcttttttctcctttttatcactcccctccttctgcggaatgccactctctacttccatagcatctacttctggtttctcagcttccactttttcattttcttgtttaccttcaattgtttccttaacctccccttctgtcgtcttctcgcag

SEQ ID NO: 91250 - DNA, 516 bp, Glycine max
  unsure (1)..(516): unsure at all n locations
  Clone ID: PAT_MRT3847_53409C.1
aaattaaaagatcaaaacttacaagaatatcttaaaatttcatggatcaaagtcaaaccaccaaattacaatggttgaaaaaaaaaagattgaaacaaaaagctcaacaagtacattgtcacataatccgtaaattgatcaaatttaagaacaaacttaacaacgttattgcctaagtaccattatgaaccaagctagagatctcacgtttatatttatgtagtatttttaacaaaaatctaaaattaaatccttgacttagacataaaatcgcaagcggagatactctagtttaaaaataaaaaataaaaactaaaagagtgtccctgctcttttatccactagcaactctgaataagactgaaaccttcacgcaacttttaaacttccattagttatccaatcaccatctatagttggaaacctgtcatttttcctcacatgtagtgaacccgaatgggtgcctaatccttctcgtaatagtaccataattcatcaaatgagaanattagtcag

SEQ ID NO: 91251 - DNA, 709 bp, Glycine max
  Clone ID: PAT_MRT3847_5340C.1
attgctgttcacccaacgccggatctgctgaataggcttgatcactatgggccgcctcgaccacttgtgggacgacaccgccgccgcgccaggacggaaaacgctctcgctaagctccggaaacaccaacaccttcactttccgacctaactgcggcaaggaagagaagggcgccagcgcgacagcgaacacacgaccaatcgcctccaggaagcgactagagcgacgcggacgatcatgaccgcgacaccgacagcgtaccaaagtggatcgcctccggtctctcctgccggatctactcctccgatgtctcgcgttctccggatgaaaagattcctctctcggatctctaagaaggacgaggatctgatgcgtacgagaagagagggcaaaacagatcaggcccttctgctcctttcgatgtgtgacgcatttatctcgtacctgaaagatgaggatggagctactctactggactttgctgtagtcgctgtagctgactcgatgtgggcatgcatgatgaccgaatgtctgtaatgaagttctgactagatcgtggaaggtagcttctggtataacttcttcaaggctttacttaagtaagctgcgtaacgtctgccccatcgtaatgacaaagagtaaggctgaaggagcgatgtatcgttactcaacatcatgtaaagggtacctataattgattaggcattct

SEQ ID NO: 91252 - DNA, 373 bp, Glycine max
  Clone ID: PAT_MRT3847_53410C.1
gcttgggctcacggagatatagaccaagtattgcacgataccgaccacccaagggtcacaagggaacactgattacctctttattgatacaaaatactcgcttaactgatgcactctctggctcttaaattgccgtatcacattttgatagtttgcaactgttgatgaaatcaaatgctgaggaaatcatcaagccaaggcaatatctagcattaactgatgagggaatgccacaacacaatttgccattcatgaatgttaccctctacatccagtataatgtggtaaagccctactcagggtttgtgttccctgaccaatgccagttataggaaaaggtgctgcctcagaaaagcagtacgcacaattcaca

SEQ ID NO: 91253 - DNA, 411 bp, Glycine max
  Clone ID: PAT_MRT3847_53411C.1
gtacataactatttatcgtaggctacaatgatcgcactctatagtgatcgatgatggccagagatccagtgacgagcttgttctcgagtcgggaaccgtcagggatggtgatcttgttaccgccggtagcaatgatgatgacggtaccggcgaaggtacagttcttgccgatatgcacgtctccgctgacggttcaagtggtcgggctcgacactgttgagacctcccttgacacgacgctcaaagccggagaccttcttgaactggtcgccgagcttgatgacgggggtacccgagaactgcctggccttgttcatggtcaactgtccgtgctacatagtgtggagaccagacttgatcaagagcacgtcggatcacgacttgacgggcaagaatcgggatcgggggacg

SEQ ID NO: 91254 - DNA, 338 bp, Glycine max
  unsure (1)..(338): unsure at all n locations
  Clone ID: PAT_MRT3847_53412C.1
ttaaaaatttttttgacaacaaaccatntacaacagagggtggatttgccacacattatccaccatggatactccgaaaagtccatcacaaagtcaaactgttcacatttcactgtacagaacaccgactgcttaattttgtataatatttaaaaactcaatatacagttaatggaatacaaggaaagatgcagaaaataattaactagtgtgatttccaacgcacacactccaagaaattgcatgatgctgtctatgtactaaagcagacccctcatacctgcttacatcatttaaagccgaccaaaatatgggagtatatgctcatttccccccct

SEQ ID NO: 91255 - DNA, 469 bp, Glycine max
  Clone ID: PAT_MRT3847_53413C.1
cagaggacacagatacatgcgtgaagctaggtagctacatgtggaagaattatactgtttgtgtggcagaattgcggatttcgcgccacttcttagttcgcctggtacaggccgaacgcgaagatgtggtcgttcagcagcgacaggttgtagggcgtcacgtaaagatcagtgtcgaccagggcgacaaagtctgttccattcacgatgttgttgatgtcctcgaagaggaagccctcggggtggacagtagttcccgtgttctcgccagtgacagtgacaggcgagtacgtgacgttgagctgcgagatgaaagcggcgaacgcgggggtggtgccgttgatcaatccgccgatcgaggtgttgtacagaccatcgtacgagacagtctctccgggagccgaccagctgagctgcagctcatctcccggcttggagagcgtcctgcgggtgtgggtgatggccgcct

SEQ ID NO: 91256 - DNA, 223 bp, Glycine max
  Clone ID: PAT_MRT3847_53414C.1
ataagattcattttcaaataacgtaccgtgtgagtgtattagtggagtcatgagtgtatgtgctcgtgacggcaacgattctgtgctgtgccgtgcatgtggatgtagtgttggcgacggcaacagtgtgagtgctcgcagaagagtcctggagctccgttagctactatggccacagccactagcaattactaggcatgcccatgatcatgaacgacaacct

SEQ ID NO: 91257 - DNA, 242 bp, Glycine max
  Clone ID: PAT_MRT3847_53415C.1
ggcgcctctattggggtttttattgtcgccggctccaattaaatgaaatttgaatagaaattcaaatttctctcaattttgggcgcacttagggtataaataaagggcatatgtatgcattttttcaactttaatcattcgagaattactctttaaagttgagacctcatttgaaacacaaaattctaggctctttctttccctctacttgcgctcctcttcctttaactttaaggttttat

SEQ ID NO: 91258 - DNA, 548 bp, Glycine max
  Clone ID: PAT_MRT3847_53416C.1
aattaagaattcataatctccaattaatttattagagttccaattagacggctaaagcaggcttggccggccatgttattggagtgaaactatgaaagcttcaaaggaaatggcatatataacactcaaacttgacactgatgctacaactaagagactactaaagctgaagttaactcagaaacacataggagtgaagtagaacaaatatgagacaagctggtgcatattcagggttactgtgtggtggggtatcaggaaggacagggccccactcactgcccttggcaaggatcaagaagatcatgaagaattctggggaggatgttaagatgatatcaggtgaggctccaattattttctccaaggcttgtgagctcttcattgaggaacttactagaaggtcctggatcatggccatccaaggcaaaaggaggactttgcacaaagaggacttggcttctgctgttatagccactgatatatttgattttttgatcactttggtttccagttctgaaagccatgcagttggtggtgccacaaat

SEQ ID NO: 91259 - DNA, 207 bp, Glycine max
  Clone ID: PAT_MRT3847_53417C.1
aagcatatatttaacgattgacttaattgaaaaaataatacgggcataaaggccaacaagtgtacattaaaaggcctaactattaccatatacaatattaaacaatcacaataacatagaccaccatcgtcgacatatccttaagaacacacactaaaggatctttgtttatcaccactttcaataccttcaaactattcacattct

SEQ ID NO: 91260 - DNA, 512 bp, Glycine max
  Clone ID: PAT_MRT3847_53418C.1
gggggcaataaaaaaaagaaattaccaaaatatgcttttttcccaaaaaacactttttatgaaaaaaattacccaacggggggagttcttttttgggggggaaaagattaaaagaaagcgccggaacaaattaagctaatcattccctatatagcccgggaaaaagttatgaagaaatggaaccaaccaatattatagccttcccttgcagggccccaacttaaaaacattgcaaaaaaggacatgccaatgaaaacttggaaactaaaatccctcacctcaaacaacggaaactaaaaacttaaacttttaaaagggtttctttgcctttttttcgggtgaaaatctttgggaccagctaaacaaggggaggaaaaatccaaccccttaaaaagttttggggccaaccaaaccttccctgttttagtaaaattagggaccagggaccgggaaatatatatggaaggaaaaacccccttaagtttcatctccctaaagcatttcagggattc

SEQ ID NO: 91261 - DNA, 464 bp, Glycine max
  Clone ID: PAT_MRT3847_53419C.1
ggccccgcgccaaaccattttgatttcgaagcggagagttcattctgttttcttcttcacaaacgaacgcaacagttctatcgtataagattctcgagaaaatcttcaatatctatctttttctctcactctaattcaaaagtttagcgaccgcaaattatctgctcctctacacatggcgtcgcctggtttcttttcattcggaagattttggccaccgtttcagggacagggagggatgaggcagcaacttgatccctcggctcacacaatgaagtcccatgtatcagcacttgcaaggaaacacgttcgtgattggcttatattgctgcttctcatagtaatagagattgtcctttttgtcattcatccatttaaacgctttgtaggaagggacatgatggaggacattagatatcctatgaaagaaaacacggttcctggatgggctggtcctttatatg

SEQ ID NO: 91262 - DNA, 2754 bp, Glycine max
  Clone ID: PAT_MRT3847_5341C.1
ctcgagccgaatcggctcgaggtgttggttgtattgtgtataatgttgtgtgtagtgtagtgtagtgtggtagaagaacagcagcagaagaggggcagtgatgcactcacagatatttaacacctccattccgaccaaacactgtcaccctttaccactgccatcatcaagccctctcccatagggccagaatgaattcctcttccctataacggttatctagtgtctgcctattgtgttgatgggagatatgaaagaattgttagtttttttgcaaaaagacaggagttagcgaaaacagggagaggattgagtaacgcacccgtattgcgtagcttcagctgggtctggccattgatttaaagaataaagggaactcccctactataaacgcacaaaagttttgttgtggagagagaaatagagagagaggggaaacagatgggttaggctgaaaagtgagttggtataacattgttggtttggtttagtttactttcctcggtggagagggctcttttttttattttggtagtgatggaagtgggaaaattgaatggcacggaactttttcaagaggctgaagcaagtttcagagtggtggcagttgcacaagcaacaagaagagaagaagagtggaaagaaacaaagctgggagtgcaaggaatcaacaacccattaggaataagtgcaaagcttcattaatagctggaagaggaaaatcacaacaggggtctgactctggatcctcacaggaatcatcatcatcatcatcatcttctgcagcaacaacaacaaccacctcatcatcctcatcctcaaaatctgattctaaattcaataagacatgtaacagaccaagaaggagaaaaccaagaagaccaagaatctcattctcatcctcaccaattccatatccaattccaacctcttcatcatcaacaagaacaacaacaacaacaatcttacacaggtttagacacggagatcttaaacccactccaaccaccgaagaaacggtcttgcctaccgcctcttccgccgccaccaccgccgccttcgtcgcttgcttcatccgaacatgcaagaaaaatgggagagctacaacaccatcaacaacaggcagcagcagcagcagcaccgtcgagagcggcgatgagaggcgtcggcggcggcgagattgtggaggtgcaaggcggccacattgtccgctccaccggacggaaggaccgccacagcaaagtctgcaccgccaaaggccccagagaccgccgcgtgcggctggcggcgcacaccgccatccaattctacgacgtccaggaccgcctgggctacgaccgccccagcaaggcggtcgactggctcatcaagaaagccaaggcggccatcgaccagctcgcggagctcccgccatggaaccccactgccacctcaatgcaaccacgacagctgccacaagaaatcgtccactgcgagaacaaatctctcgcgatggacgattcaatgaccgctgccttcagtagccgcggcgaaagcaacgctttcgcctcccaccaacaagtggaggataatgaaaatgctaacaacattagcagcagcagcggcaacaaatacaataccggttctgggtttctgcccgcgtctttggacactgacaacattgcggagacaatcaagactttctttcctgtggaagcgacctcgacgtcgtttcagagttacccgccggcgccaccggatttagggcaccaagatctgcggctctcgttgcagtcctttcaggaccctattatgcttcaccaccagcctcatagccaccaccaaccggttctctttgccggaaccgccgccgcggcgctcgacttcgacggcggttccggctggtcagagcacctgcaccagcaccagcaacagaaccaccactcggaggaacagcgattgctctatgctggtggtaacagtggccacggcggtgggtttgtgttcaacacgccggcgccggtgcaggtgccggcgtttggccagtttttttctcagaggggaccccttcagtccagtaacaccccttcgattcgtgcttggatagacccttcggtcgatcaccaccaccaccaccatcactacctatcacagttgatccaccaaggatccgtcgccggtggcggcggattctccggcttccgcattcctgcacgaattcagggtgaagaggaacacgacggcgtgtccgacaagccgtcctctgcttcctctgattctcgccattgatttgaaaaacacacatcaaaaaccccaactttgttctccctcagggtttgtggggttgcattgaagatggttcaattgatggagagaacatgattttggaagatcatgatgaatggattttcaagctacaacgggaattcaagaaaatctgaggtggatattcaggttttccaatccctcggtttgttatgctttttatgttcaacttatgtttttcatgcttaatttaactaggactaggagtattgtgtttcttttgtttcttctgtattggagtgctatgtttcttttgtttcttctgtattggagtgctatgtttccctttgttaagtgattgtgtcttctttgtacttcttcagtttcgagtttcttgtagtgatctgaaaaacatgcaaattcaataaaagagctagtttgctctagttattgtatatttccaagttagtgcaaaaaaaaaaaaaaaaaaaaaaaaaaaaaaaaagaaag

SEQ ID NO: 91263 - DNA, 380 bp, Glycine max
  Clone ID: PAT_MRT3847_53420C.1
aagggcgcaatatttaccttttttacttaacttaaccctggggaaaaactggccggcttaaaaggggccatggcttttaaattccattaattcattgcttaccatggaaatatttcccaataggaaaccacatacttttttggcttcttttaaattttccttggaccctttaagtttatcacatttccaaaaatgttttctgggtttcccttgtggatggcaggctaagttaaatactctgcacttgattgagctgaaggatccgttctttcattgcgtcctgttgggccgttgacacacatatcttttgcgccaaaaaaggattcgtttctttgcaacctcgcagtgcttttaattgtgaattacatcccataaaccat

SEQ ID NO: 91264 - DNA, 327 bp, Glycine max
  Clone ID: PAT_MRT3847_53421C.1
ggctcgagtgcatatctaggagtggtttggtgaaccctttgatggagcgagagctatgttgacaggataccatttggtcatggacatagggaaggctccatagcagaggatcaatgatgaacaacagctaaatgcaagtgacgtatgcaccacagaaaagactacataggagggcctaatgactgatgtactgcggactgtatggaatgctggaagagatcatgccgtgaccacactattaggggatatgatgaaaaggcgcatacagctagacatggtctgaagacttatgcagtatgatggatatcgtatctacgattgagccta

SEQ ID NO: 91265 - DNA, 490 bp, Glycine max
  Clone ID: PAT_MRT3847_53422C.1
gagattaatgacttattacaaccatcggatttaaaaaaataaatggtggggatgggaaataactttaatagtgtgtttggatggaccaattcaataggggaattcattttttcaaggaatttaaaatgattggatggagccttggttgatgtcggtttaaaaacatcactagttgtggtcatgcaaaacaaccctcgttaaaattgtcaatattttatatttttaaattattaaaaattgaaaaatattttttaattaatatttcaaaattagattgtgtttgttttctataaagtttaatattaaaatttcatttatttaaaaaataaaattaaaattttacatatgaaggaaattgaattaccctatccaaataaaaatttaaaattgaagaaatttgaattgatgtatccaaacaaagcatttgaaaaatgaaagaaattaaaatcaaagcaattcaaattttagacatttcaaatttcctaaaatt

SEQ ID NO: 91266 - DNA, 542 bp, Glycine max
  unsure (1)..(542): unsure at all n locations
  Clone ID: PAT_MRT3847_53423C.1
atttgatatggtttttgtaaatttaaagaatagaatacantgaaaaaattcaatgatcagctgcagatgatttcccggacaaactttgatgtccataaatattaagtattcactggagtgcagctccgtatgaattcggactataaatctaagatttggttcactctaaagtgagtagaatgcactttagaggataaagtgcataaatctaataagcagaggatgattgggaagagagatgaagttacttgatattgtagtccgaagaagcttccaatttgctctgttctaggagtgcacgttggacttaactgataaaggtgggctttcttgactaacaatttgggagaaagattgttattcagcacgaaaaattaagtgattgggcattaataattaatgtatcgaagttaaggttgaattgtttgggtactatttgagtttgattcttgcgaaaataattcttagttagattttatttcccttcagatgaattctgaattagctagagtctctctatcctagtgaaatggaggattaag

SEQ ID NO: 91267 - DNA, 538 bp, Glycine max
  Clone ID: PAT_MRT3847_53424C.1
accattgggtaagctggaacctgtgccggctccgggccccgattccgggttcgccccacgcgccacgtcttgccttacctcatatctgtacgaagtcggttttatttacctcttaccgtttccgttcaggattaataagtcacatcccctgttgttgcttcagaacaaggaatcttcttagattctttgtctgagtctattagcgtttcacaaatagagagagagaaacagatacagaatcagaagaagaaacttttcttatttatatacagcctctgactgatcggtttttcggaaactctttttccgagaaatacacgcgcgcgcttcggttatggatgtgcacgattaccgatccgttttggacaccgttggcgtatacgtgtggatgtttatctacgccgcactggcccgcgtctacgtggattccgccggagagctgaatctccgccgtgacggaatcgttagagcgcttctacgccgccacggcggatgctcctcagggtcggatttgcacgacggaggcaatgacctcaac

SEQ ID NO: 91268 - DNA, 559 bp, Glycine max
  Clone ID: PAT_MRT3847_53425C.1
tttttgggctttgaatctgaagaatgctgagcattcaatactgtcacattgcttgtatcaagcggaggggcagttgctataaagacattttgtaggcctgcactagaagctggcagaccaggaggagcattctttatgcctgaggaaggaggtacaggatatcctttgacagaacttaaccgaattgtatctgtgagaggtgatgcagaaagatgggaactgttgttatcaggggcagaagtaggagtccatgctccacaaagggtggcttgggataaccaagatgtgttatgtccaagaaagtttctgaggggtggggtttgataaggatgcgaagaagtaagtgcctgtgaataatccacaacagaacctcttgcaaacgcactagattgaagggaatcacaggaaggagttggtagactccaaaggggagatgaaaggggcattaatgggttagcaatagtcggagtagccttgctgctggctaggctaagaggtgaagagattccttttccttgaagtgcattttgcttaactgccacatcagtggttctaggac

SEQ ID NO: 91269 - DNA, 192 bp, Glycine max
  Clone ID: PAT_MRT3847_53426C.1
ccagggccccccactaataattactcaactatccatacctactaattcataactatcctacatctattcaacttaaaacctttccttcataatttttccaatatcacacaaaaactcaaactccttaaaccaataacgggaacattacatcatatttctatcatttctttaccacttttcctaccaaaacat

SEQ ID NO: 91270 - DNA, 464 bp, Glycine max
  Clone ID: PAT_MRT3847_53427C.1
gcaccagtagggatcaagaatgagaagggaaactccctcaatggaggagggcttttcaaggcatttgcatcaaagggtaacagtgatgacaagaagaaccacgcggtgatggttgaagcatccccatcaccagtgttgcaagccaaccctgcagctttgtcaaggtcccttgtcttccatgagaggacataattggaacttccaaaaaatgtttctgaagtaggccatgcaagtacttcaagtcttcaactattataaccttgttctggggtagtgaatggtgacatgttttttgcttttctccatgagaacttgtattattgaccaacctttctgcagcatttgtaggacaggagttatatatacatatatagtatagtttccttcttgagcctgtcagagtgaacaggtgttttttttttcttttctttcagttttagaagacttgttgagtaaatatcttt

SEQ ID NO: 91271 - DNA, 290 bp, Glycine max
  Clone ID: PAT_MRT3847_53428C.1
ggctcgaggactcgttctagaccttttgcgcccgtcctcactgaacatgacactcggggtttttccaccatgaaaggacacaacttctgatgcacaccacatatccatcttgcataacaacaacaactatggtgagcgatgacccaatcttcttaggccaattttcatgtggatctgttattgaaggctagttgttaatgccctttgcctgaggactcacccattacagaggctataggacccaggaggaagaggaagtggatggaccatcctgagaggcatctgaagga

SEQ ID NO: 91272 - DNA, 1837 bp, Glycine max
  Clone ID: PAT_MRT3847_53429C.1
ggaaatcctttgtgttgtgctcgatggtatagagcacaagtattcagcttcttctcctacccagaaaggttgaagttagatgagaaagaaattaacactagtgatttttggaagagacaaataattattgccagtatgcataagcgacctgccagttttgggatttatgtgcctgcaaaggatgaagctgtcattgaaggtggcaatatcagaaggaaaaaggtctctcgtcttgtcagtataaaaaatgaagagaccactagcatatgttctgacgaggactctgcctcttgtgcaaatgatattcaaaatagacaggatcctgatttatctgacaatgaagctgaaattgtagatttgataaatagagttgaacatatgaagaaagagcgttctattcattggttgagggaatttaaagactggatggatactgcttctgacaaatcagtagaaactagaaaggaaggcggtgcttccctgcatcatcagaaggaaaattacatcaggaagaagacaaatcaggagcagtctggtgacatctcaagatatgcttcagactcagttctagcctcgggagatgacagtagcatgaatattttagaatctgatagttcttttgtagatatgtcagctagttatcatagacagcagcactttgactatagaggtttgcttggtaatgttagtggggcttcacattttgactcaagaggagtggacatggagcgccttaaatcctcacttgagggaattagtagttctctctcacaacctagaagttctcattctgacactgttaccacccaaggagcacaaagaatgactgaaaatgtcaacatctcaccattgataaccattcatgatatatctgggtctcagtcatcatctgcttgccccacttctcctccacattttcaagaagaccttcttcatcgccggcaacacttggtggaggaaattttgcagctttcagcagattccttttcagtggcatcttctgatagtaacacaagctgtagtgaagttgattgcagtgaatttgagtcatcagtgcctaaagttgataatttcccgtgcaaatattatatgaatggaagtgttgatggtcatttatctcaaaatctgctcaaggaaaagttttacaacccaagacaaggaattcttcatgcaagagaaaatggaaattctttatctagttctacctgtgacccaacttctaagcagcattcaattgattttgctgctggtgctgacaatgctgagagtgcattttgtgctagccaagacactggtttgttggagaaaagaaaaattagaaaaaaagccaagaagagaattatttcaatattagaagagaatttagatggtgatgcatctgatcatacacaagaacagataagtcaaggacagatttctccaaatttaaaacaagaattggacattgatgattctactgaattttctgggcgcaattactctacccaagagaatgatgatttgattgtgacatatttcaatacaagtattgctgattctgaagctagtgaggtctgtagtcattgtatgcgctgtaattgtgtccttcagagggagacaaactataaagaaagcgaagttgcagtgttgctgagcagccataagaagctctatttgctactaatcaacgttgattctaatgggtcaggaacacttttgagtgtattgagttgccacaaaattgaagaagtttgtgaggtgctagtaggaatgggacttcaagtgttaagggtaaattttgagaatggggaaacgtatctttttgtaacaagaagcattgagaaatcaagagaattac

SEQ ID NO: 91273 - DNA, 271 bp, Glycine max
  Clone ID: PAT_MRT3847_5342C.1
ctacggctgcgagaagacgacagaagggcatgaacacaaggcattcagaaatcaaataatatcaacaataaacagcattcagaaagtgtatacattgaacacaatagttcaaaaatcaaataaacaagctaactaataaattgtatttgtgttccgtagaaaacatatgaacacacaattagctgcaacagcagtttttccatgttttagattgcaagaatgcctatgcccacaagtcacataaaatcaatcacatgataacaaatgacaa

SEQ ID NO: 91274 - DNA, 1011 bp, Glycine max
  Clone ID: PAT_MRT3847_53430C.1
ctgatcttcaacccactacaatttttggccatttcatttgacccattttttcgcatttaagcttgatctgctgcttccggtcacgtgcttctcttggtcaagattaggagcttgaaagcactttaacttcttaatacatggcttgtcaaatgggaactatgactctgaactggagattatcaattacagagaatgaaagctctgaaaagtcatgtgtcaaccttgcaacttccagaatccacagctgttgctgtgagccaaattttaacgggctaactctaaaagcttgcatgaaatcttcaccttttgctcagagctgtttcctgggaagaagagctgggtggaaaatagcttttgcattgaacacaggtggagtgtctggaaatggtgaccaacaaagcttcaacgaagccagttccaatctcggtggtactcgattgggtaggatattgactgcaggtggcagacaacttctagaaaagctgaactcagctagaaagaacatccctttgaaagtattcctgctacttttgggtttctacacggcaaatgcactagctacaatccttgggcaaaccggtgattgggatgttctggttgctggtgttgtggtggctgcaattgaggggattggcatgctaatatatagaaagctacctaccgcgaggactgggaggttgcagtcttttctagtgctggtgaactactggaaagctggcatatgtttaggtctctttgtagatgcttttaagttgggaagctaagaacccgcaaaatcttgtccttgttttgtcttttcaattttttgttgtatgtcataaaactctgttaagccataattttgaccgtagtcttcttctattgctaccttatagttctatactagtggtgtacatgtaattgtagtatgtgaatagtatatatgacgattgcttaatgactttatggctctgtgcacactgcacagtgcaccattttgcatgtgcttggtgaaggagaaactgttacatt

SEQ ID NO: 91275 - DNA, 564 bp, Glycine max
  Clone ID: PAT_MRT3847_53431C.1
ggacgagtgatcaagcggaagaaagaaacgcagtgtgctgcgagaagacgacagaagggggagctccacgttggttgtttgatatcgattattgaacaagcggaagaaagaaacgcagtgtggaagatgccgacacgttgtgaaatatgctgcgagataatgatcgcgatcttgatccctcctctcggagtttgctttcgccacggttgttgcagcgtcgaattcatcatctgcttgctcctcacaattctaggttatattcctggtataatctatgctctctatgctattatcttcgtcgatcgtgaccagtactttgatgaatacaggcgtcctctctatgcacaatactgatgataattttagtttgtatgcctatgagtgatgctcatgttgatcgtgtgcttaattactgacaatttaagctcgtgtgcttgttgaaattgatggtttgtagaatttattgtttacgctctcgaagcttcaatgacttttatgccataaggattcttctaaaaaagccttttgattttgcataaatctatgtctccagtaatatatcac

SEQ ID NO: 91276 - DNA, 1054 bp, Glycine max
  Clone ID: PAT_MRT3847_53432C.1
gtgagaaagagggtggatcacaaatgaaattgactgtgacatgggcccctgatgtgtctgatccggtacctacattgttatcacatactgtaaaaaacaagaaacagcagaaacccaggatcaagaagagtcaaaagaaaaatggaaagggccaaaaggtcagttactccaaaagaggcagcagcaaaggcaaactgtatcgaaataggtggttgcattctcatgatgaagtgtttgaagcttcctctgaattagatgatcttaatgctgttaaccatgattcctactatggaactagttactacttaaaaacatcattcacacaaaggttcactggcctattggagacgcgctgtaacatgcttggttgtgtcgtatactgagactgcataaatagataatttcctgttatattgtgatatgaatagatcgatcaaggctgttagaacatccaatgtaccactaaaagcagcctaatgcacgattcataccttttttgttaaataattcgtggagcaattttttttataccatcaatgaaattgacagtgaagtgggcccctgatgtatatgatccggtacctacattgttatcacatactgttaaaaacaagaaacagcaaaaacccaggatcaagaagagtgaaaagaaaaatggaaagaagggccagaaggtcagttactctaaaagaggcagcagcaaagataaacagtatcgaaataggtggttttattctcatgatgaagtgtttgaagcttcctctgataatgctgctaaccatgattcctactgtggaactagctactacttggaaacatcactcacaaaggttcactggtctattggagaagcgctgtaacatgcttggttgtgttgtatacagtgactgcataaatagataattttctgttatgttgtaatatcaatagattgatcaaggctgttagaacatccaatgtgccactaaaagcagcctaataatgtacggatacataccccttttttgtcatataatcttaaaggcttctaggttgcagtggtattaggatcttt

SEQ ID NO: 91277 - DNA, 390 bp, Glycine max
  Clone ID: PAT_MRT3847_53433C.1
atggaaacccggtttacttttttcaaagtgtcatgattttactttatgtttactatgttgatggggagaaaaataaacgggagcaacaggaaaaaagttcgaagcaaaaatcccatagctcaaaagtaccattacccaaatcgggatgtgctcctttcagagccagagttttgctaacgcccccatctataacaaaaggctatgttaataggggaccaagtgatacccacacagggggcttctcccagaccgtacaaggctctgagagactcaagtcactcccccctgctataaccttggactttgcccgagtacgggggcggacccattgctctatgaaaacactggctttggtccccccaaaagggaccgacatgagccccattatac

SEQ ID NO: 91278 - DNA, 335 bp, Glycine max
  Clone ID: PAT_MRT3847_53434C.1
aacctgatgtgctctttatactcatgatcaaggtgtatatacaccctaattggggatactgactgcagttagagcgccatgctatggatgtgaatagttgaatgcaccagctaagcttttgaaactcataggcggtctgagagattgatcaataagcggaggcagaactagggcttgggaacctatatattgatgacctaccacttctaggtaaagccaactatgttttgagatgtaactgagagcccgaagctgatctctggggttcttatgacaggccaatttaggtattagcctgtggaagatacttgggttcacaattggattcaaaggct

SEQ ID NO: 91279 - DNA, 1263 bp, Glycine max
  Clone ID: PAT_MRT3847_53435C.1
aatcatcaaagtttgaaatggtcttttattttcgtaaaagaaaaattcaaaaaattagaatcgtggaccaccaacagtaaaaacggttacacgccgaaacagaaaagaaacacgcgcaagtggcctcaactgaactaaaacaaacttgccgcaccgttcacgcggttctgctggttcatgatgtctattccattccggggcatattctagatcaatcacactactacgctatgatgataaagcaaactgagagaaatcaattacattcttacaaatataaataaatgaattgaattgaattgaattgccactgtcaaaagtacaatgactacaatctaaaagctaaaactagcgaataaggtccaagtactatatatgtacaagaacaaattaatctcaaataactttaaaaaagaaagaagaaaaaaacactgaatattttttggatctatggatcatcagtattgagggatttcaatcttgggtatggtcaaattgagacgggatttcttggatggatgaggactggtaacctcgtcatcaacgaagaaccttgttgaaaagtccggaaaagccgggaggttcagatcgaaatcgcggtggcttcctgtgtgagtggaccccactccctcagaggcggttacggcgctgttaccgccttcgtagtgacaacgtttgtgtcctcccaaggcctgtcctgttgggaacgtcttttggcagatggagcactcgtgggtcctagcaccgccgttcgacgccgaactcgttgtcacggcggaggaggtcgagtggtgctcgccgccgagcttccggtggctggccttgtgtccaccgagtgcttggtaagaggagaaggctttgttgcagaccgaacatttgtagctcagtttggcggcgggtagcggcgcggaattgttgtcggagacagcaggcttggcggcggggacaccgccggcgccgccgtgagcgagcatgatgagacagagagcgaggtactcttcctcggtgcatgaagagtgttgcagttgctgctccatgcggctacgcttagaacgctttcctttggtccacggtgtctccaagtaactgaggttggtttcttcaaagggactaaacgatggagtggcagttctgggtgattgaagagcttccagagccatttgaagtgtctgcgcttgtgaatctgtaatagggtgtgataggaaataagagaagtgcttgttgtggttgcttttggtgaacttgagtttgagcctggggtgt

SEQ ID NO: 91280 - DNA, 636 bp, Glycine max
  Clone ID: PAT_MRT3847_53436C.1
cactgaggttgagcataaatgatgaagaaactaagagtgcttttgtagatttgttcaataacagaatctacggacgaaactactcaaacaagcagttgaacaagagagagagttctcctggagattttgctgacaaaccttgattaccttgggttacaaatgtttcggtgtcatggtcacgaattttctcattattttgaatcaagcatggcaaggttggctgtcaaggtgggaaaatgaaggaacctgctttggaagagaactgagctgattgtgcaaattataaatgtaatggctggaagtcactaacagagtctgtcacgggctccgtgattatcaacgcaacaaggtcaattatagagactagagtgtggtattaattaaacgtttatttaataaagtttatttcattataaagaagttggaacttatttttatatatttaattaagatgtgtaaaagctcttatagaactgttctgcgatgtatcatgaggagaaagattctagcgactcgtatggtggtttgtggtggtccacggtgaataactccgatagagccacgtgcatggatttggatgatcaagtcagcatctgagcttagagagtgagaatagggaagttgtgtatacttgca

SEQ ID NO: 91281 - DNA, 329 bp, Glycine max
  Clone ID: PAT_MRT3847_53437C.1
acccacgcgtgcgccacgcgtccaatatattcagcttcttgtcttttccggtaccttattcccctgaaatcactgatccacgacaagaggcactcagagagcatttgttgatttggattcggaaggttccactttgtttatggaagcaactcagctcccttcctctctctttattatccacattgcacaaatgaattttcacggtacttgttgtcagtggtggttgacaaagatattgactatgcgaattctgagcactatatcaagcttttttggatctggaatggtaacttcaattgggctagtcattgtatactatttgatcatat

SEQ ID NO: 91282 - DNA, 228 bp, Glycine max
  Clone ID: PAT_MRT3847_53438C.1
gctagcaccacattcacctgaggcttccaaagccatggcttcccttgtagcatccactgctgctgcttacccttggcatgacagaaatgcttggaaaccccatcaacttcaatggagacacaaagccagctccatctgcttctaatcctgacacctacaagactgtggctcatttctccgagaagatggctacagcaacatctccgagaaaagctgctgctgctgctc

SEQ ID NO: 91283 - DNA, 406 bp, Glycine max
  Clone ID: PAT_MRT3847_53439C.1
cccacgcgtccgatatgccccaaacttgattacgtctcaacccagctaggctgtacttctattcaatctctactctgcgccacttgctctctcttgccatcgctttctggttccgatataaggctacttcactcacatgacacccttattgctgatctttttttgctcttatcctttggcaggtctcagcctcctagatccccaacttcaatccattccattccgatccttcgccttcaccgccactgcataacgttctcatcactcatacaatcatattgctctcgccgttaggttgttgattgcatgcgcggacacgagctcagacattgtgcacacatctgataccagtgaaggaaaaaagggactggtgtttctcagtgctgagaagacattctgcttgacg

SEQ ID NO: 91284 - DNA, 233 bp, Glycine max
  Clone ID: PAT_MRT3847_5343C.1
cacgtgatagaaaatgcagacttgcgggatcgtttttgcgaccacagctgcccctaatccagggacgcttagtcaatcttcaggacgcgctcttacaattccccgcattgggtaaagccctgcgttacagatcttcatagattatctgcccactagtcttgattctgctggcactggagcgacatatgacgcatcaatcgctcctaccaaacttacagatgactgcatggcta

SEQ ID NO: 91285 - DNA, 360 bp, Glycine max
  Clone ID: PAT_MRT3847_53440C.1
gtttatccggcagaggaaactagcacacaggggtgggtctctagggacaacatatcattcacatacagataggaattacatgaaaggacccatgttattaatcatgctgatcggctactaaaggataagaaatacacattactgctatctaacggcggaggacatgattggcaaagcgagtactctgcaaagccatttaaataaaaaaaatctccatggagaaatccaactacagcatatgcacgtaacggattacttaaatggagatatgctggaacgcaccaagcccagtatgtttttcagtcagataaacctgtctttgtccttaaggggtcccaggaatgcataatggcacctttc

SEQ ID NO: 91286 - DNA, 592 bp, Glycine max
  Clone ID: PAT_MRT3847_53441C.1
gcacgagcgtgtgccgtgtcttaaatttgcatttaatttataaggaagttttgttaactgttttttatggtttaaaaaaaaaaaaaaaaaaaaaaaaaaaaaaaaaaaaaaaaaaaaaaaaaaaaaaaaaaaaaaaaaaaaaaaaaaaaaaaaaaaaaaaaaaatccccccccccccccccctttcccccttaagggggggtaaatttaccctggccccgcccccgtttttacccccctgggacggggaaacccccggggttcccccccttaaaccccctgccccccccccccccttcccccccgggggtaaaaacaaaaaggcccccccccaccccccccccccacagttgccccccccaaaggggaaaagggcccccccccttaaccgccccttaaaccccggggggggggggggtccccccccaggaaccctttccctttcccacccccttagccccccccctttgggttttttccctttctttttccccccgttgcccgggtttcccccgaagaccctaaaaagggggccccccttgagggtccccaataattccttacgccccccccccccacaaaaccttattggg

SEQ ID NO: 91287 - DNA, 1408 bp, Glycine max
  Clone ID: PAT_MRT3847_53442C.1
cccacgcgtccgtacggctgcgagaagacgacagaagagggccagagtggcattttgtgttttgtcactttttctgtgtcttcttttcttttctattctcttttgtgtgggtagtgattttcagtttcaatcttggaaagccaacctttgcaattttcaacccgaaatcgtcgatttcttctaaaatatatactgtgcattggtctccttttcgaattgtggttgagggattaaagtaccgttattggtagagatggcttgtagggggtgctgggagtgccttttgaagctgtttaacttcatactgaccctcactggtctggccattgtgggctacggaatctatctttttgttgaattctctaaagcttcggatgatgacaacacgcctgcaatttctcccgtcagtgatgattctgctctgattcaacttggccggcctgtgcttatggccgtgtctctatccaacgacttttttgataacttgccccgtgcctggtttatttacttatttattggtattggagtggttctctttcttatttcttgttttggttgtattggagctgcaacacgaaatggatgctgcctgagctgttattcaattttggtggcattattgatcttggtagagctgggatgtgcagcctttatattctttgacaaaaactggaaagaagaaattccaacagacaaaactggagattttgatgcgatatatggatttctgattgagacataaaatttggtagaattcttatcatatatctaaggaatgtgtatgaaattgcaggcccttcttttcctgttagcccttattgttagggctgcaaataggccagcagattatgatagtgatgaggagttcattaatccaaggcagcaagtacaacagccattgctcaacagactaccagcaggcccagcaacagggataccggttgctggaacaattgaccagcgtccaagcagaaatgatgcatggagtacacggatgagggagaagtatgggcttgatacttcagaatttacatacaacccatctgagtctaacaggttccaacaagtaaactcacagccaactgaagaaaagagccgctgcgctataatgtgatctctttcgctgagtttgtgtatacaactcgcactgtactggttcactctatgacatggccaacaccatcttcatgttagtgtgcagtattgtgctgagacgtcaaaatttactgtggtgttgcttatgttcatagttagggggagtgagtagtgaagtcgttgatgcccccatattgttgcttcaaagccaatgtcttctttggcccatgttttgcccgtggtcattactcgcttgttgggaaaactatgatttagtccttaaagttctgattgagataacttgatttactca

SEQ ID NO: 91288 - DNA, 791 bp, Glycine max
  Clone ID: PAT_MRT3847_53443C.1
ccttgtgggactgacaagcgagtaacaagagggagagagtagagtgcataaattgaattgcaagcacgagcaagtacttggttttggcttggggaaacgaaggaagaatggcgcagcaacttggagttccatttaagttatcatgcaaaccctctcacattcacgctcttaaaccctttcactctctccctccccttcgcaccttcaccaccaaaccttctcttaatgccaaatcccatcatcatcatcatcctttattaacgcttcttcgttcccaccgcactctcgcaccctgctgcaactccaacaaatcagatataatgtcacaattggagcttgggaaaccggagcaaaaggggaaaccggagaagcgagtaaatggtatattctggatcattctcctcaacattgccatattcgtcgctgaccacttttttcgggttaatgggatcaaggctttatacttgtaccacaattggccttcttggtaccagtttgtcacagctacattttgtcatgctaattggaagcatctttctagcaaccttttcttcttgtacatttttggaaagcttgttgaagaagaggaagggaactttgctttgtggctttcttacattcttactggtgtaggagccaaccttgtttcatggttggttttaccaagaaatacggtttctgttggagcttctggtgctgttttcgggttattttctatcagtgtccttgtaaagatgtcctgggattggaggaagatccttgaagtgcttatattgggtcagtttgttata

SEQ ID NO: 91289 - DNA, 511 bp, Glycine max
  unsure (1)..(511): unsure at all n locations
  Clone ID: PAT_MRT3847_53444C.1
cgtcaggacaggagatccatggatgctccagtcctggacgcacaaaaatatttatgcggacgcgtagcacgacccggtacctcaggacacgttccaacagacgtcccagcgtttcctacacaatgccgatgacgaggagtgcaattgcagacaatgaaaaagaccatgatatggtgtctagattaaggtaaagatgcatttacctgacaataacacaggtattcagactttgatggtaatgcaacttctcttagaatgagagaatctgattaagaaactagacattgattcagtgatgatggaagtagataatttaactaaagaatatataaatgaacaactcactgaacttaaagaagcacatgctgctcaatgatggaagtttcctgatgaaatgagatcacataattatatgttccttgcatatgaaagcaggattacaaaatacggggcgactcanagtccgttaatgaacttcttcatgcggatccttaattaatctgtactcaca

SEQ ID NO: 91290 - DNA, 373 bp, Glycine max
  Clone ID: PAT_MRT3847_53445C.1
ggaaagggtgggttcatacatgcgttcaaaaatgggtgataccctagtatgaactcgattgatttctagggctctctttcctgagccaagaaaatgagagagtgcattgatatccacattggccatagacagtgtccatatagggaacccccgctgggatctgtattggcttgtgcacagcattaagcccgatggacagatgccgattgactgaccgttggatgcggatacgacgcctctggcacattactgagggagaccggggccagaatgcacgtgccacgtaccggctttttagatcttgaaaccgccgagctcgacggattccgaaccggtgcattccgtgtgatggttcccgccgagctgctgatca

SEQ ID NO: 91291 - DNA, 229 bp, Glycine max
  Clone ID: PAT_MRT3847_53446C.1
ccttgcttgtttctgtttttttttttgttttgttttttttacaatcataaaaaataatatcaaatttgatctaaaatctaaattctacgttttctttttcttcaaatcttaacattacatcgtactaaatcctttatcaaacatttatgagttctaaatttatcttaacgattatcgtggggtctaaaataaatatttatgtatccataattatttaaaaaattaaaat

SEQ ID NO: 91292 - DNA, 863 bp, Glycine max
  Clone ID: PAT_MRT3847_53447C.1
gcctcggactcatggcccgtggaccctggaggtcggggggcacgcggcggcccccctacctggccgctccgacatcccttttctctcttgctggggactctgttggagcagttcgcgggccttccatgcgccccttagttgggcccattctcttctgtgcgactgggccggcccccttccttgctgtgtctggtgcgctccccctgcgacttccaacaaatgagaccctcccaaaagagctacatcctgtgttctttatgtttgttgcaccacctgttgttgcttccatggcatgggccagcattcaggattcttttgattatggatcacggatttcctatttcattggcctcttcctatatttctctttggctgtccgggtcaattttttcagaggattcacattctcgcttgcatggtgggcctatacttttccaatggctagtacagcatctgcaaccgtaagatacgcaaatgaggtcacaaatgtagttacaaagacgctaagtgttatactcagtctcatgtccacactcataatagcagcagtgcttgtatcaactatattgcatgccttagtcttcaaagacctcttccccaatgaccatgccattgccataagtcatggaaaaagaaggccagaaaagaagtgtctagctcttggatacacgagccatgactccgtagagattgatttagaagcttctaccccactaccaaatggcagagagatcaatttacactctatctgaggatatttgttatatattatagaaatgtgtccttcaaaacacaatattatgagtttgcttgcctaataatcttccattagttaaacataaacagaagagtttgactgttcc

SEQ ID NO: 91293 - DNA, 265 bp, Glycine max
  unsure (1)..(265): unsure at all n locations
  Clone ID: PAT_MRT3847_53448C.1
cgcaatcgtcccaacggcaatagcaacagcattaataataatccctcccttggtcaaaggaatttgatctgtttgaggagaaaatcgaacaagttcctttgaccaagtgtgaatggttctctgatttccatcccaatantcagtccgnantngnccnangggnattggnacnngnttnatnatnatcccccccctgggnnngttggcttnactgccctagcgntnaagggnnnaaggntttnttccaggcngangngggtgtgtc

SEQ ID NO: 91294 - DNA, 405 bp, Glycine max
  Clone ID: PAT_MRT3847_53449C.1
aacccacgcgtccgcgcgtcactgctacgtaccagattcactgcttatattagcgagacaactctgcctacatggtggtgtatcaggacctgcttacaggtgatgagcttgtgtcggactccttccgttacaatgaaatggagaatggaatgctgaggcaagttgaggggaagtgggttgttaagggagcaggtgctgttgacattggcgcagacccttatgctgagggtggagaagatgaaggagtcgatgacgcagctgataaagctgttgacattgttgatacattcagactttacgagctacccgattttgataagaaacagtttgataccttcatgaacaggattatcaagaatatgactaccaagctcgatgcacagaatccagagttgtttaagaagc

SEQ ID NO: 91295 - DNA, 253 bp, Glycine max
  Clone ID: PAT_MRT3847_5344C.1
gggggggaaaaacaactcttttcacatttttggaaaaacacggcaaacaatttctcatccaaaatcaattgcatttcgaaaatgatttccaaaacaagtgctttaaaaaccaaaagacagaaacagttgagagatgttttcttatctcctgttttcttcaggtgctcaagggataacttttttcgaaaacaacaatctactcatgaaacaaacattcaaatgtgggttcaggagacagaaattttagaaaaca

SEQ ID NO: 91296 - DNA, 720 bp, Glycine max
  Clone ID: PAT_MRT3847_53450C.1
tggaaatgttggagaccatatggcattactaagggtctacaattcatggaaggagaccaattattcaacacaatggtgttatgaaaattacatacaggtaaggagcatgagacaggctagggatatccgtgatcaacttgcaggtcttttagagagggttgagatcgaactaacttcaaattctagtgatttcgatgccatcaagaaatccattacatctgggtttttcccacactctgcgagactgcaaaagtatggaatatataagactgttaaacaatcacagaatgttcgcatacaccctggttcggggctggcgcaggttcttccctagatgggttgtataccatgaactagtactcacaaccaaggaatatatgaggcaggtgacagagataaatccagggtggctggcggagatagcccctcactattaccagctgaaggatgttgaagattcatattccaactagatgcctcatggagcaggacgtgcatatttggacagctagcgggcacagtggcacatttgtttaggttactcttcatttatatgctctatttttgtcatattactagtaatgtggatggaagatcttcaacactaactatatattagttttctgtgttatttttttggttttagctatcataaagttaaatacctcatttgttgctttatcttgcatatacaataaataagttcgttatctgctgtta

SEQ ID NO: 91297 - DNA, 1462 bp, Glycine max
  Clone ID: PAT_MRT3847_53451C.1
gttctggtcggttggacagatctttcaaaaatttgaatgtggtgatcaatcccatggaggtgttatccgcaatgttgttcgatggagtattccaaatttgttagaggaacaagaaggtgctacactgcttgtatccgccaagtttaatgttgtatctgtccgtaatatctacctatcatgaaggggggtgtaaggtctggacagtggcgtggaaggcgaatcagccactggcactgaacaattaaccattaacaagaacaagaacatttcaagggaggacatagtaatggacatggttctgcattcagccttgtacccaccatctctgtcttgttcctcttctactactggaacaagatggcccaattcccgggttggtgttagtttgagttggaggagcttgtccttggtgccttgtgcactgaaggcatattatgattctgaattggagaataaaaagcatctacttctgacctctgtccaagacacgcaaaggggcctcttaacaactcctgatcaacgctcttgtatcgaggaggctctggtgagtctcgaaggatgcaacattggctctcaccctatcaatctctccaacttggatggaacatggcgcctccagtacacttctgcctctgatgttctcattcttctccaagctgctgctactcttcctttctttcaagttggacagatctttcaaaaatttgaatgtcgtgatcaatctaatggaggtgttatccgcaatgttgttcgatggagcattccaaatttgttagaggaacaagaaggtgctacactgcttgtatccgccaagtttaatgtagtatctgtccgtaatatctaccttcagtttcaagagatcacaatccaagatataaatattagtgaagagctgcaggctctaatagctccagcaatactaccaagatcttttataagtcttcagattttgcaatttctccgcactttcaaagctcaaatccctgtgagggatccaggaaggcaatcagttggaggactatattaccttagctatttggatgataatatgcttttgggtcgtgctgttggtggaggaggggtatttgtgtttacgagagcccaatctctctactgatgagcaccgagcaggagttaaaacttgtgtttgccagcaataacactcaatgagcctctgtttatagaagtgaccccatggagagagcaagaaattgattcaaagcatatagcgcataaggaattctgcaaagcttattgaagaaggctattatgtgcagttgtcgtgttgactttagtcgaactgcttttttgtttatgtatgtatatttgcattgtttgtatcaatttggttatatattggcaaagtacgaagatggtgagtgttcaatgtaagtgatacaactcgtgggaaaatgataaggagcccagtcctcgctatgtgcagtgtaggcatcttataatt

SEQ ID NO: 91298 - DNA, 244 bp, Glycine max
  unsure (1)..(244): unsure at all n locations
  Clone ID: PAT_MRT3847_53452C.1
ntttattttttttttttttttttctctttttttgttctttttttttttctttttttacggggcccaaacttcacagactaaaacccaagcgcaacaggtcccttaccaggcaggtgtatgggaccgggacaggccctaaaaagcaaccccaccttgcaaacgcggggttaagccccatcattaaaatctattgtccaatggggcaaccaaggaggccaccctcacaagttcaacatctagttgg

SEQ ID NO: 91299 - DNA, 2089 bp, Glycine max
  Clone ID: PAT_MRT3847_53453C.1
cggaattccgggtcggaccaagccttccggtggctatgaagaaaggagtagatattgtgttggacccttgcaatggttctgtactcagatattcgcgcacgaaaggccacagaggaaaactcaaacaagttttgtgcaatttactgagcaatgctgttaaatttaccgaggaggggcacatagctgttcgagcatgggctcagaagccaagcttgcagagctcaatgattgctactcaccaatacgggtccagtagacttttgtcgcgcttgtgttgccgccaaaatgaagcacgtgatgacgtggaagacttgaacatccaacaagatccaaattgtatggattttactattgaagtggatgacactggcaaaggaattcctaaagagaagcacaagtctgtttttgaaaattatgtccaagtcaaagaaactactcttggccaagaaggaactggcttgggacttggtattgttcagtcactggtacgtttgatgcatggagatattgaaatcatggacaaggatattggtgaaaagggaacctgctttaggttcaatgttctcctcactgcccatgagacacagatgaatgatgacacaagagatgaccaagttggatcaggtaacaaaaatcaatctcatggactaaccatgagtcccaagttatctatttggacccgtagtcctagatccgaggcttctcgagttgttttattgattcaaaatgaggagcgtcgagggactacgcagaggttcatggagaggttagggatcaaagttaaggttgtgaaggagtggagacaacttcattacactctgaagaagatcatcaaacaaaagggtctccatccaaatagctcaagctcgccagagtcttcagattctccctctgcatcaagctgcacaaacggagtccctttgagtgcacaagatggaactaattacataagttcaatcttcaagagaacagatattgaagcttcgtcgggttttgtcctgattgtgattgatgctaatgcaggacctttttcagagctttgcaaagtggtagctgagttcaaaagaggcctttgttatccttgtagggtggtttggttggagaatccacttataccttctgtggacaacaaaatccttaacaaggatgtttctaattctaatgacattgtcttgtctaagccacttcatggtcatcgtttattccaagtcataaggattctccccgagtatggaggtgtttggccatgcaattctagtgaaacaaagaaagaaaagggtcaagtttccttaactaatgaaggtgcaattcgacgtgttgaactacaagagtgtggcagctcaagcgttacacagcaatcttatgatagatctagagcaagaaaatctcatatccaccaaggagaaatacaagaatgtgaagagtcaagcaatgaaaaacccttgtggggtatgaaatgtttggttgttgaggacattgttttgttacgtaggataactaagtctactcttgatcggcttggtgcttctgtcatggaatgtgagaatggtgaacaagctgttcagacagttgaagagggtctaactaggaattcttccaatcgtccatgtgatttcatcttaatggactgccagatgccggtaatggatggatatgaggcaacgagacggataagggagattgagaagtctcatggtgttcacattcctatctttgcattaacagctaatacagggaaagaggcaatattgtccattgaagctggaatggacgatcacttaatcaaacccatcaacaaagaggctttacttaaagccatcaaaagaatatatacttaagagtgaacagtaaatcttatcttttttaattgctttatatgattgttatcaagtttttaaattaaacaatgacaggagatatctttttacaccactaactagcctatatataaaacagaaatagtaaataaataaataaagcattcatgtgtcattgtttaatttgacaatttgatggtaatgacattaaaaaaaatatttttaagtattgtccttttctttaattgtttatagattttttttgttttttt

SEQ ID NO: 91300 - DNA, 314 bp, Glycine max
  Clone ID: PAT_MRT3847_53454C.1
aataaagggccgcccccataaaaaaaacttggaggtcatttgggaaggccatttcccgcccaggggtttccttccttcctttttgactggctcccaatggatgaacccctcccaatttccccttttttttgttttcccacgggttttttttacaacccgccattttcttttatacaacaaaaaacttaaaaaaatcccttgaaaacgaaagggcgctttaagttacatatggaaaggggccttccctttttcaaactcacaggaaaacacgggtgtttatagggttgggcttcaatcccacgccctttggagaa

SEQ ID NO: 91301 - DNA, 936 bp, Glycine max
  Clone ID: PAT_MRT3847_53455C.1
actaagtcagcaaggatgaaggctgcatcgtcaatgcctgcatcatggaccacagaacatatgcgtactgcaatcagggaagctggaacaattaagtatttagtaaagcttttaaagtgcgatgataatgctgtccagttggcagctacacaagctttggaaaggctgtccgttagcaatattgtttgccgggttattgaagctgagggggttttaggtcctttagttagtattttgaaatgctcagagatagctggaactattttggaaaagtctttgaacatacttgctcggatattggaccccagtaaagagatgcaattaaagtcttatgatggaccagctaatgaatctgaaaaggcatttggtggagcaaaaggtgactgtgtttcaaccgggtttagtagcactgaacaagcggtatcaaaaacatacacaaggaatgatatactggattctgttttcattgcgcacctggttgagattctgaagtcctctcctcccagtttacaagaaaaagctgctactgtgcttgagtttgtggcattgactgacccaactctggccccaattatatttctggatattgaatctggtctcaattctgcttttcagcaaaaaattttgaaaatttcagcggacatggaatctgacgctcaacaacagttttccgaagcatatgcaattgaatttgaagaagctggtcttgcaatagctgcagcatcccgattattgacaaggctactcgattgtgagcaattctgccacaaaataaactccttgcagttcattgatttgcttcgcggaatcctcaggtccagcattccccttcacaataaagagtgggtagctgcttgcctagttaaactaagttctctctctggttccattgcgatcctctatccaatcaatgtggaaattacactctacgagact

SEQ ID NO: 91302 - DNA, 838 bp, Glycine max
  Clone ID: PAT_MRT3847_53456C.1
ggtaaagccgaaaccttccatatatagccagccaaagaaatgtggagtacaaaactctttggtctctttcttctttcagcattcaccttatacccaccttcaaccatggctcaaccagtcttcgaccttgatggccatccggttataaacggtggctcatactatattatggaatatatgggcagtggagtagagctagccaaaacggggaatgaaacttgccctctcagtgttgtgcaatcttccagttttgggtcgactgggctaccagtgaagatttcatccatgctccgtactcctttcgtcaccattggaagagtggaccttagtttcactggtgttccggattgtgccaccactccttctgggtggaccgtcgtcgagggtctaccggagggatccgtggttaagattactggctacgaaaacacggagaatggtcactttctaattgaaaaagcttcttttcgcaatatctataagctttcgttctgtatagttggcaaactcgggtgcggaactattgggcttattaaagatgataaacaaaacgaccttttgggtgtgacttgggactatgcgtttgagtttgtgctggtgaaaactgatgatcagcctacttcatcttctgcgtgaacactaatgaagcattgatcgaccatgagaaatggtctactttctcgtggcgagagacatgtgtgtgatgatgataaataaacatgatttggttgtagttgtagttactacaaacctaaaataaatgaagaatataatattgtaaggtttacactctatggtgtatcaatgaagaatatcaattttatgtttatcttcctgc

SEQ ID NO: 91303 - DNA, 333 bp, Glycine max
  Clone ID: PAT_MRT3847_53457C.1
aacaactatgagggctgatggtggcccatattagtatgcaatggagcatgatagttacattgtctacaataccaggagattttgtcattggtggcaagatgactaccataaacaatatgcgtgcatatgggctcaatgctggaatatgacgttcttggctattgggcaccatttgtcagcacatttcacagcacactgtttggaatcaaatggcatcagtgagaacaccattggatattaattctagcaagcagaacttttgtcagttttctattcaccgtctgtttccaggaagataactggacaaaactggagattggatcacacttatac

SEQ ID NO: 91304 - DNA, 132 bp, Glycine max
  unsure (1)..(132): unsure at all n locations
  Clone ID: PAT_MRT3847_53458C.1
gctagggttgaganctcatanatcatggctacctccatgggtgaagctnatgcttntctctgctctananaacncntgtccttgcaagcaggggtgtctgtaanaccactgcatttcaananccatagaacc

SEQ ID NO: 91305 - DNA, 146 bp, Glycine max
  Clone ID: PAT_MRT3847_53459C.1
actgggacatagagctgcaagcatcctcattgtcttggacggaggtagcacaattgccgatttcgcggatgcgagggatgctaaacacaaacacgaaaagagtgattgcagggggactacgatgtttatgtagacggagcaagcta

SEQ ID NO: 91306 - DNA, 810 bp, Glycine max
  Clone ID: PAT_MRT3847_5345C.1
aagcgcagcgtatagaaagggaaaagaagataatatggtggtagtttaagataatggtaatctatggcccaagtttatcggtgtactgtgggtcgtgggtacgagatggtgagagcaattggcaagataggtgcagccctcagaaattgagtgggtctgggagaagaagcatcacctgcaaattcgagagtgtgagactcagtagagcatgcagtgtggcactgactaccttgctcacaaccgctgcggtgatagcttctgtggcagcagctgatgaacccgagactctatccaacataccccagactttgtccggtgagtgcacgttgcccaaagattgcaagaaagctagaatacagaaaccaaagtcaaggaaagcggaatcatgcacaatcaagtgtgtcaccacttgcatcagaggtggagatggctctcctggggaaggcccttttaacgtgataagacctctggttgttttcaagcaagggtttcgaactcgtcaatactgtttggtggaatgctcagatatctgtaatttgataagcgatgctgtagtaacaaaaactaggtagtcactctttcagtaaatgcttatttgcccatgtatactttccttgtgtaatttagtactatgttcaaatatatctgtaatttttttttaagtgatgatgatagacattcaatttctgtttggtttatagcaataattataattgttatgtgtactcttttaagaagaagaaacaccaccaataataataatgtgtattttgatgctaaaaaccaaacagaaattgaatgtaatcatcc

SEQ ID NO: 91307 - DNA, 364 bp, Glycine max
  Clone ID: PAT_MRT3847_53460C.1
ggcggcactgtggcagacgcgccggcggcgtttgaggagaagacggacttcgacgtggtgagcgcagaagcaccgatcaacgctcgaatcgtcacgataacggctatgatctcaccgacaaacacagctctgcctaatgccaaggacttgaacgactccattccgaagaacatcatcgatggtattacaaaggactaaggctcactatgccaacaatcaactcgaaaaatctggagccaacgctaccattgcttatacactgactaactgcaagatatatgttctgcttcctctattgttggttgcaaatgagttcaccatttcactggaatatcattttcattttgtctggatttcaactttt

SEQ ID NO: 91308 - DNA, 260 bp, Glycine max
  Clone ID: PAT_MRT3847_53461C.1
ccacctagtgggataaggcgttgttgttgttgttgttgttgtcttcttagattttttttgtgaagagatggagttcttgaattctggactatgatgacttagtaccttttttgtgaggcttattttcatatgaaaattataaagcttaacaacttattgtaagatcaatatatatatcttaattagcaatttaaacttttgtcatcttgattatatatatatatataatgtgttcctgtgtcttatgttttgtactttag

SEQ ID NO: 91309 - DNA, 1891 bp, Glycine max
  Clone ID: PAT_MRT3847_53462C.1
cggatggagccatccttcaagtgatcaaagttcctcttttgagtcttcgtgcttccttccacgcaataatcattttacaaaagcctccatcaacgaagtgatcaaagttcctcttttgaaccttcgtgcttccttccacgatccttctcctctcatcaaaccccaaatgatagaaagctgaaaaaagggtttctgaaatatcagctaatgttactgagtgcgtaatcattgagatctgccttcatcttggggtgattttgttgatgggtgcttgctggagtaataggattaaggctgtgagtccttccaatacagggatcacttctagaagtgtcagcaggagtggccatgacatcagctcaaatagcaggagctcatcagcctccatacccgtcacttctcggagtgagggtgagatcttgcaatcttccaacttgaaaagcttcagctatcatgagctaagagcagccacaagaaatttccgccccgatagtgtcttgggagagggcgggtttggttcagtttttaagggctggattgatgagcattcacttgctgctaccaaaccaggaataggcaagattgttgctgttaagaagcttaaccaagatgggctccagggtcacagagagtggttggctgaaataaactatcttggccaactacagcatcctaaccttgtcaagttaataggatactgctttgaggatgaacatcggcttctggtttatgaatttatgcctaagggtagcatggaaaatcatctattcagaagaggttcttactttcagccattctcttggagtttgcgaatgaaaatagcactaggggctgcaaagggtcttgcttttcttcatagtacagaacataaagtcatataccgtgactttaaaacgtcaaatatcctactcgatacaaactataatgccaaactttctgattttgggttggccagagatggtcctactggtgataaaagccatgtctctactagggtcatgggaacccgtggatatgcggcaccagagtatttagcgacaggtcatctcactaccaagagtgatgtgtatagttttggagtagttcttctggaaatgatatcaggaagacgagctattgacaagaaccagccaactggagagcataaccttgttgaatgggccaagccttatctatctaataaacgaagagtcttccgtgtaatggatccccgtctcgaaggtcaatattcacagaatcgagctcaagcagcagctgcgcttgctatgcaatgtttttccgtagagcctaagtgcaggccgaatatggatgaggtggtaaaagcattggaggagcttcaggaatcaaagaacatgcagagaaaaggcgctgatcataaacagcatcatgtacgcaattccggccccggccgtaccaatggtggcgatggtggttcagatgcccctagaaaggcttctgcttatcctagaccttctgcttctctcctccgcggttgagagaattttgtgatgcggcaagtagtaaagcatataacaaaattcggaggtttaggtgtggctggcatgaaccatgtttatgtaagcaatgtatagtttgctttatttccatgttacattttgtgctatatataatttttttttctcgttgtggttctgattgttagacattcaagggtctaatgtgggtccttaaggtgttcattaattttgaaccctgtaaacaactgcaacactacccatgtggttgattctctacatttttatcttttgctttataatatgtaaaaaagtcttctccatgttgactatttgacttccttcccaaccaccaaagcctgttgactctgctttttcgacttaaaaaatttttttaatcctttgaaattcttctt

SEQ ID NO: 91310 - DNA, 462 bp, Glycine max
  Clone ID: PAT_MRT3847_53463C.1
ccctcgcgtccggttctgtgctatgaatagttgttttagggggcgtgccagttctgatattcacactatctgctctcaagactgtgaattatggaatcctgcttgcacaatagcgatgactatgtcatttaatgcaaacccgtgtgctgatgcatggagcttggaatttctgaagcgtaccggatttcatcgagatatcatttgagtcactggatggactgccaccccaatgcaggatgttcaggcaccaattgattggtttattttctctcaggaaggtgttgccaggacctaatgggtcttgaatgcacaaaattcttatgtgtcaaataggtggatgggaaaactgactttcccccagggcacttcccgaattggtaaaaggatgcctctttgtatagggggaggagcttgggcaataaaagctattctcatgaatgagccaaaagctggtctttcaat

SEQ ID NO: 91311 - DNA, 338 bp, Glycine max
  Clone ID: PAT_MRT3847_53464C.1
gttaggtcacaagaatccttttgtagaatttacgaatataaagcacaagtttgaccaaaacccgtcaaggtttttcctgcctaatttcgggaacccccaaaggggattatcctccacccagttcttgtctttcaaaaggaaaaaaaaccccacccgcttgtgttttttataaacacgaaaaaaggggacctcctcctgtttgatattacaaggaaaaaaagcgcttcacgggggtggtacccaaaacagcccaaggaggatattggggggatcaccccctaagggttatcgggaaattatgttataacccccactatgggggcaattgggaggggggg

SEQ ID NO: 91312 - DNA, 508 bp, Glycine max
  Clone ID: PAT_MRT3847_53465C.1
gcaagcaagcaacatcaatgttcctcccacaacactactcaaaacatggaccctcaccgccgccaccgccaccgccgccgcacgtggtgctgctcctttgccgtccctccctccagccccgacaaccttactaactcctccaaacctctccctcgcaactccgagcctcactccaaacctgcattctccctcccaaactcccccaaatcccgcatcccagtcaagatcgaccctcgccggatcctttccccgggaagagtctcccccatcgactccgatcccgtcgccggagaacctcttccctttccccctccctcgccggagccgccgcgtccgccatctccggcggcggctaccggcgagagggacgtgaggatgagcctgagaggaaagaacggcgggtgcatggttctggaagtgaactcaggagttctctgcgcgaattcggaagtgttcgcggggttgatagaggattacaagaaagggtcttcgagtggtagcacaaaat

SEQ ID NO: 91313 - DNA, 277 bp, Glycine max
  Clone ID: PAT_MRT3847_53466C.1
cacgggtgcgagaagacgacagacgagggactcgaagcacgcactaatcacacattggatatgctaactctctctctcatcgctttccaatgctcagagtctgaaataggagattaattatctatctccacagactcttctgtgtgggtgtagagcactgatccagatggctatctagctagcggcttctgagaaatttcctgagccaagaggaaaccgctgcaaacaatgcttactccaagaatgctgaaccagagaacttgaaaaaacttgctca

SEQ ID NO: 91314 - DNA, 293 bp, Glycine max
  Clone ID: PAT_MRT3847_53467C.1
tcgggacgctgctgaagagtccactgacatcattcccctggatgtcgctctactcactctcggaattgaaactgttggtggagtcatgacaaagttcattcgcagaaatcctgttatcgcaagcatggagtctcacgtgttcagcaccctatcatgaccattagactacagtcgccattcatgttttcgaaagcgacacgagtctcacacaggacatgccgccttcgtgggaattttgatatgtccagacatcctcgatccccatcgggtacgcctcacattgaactgacctt

SEQ ID NO: 91315 - DNA, 277 bp, Glycine max
  unsure (1)..(277): unsure at all n locations
  Clone ID: PAT_MRT3847_53468C.1
ccagaattcttgttctatgcctccttttgagtgaaaaaaaaaaancatcaanacaanacanttgttctnngntcagntttgaangnttnggatcttaatatacatngnntaaangaaaaataaagggatnaaatttaagttncttgnccnaataagatccttgctttaaattgnantactcatnaagagnnttggcagttcgggtacactgggtgcnntaccacgatttgtccaccaacagangaacacagtccgaggaanaaccangtgnatggga

SEQ ID NO: 91316 - DNA, 524 bp, Glycine max
  Clone ID: PAT_MRT3847_53469C.1
ggctcgagataacatctatctagtccacccctttttttttttttttttttttttttaaaaacaaaaatgctttgtactatattaaatctcagtattgtaaaggtaaacgtttgaattctaggagattaagatcctctatgcctctgtgtgtatcactcaatcagactttatcatcatctccaaataaaatacagttgaattcaaaagcctcgtccatcaatggtactgctcttgaatctgtggagcatttggttgcacagggacaacaaattggcagtaaaatggaattggataatcttcaatccaagggtacaggtgttgctgtaaatggaaaagctgcagtgtataccacagtggtggatggtgtggaaaagggccaatttgtacaggaggacaatcatgaaaatcattttttcttaaaatcatctggcagagtaacagatttaaatgaaccacttgttgggaatttatctccaccaatagaaaaagagacaaagggtctcgagcattctgggagcatgatg

SEQ ID NO: 91317 - DNA, 616 bp, Glycine max
  unsure (1)..(616): unsure at all n locations
  Clone ID: PAT_MRT3847_5346C.1
tattttaggtatgttgctaacttgtgttttttccttttccctatctatttatctttctgaaacactgttcagattgaccttgcttttggggcctccaagatcaggaaaaactacactgctgcaagcacttgctgggaaactggacagggatttaagggttggccatcctcttgctccatttttaaggaacgatgcaatgatatcttcctacatgtattttttcattaaatgataattatgcatgatttaggatttgcttttaactaaccaaaaaaagagagaaaaaaaaccttgaatatttctccacatttggtgtgtcagtcagtatcagtacgtataaaatagtgatacttcacatgttaagtgaatttaagaaacttatcatcatgtcagacagcatatatttcctatcatatctgtcatatactaatgctttcaagttctcactcgctgcttttgagttcaactcattccaatcatgatcatgttaggaatatggtgaattggagtgttcattcttctatctttatctcannngcattatttctaacatggtgaatatgattcattttccattattnnnattatagattgtacttctcacctaaggatcata

SEQ ID NO: 91318 - DNA, 741 bp, Glycine max
  Clone ID: PAT_MRT3847_53470C.1
gtctcggacctcgctcctttacgtgtcatgtgcctctctccttttcccccaaaatctgcttcagttcacgttcacgcttcgctacctgcgcctattcattgtctcttctcttcccctgctcaacgtttttcttctcccttcccccacccacctccactcttttcatttctattctcttcccaaacagaacgaccatcggaacaaacggcattttgtcaaacagttacgaggtgactgacaacaattaagattgcaattgcaccaaggggacaaaacaaaacaatgagcagcgttttgcaagggaaacgcaagcgccaggacttggcttcaaggctctcggcctcaatgaataatgaggagggtcgtgtctacaacatcattcgcgggaggaaggagatggggatatggcaaggggacatcaaacgagaagccaacatccccgatagtttgttgaagaaatccatcaagatgcttatcaccaagaaactcgtcaaggatgttgtgaacgtgcagaacaggtccaagaagttgttgatggcatcggatttcgaaccctccaatgagatcagtggtggagagtggtacaccgaatgcaaactcgacacagaatttattgacaagctgtctgaggcttgctttagtagtattcgtcgcctgaaggtcgcgacttgtgagggcatccttgagtggattaagaaggcgggtggtggagtcagtaaagggcagatggagcagattttg

SEQ ID NO: 91319 - DNA, 323 bp, Glycine max
  unsure (1)..(323): unsure at all n locations
  Clone ID: PAT_MRT3847_53471C.1
cgcangcacgcntacgtaagctcggaattcggctcgaggaaatatcgaaaganacagacagagcgacgtcggagaaagaaagaaaggaatgaatgaaaganggatngtangagnaaaatnagaanngnnntaannttaagaagagangancnnantatnagantcggntaccttaaagaancggagataggantntnngcctcnaaacccaaggggnttggnaggggtcttaatcgaaggcgtgnnaaaatccccttccngatttccccaacnnnaagannggnctcnaggccaangcccgganttctccgatatcgttnaac

SEQ ID NO: 91320 - DNA, 122 bp, Glycine max
  unsure (1)..(122): unsure at all n locations
  Clone ID: PAT_MRT3847_53472C.1
ctggatttgtaantccgtattntcactcatgngangtagatgtactcnnaatattngatgtgggttncncccgttnccaagcattgttgtggagaganttttatanttggcaatgtggcctg

SEQ ID NO: 91321 - DNA, 392 bp, Glycine max
  Clone ID: PAT_MRT3847_53473C.1
ggctcgagcgccaacatacgaagacggtctcacaggtgggcacatctgtttacggagctgcgaggtcacttgtctccgtttccaaagcctcccatggacgtgcgaatggcgctgctaggggtggttcatagagccgaaacatggctccattttacggacagagcggccatgtacatgatcccacttgatcagcatgatcatcatggagttaaggagcgcttgctcttcctggcggagcttacatgttccaagatcaggttgggccctcatctaagctggatcgcacattcatagacattaagcctgatgaaatgcagacaaggctgactcatgagattatatctccccacgtgcgggctgggtacaagcctgtggggattaaaggagggatt

SEQ ID NO: 91322 - DNA, 382 bp, Glycine max
  Clone ID: PAT_MRT3847_53474C.1
gcgtcagtcgggcctctatattttttccctatacaaaaaaaaaagctctgtgctttgtctaatcaattgagcttctagaataggaaagaataatatgtaggaaatcttacagtactcacaaaatttgttatttttgctgccctgagaatttggagagatatcttgttcggaatttattactaaatcagtaaagtctgaataccttcgattatggatctagtttcttgggtgtgtagagactatatcctctaattctaattcttgatcttcaaatctactcactaatttcagtaattttcaatgttcactacatgctgttaatgatttgaaaaagatgatttcattacattgttttatttagtgttttggattggctatgcat

SEQ ID NO: 91323 - DNA, 374 bp, Glycine max
  unsure (1)..(374): unsure at all n locations
  Clone ID: PAT_MRT3847_53475C.1
gctgcgcggaggagacatatgggggacggaccagcatgacagaagggtagggcgagttatagcaatctgaaaaacgccgtgatagcatcctaggtccctctacccttcatcctataccacctctcatttcaatgggacattaccactacttatttttgggcttctctggggacatggtgcgatgaccaccctatgctattggccaatgtgcggtgcttattaaatgtaaaactcctcttgtggctgataagcctaaaccaaatcggncgctgggtgattgacccgttttggcccgccgcgccggcgctgcgtcgccttttcttttccactcgccctgtggcggcggccccggggggggggccccggcgcgtccc

SEQ ID NO: 91324 - DNA, 929 bp, Glycine max
  unsure (1)..(929): unsure at all n locations
  Clone ID: PAT_MRT3847_53476C.1
aacgcagattctctctttcgccgccgttgcagtggcagtggcagtggcacgtcctctcacgagtcaccctttttctcaagggttactcgtgctatcatggagtttgttgcttgtgctaaccctgataataatgatgagatatctgattctgaaacacaacccaataagtggatgagaaagaagtctatggtgtgggactacttcacagtggaaactgttggagctggatgtaccagggcctactgtaaacagtgcaaaaaatcattttcttatataactgactcaaaattaactggcacaagccatctgaaaagacacatttctttgggaatctgtcgtgtgcttcgggagaaaaaccaacaaagatcatatcctaaaactggtggttctctagatactgccaatccactcaagaaagggccaagagcaacacctgggtttgctggtaatggtatctcattttatcaggagcattgcaaccatgatgtcgctaaaatgataatcttacatgattatccacttcatattgtgaaacaacagggtttcattgattttgtgtggatgcttcaaccccagttcaatccattttgtctaaattctgttgaagcggattgtgttgctatgcacctcagaaaaaagtgaaatctgttgaatgttattaatgggattcatggccaagtgagcctttggatttgtggacttccaaccaggcaatgggctatgtttttgttcaaggacacttcattgatagtgatcagaaattacatcatcctattctcaatgttgntacagtaccatttnccattctgacaactctttaaatcaaactttagtgacctgcctatctgattgccatttggagggttggctgtttacccttgcgcttgataatttttttcagtgaggctgtgatgggaaatctgagaggc

SEQ ID NO: 91325 - DNA, 447 bp, Glycine max
  Clone ID: PAT_MRT3847_53477C.1
ctattatctttatcttcatctttactttttacgtacaagcactctttgagatctcgtttcaaaatttcaaccaaggctttccctctcttttaattaatattatagtgaagattggttttgtcattttaattcttacaagtttttattataagggtcctaattaatttagtcctaacattcatctgatttttttactcttgtgacagaaagttgtgctaagtgtggaactacatgatgacaaaattaagaaaaaagccatgaaggtagtctccaatctttcaggtatgaattttgatttcaatctctttttggtttcttagaacaaagaaattttgttttatatagtattcaagattgaatgatttggggggtgataaatgattattgcaggggttgaatcagtctcagtggatatgaaagagcaaaaattgaccttaattggagaca

SEQ ID NO: 91326 - DNA, 849 bp, Glycine max
  Clone ID: PAT_MRT3847_53478C.1
cactgatagcttctcatatagctggttaccaaattgcaaaccccttgcaaatgacctcaaggagcctctaagagaatccacttacaattcctgtgaaggcaccaccaattatccattaatggaagaatggcaaaacttcaattttgatatttccatcacacagtcccctgctgttctttctcatgctgatgaactcttctctaatggccttatcaaaccactatttgctggcccttccacattagagtcttgcgataccaccacaaattccacacaatccaagcctatttcttccttttcttcaagaattgtttctccaagaactgtgcaaattcatcatggtttcctcacaaagtggaaaacttctacttgtagaaccttgagaaacctttctaggtatgtcaaccaactatgccagaaagttggaagctcaaggaaaagtactaaagttgatgatattgataaagaagagtggctagttaatagcagctggagcagttcacagcaaccgtctccaaaatcaagcactgtcaatcctgttggtgctttgcttgatcatgagaactcaatctatgaagcagtcctccactgcaaaagatcaatagaaagatgatccctcctcaaataaaaagaagaaaattgtagagctatttgaaatgggtggtagctgtttaagcatggcaactggttctttgcatcatttctctcttgttcttgaaagttatttttatttctttgcttaaacaagaagaggtgctttggcagataccaactgtggggtttataagaaatgttggattggatcctactgtttcatggttttgtatagatatgagttatagcacaaac

SEQ ID NO: 91327 - DNA, 103 bp, Glycine max
  Clone ID: PAT_MRT3847_53479C.1
ggatgagcaagtggccgctgtgctgtctacacaggggagtaagcgcgaggtagtgtgatggggcgttacgcctgcggattcggtccttgtggtgcctttggct

SEQ ID NO: 91328 - DNA, 380 bp, Glycine max
  Clone ID: PAT_MRT3847_5347C.1
gttcaaattgggggggcgaccggaaattgccggaacttgccctacaagcgcgcaaattttgcttaaacagagtcttgtaaaaggaggggaagaatctgactttaattgcctaccagaagaaaacgggcttccgatccaacttcctacaattcatcaacccggaagaataaaaggaagcgcggggggacccgagggggggggacacggaacattaatgggaacgcggtaaccgtccgatgaccggtagtaaaacctggcggaccaatgggaataagggattcctgagagcaagggggatggggggacaattttttaccacaagggaggccggagcttttaacggtaaaaccggcgaaagactaagagagatttaccccacg

SEQ ID NO: 91329 - DNA, 332 bp, Glycine max
  Clone ID: PAT_MRT3847_53480C.1
aaggccggaactaattttttaataacgtctttaaaaaagttaatctccaaagaaaagaattaaaaaaaaaaaagaatttcctaaaatctttacatgggattccgttttttcatttccagccccggggcgggggatgagagcaaaattttgttcaacccaggggtgggggctgaaagggcaatgaacctctgggggagttgctgtctcctttttctttcacccataatgggggaagcttttttagccctttttccaggttgggcctttaggggggggggggaagaaggtcctggttttttgggggagttataaaaagacaaaatgttttttat

SEQ ID NO: 91330 - DNA, 525 bp, Glycine max
  Clone ID: PAT_MRT3847_53481C.1
ctaaattcattgatcacatccatgaaatcaggttaaacaacaacttcaacgacacctgggtttggagagctgaatctactgggattatctcaactaaatctgcataccaagttattaaatctgagctggatgatgaaggtcagcacctgggattcaagaaactttgggagatcaaagtccctcctaaagccctatcttttgtttggaggttattatgggatagacttcccacgaaggacaatttgatcaagaggcaaattcaggttgaagatgatctatgtcccttctgtcatagtcaatctgaaaccgcatcccacttgtttttcacttgtggcaaaattatgcctttgtggtgggaattcctatcttgggtaaaggaagacaaggtgtttcactgcaggccaatggataattttctccagcattattcctcagcagcttcaaaggtttctaacacaagaaggacaatgtggtggatagcagttacaaattcaatttggaggctcaggaatgatattattttcc

SEQ ID NO: 91331 - DNA, 438 bp, Glycine max
  unsure (1)..(438): unsure at all n locations
  Clone ID: PAT_MRT3847_53482C.1
aaaattaataaaaaaaattataaaaaaaaaaaaaaaaaaaaaaaaaaaaaaaaaaaaaaaaaaaaaaaaagggggggaaaagaaaaaaaaaaaaaaaaaaataaaaaatttaaaaaaagaaaggaaaaaaaaatggaggaaaaaaagaaaaaaaaaaaaaaagaaagaaaaaaaaaaaaaaaaaaaaaaaaaaagaaaaaactgaaaaaaactagaaaaagctttccatctgctgcttttggtttgcagaattccgtgatgacctgggagggtggggggtggggtgggcctctangctggttgtttcgctttttgcccgcgttggtgcgggggggcgccccggggggggggcgggtgcctgcgccttcgttaaggtggtgcctcctagggtgcaatcttgtggccttgtcctggcccgggcgcccttttgttggccct

SEQ ID NO: 91332 - DNA, 101 bp, Glycine max
  Clone ID: PAT_MRT3847_53483C.1
cctcctcacctgatgtaatttccaaggaggctgccactaaacgatatggggtagtgtaagatcacatgaacatgttcacttgcaagcactggctgcaggct

SEQ ID NO: 91333 - DNA, 272 bp, Glycine max
  Clone ID: PAT_MRT3847_53484C.1
ctagtaacggcgcgccagtctgctggaattcgcccttccgagcggccgaccggccaggtacgcgtgcaggcattcatactcaatgtctagggggtatcacaactggtaatctagccaactaaaaacgggcacaactcaaagctaatgatggagctcatggtattgctcaaacatgagagcctgaacaagagtcatatggacagcatctgtccttatcctatcatctgtgtcggctgccatatgtcctgtaccatatcatccgttgctgcctg

SEQ ID NO: 91334 - DNA, 529 bp, Glycine max
  Clone ID: PAT_MRT3847_53485C.1
cgtacgtctcgcaattaatttcgagaaaggatacaagtacctttgtttacatttaacatatgagagtttctaagaataaacaaatatcaaatgaataaaaaagagatgacagtttctaaatgatgaaattgaatatagaatcagaaaaaaaggagtgcgtattgccactctaatgagtctgttaccagttttatgtgattagattttatcaaaaaattcaaatatatcactttgattaacaaaaaaggaagggcattttgattcaaaaaaatcaaaaataataagagtagcaatagacactggagtggcaataaatattacgcaggaagaaaaatataactgaacctaacaatataaaattatcagattttagctacacaaatgaaagggctataatactgtatagactttgtcgttttacatagagagatcagtgaaattttggaaaatagtgagggacagaaaatgcttcatgtaatggcagaagatagctctgcattgaatttggaaaatacaaatgtcactttct

SEQ ID NO: 91335 - DNA, 419 bp, Glycine max
  Clone ID: PAT_MRT3847_53486C.1
ggcgccagaaattgtaatatttttagcagggagggattattaagattaaccggcctttcttcatacgcgaccgaccacctaccattcattaaaaaaaaaaaagaggcagccatgatcttttcacccccctcataagtagaaaacacttgttcttcttgatgggcgggacaagaccacctttttctaaggaggttggttgaacacaaaacaccacagtggaggaaaaccaccacagaaataatacatcagttgttagctgcaccacaatagttgatcattattcctaattaagggcggcttttgctggaagaatgttgttccaacaccacatttgttagtacagcggttgctggagcagcttggtgcacattatgagccatcattgttcgcgggcgcccccctttttgcaccctcaaaaa

SEQ ID NO: 91336 - DNA, 258 bp, Glycine max
  Clone ID: PAT_MRT3847_53487C.1
cccgtttgagtcccagaactgcctatacatagtcgcggcagagaccccaaccaagatggccgttatcaagtatctggggtaaaatgagactaaccctcacatcttacacacatacacactatcccaatccaactctcgaaccgtctcacctgcctactaactccactaactcacattaattccctttcgatcactatcccatgtccatcaatgccacctgtcgtacaatcttcattaatgaatcaggcaacacacctg

SEQ ID NO: 91337 - DNA, 2169 bp, Glycine max
  Clone ID: PAT_MRT3847_53488C.1
ttccggtccggattcccgggtcgacccacgcgtccgcaagtttcgaaattgaaaagggtgggagagatacaaagtgttcattgatttaaacccttgctagaacccttggtaaagcaagcaaataagggctcaatgaacaacaactggctttcgttccctctttctcctactcattcttccttaccagctcatgatcttcaagcaactcaatatcatcaattttcccttgggttagtgaacgagaacatggataaccctttccaaaatcatgattggaatctgattaacacccatagtagcaacgaaattccaaaagtggctgattttctaggagtgagcaagtctgaaaatcagtcagaccttgcagccttaaacgaaattcattcaaatgattcagattatctgttcacaaacaacagtctggtgcctatgcaaaaccctgtgttggacacacctagcaatgagtatcaagaaaatgctaatagtaatttgcaatcattgacattatccatgggaagtggtaaggattcaacatgtgaaaccagtggtgaaaatagcacaaacactactactactactactgttgaagttgcacctagaagaacattggatacattcgggcagagaacatccatatatcgtggagtaacgcgacatagatggactggaaggtatgaagctcatctttgggataatagctgtagaagggaagggcaatcaagaaaaggacgccaagtttatttgggtggatatgataaagaagaaaaagcagctaggtcttatgatttagctgcactgaagtactgggggacatccaccactaccaactttccaattagtaactatgagaaggaattggatgaaatgaaacacatgacgcgacaagaatttgttgctgccattagaaggaaaagcagtggtttctccaggggtgcatcaatgtatcgtggagttacaaggcatcaccaacacggaagatggcaagcaagaattggcagagttgcaggaaacaaagatctttacttgggaactttcagtactgaagaagaggctgctgaagcatacgacatagctgcgataaagttcagaggtctcaacgctgtcacaaactttgacatgagccgctacgacgtgaaagccatccttgaaagcaacactctcccaataggaggaggagctgcaaagcgtctgaaagaagctcaagctctagaatcttcgagaaagcgcgaagagatgattgcactaggatcatccacattccaatatggaaccacaagctctaattctaggctacatgcttaccctctaatgcagcaccaccaccagtttgaacaacctcaacctctgctaactttgcaaaaccatgatatcagttctcacttctctcaccagcaagaccctttgcatcagggttacatccaaacgcagcttcagttgcaccagcagcagagtggtggttcttcttcttatagctttcagaataataatataaataatgctcagttctataatggttataatcttcagaaccaccctgcattgcttcagggaatgattaacatggggtcttcatcttcttcatctgtgttggagaataataatagtaccaataataatgttggtgggtttgtgggaagtgggtttggtatggcttctaatgcaacgtcggggaacacggtggggacggcggaggagctagggctggtgaaggtggactatgacatgccgactggtggttacggtggatggtcggcggcggcggcggcggagtccatgcagacgtcgaatagtggggtgttcacaatgtggaatgactgagggaagggaagctagttctagtaatgtatggcacaacgtacgagttagttaccatacaattttgttatgcttttttctttttttttgtttttgggttttttaatattctcgcaattggaaaagaaaataggtgctgattttctgtgactaaggaagtgagcaaagaccatatatctatttatatttatgtctcttgttatggcgaatgtttgtgagacttttgcttgatttaggtaaactaatcaaacactgacttatatgtactaatgttttatttgtttagcattggattacctcccagttctatcactttttaataaaataaaaaaaactatatgagaaattatatat

SEQ ID NO: 91338 - DNA, 649 bp, Glycine max
  unsure (1)..(649): unsure at all n locations
  Clone ID: PAT_MRT3847_53489C.1
antgtactgcatcaagaacatggctacagcttacagttgaaaattactgctacaaaatgattgtaagggttatttgattaatatatgctgcaacaggaggactgtagcaggtgtgttgatccacccaagacctcaacaaagcattcaaggcgtataggagtccatggcaatcattaatcaatcagcactggctttaattttctcaacctcattctgaagcactttgattctttgaatagaacatatggcaggcgtcgtttccaaaacttcgatgaataatctcaataggttgcctttgttttcaggcacattaaccaggttttgagtgctgcaactatattagctaccaatgaaatctctagcaaaaaaacaaagaaaaggaaaaaggaaaatcattgaactattattcaagtcttgtgtatggatttatgcatacacaaaagtggactcgacattagatccaactcaaccttaaaatgtgtatgcttactacttatatcttgcttaacctacccattcacatccagtgtagnactnnnactccnnnnntccannntcttacttatgtgtgagnnnctccatctcatatatacccccatcatgtgggnnnnggacntnccatctcatnnnctcccattatgtggggacc

SEQ ID NO: 91339 - DNA, 554 bp, Glycine max
  Clone ID: PAT_MRT3847_5348C.1
cgctagagatttggcggacccaagtatgaataaagacaagatactctacctatgcgcataggaaaacggttatcaactgagctttcataaagacaaataggctgccataaacatatgggatggttagccttgtcatggatctaatgggcttcgctatattgatagaaacaccattccccgtcctaacctaaatgcatctactcttgctaacccttttgatatgaactcttttgcaaaaaaagctctgctggactgtgcctcatggcatccgacaattgggggcgacaaaatcatatgaaatctgctgaatattcagtaatgaacataaccttggaatatctgatgcttgacattccaccctattggtgtaactgatgaactcgttacggtagtagagcagatactgggacttgtgggtactctatatcacaccctatctggttgcatgaacctcatctatgaaacattttgtgtacagcatatatagagtcatgcgtgccccatctcactactaacatgcggagcattgtgctctttacctcagttaaactttg

SEQ ID NO: 91340 - DNA, 393 bp, Glycine max
  Clone ID: PAT_MRT3847_53490C.1
ttttacggctgcgagaagacgacagaagggcctactgctggagactcaaagacaaagacactcatcctcataggaagggcggaattattttttgtacccacgctatcttttttacgttactttcaaatattttattttcaaagagttattatcacgttctttagtattagttttaaatgagtatttttaattctaatttttgaatgtattaaatatttttccgtaaaattaattttagaaagtgatttataaaacatttcgaatagtgtttatagaattgatttatatatcaattttagaaataaattttaaaaaaggtttttaatgtattttgacattaaattattaaaaatgataaaaatagaatgttcgagcgccctaaaaaattttttt

SEQ ID NO: 91341 - DNA, 678 bp, Glycine max
  unsure (1)..(678): unsure at all n locations
  Clone ID: PAT_MRT3847_53491C.1
aaaaaagaaaacaaacacaataacttttgataacaataataatacataaacattcttttattttaaatatcttaccaacatcttctatttatttttttctctctttcttctcatgtcaaaaactctatcttgcctgatttattattctcgttgcaggtactgaagaagaggctgctgaagcatacgacatagctgcgataaagttcagaggtctcaacgctgtcacaaactttgacatgagccgctacgacgtgaaagccatccttgaaagcaacactctcccaataggaggaggagctgcaaagcgtctgaaagaagctcaagctctagaatcttcgagaaagcgcgaagagatgattgcactaggatcatccacattccaatatggaaccacaagctctaattctaggctacatgcttaccctctaatgcagcaccaccaccagtttgaacaacctcaacctctgctaactttgcaaaaccatgatatcagttctcacttctctcaccagcaagaccctttgcatcagggttacatccaaacgcagcttcagttgcaccagcagcagagtggtggttcttcttcttatagctntcagaataataatataaataatgctcagttctataatggntataatcttcagaaccaccctgcattgcttcagggaatgatta

SEQ ID NO: 91342 - DNA, 1033 bp, Glycine max
  unsure (1)..(1033): unsure at all n locations
  Clone ID: PAT_MRT3847_53492C.1
ccacgcgtccgtaaagttcagaggtctcaacgctgtcacaaactttgacatgagccgctacgacgtgaaagccattcttgaaagcaacactctcccaataggaggaggcgctgcaaagcgtctgaaagaagctcaagctctagaatcttcgagaaaacgcgaagagatgattgcactaggctcatcttccacgttccaatacggaacctcagcaagctcttctaggcttcacgcttaccctctaatgcagcaccaccaccagttcgagcaacctcaacctctgctaactcttcaaaaccacgacataagttcttctcacttctctcaccagcaagaccctttgcatcatcagggttacatccaaacgcagcttcagttgcaccagcagagtggcgcttcttcttatagctttcagaataatgctcagttctacaatggttaccttcagaaccaccctgcattgcttcagggaatgatgaacatggggtcttcttcttcttcctcatctgtgttggagaataataatagtaacaataataataataatgttggtgggtttgtgggaagtgggtttggtatggcttcgaatgcaacggcggngaacacggtggggacagcggaggagttagggctggtgaaggtggactatgacatgccggctggggggggggggtgctggtcggcggcggactccatgctttcgtcaaatggaagggtggggacaatctgggatgttttaggatgggaagctcgccctagtatgggacaggtccctcgcccaatttttgttaaccccatttttattttttttgtggtctggggggtttttttaatattcctccgcaaattggaaaaaagaaaaaataggtgctgattttctgtgagcctttgatcccaaaggaagtgagaaaagcccatatatctattatatatttatgtctctcttattaccccgaatgtttgtgaaccttttggttgaattaagtgttgattaattgattcatgctatgattagatgaattaattaagagct

SEQ ID NO: 91343 - DNA, 1873 bp, Glycine max
  Clone ID: PAT_MRT3847_53493C.1
ggtccggaattccccggtcgacccacgcgtccgcaagtttcgaaattgaaaagggtgggagagatacaaagtgttcattgatttaaacccttgctagaacccttggtaaacctatatctgttctttggccatctcttattttctttcccatctttgttttcccttgcaaaatattcatactctatagtttatatctatctgcttctttaatgtattaattagatacacaggtggtttttgattttgtgaaagggaaagcaagcacataagggctcaatgaacaacaactggctttcgttccctctttttcctactcattcttccttaccagctcatgatcttcaagcaactcaatatcatcaattttcccttgggttagtgaacgaaaacatggataaccctttccaaaatcatgattggaatctgattaacacccatagtagcaacgaaaatccaaaagtggctgattttctatgagtgagcaagtctgaaaatcagtcagacctccacgcgtccccccgcccccaaagttttggaagttaaaagggtgggagagatacaaagtgttcattgatttaaacccttgctagaaccctaattggtggtttttgatttggtgaaaggtaaagcaagcaaataagggctcaatgaacaacaactggctttcgttccctctttctcctactcattcttccttaccagctcatgatcttcaagcaactcaatatcatcaattttctcttgggttagtgaacgagaacatggaaaaccctttccaaaatcatgattggagtcttattaacactcatagtagcagcgaagttccaaaagttgctgattttcttggagtgagcaagtctgaaaatgagtcagaccttgctgccagcttgaacgaaattcagtcaaatgattcagattatctattcacaaacaacagtctggtgcctatgcaaaaccctgcggtggacacacctagcaatgagtatcaagaaaatgctaatagtagtttgcaatcattgacattgtccatgggaagtggtaaggattcaacatgcgaaaccagtggtgataatagcacaaacactactactactactactgttgaagctgcacctagaagaacattggatacattcgggcagagaacatccatatatcgtggagtaacgcgacatagatggactggaaggtatgaagctcacctttgggataatagctgtagaaagggaagggcaatcaagaaaaggacgcctacggaacctcagcaagctcttctaggcttcacgcttaccctctaatgcagcaccaccaccagttcgagcaacctcaacctctgctaactcttcaaaaccacgacataagttcttctcacttctctcaccagcaagaccctttgcatcatcagggttacatccaaacgcagcttcagttgcaccagcagagtggcgcttcttcttatagctttcagaataatgctcagttctacaatggttaccttcagaaccaccctgcattgcttcagggaatgatgaacatggggtcttcttcttcttcctcatctgtgttggagaataataatagtaacaataataataataatgttggtgggtttgtgggaagtgggtttggtatggcttcgaatgcaacggcggggaacacggtggggacagcggaggagttagggctggtgaaggtggactatgacatgccggctggaggttacggtggctggtcggcggcggactccatgcagacgtcaaatggtggggtgttcacaatgtggaatgattaaggaagggaagctagttctagtatgggacaacgtactagttagttgccatacaattttgttatgcatttttatttttttgtc

SEQ ID NO: 91344 - DNA, 276 bp, Glycine max
  Clone ID: PAT_MRT3847_53494C.1
acccccgtaattccctttggattccgggcataataaacatttacgggggaacacttaacattaaacaaaaacttttttgtttaccctctccaatttcacgttacaagtttttcacaagtgcttctaatccaactaagggaaaatgttttaatttcaaccaaaagccgaaaaaaaaaagacttttacaatatgcttgtaataggggcggggcacaaaaaagacttttttttttaaaagggggatgaaaaggtgtcaattatggttgtggggaggggg

SEQ ID NO: 91345 - DNA, 325 bp, Glycine max
  Clone ID: PAT_MRT3847_53495C.1
ctgactgccacatagttgctgcaatgctttaggttgatacttatcataccaatcccgaaaatgcataaaggaatgtttaagatgcgcctcacaaggcggatggccgattatacatggttactattccgactgccatttgacaaattgaaccagacatgaatccaaggctgaagtttacagagtaccactaccaatggtgattatgatcaaatactagatgcacaaatgcattaagtatatgattcatgcgctactcgtggcttgacacatagtgacagtacatctccattggtgcaatctggcatgcaaaaagacagagggttaa

SEQ ID NO: 91346 - DNA, 369 bp, Glycine max
  Clone ID: PAT_MRT3847_53496C.1
atccgctcagcacaggggaatcatacaaaacgctctctgtacaactattcaataaacaaaaaaacatcgaagacacgtaaaactaaaatggcgccgcttatattatataaattttgacacaatccttccccacaaagcctctcaaatagcaaactcattctctttccaaacatatctatttctatttctcatacctctatgccttacctatcttaactctacttctctcacatcctatttccccttatcaattctatcccattctcttttaaaccatctcaactactaactcattatactatcctacttaccctaacaaaactcaacattatacacattccatacttccacatttaactctaattaaac

SEQ ID NO: 91347 - DNA, 300 bp, Glycine max
  unsure (1)..(300): unsure at all n locations
  Clone ID: PAT_MRT3847_53497C.1
ggcctacagaaaattgaggaatctaataatcttgttgaagaagattatgttccagcaatttcaattgttggtagacctaatgttggcaaaagtagcattttgaatgcactggttggtgaggacagaacaatagtcagccccatcagtggcactacccgtgatgctattgatactgaatttactggaccagatggacaggaaaagaacagccattgcttcagctgggagtacaacagaggctttatcagtgaatcgagcatttcgtgctattcgtcgntctgatgttgttgctcttgtcat

SEQ ID NO: 91348 - DNA, 332 bp, Glycine max
  Clone ID: PAT_MRT3847_53498C.1
gacaccgctccaatacaagcctcaacaatggctctgaatcttggtatctgacctaactgataatgggctccatccacggcctccttagatagtgcatattctctgagatctccacttggttgttgtttcgctaacataaactttgctcgcaccatgtaaaccgctagctatactgtcgagtctcgtgaagaccgcgagtctaagtgctagacctagcgtggtatcttcggggccgacaattacagtgcaacctgtcactaacgtttacaatgtttcgttctagccaacacataaggctatcggcgatcataccgttcgcttctacatacaca

SEQ ID NO: 91349 - DNA, 2082 bp, Glycine max
  Clone ID: PAT_MRT3847_53499C.1
gtcctcttacagcagtagttctgggaacttttgcaaaaatatttcatccatcatcaatttctttggtgggagatatacctcaaggcctaccaaaattttctgttccaaaatcttttgagtatgcacagtccttaattccaactgctcttctcataactggtgtggctatattggaatcagtgggaattgcgaaggcattagcagcaaagaatgggtacgagttggattcaaatcaagagttgttcggtcttggtgtttccaatgttcttggttcatttttttcagcataccccacaacaggatccttttcaaggtcagctgtaaatcatgaaagtggtgcaaaatctggtgtatctgggattgtttcaggaattataatgacctgtgcacttttgtttctaacaccattatttgagtacatacctcagtgtacccttgctgccattgtgatctctgctgtgataggtctggtagattatgatgaggccatttttttgtggcgtgtagataagaaagattttcttctttggaccattactagcactacaacattgttccttggtattgagattggggtccttgttggggttggggtttcacttgcgtttgtcattcatgagtcagcaaatccacatattgctgttttgggtcgtttgccagggacaactgtttataggaatgttaaacagtatcctgaagcatatacatacattggaattgtaatctttcgtgttgatgctccaatttattttgcaaacacaagttacatcaagggacaggttgcgtgaatatgaagttgatgttgatcgttctaaaagacgtggacctgagggttgaaagaatttatttcgtgattctagagatggcacctgtgacatacatagattctagtgctgttcaggctttgaaagacttgtatcaggagtacaaattacgggacattcagattgcaatatccaatacaagtccagaaggtctgcttaccttgtctagatcggctctggttgagttgataggcaaagaatggtactttgtgagagtacatgatgctgttcaagtttgcttgcaacatgttcaaagcttgaaaggagcatctaacagtccacaagcaccattctcttcagtagagaacaaaccaagtttgtttgcacgattatcaaaagagagagtggagaagctttcaattaccgacttggagtctggtaatggcaggcctccactccccgaggagagagattccaaattggagccattgttgtctaaagatcattgaagtctactttgtatcataaggtaaaaagtgtatttagccattctttcagaaaaaataaaatgaataggttaaagtttaaccgggtgtaatcaagccaacgttaaaaaatagcttgtgtaatatttgattggccggttgttgtaaaattaaatgaatttttaagaatggttttattatgtaaatctcctgttagctgtgtatccctaatacgaaaatcttgttaagttttaagttcatttcaaaaatgctgttcaggctttgaaagacttgtatcaggagtacaaattacgggacattcagattgcaatatccaatccaagtccagaagttctgcttaccttgtctagatccggtctggtggagttgataggcaaagaatggtactttgtgagagtacatgatgctgttcaagtttgcttgcaacatgttcaaagcttgaaagggggatctaacagtccacaagcaccattctcttcattagaagacaaaccaagtttgtttgcccgattatcaaaagagagaggggagaagctttcaattaccgacttggagtctggtaatggcaggccaccactccccaaggagagagattcccaattggagccattgttgtctaaagatcattgaagtctagtttgtatagtaaaaaatgtatttagccattctttcaaataatgaataggttaaagttaaaccgtgtgtaatcaagacaatgttaaaaaataatttgtgtaatatttgattggccggttgttgtaaaattaaatgattttttaagaatggttttattatgtaaatcgtcccgaata

SEQ ID NO: 91350 - DNA, 487 bp, Glycine max
  Clone ID: PAT_MRT3847_5349C.1
aagtattgtggtttttttttttttttttgttgcaactttttcatgaggacaaaaaagaaaacggggcctaattttcacttaggggcggcattgattctaaaaaaagggggcagctataaaaaaaaaatagggtggttaagagcgaaggataaacaaaaaagaggggggacaaggaaaaaaaaaaaggggggagaaaaatcaaaaaggggggaaaaaaaaattaaaacggggggaaaaaaatccccaagggctctcaaaagggggaaaggaaaaaaaaagcagcctgggttataagatccaaatccccattattcaaaaaaaagggatgagagccggaaaaatccatagggcaagaaaacaaattttgcagccagaaggaaggggaggataacaaaacgcctggagcataacagaagctgggaatggggaacaaacaggagggccaacaaggggggagacactaaaagggggggggaccctcaaacag

SEQ ID NO: 91351 - DNA, 355 bp, Glycine max
  Clone ID: PAT_MRT3847_534C.1
tttttcttaacattaaaagtggaaaaacaacaaatttgtggtcctaactacataatgaatgaatgtgatgggaagaactcgcaactttcaagggtttgatttaatcatcagcatatacgggtggatcataaagacaacaaaaacataaggatgataactgacccactgcttaaaattataaccctgccgaacccaatccaatggcagttatttctccgaggtctcaatgattgatggctgttggcaacttgacacactgcatcatcttgatgagtcttaagctttactctgactcaccaggcactgtccatcttgaaggtgactgaaggctgaatccaccgtattcactagcagc

SEQ ID NO: 91352 - DNA, 1384 bp, Glycine max
  Clone ID: PAT_MRT3847_53500C.1
caaaagtagatctatagacagtaaaggggaaaatattggtgtgattaatggtcatgtgcttaattcaggatcttctggagataatgcagcacagcaggttgaaaacaacgagaatagtgttatcccctcttgtgagacttcattttacaaattggagatgattaagattcaagtgttttctgcacaagggcaacctactgcccttgaattagaagactacatgaatgcccaacctgatattattgcgcactctgcttccaaaatcatatctcgtttgaaagctgatggagaaaagaccttggaagcccttaagtctctgtgttggagatgcaagggtattcaagtagaggaggcacaacttatctgtctagactcccttgggtttgacgtaagagtttgttctggaactcagattcaaacactgagatttacattcaagaaaagggccacatccgagtacagtgctgagagacaactcaacgatatactatttccaagaattcacccaaagcagcaaaaaatgaagcaaacacatcaaaatgaatgctgaaatcgtctaaatgtcatcttacatgaattttgtattgcttgtatgcctttggccagtgattgtgtataaaagtgaaaggcaggggaaaagatcccatgcacatgtcaatcaggttatgaagttggaattgcatttaatcattattttagttagaagtaattttttccccagttgcttccttagtcttgactccggacttatctatgcttttgtatttatctttttttgttgattaatctaaaacctgctagtataactagaggcattagacatgaggaacagatgaatatgaagaccccaaatacaaactaatatattagtgggcctttaataatcccatgacttaattgggtttcaattcagtgacaccatgggacccgaagtgtgtagcatacggagttgaattggtttcaactttgaaaatggtgctcaactatactcggggaaattccatgatttgaagaccattcaaacatctgctatggtcaagctgttgtcaaggctcaacagaaaagcttcttaaacctaacgatcagagttaggttaaatacaagataaaggtggctttagatcgagatatcatcagtttaaatcttgaaggtagattgaagaccatggataatgaacaggttgtacaattgttagtgattatttcttggattagtgtggatggtttcaacattgtgatattcaggtgtcattattctgccgaggatggatattttcaaggagataatatgtagatggaattggtgccttttgaaatgcatcttgaacataactcttatttttgctctaaatttatgaacattttttataattaatttacgctta

SEQ ID NO: 91353 - DNA, 383 bp, Glycine max
  Clone ID: PAT_MRT3847_53501C.1
aaactaaattgggaaccacttaatataggtaggattaaattaagaaccacctaattgggaaccagctaagccatgggcctattgttatctatagaatctgcctttagaattattggaaacagcccccgccgggtttttttttaaatggggagaaaccacctaaacctggaccattggcacacttactgattgaccggattttccactggattcttataagggtggaaaaaaattccgtggaaacattggttccgggaacccccttaccattcattggaaacccttaagaattaaccttcttctttaaaggggtggtggcttaaaaagccttattttcacctggttcccagcctggaatggtaccaattttcttccaaagcggt

SEQ ID NO: 91354 - DNA, 291 bp, Glycine max
  Clone ID: PAT_MRT3847_53502C.1
ttcatcgtacgacggctgcgagaagacgacagaggggggagtgacggagaccgtgcgatccaacgtacactgcatgaattccaaaggattccgtagctaaggattcgatactgagtcagtccgagcctggagcgcctccaaatgacgaagtatcatgttggggggccacgcttgcaagaatctgaaggtgttggagacaaagaaggtgctaacaaatggagggagataccacatgcaccatgaatagaaactggatgccagtgtatattaataaaggaatgaatgtgaaac

SEQ ID NO: 91355 - DNA, 472 bp, Glycine max
  Clone ID: PAT_MRT3847_53503C.1
aggcgtacgcacacgcgtggggttttaatcatactgaaccactggcaaaagcagggcccatggtgattgctagagataatctaatagataacactggaaaaccctttgttgtactcaacagagatggtaacacggagtatacacttaaagaaatgactgcattgcatcaacgccatggacgagaggcttccataccgttaactcagagtgacagagccatcaaagatactgcgtgggtgtgatggaacaaagcacaagccaccatgataaatccgacgccaaaccaaagttgctaggcgctaacatagccagtgctggagataacctgcggaacccatatgtttcgtatcgaatcgaaccgaggcccacttacactgataaagaggggcttacaaaaactgctgcacagaaagagatagtatgcttggtcctgccaagattttaggatggacattgtacatcccatggacta

SEQ ID NO: 91356 - DNA, 486 bp, Glycine max
  Clone ID: PAT_MRT3847_53504C.1
agcaaaggtgccacaaaagttaaaagtagtgacgctgatcatgcaactagatgaagacctgaagggattaatgctaagttctataaagggagttgttatttctacctacactttttctatttacaccgcgcgtggggtaaaaaatactattaaagattgatctaactgtttcggcccaaaagaaaatattttgatgccagaaaagagaaatagtatataagtattgcttgtaggctagtagcctagtatttatttgaaatgcatcattgaatctggcttttgtcacggaggtttaataattagctgaaattgtgaagattttgggtttgtggggatttacttgtatgcatctaccatcattatcttactcccatggaaagcttttattcacatctactcatgaaaactcaatccaaagaagccatgggaattaaaattcaaaacaatttaagagactctgaaaagaaatgtgactcccgcgggata

SEQ ID NO: 91357 - DNA, 243 bp, Glycine max
  Clone ID: PAT_MRT3847_53505C.1
tcatgtccttactagatagcgagcgcgagtgtgtgtttttgtgtgataccttggtgcatacacacacatgatggtggaccaaaatggtcgtgtgaaggttgagccaaggcactcagcaggcgaaggcagaccacgctataaagtcccttcagattgggctctaagggatgcatatcatcactaagagttctttcaagcacggcatgcgtcattggatgcattaagtggaccgtcaagtaaaaa

SEQ ID NO: 91358 - DNA, 350 bp, Glycine max
  Clone ID: PAT_MRT3847_53507C.1
gggcacgctgagaagtgtgccaagagattgatgaagaaccagtatcgcgcaatccgccggcctccatggggaaagggggctgctaacattcgctacccatgatagggggtccgtgtttggcttgcaactttcagctctgctgaagaagctgcaagaccttaccatgcttaatcacggaggatccatggccagaaaccctatgtgaatctacctgatgagccttcttgcgctgtttccttaaaacctatgacggctattccatatgctcaaccaatgaataaatatctgtactctctgaagccgaagataaaccacatgttacattttgcagacattcttgagtgcttcta

SEQ ID NO: 91359 - DNA, 348 bp, Glycine max
  unsure (1)..(348): unsure at all n locations
  Clone ID: PAT_MRT3847_53508C.1
attcggaatactataacaataccattacgtttaacaaaattcaaatgtcatacaacgcgcatatgactaactgacatgtaccccacaaattaaaaggcatattgtgaattatactagaggtaaaaggaagcgaaaaactggtatgaaacagagaattgcactgaactatggaccttcgaatcttaaaaaaaaggagacaagaacaaaaagcgaagattgaagctttaagagattccgatgaatacataggatgaacctaattttcctcacaacattgcaacaaaatgatcatccatgnttctagagatcacactacaaacgaatagatacatcataacaagactgatt

SEQ ID NO: 91360 - DNA, 222 bp, Glycine max
  Clone ID: PAT_MRT3847_53509C.1
gtttctcgggggcggacgcgtggggatgcaagctccgtgttgttgggctaatgggacctattcctaggcacgacatgcatgcggagaaaccttttacactcacctaatttggagctgtgccacattctcaagaagacctcactggaacggcagcacaagcatgacgcctcgcgcctgtggccagatctgtacaacaaggataccactcaatacatggaggtt

SEQ ID NO: 91361 - DNA, 351 bp, Glycine max
  Clone ID: PAT_MRT3847_5350C.1
aaaaaaaaaataattaatatttttaaaaataagttttcaacaaaaaaatgggtcctttatgctgatcctggaaccacttaaaaaaataggcctattttttttaccccctcgtaaaaaaataagccttttttttttaacaaaatttattttcaaggattaatttctcactggaccattttttttttttgaaggaaaaatctcgcggggaaaatatcccctttttttttttttgaagccggggccccctgaatggggggctcccaataagggtcaccccattcatttctggacttttcattcatttcaacaaagtttttaaagccctggtaaagcatattttttttccatttt

SEQ ID NO: 91362 - DNA, 296 bp, Glycine max
  Clone ID: PAT_MRT3847_53510C.1
aggggttagaagaaaggttctaacggaaccaaaggcaacaaaggtgcccaaaagaagaagttaatccttccggctggttcaacaagggaagttggttacaataaatgttgggttcctttccgtactcctgtgtcctcctttctaagtaacttgtttttcggacaaaatttgaaatctccaacatcatctctcaactgttgttcccaaaactgggttcttgatataacgtggcaaacatgcttttaattatctgtgttttaaaatgttttgtttgtccgaacccctgattacaattt

SEQ ID NO: 91363 - DNA, 240 bp, Glycine max
  Clone ID: PAT_MRT3847_53511C.1
aatccagataagtgtgccttgcacttcacaagagtcaaattcatgttggttgacttaataggattctgttgaaaaattgattatttgcatcttgcctttccttgtttcctaaagtattcctatttaaattagtctaaactctaaaggacactctccacatgtggaaaacatcttaaaatactgtacaaattaatcatttcactagttctaactttgtacatcaatgtttttctctgcaca

SEQ ID NO: 91364 - DNA, 448 bp, Glycine max
  unsure (1)..(448): unsure at all n locations
  Clone ID: PAT_MRT3847_53512C.1
aaaaaagcaaaaaccccccccgccaaaaaagcaaggccagaacaaaggaacaacaccaaagggcgaagtcccaaaaaaaaaccacatgaaaaagttcccagggccacaggaatacgaccagaaacaacaccaatcccaccagaacccaaagaccacgggttattcggcatcatcatatgaacaagaaatacaaatccccgtattgaggggaaggagcagggttctttaaccggacgggttgctnggaaaaaaggtcccccccctttttattggcagcagcaagcccggcaccccctgcagcagcccctggagcagcagctctggcagcagcaaccaattcttaacgggacctcctcctccttgaagaagcaaccttctggagacgccctttcacaacaacagtagagggatcccccacaattacagcgccggtggccaaaacaggccc

SEQ ID NO: 91365 - DNA, 430 bp, Glycine max
  Clone ID: PAT_MRT3847_53513C.1
attaccaacatcggttatttatataatcgatgttggtaattttacgttaacatcgggttggtaaaaaccgatgctaacaataatactatcaacgtcggtacttttaacatcggttcaaaaaccgatgttaaaagtcataaataatcgatgtagaaaacatattttctaatattcttgatttgattctactggttcccatggtcaccccaatcatcgatccaagtcaagactcaagcaaccctcttcaccttcatcattcagatgggtctggcctcgttctcacatctcaaccccttgatcataagaattacataacctagagcagagcaatgaaggtagtgctctttgtcaaggacaaaatagcattcattgatgacacccttctgaagcctgacgaagacgctcctacctatgctgcttggacgggtgc

SEQ ID NO: 91366 - DNA, 445 bp, Glycine max
  Clone ID: PAT_MRT3847_53514C.1
ggaagcaaaaccccttgaaaaatatttttattcattcattcctggccacaaaggttacacagggggccagatctcaacaaaatcggtgatcttattttggggaagatcatttaacgagtttttatacataaaaagaccttttaaaacctaccttacccgcaaaaaaaaagattttttttagattaaattaacccccatattgccgctttttttaaaaagggatgaaagggcaagttgacaaccctattggttaggtttcttcatcacgaggaaggggaacatgagatcggtcaatgaaaaaaggctcattgatgttaccagcagggcccccaccaaggggaggcccaacccagtaaacccaatggtcgggccattttccagggaccaaggggggcccaaaagaccttggtgggtttataaaagcaggaaaagaagccccacctgg

SEQ ID NO: 91367 - DNA, 372 bp, Glycine max
  unsure (1)..(372): unsure at all n locations
  Clone ID: PAT_MRT3847_53515C.1
gtcttgttcttatctttcaaagtatggttggggttcccggaaaatcaaaagcgtgcatcaattgtcgcaagcgtcgatcgcagtgtgatatgaaacgaccctcgtgtggccaatgccaaagatctggtattacatgctccggctatcagaaagagttcatcttcctgaacagcactacgcaagaagcccangacggctccttgtcgctcgagaaggagagctactcagcgggaactagaacaaggaacccaacaactgcgggttccgccgcatcgagggcagccgctacccgtacaactncggtcgttctccacgcaactcttgagcgcagtgcctacgaaaataatgtcattgatgaatttgggcatcata

SEQ ID NO: 91368 - DNA, 315 bp, Glycine max
  Clone ID: PAT_MRT3847_53516C.1
tggggcagttcaattccaatatattggagtcccactgtgtgattccctaccgctcccttcaggacgcagatcttcgtcaagacgcgcaccggtaagaccatcacccttgaggtggaaagtcctgataccatcgacaacgtcaatgccaagatccatgacaatgaaggaatcgccccgggccaccaccgtctcaatttcgccggaaagcaccctgaggacggcagtacccttgctgacgacatcattcagaaagatagtactcttcacctcgtcgtcggtcaccgtggtggtatgcagatcatcgataagacactc

SEQ ID NO: 91369 - DNA, 353 bp, Glycine max
  Clone ID: PAT_MRT3847_53517C.1
ggaggtaatgaaggcccatcctaattgaaaaagaaaacctgtaatggaccaatatgggggacattttcacaaggcccacaagttaacaaaaattgcttcttaataaaaaaaaattttttcatacccttgacccccaattaccagggtcccccatacatatgggggggcggaaccaaaagggcaaaaggggttcccttcccaaaaaacccccattgttgggataactgagggccttaaaaaataaccttattttgccccccaaaaagaagggggcgaatcccaccccgtttcttttaaaaaaggggaaatttcctccacttgccctccaaccttttccttttaaatttttcaat

SEQ ID NO: 91370 - DNA, 104 bp, Glycine max
  Clone ID: PAT_MRT3847_53518C.1
accattgaattagttaatgctttacacaaattagggtataaacaatgtacataaccaaggaagccaaacggcgaaacaagaaaccggccgagaaccggggaaac

SEQ ID NO: 91371 - DNA, 261 bp, Glycine max
  Clone ID: PAT_MRT3847_53519C.1
ttctttcgtccgtagcatgcttgccagcagttcggctgccaaagttctttgtatcgtgaattgtgttttgccagtatagtcaccgcaccttccaatggttctgagtgtttgtttaccattgctattgttgctgacttttggtatctttagaatgtgaatttaattccaactcaaccccaaaaattaattcaatgggtgaaaattcctcacttatctaatacaaaaaaatcttcatctttcttataatttttacactctttc

SEQ ID NO: 91372 - DNA, 267 bp, Glycine max
  Clone ID: PAT_MRT3847_5351C.1
actttgttatccgctgggtcggtatgaagattggtctggaggattgtgaggactagttgtagtaccccatacacgccctgatggcctgaggcgtctagggcacagggagtagactgcaagacgtgcgccagcgcaccgccgagctaaggaactggttgggagcctgtgccggctaccaacactggtgcctgggcgggtactacacccactgatagaccaaggtgcaagagcaagtgcgatctgggagcttggatcacgttcgaaaac

SEQ ID NO: 91373 - DNA, 337 bp, Glycine max
  unsure (1)..(337): unsure at all n locations
  Clone ID: PAT_MRT3847_53520C.1
ggagagacaagcnagcaagccagcaggncgacnctagagganccccncggggaannccaannccacannnnncaagaaaaaggaggcaaaaaagggcanacaagaanaggaannannngnnnncnnannaggcccanccagaagccaaaggaaaagagaccggaannccccggggaannccaacnccacacnnncaagaaanaaggaggcaaaaacgggcaaanangaanaggaannannagnnnncnnannaggcccancccgaagccaaaggaaaagagaacggaannccncgggagaacccaannccacanncncaagagaaaaggaggcaaaa

SEQ ID NO: 91374 - DNA, 448 bp, Glycine max
  Clone ID: PAT_MRT3847_53521C.1
ctttgtatacaagataagttatgatcaatacctctcctctttgtgggagatactagaccagatgctggggaagtatctcccacaaagaggagaggtattgatcataactcattcatggtacattttcttatagactttatgatttttagaatttgtgggggaaaaaacttttcatataagaatgtggcctaaaacagtatgagttcaccaacaactcgttagtttgagtaaaactgggctcggttcccttaaataaacaaggtcttgggtttgaaccttgtaaatagaaaaaacgtggttgtgagagaagactccactaaaggtgaccgactaaatttcacggcgaatattaatcatcgtcaaacccggtggatactctgtatcaataatatggttaccaaaaacagtgcgttcactaatggatcttaaatattatttcattcatttg

SEQ ID NO: 91375 - DNA, 337 bp, Glycine max
  Clone ID: PAT_MRT3847_53522C.1
ggctcgaggaaacatgctaagactaaacaactttttcgcatttacgctatcaaccaccggaaaagggaagtttctgcaccgaaactaaacctcccgcattgaacatagcctatctatcaatatcaacagctctagcagtgatcaggatctgctcagaacctgaatgaaccctattgcaagacaatctacgacctgaatcttaattggcggcccaagcacaaaactaactaaatcctgaccacagtcatgaagcacagtcgtcatgctcattaggaccggataccaacttaacttgtcaatgggggagaacaaacttctcacgtggcacaaatacaaa

SEQ ID NO: 91376 - DNA, 2334 bp, Glycine max
  Clone ID: PAT_MRT3847_53523C.1
ggctcgagcggctcgagcaactcacatctaccgttcttctctctaaagacaaccataataaaacacaatatctcaattaaaaaacataatttcggttaagaaggtggaacgcatgagctaacaaccaaactaacaaataccgcaccaaacaaaaactaaaaaacgaaatcaaacggaatttaattactaattccaagtttccaacccttaaaataaattatttaaatcgcttagcgcaacaattcacagcttgtgcttttatgttgttttcctaacaaaaattaaataaatagaagcatcttctgttcttttatttcaccgccattcatttcattgacatatagggcttgcgttcttcttcttcttcctttctctgcttgcagttgcagaggtaggaggggggcggtgattgtgttgtgtgctttagaggatgaaagatttcaattcggatctattcgacccgggaacggtgatggactcttcctcctccgattactctcgcagtgcttcctcttccgacgccgatttcgggttcgctttcaatgacagtaatttctccgacaggatcctccgaatcgagatcatgggggaccccgtcgaggcccgacccgattccgacggttgcaccactatcgccgactgggctcgccaccgcaagaggaggcgcgaggatatcaagaaggataacgttgttgatcttactttattgcctgacgagcaaattttgaacgggaatcagcctgatatggatgattttgtaccctccgagaatcaagatgaagatgcggttgcaatggttgaagaacccccttcaggtgatgaggcggcaaatagcaatgattcaaattggaatatggattgctctgcagttgtgagagttaaaacactacacatcagttctcctatcctggctgctaaaagtcctttcttctataagcttttctcaaatgggatgaaggagtctgagcagaggcatgtcaccctcagaattaatgcctctgaagaggtttctctcatggagctactgaattttatgtatagtaataccttgagcattacttcaccacctgctttattggatgtgttgatggctgctgacaaattcgaagttgcttcctgtatgagatactgtagccgattattgcggaatatacctatgacacctgagtctgcattgctttaccttgagcttccttctagtgtcttaatggctgatgcagttcaaccattgactgatgcagcaaagcagtatcttgccagtcgatacaaagatataacaaatttcacatatgaccaggttccaggaagaggttatgggcttgcctctagctggaatagaagcaatattgtctagtgatgaactccaggttgcatcagaggatgctgtatatgactttgtgttgaagtgggttcgaacacagtacccgaaactagaagagagaagagaagtcctgggtacacgacttgcccgtttaattcgcttcccttacatgacctgtcgaaaacttaagaaggtcttaacctgcaatgactttgaccatgatgttgcatccaagcttgtactcgaagccctctttttcaaggctgaggctccacaccgccagcggatactagctgctgagtctgcttccttcaatcgactttttgtggagcgggcatacaagtatcgccctgttaaggtggtggaatttgaacttccccggcagcagtgtgtggtttacttggatctgaagcgggaggaatgtgccaatttgttcccatctggccgagtatattcgcaggcattccatttaggcggacaagggtttttcttatcagcacattgcaacatggaccaacagagctctttccattgctttggcctgtttttaggaatgcaggaaaagggctcagttagctttgccgttgactatgaatttgctgcgaggtcaaggccaacagaggaatttgttagcaagtacaaaggcaattatgtattcactgggggaaaggccgttgggtatagaaacttgtttgcaattccatggacaacgttcatggctgaagatagtctttactttatcaatggtgtactccaccttagagctgagctcaccatcagacactgactgggatttatatgtgtaaaccttttcttctagttggtagctctgactttttttgggcaatgtgtctcattttccgataacctgctgtaatcttaactaatattcaggcaatgtgcactaggtggttagtgctggatgtgagatcaaatgaattttcgggaccttactttttctttcacttacatttacaagagtttgagtagctacaggaaggacgtttctcgtt

SEQ ID NO: 91377 - DNA, 333 bp, Glycine max
  Clone ID: PAT_MRT3847_53524C.1
acaaaggggaaaacaacaacaaaacaaacccaataaaaagggttcctttggaaccttcctaatggtgcctcctggaacccctaacctcaagcctcaaaggcctgccaattaataaaaaccaatttaaaaaccaacaattttcaaacctccaatgttcaagccaacaatgttcaaaccaacggtttaaaaaccaaaaccaacggtttaaaaaccgaaaccaacggtttaaaaaccaacatattagaagccaacattcaagaaaccaacttaaggaaagtatcctccaattgaagacaacaaccaagcctaaagccagccatgaagtccaataac

SEQ ID NO: 91378 - DNA, 476 bp, Glycine max
  Clone ID: PAT_MRT3847_53525C.1
gcaacaacaatgctttactcaaattagttgcccctttgtgagctcaccctattttactcaatcgcttaaattcgttgtgaattgctttgagtcatttcggattagttggtacgcaagcatcgattcggaaggaataaaacccaagctctatcaaagtttatatgtaatattggcgttggtaattttaagattgttaatatgtttatctagaacgcttttaatgtgcacgcatgattgttgtatatttacaaagcatggctattatactgtttctttagcatcaagtactgttttacaatcactgcataacagacttcaaaaaatcttactgctaaatatttttaagaaattaacacataacatcctcacagacattgagacattttgcaacggtcctctccccaaaatcatgaatatcctattcttataaaacattttaaaacaccaagcacattatacattctcaaagatcgcat

SEQ ID NO: 91379 - DNA, 342 bp, Glycine max
  Clone ID: PAT_MRT3847_53526C.1
ggccatgcaatggacctcccactacaagcagcagctactttcatgcaacccacctagtttttgcagctcaagtctatctcaggccatatctaaggcttgtggttctaacctgctggagttaataacgtcacatgctcccttcaggctgatcttacggacttggctcactagtgagctgatgctaccaaaattgcaagctatgcccttgccacctctgctctcattgtttccggatcaagtgctgaatgagcaccaaagcggctaacctttgacgaaatgcacagcaagacctacttgtaagcgtaagggtcaggaactgcataccagtgtgcaacaattgat

SEQ ID NO: 91380 - DNA, 439 bp, Glycine max
  Clone ID: PAT_MRT3847_53527C.1
gcaggtagcaaatcatcttgaccgtatggtatcaacccttggaagaaatcctctgaaggttttggtgcaagtaaattcgagtggagaagaatgtaagttcagcttaaaattataatgagttactctaactccttgttatactttttggatcttatgaggtttcctcactccctttgggtgtgaggaaaattcttgcttgaggcattagaaatccttcttttgtacattgtaacttgtaaatttgtgttactgacttgtcttcatgtactgagacttcttaatttgacatcagggaattgttattcatatttagttctttaatgctttgcatggaattgcatcaattaaaatatatatttcccccttatcccagggttattgtactacattcaaacttctatttattcattttagataatgacaccagtatggtacttaa

SEQ ID NO: 91381 - DNA, 266 bp, Glycine max
  unsure (1)..(266): unsure at all n locations
  Clone ID: PAT_MRT3847_53528C.1
ttgcgccgacttttgaagaagacgacagaagggggggctgggagctcatatctagganagggggggatttttctgccccgaacactaacaagagcaaaaagctagatcgaaacaacagctacatcaggcgattgaacagaaccaaacaccacaacgcctactccaaacacctataccgggccaatagcgtactcgcactcatgctcccctgtcgccacacccaacactgacctcccctcgccccagactttacctcccaccgcaaa

SEQ ID NO: 91382 - DNA, 616 bp, Glycine max
  Clone ID: PAT_MRT3847_53529C.1
tacatttatttgttttacatatctccttgttgtgacctgcatagttcacatgaattttaaagttacaaatatatagatgtcattgtaatcttagtccaaacaagaccatactgaaacaacagattcattccatatgggaaaggatctgtttagtaatttaccagacgaaattctaggtcgcatagtttcatttctaccaaatgaatcatcgctagaaaccagccttctttctacaaggtggagggacctgtggaatgaagctcttgtcaaacatggaactcaagaggatatcataggtgttgttgctggttttatcacacgttttgaggagtttgatccattgaagcatcctagaaagcttcaatttcactttgctgaagacagtgtagtctcagcaaccgttgcaaataataacaagcttatgcttcacttttccccttggaaagaagagattcaaatggggtatgagttggagttcaagcaaactaagcaacacatagccacctaccagtcttttccttccactttctcagtcaaaaccctctatttgaaatcggtgagttgtttcacaagtaatattgctgcctccatcgtttcaaatttggagcatcttcag

SEQ ID NO: 91383 - DNA, 347 bp, Glycine max
  Clone ID: PAT_MRT3847_5352C.1
tcgtttttttttttttctttatcacaggttggggggccttataaacggttacttaagctttcccccctagaaccaagaaccctccaatatcaccctacacctaggcgagcgacaccttaagggaaagaaaaacactctttgtgctggccacagacatcgagaaacacctgcacaaccacactcatgagatatgcggaacactctcccatttgatataggactcacgcgtcagacataaactctttctggctcattctcagctctctgccttaattccaagtacaaagctggtgaaaacttggattagtgcacccaccctcctatcaggtacagagacctccgggtag

SEQ ID NO: 91384 - DNA, 196 bp, Glycine max
  Clone ID: PAT_MRT3847_53530C.1
ggaatgaaaaaagccgtcgaggattgaaaaaaatcctgagtttgtacatgataacatggcattaccctatttgccaatgcttttataactacgtacatatctttccctaccccttatcgatttttgaatttaaacgtgagtctcggtcgctggcacccattttttttttaccgctcttccttatatctctagcttt

SEQ ID NO: 91385 - DNA, 310 bp, Glycine max
  unsure (1)..(310): unsure at all n locations
  Clone ID: PAT_MRT3847_53531C.1
nttncctttntangtnactnttttngttttatgtttntnttttcttcntatgttattttntttatnttatcntnacttcnntctanncnctntnctanctncnntnncnancttttncattantcnctnnttntncnntacacatncnctnnnacnnnanntttntccnctctntcacnctncaatnnacanntnntcntacnnaatncnnnnncntnnntnantanacccattanncnannnntacccnacttnnaacccntncncacnncanccancaaccnnnncncanatntttttnnnananccc

SEQ ID NO: 91386 - DNA, 456 bp, Glycine max
  Clone ID: PAT_MRT3847_53532C.1
gaacttatttcctccaattgatataatttttattaaatccaactcaaccattgatattatgttcatatgtgttaaaatatcagttattgatttttttcatcaacatttacgattattactttatcctttctcattttaagggagacaaatccaacttttatgttgtacgcagatcacctgtctctctttcatgtccctttttctgtttctctaattagaaggttattttggtaatgacatgttttttaattggaggaacatggaggggatcaaaaactgagaaaggtgatttcttttctattggaacaggaactacaaccacgttttagtattttgcaaaacaacgttagatttctgtcttctacaatgcacatacactcaggcttcaccacatttgaattagctttagattttgatttcatctcagttgatttgccagggttatctaacttaacc

SEQ ID NO: 91387 - DNA, 261 bp, Glycine max
  Clone ID: PAT_MRT3847_53533C.1
tcaacatgtgaacaattagccatcagaacgctaggaagtgtcgcaaggccattttgctggggtttttccaaaggctccacgccgctgagtaggatcatcaacatcagaactcaagtcacacgttggtgagcccgacattgtactatacagataccatttggtttcggcccttgaagcggcctcagtgcgcgctcctgttccgaccatgatgcatagtgtatacgtgtcttgttttctcacttcggtaagagtgtcgctttc

SEQ ID NO: 91388 - DNA, 1424 bp, Glycine max
  Clone ID: PAT_MRT3847_53534C.1
acctcgagtttgttttttcttgttctcggcgcacgcgtcatgtgttgaggaaaatatggcaggtaaactctggaatccagagttttgcacagttaacactgaattagcaatcaacaaaatgtgcttgcacaagccccaaaagaaaaaataaataaaagtaaaaaaacaaaaagaataacaataaacaactaaagaaataaaaaaagaaaattagagtagcaaaagagaaaacctaaaacacaagggcctctaaaaaactaaaaaagtgtatttaactattcttgtcggaagcggctggagctgtccaataattcttcacagcaaataaaagtttctccctttcaagaggcccatcttcatggtccacaatttgactgtcccaatccatgccattgactatactttttacctttaccaatatatcaacatcatctctgatgatcacacttccttcaggtctaagaatcctatccatctctaacaaaatgtcttccaattcacatctgtcattgtagaggctgaacagtgaatcagcatgaattaagtcataagttctaggataagtagacattgcttcacaccaattatggtatgttccaatcaaccccctttcataaattgcaccaagtgtgtcaaccttagcctggacaggaaccacattcatcacccaaacaggtaaatctacaagtgcagcagcaaatccacccaagtaagcattcatgtctaaaaggttgcggtatctcccagcttttcctagttgattattagccttcttataatatgctacccttttcttccacagttcattatcttttgagaaagtttcgggattcacaccctttatggtcccccgagaaatccttggtggggtggcttttagtctttcaggccattttttcaatgccccgcctgcagtttcttctttgctggacacttcaggcataggactcaaacatgtttgcatatctgtgtaccaggccttgtcagggttattttgtgccttgcagaaaggtctgttttgagtgagcttacgattggatttgcaatccaaatggtttttggctttctgccaaatggctatatcatccttctccactagcttgttccagcacaggcttttagctgcattctcaattttggtctgctctttattcaaatcctcctttgttctttcccatcctttccaatgtttcttccaccggattggtggcccagatagaatccaatacccaccagggcgtagaattcgatcaatttcattcagataaagcccatcatattcagcccaaggaatgaggcatcgagagcagtgtgccatgtcaaaagctctagaagggaaaggcaacctctttgatgctaggaccccaattaatgcaggaactcctctttcaagagcaaactgaacttgtgcttcgtgggtgtcc

SEQ ID NO: 91389 - DNA, 580 bp, Glycine max
  unsure (1)..(580): unsure at all n locations
  Clone ID: PAT_MRT3847_53535C.1
ctcncgtgatggccgcccttattaccttttttttttttttaatcggcaaacaaattatattattatgaaaacgattccatgttgttactaatttttccagaggctaaatgaaaattagggtcatcataaaatcaatggtacaagctcgcccctgaacccaaattgagcattggtcatgagaataaccaaacgatgagtctaaattcttcaaccatgtccacatatgaaagatagctttttgcatgatcttgttgttatcgaagaaacctcccctgaagatagtgttgtttcttgccttccatagagaccacaccacacctacccaaacacaattccacttttcacagacatttttcttctctttaatcaacacgcgttgcaaataatgttccttaatagtgccaggaaacacgctttgcaacccacaccacttgtagtaggtatgccatatttctagtgcaggtttgcaccaaaataaagtgtgaaacaatgattcttcttcctcccttctctcattcaaaccattccctccttcacaccaagttccacttccgctcatccccacaccactcaccaacat

SEQ ID NO: 91390 - DNA, 389 bp, Glycine max
  unsure (1)..(389): unsure at all n locations
  Clone ID: PAT_MRT3847_53536C.1
gcacgagaaagaattgcctagaccatctgaatagcttttaatggactgtcctgtcacaataacatgtaatttttcgtattctaaaaaaaaaaaaaaaaaaaaaaaaaaaaaaaaaaaaaaaaaaaaaaaaaaaaaaaaaaaaaaaaaaaaaaaaaaaaaaaaaaaaaaaaaaaaanctngggggggggccgggccccaatttccccttttagggatttttttacccccccctcatgggccgtgttttaaaaccgtgggaatgggaaaaccctggggttacccaaattaattcccttggcaccaattccccttttccccggtggggttataagaaaaaaggccccccccattcccctttccaaaaattggcccaccttaatgggaaatgg

SEQ ID NO: 91391 - DNA, 451 bp, Glycine max
  Clone ID: PAT_MRT3847_53537C.1
ccaaaattaaacctctctctaatctcgttattcccttttatctttttcagccattaatccttagcaaattaaaccaccaaattaaacttcaacaacacccccgatctgaataaggagctagccccatcccatcttatatttcatatttgtcaatttggtcatggacaccaacactagtacattattcacaaatgtgaacagcacttggaatcttgaaaagatggaaacaaatgaacaacaacaacaacatgatgaccatagtattattctccaagttcaagaccctatgggttctgggatttggcccatcaacaactaccagaacctttttcaaatgcatcaaacacccaacacaacatcctcattcacggtcatagtaccaccctactcctcatagggttccttggagacatactaggtgttcatcacaacctacaacaagatgaatagc

SEQ ID NO: 91392 - DNA, 447 bp, Glycine max
  unsure (1)..(447): unsure at all n locations
  Clone ID: PAT_MRT3847_53538C.1
nnnnntnntttttttttttttttttttttttttttttttttttttttttttttgtttgttttttttggaaggcagcaaaaatgtttttcacgttaaatttgggagtaaaaggatttccttccccataaaaaaaaaattttttgaaggcctcccaattggggttttccaaagatgaaataagcggcccaactaacccccaaaaggggattaaaatgttcgaatccaagcccccctttaaaactcacttttgcccatccccaaggggagggcccttttttgtaaaatcgatcacttcctccaccttgatggcctttgcctcgttttcccccttttaatgggtggcctctccatccctgggcttttgcctttgtaaacttttttcctggggggcccctttccattcgttaacccacttgtcccacttttttttaaacatcctgggctttt

SEQ ID NO: 91393 - DNA, 369 bp, Glycine max
  unsure (1)..(369): unsure at all n locations
  Clone ID: PAT_MRT3847_53539C.1
cggaacactctgaaatgtaaggatttagtttgagaggagagacctattgtgggtggttttgacaagctgctagacaatactgctgatgagaataaagattctaacatggaggaagttcaagctcttgtttaaaagctttatgccctggaaattgattcttatgtgtctgattctagagatggggttggtgaagtgcttcatcctgattctgaattcagagatgtnnnnnggtaaattgggatactgatgcatcagaagttcatcctcccactgaggctagtagcaatggtattggtagtctttcatctgtacaaaatgggatggctgagaaaaggagcaggtttagtatggatgacagctcttcaacat

SEQ ID NO: 91394 - DNA, 1120 bp, Glycine max
  Clone ID: PAT_MRT3847_5353C.1
gttcgcattgccacgccgttacgttagagccttcggaaatttcaggcctcgaagtaaaactccctcctcttgtctaattgaggaaattaaaatggcagcctcttcattgaaccacaaattccataaccatgctcgttctaatagcttgccctctaagccacaccctctcatcctacaatgcaatgaacgcttatctagactaggggcctatgataccatctcttcttcattgctaaggcaaaatcttactaaccttctagatttgcatgggtgcattgaaaagttggttcaactacccttaactcaacaagcacttgttcaggaatgccaagagaaatgggtggatgatctcttggatggatctctaaggctccttgatgcatgtacggcaaccaaagatgccttacttcacaccaaggagtgcacccgtgagcttcaatcaactataagaagaagaagaggaggtgaagtggaactcacactagaggttaagaaattcttgacctcaaggaaggtggtgcgaaaggccatattcaaagccctggagaatctgaagggtaatgcaaataaaggaaaccttgccatcactaattacaaagactaccaaaccatggcattggtaaacttgttaaaagaagctgaagtgatcactttttccacgtttgagtcattgctgaatttcttttctgggtcaacacaagcaaaacgaattagcagctgggctttggtttcaaagctgatgcacaacaaaagggtaggctacgcacaaggagcagatgagaatgagtttgcaaaagtggatgctgcatttcagttatttgcctttaacatgtcaaccaagtcaaatgatgatatcagtgatttgctaaagaagctagagaacttggggacttgcataccagatcttgaagaaggacttgagtccctgtttaggcgtttgattaaaatcagagttgcacttctcaatatccttaatcactagttgaagaatctaaactagagggatcaaatttttgtaatggcatagatattattgtcgtgggtacaattgtagatactaatgtacttgttatgttcatgatttgataaacatgccactcaatatattgttcatatatta

SEQ ID NO: 91395 - DNA, 133 bp, Glycine max
  Clone ID: PAT_MRT3847_53540C.1
ctcactcttacgaccttaacacattcttaatactaactctcatccattatcatggaaagggtttactaccatatgaccttgcacttagtatgctactttccattacacaatatattatactgctcgactaaac

SEQ ID NO: 91396 - DNA, 292 bp, Glycine max
  unsure (1)..(292): unsure at all n locations
  Clone ID: PAT_MRT3847_53541C.1
cattttattttttttttcanccacactcaacctggcgatatgtcacagttcaaagtttgcataattcattcgaccctgagtaagaagtaaagggtattgagtctcgccaagtctcataaagttgtggcagcaccgcgggacaaatctttaccttcgtccagtggggaagaacaccacatgaagtgtaacggggcccatatttttatctatatattccgacatgtctggatcggggtctaaactataccatttcaattaaattcccaaacccgaatttggcccccttgggtat

SEQ ID NO: 91397 - DNA, 590 bp, Glycine max
  Clone ID: PAT_MRT3847_53542C.1
tgagaatattaatttttcttgtatgatattaagaagtccaatttaatagattaagtctagtgtgtgagtattataaatcttttgtctttaattcttatccataaaaaataatattccttgtatatttgtcttatagatgttttattttgaaaaaaggaaattaaatacttacatttactaaacaaaagaaaaaaccaaagaagagtcaaaaaaaaccataaaaaaaaatggaaaatatacaaaaaaagtgcgcatctacaaaaggaactcattcttgcaccaaattgacatgaaggaagcggggcgcccattttgggggataaattttattatccggcctgctcaattatgaatgctttataatgaagcccctattgactatccactcccccagctttaaaaccaactggctggaaaaacccttggttttcccactttaaggacttacaaggcaaaccccacttcggcttttgcgcttatttagaaaaagacacccccccttatatccctttcccaacagaataccccaccgttaatggtgaaggggaccccccccttaatgagccccttaaaccctggggcgggggggt

SEQ ID NO: 91398 - DNA, 644 bp, Glycine max
  unsure (1)..(644): unsure at all n locations
  Clone ID: PAT_MRT3847_53543C.1
tatttttttcaaccaaaaggttcttaatttattatatttataaatggcagaaacggaggggacataaaagttatttacaagagaggatgttcctccatattaacatcacccgaatccaaaacaggaattctaatcatcatgtttggatcctaacaatttcagaaaaaaaatataaacattttcaaaaaaaattgtaccagatgattctaaataagaaatatctggaaagaaagcaaaattaaacccataaccataaccattgcatggggctttttccactttcaggaacatagcttttgccgaattcatgatctccaggaaccacacacacacgtgccccacaaaacaaccttgccgaagcgcttcagaatacgacggcgtttcaacgccctctgattcaagcattcagttgatcgcaataaccgttgaatatcaatattcaattgtttgaaggttcaaaattcaggaatgcgtgaatgcggataatccatttcagtccactccggttatggttgacgctgagactcgctccgccagaatccagttcctgcaaaccgggcccacatctccttctccaatccctcttcctcttccttctcgcacttccccttnctctcgtcctcccactccttcttcataaactc

SEQ ID NO: 91399 - DNA, 250 bp, Glycine max
  Clone ID: PAT_MRT3847_53544C.1
acgggcccggcaggctgacaacagtcggggtctcaggggattcggcaggtcttggacttgctcaggttgtctgtgctccacgctctgtcgtcatctggtgtttaatggagctgtcacaatgcatcagcttcctgtaggtaccagtctgtctcaggaggccagtgatacacagtatgctcgtaggatccgggagattagtgggagacttgttggttttgcctaagtgggacgaggctcccagatcccatgt

SEQ ID NO: 91400 - DNA, 455 bp, Glycine max
  Clone ID: PAT_MRT3847_53545C.1
cccgattcacccaagtaacctgtcatttgttcttcagcaacccgaatccagaaaagacaaggacactgctggcgcatgttagcaccatagctgacctgccacgaccaatacgtgttatcgtgcgccgcctctctctctctctcgcgcgttctctcttccatgaagaaccatttcttccatgggaaccaaatcgctgaaacggagacctcgtgagtcgcagaaccctcccatggccgccgtggcccctccgcggcgcaagcctcgatcatacgccaaggcctccgtagttctctccgttcttctcgttgtctccgtcatcgctctcttggtcctttcgtcgaacaagttgcgtgcgttccaacgcggggtttcctatgagacgatcactgtcggcaacgttttccctcacgacccttaagccttcacccagggccttggttatgatagaaatgaca

SEQ ID NO: 91401 - DNA, 180 bp, Glycine max
  Clone ID: PAT_MRT3847_53546C.1
caccaatgaactctcccatgcatgacttgggataagtcgtaaaagccatgcaggatagggtttataaagagtcgctgttccctgtccctccttatacaagactcccactcaaggggaacgctaaccagaagcgttaccttagcttcgcgccccaactccgtgcagcaaacctgccgctgg

SEQ ID NO: 91402 - DNA, 431 bp, Glycine max
  Clone ID: PAT_MRT3847_53547C.1
ggttttctctgctccttcgattttctctctttcacacttaccatcatccatatgcactttttgaattagtcatactccctccaaagctttgacttttgcctacaaccctttctgggtccttccctttccgctttattcgcagctcccactttcgcaatttcgcgttttgatccgatctggtgctcaattttccgaagctgcttcttctatcgttgaaagctccgaaaagggtatgttttctgcctcttacctcggctctagggttaactttgatgctgttggtgggattgatttctatttgggataaaaggaattgagactcgaattaggaattttggaatttgcttggcttcaggatgcttagatcacagctcaggattggtttgttcaattagtgtattagaaattgttgaaattcaacgggtttttta

SEQ ID NO: 91403 - DNA, 1555 bp, Glycine max
  Clone ID: PAT_MRT3847_53548C.1
tgttccgccaccaccgactcatactccttcccaattttcgtacaatacaaacactttctctcggatttcgtttcatggaatcgccgcattcatagcacaactcttcaaaatgtattccttcaaagacaaagttacacagaaactctcccatctctttcccaactcctcctcctcctcgccccaggatagtccatattcgcaagaggataaacctttgtcttcatatttatcttacattatcccttccatcagctttgatggatcgaagtcaaacaagaatcaacatgaacttaaaccaattcaatcggcttcctctggatataattatgagaattttgaatatcaggatgttccatcggataattatgttgactgtactaacatggatttgttgaaagatgataatgataatattaatgaagatcctacctctagaaggagcagtagtagttctgaggtttttgaagaagcaaatgagcagcaaacgccaaatacttcaaagaagtctcgactcaatcttactgatgactctacttttatatctcctgaattgtatgaatttttggaaatatgcctccctaatatagtgaaaggacgccaatgggtcttactttatagtacgttaaaacatggagtttcacttcgtacacttattcgcaagagtgctgagctttcttgtcctggtttgctgattgcgggagatatgcaaggtgctgtgtttggtgggctgctagactgtcccttgaaacctacagcaaagcgaaaatatcaaggaacaaaccaaacttttgtctttacaactgtatatggtcaaccaaggctgtttctacctactggtgtcaaccggtactactacatgtgtttgaatgacctacttgcacttggtggtgggggtaattatgctttatgcttagaagaagatttgttatccggaactagtgggccttctgacacatttggaaacaaatgtctagctcatagtccagagtttgagttgaagaatgttgagttgtggggttttgcacatccttccccttttcatggctaagatgcttttgtttggaagtccaaaagaagcgtctctttatttttcttctactctttggatgtagtttagtggttgatcaatttgatgttccgttactgttagacatgtcccaaattcttgtagtatatttatgcttgaaattccattttctagaggttggggtttgtgaaggccaaatggttgtgtagtagaatgaggtacggaatccactcactcaactaccaagaaaataaagcactaattaggctattttacatgcaatatttggtttcccatggcatgaaccaaagaccaggttcaggtatatacaacatgagaagtttgtaccacaactctagctacaaatataacattggtcttacaattatgcctgagaagctaaaattagaggcacgtcatttggtggatggtgtaaagcaatgttactaccctcccgcaatgtattcaaaatggatgtggttgtttattagagggaacttggctgggtgcatgacttaattaacatat

SEQ ID NO: 91404 - DNA, 2667 bp, Glycine max
  Clone ID: PAT_MRT3847_53549C.1
aattcggctcgagcacgaatatcttacactacaaagtacaaacacgttacacccctaaatctttctctatctacacgccaaaaattcaactatatatatggctgaagatgtttgtccagtgcaacttgaggataggaccagaggccagagcactaaagttggtcaagttcttcaacttgggtagaagcctcttttgccttttgataaaatacccctttggggaagattgattcaaaagtctaagatatggggcagatgtagacaactgaaaatcaaacaactcctcctcctcctcctcttcttcttcttttctctcttagagcctccgctccttccgtctctccccacaccagaaatcccaaatgaacccaaaacagctcctcctcctcttcttttctctctttctcacaatcactttctcgttgaacgaaagatttgaagcctgcgatgccaagacatgtgggaacgggcagaacataagctacccattctacatccaaggcaagcaaaaacccttttgcgggcagccaggcttcgagctaacgtgcagccacaacggtttcccaattctgactctcatgtacaccccatacacaatccaccaaattttctacgacaaccaatctctccgagtgtccaatcccgtcttttcacaaccaaacctttcttcctgttctgccccgactcagaacctcacggtcggaaggtacagattccgagtcgctccgaaccagagggaactgttcgtgctgtacggctgcgactcagcggcgcttcagaaaacggtgccggagcggaggatctggtgttctgcggcgggaaacgaaacgacgtcggttgtggggttggataagggggatcgggatttggtttcggcgcgggagagttgtaagggtggtgctgtgaatgcgacggtggatgatttgaaaggaggggttagagaggcgctgcagagagggtttttgttgctttggaatgcgactagctgcagcgagtgcaagagtagtggagggaggtgcggtttcgacatcgaccctcgtgcacgcgcccacgcgtccgcccacgcgtccgacgaggccggcaaaatcttatcttagcaatagctacccctatcacaacaatactctattaggcaaaaacaccaaatgggagaggaaaaagagcagcctaagaatgaaaccgagaagaagcccgaggaggccgccgcagcccccaagaaagacgacggacccatccctgtcgtttacaaactcgacttgcattgcgagggatgcgtcaagaagatcaaacgcacatgtcgccacttccaaggtgtggaaaccgttaaggcagatctatcgtcgaacaaagtgactgttaccggcaaattggatgccgagaagctgcgagataagatcgccgagagaaccaagaagaaggttgacatcatctcagctccgcccaaaaaagaagccgccgccacggaaaatccaccggagaagaaggttgaagagaagaaacctgaagagaaaaaaccagaagaaaaacctaaagagagtatggtggttttgaagatcaaactgcactgtgacggttgcattgcgaaaattcgaagaatcattatgaggttcaaaggtgtacaatcggtgagccttgacggaagcaaggacttggtgacagtgaagggaacaatggacgtgaaggagatggtgtcgtacctgaacgagaagctgaagcgaaacgtggaagtggtgcctcctccgaagaaagacgacgataagaaagagaaagaaggtgacggtggcgaaaagaaagagaaagagaaagacggtgccggtgagaagaaagagaaagacgttgctgcagcggcggaggttattaacaaaatggaatatatgcaccagatggcacctccgtcgttctggtacgacggaggacactttccaggtcaaacaaattacgctatggaggttcacccaggatatggtgctagtgctaataatcattacgtggagccagggtacgtgaaccagggttatcctctgcagccacctctaccgtactacatgcacccgcacgcacctccgccacagatgttcagcgatgagaaccccaatgcttgttccatcatgtgataatcagtgattaattttcgttttcggtgtactcttacacacggacggaatacgggatacggaatatgcacgcacgttgtaatttgtaaataaaaaaactggaaaaaaaaatcgacctgcgtgtaaaaaatgaggggtggataatatatcaatattccgtgttattgaaaattaatatagagaaattttatgatatggtagaattttgatataatataatgttttagagaatagagatagaggatggccggctggctggagaatcctgtccagaactcacatcacatgagttgttatttgttttgtttatttttttaatatcagaataaatggttactattgtttcaatgaatgtttcgggactggttctgaattgccgaggcattatgtgtgaaaagtgattggtttggttacttttttgtctcatttgagatttttttttctttctcgtttctgtttttgcttttggcaattttcatatgtggattgttaacctaacaattctgttattgtttttctttttcttttttcaaatatagttcattacgcgttg

SEQ ID NO: 91405 - DNA, 191 bp, Glycine max
  Clone ID: PAT_MRT3847_5354C.1
aagggataacccaacatttcaaaacatcttgcaaatactatcataaacccaaccaataaaatacactatcctacaactactattgcaccactccagacaaaaagtcacccagcacactccatgttataattttcttaaacaagccagaaactattaacctacgagaaccccctatcggcaaacacacgatt

SEQ ID NO: 91406 - DNA, 264 bp, Glycine max
  Clone ID: PAT_MRT3847_53550C.1
atcacaaccttgtttcattcatggaatttgtggacccaatagtatatgcagtcatgaacaagtaattggtagaaagtgttcgtgtcttgaagggtatagttggattgatagccaagattggactttaggttgcaagccgaatttccaacctacttgtgaccacaagacagaatatcgctttgtaccctattatgaagtggatttctatggatacgactatgggtcatctttttcaaattacacttataaacaatgtgagaaatt

SEQ ID NO: 91407 - DNA, 2699 bp, Glycine max
  Clone ID: PAT_MRT3847_53551C.1
tgcacacgcacgcggcgaacaacgcttgatcaagaaaaaaccttcaatcgccgattaactgcaatgcaccactcatcatcaactcatcatccatggctttctccgcttcaattcgccctacctcttctcactctcagttgttttgctctgttaggttcaataggaggcaccatagcagtagccgaataggtttctcgtcgaacggcggaagaagatgtcgtcggttacggaacagtgttaggtcggtgttgaacgacaaccggcctagcgcaagcgtgaacgacgattacggagcggcggagtctgctagggttttgttcgagagactgttcacggagaaccggataaccggagatgaaccggatcttcggattcttgaatcggatctcgaagcggcgctggcggcgctgaagatgaaggaggatcacttgatggaagcggagaggacggtgttgttggagaatagtaagttgaagctcacgaaggaggagctggagcggcaacttccattccatcatcttctacccacaccaaaaatcctaaatgaacccaagacaactcctcctcttcttcttcttgagcccacaatcactttctccttagacgaaagattcgaagccttcccaagacatggaatggaacataagctacccttacagcaaaaaacccttttggcggcttagctaacgcgacaacgcaattctgactcttcaaattaaaccagcgcgatcttatcttagctaccccatcacaacaaccaccgaacactctctcggaaatcgaggcgcgcaaaatcttatcttagctaccccatcacaacaaccacgatactatttctcatactctattaggcaaaaacaccaccaaatgggagaggaaaaggagcagcctaagaatgacaccgagaaaaagcccgaggaggtagcccccaagaaagacgacggacccatccctgtcgtttacaaactcgacttgcattgcgagggatgcgtcaagaagatcaaacgcacctgtcgccacttcgaaggtgtggaaaccgttaaggcggatctatcgtcgaacaaggtgactgttaccggtaaaatggacgccgagaagctgcgagataagattgccgagagaacaaagaagaaggttgatatcatatcagctccgccgaaaaaagaagccgccgttgcggaaaaaccgccggagaaagaaccgcagaagacaagaacgcctgaagagaaaaaaccagaagaaaaacctaaagagagtagagcagcgtaagtgaagatcaaactgcactagcgcagaggaggcagccgcagcaaacatcaaaagatgcattattcaagtcctgtgggtgtacaaagttggacttgcattgcgagggatgcgtcaagaagatcaaacgcacatgtcgccacttccaaggtgtggaaaccgttaaggcagatctatcgtcgaacaaaagtggtgcctcctccgaagaaagacgacgataagaaagagaaagaaggcggcggcggcggcggcggcggcgagaagaaagaaggcggtggtgagaagaaagagaaagaaggcgacggcgagaagaaagagaaagacggtgcggcggcagcggctgcggaggttattaacaaaatggagtatatgcaccggatggcacctccttcgttctggtacgacggaggacactttcccggtcaaacaagttacgctatggaggttcatccagggtatggtgctagtgctaataatcattacgtggagccagggtacgtgaaccagggttatcctctgcagccacctctaccgtactacatgcacccgcacgctcctcctccgcagatgttcagcgatgaaaaccccaatgcatgttcaatcatgtgatgatcggtgattaattttcggtgtacacttacacacgtacgggatacggatacggaatacgcatggtgtaatttgtaaataaaaaaaaattgacgtgcgtgtaaaaattgaggggtggataatattccgtgttattaaaatttaattaatatagagagtttttataatatggtaggattttgatataataatatatcatatgtgtaggttgttgttttagagaatagagatagagaatggccggctggctggagaatcctgtccagaactcacatcacatgagctgttctttgttttgtttatttttcagaataaatggtttactattatttcaatgaaatttgttgatcttattcatgtgataatcagtgattaattttcgttttcggtgtactcttacacacggacggaatacgggatacggaatatgcacgcacgttgtaatttgtaaataaaaaaactggaaaaaaaaatcgacctgcgtgtaaaaaatgaggggtggataatatatcaatattccgtgttattgaaaattaatatagagaaattttatgatatggtagaattttgatataatataatgttttagagaatagagatagaggatggccggctggctggagaatcctgtccagaactcacatcacatgagttgttatttgttttgtttatttttttaatatcagaataaatggttactattgtttcaatgaaaaaaaaaaaaatcgcgcggctttgcctctctaacgattgcactatgatttgcgatgatgctactgtggttggattggtgccacacgttttcttctttggctgcatgattg

SEQ ID NO: 91408 - DNA, 1327 bp, Glycine max
  Clone ID: PAT_MRT3847_53552C.1
gatgatgcatgtgtggaaaccgttaaggcggatctatcgtcgaacaaggtgactgttaccggtaaaatggacgccgagaagctgcgagataagattgccgagagaacaaagaagaaggttgatatcatatcagctccgccgaaaaaagaagccgccgttgcggaaaaaccgccggagaagaaggcagaagacaagaagcctgaggagaaaaaaccagaagaaaaacctaaagagagtacggtggttttgaagatcaaactacactgtgacggttgcattgcgaaaattcgaagaatcattcttaggttcaaaggtgagagagttgacctaattcatttttaattaaacatttgattattttaatataagtaattaattaattaaacatttgatgagggtgatggtggtggttgtgtgcaggtgttcaattggtgagcctcgacggaagcaaggacttggtgacggtgaagggaacgatggacgtgaaggagatgttgccgtacctgaacgagaagctgaagcgaaacgtggaagtggtgcctcctccgaagaaagacgacgataagaaagagaaagaaggcggcggcggcggcggcggcggcgagaagaaagaaggcggtggtgagaagaaagagaaagaaggcgacggcgagaagaaagagaaagacggtgcggcggcagcggctgcggaggttattaacaaaatggagtatatgcaccggatggcacctccttcgttctggtacgacggaggacactttcccggtcaaacaagttacgctatggaggttcatccagggtatggtgctagtgctaataatcattacgtggagccagggtacgtgaaccagggttatcctctgcagccacctctaccgtactacatgcacccgcacgctcctcctccgcagatgttcagcgatgaaaaccccaatgcatgttcaatcatgtgatgatcggtgattaattttcggtgtacacttacacacgtacgggatacggatacggaatacgcatggtgtaatttgtaaataaaaaaaaattgacgtgcgtgtaaaaattgaggggtggataatattccgtgttattaaaatttaattaatatagagagtttttataatatggtaggattttgatataataatatatcatatgtgtaggttgttgttttagagaatagagatagagaatggccggctggctggagaatcctgtccagaactcacatcacatgagctgttctttgttttgattatttttcagaataaatggtttactattatttcaatgaaatctgatgatcttattaaaaaaaaaaacacccctg

SEQ ID NO: 91409 - DNA, 1198 bp, Glycine max
  unsure (1)..(1198): unsure at all n locations
  Clone ID: PAT_MRT3847_53553C.1
gactcttcaaattaaaccagcaaaatcttatcttagctgccccatcacaacaaccacgatactatttctcatactctattaggcaaaaacaccaccaaatgggagaggttagttttagtttcatcatcatgtatattcgtcattcattcattcctttttcagtagtatattcagattcttgcaattccctttaacacttatcatcacgcgtttctaattaaaactcgtgtcgtttatggcaggaaaaggagcagcctaagaatgacaccgagaaaaagcccgaggaggtagcccccaagaaagacgacggacccatccctgtcgtttacaaactcgacttgcattgcgagggatgcgtcaaaaagatgatgtaggtgtggaaaccgttaaggcagatctatcgtcgaacaaagtgactgttactggcaaattggatgccgagaagctgcgagataagatcgccgagagaaccaagaagaaggttgacatcatctcagctccgcccaaaaaagaagccgccgccacggaaaatccaccggagaagaaggttgaagagaagaaacctgaagagaaaaaaccagaagaaaaacctaaagaggtaattaattagtaattaatcttcattttcccctaatagaacgaatttattaggcataatttcactaacggattttattttaatttatttattttttcttctctacagagtatggtggttttgaagatcaaactgcactgtgacggttgcattgcgaaaattcgaagaatcattatgaggttcaaaggtgagagagttgacctaaatcattaattcacacctaattcattttttttaatgaaacatttgattattctaatttaagtaattaattaaatatctgatgcaggtgtacaatccgtgagccttgacggaagcaaggacttggtgacagtgaagggaacaatggacgtgaaggagatggtgtcgtacctgaacgagaagctgaagcgaaacgtggaagtggtgcctcctccgaagaaagacgacgataagaaagagaaagaaggtgacggtggcgaaaagaaagagaaagagaaagncggtggcggtgagaagaaagagaaagacgttgctgcagcggcggaggttattaacaaaatggaatatatgcaccagatggcacctccgtcgttttggtacgaaagaggaccccttcca

SEQ ID NO: 91410 - DNA, 158 bp, Glycine max
  unsure (1)..(158): unsure at all n locations
  Clone ID: PAT_MRT3847_53554C.1
gggattgttaacnantgaaaangccaancacaatacntgatcacggangttgcacggtcagcnctttgcagttgacngcatnccaagtatgnatattctncaancatgttgtaaagactancntatncagcngagttggangaataagccactccatc

SEQ ID NO: 91411 - DNA, 296 bp, Glycine max
  Clone ID: PAT_MRT3847_53555C.1
tcccttcccactgctcttcctctcctttgtgcgtcgcgcctcgccgccgccgctctcgatctgcccctagcaacagagattagaaacgactgctgttggagaacatgccaagtagataattgctaaaagttagtatagcagaaggcagggtcgctggatgtgtggccaaagcgactttttgaaggaggaaaagggagttttcaattagtatgttactttcatctaattacatacacatgggttacttttttaaaataataataataatatgatcaaaacaatccccccacccccca

SEQ ID NO: 91412 - DNA, 364 bp, Glycine max
  Clone ID: PAT_MRT3847_53556C.1
gaaaacttcacggtttttctgtaccaagattaaagacaaagtgctggggttactcttctgtccttttcaactactgatgatgcaacaaaacgatcacctatgaggtgtaaaaaaattagctttttgaatgaaaccaattgtcaatatcagactgattttcctgatattgctaaattcttagtggttacttacatcactgatgcaaaaacatatctgcactccgctcctataatggctaaaagtgaaagtggcagcaacgttggattgcatgactctgaaactgtttctatgtaaatggatataaatgtgattgcacaacctcaaaattcatatatagaacggcacacagacggtgcatttcata

SEQ ID NO: 91413 - DNA, 233 bp, Glycine max
  Clone ID: PAT_MRT3847_53557C.1
aaattaaatcagatgatataaaattgggcggggtaaaaccttaagggggcgtaaaaatcctcaccctattattggcgccccccagcggtgggcgtttattgagcaaaattttttaaccgggaagcatttttaagtttcaaggatggggggccaatttgaacccaggatttggttaccagttagtaagaactaaaacttccctccccaagagaaataaccttctctcacaaagg

SEQ ID NO: 91414 - DNA, 249 bp, Glycine max
  Clone ID: PAT_MRT3847_53558C.1
ctcgagccgaatcggctcgagccgatcgagatcccttgctggatgtatggctaacccatctcctgttccacacgcttctgcttctgctggacccatgggtttggcagcatctaatactgcagctattttaaagcggacgagaacccctcctaccaataacccagctatggactatcgaactgctgattctgatcatgtattgaagagaacaagacctttatgattataagatgaagtcagtcctctacc

SEQ ID NO: 91415 - DNA, 304 bp, Glycine max
  unsure (1)..(304): unsure at all n locations
  Clone ID: PAT_MRT3847_53559C.1
cgagcaaattccaatccttcaattcaataatttctcttaaaagnagccttctctgctgaaccctgaggtgaccttcacccttncaatccacccaattgtaatgcctaataaccggcgcgcctccacctgaacatcatgctcctgctcatacctcagcatcaacatgcactccgaagtaagcttgccggcgaacatcaaggacgaggcccgccggcgccccgggggggataacgacttcacggtgagagacgtgcccttgaacgccgggttagactcggcggaaacctactcgctcgaggaaatc

SEQ ID NO: 91416 - DNA, 1615 bp, Glycine max
  unsure (1)..(1615): unsure at all n locations
  Clone ID: PAT_MRT3847_5355C.1
gccacctgaatgctttgtaaaggatgtgacaaaatgtgccaaagcctccacactacagctagctgtgttctatggtgcactttacactctagcagggggaactggaggaaccaagcccaacatctccaccaattgaagaaggatagcttgtgtaacttctctttagggtgaaaatcatcaaattgatcagctcctatggtggcgttcctatcatcacttctcaaatctcgaaccctctcgttcgtgccgatcactaggtcacacttcgaaaatggcgggtagaggcaaaaccctcggtgccagcgacagcgcggtcgtatagcagcgccgtttacctcgccgctgtctcgaatatctcgcagccgaggttttggagttggctggaaacgctgcgagagacaataagaagactcgaattgtgccgcgccacattcaattggcggtgaggaacgccgaagaattgagcaagcttcttggtgacgtcgccatcgctaacggtggcgttatgcccaacattcacaatcttctccttcccaagaaggccggtggctcatccaagggcgctgctgctgacgatcactcttaaatagggattcgcttttctagattcgtctagttatccagtatagattatcttttggcctctctggttgggagtttcttttttagttttgataattatgctctgtagaggtagttaggttttcattactgatgtgagcagaggaatgcatcactttcagcaccaatagatgtgatgacactgggacgaggaacacgtttgtggtgnctgtctcncttgcagtcctccaggctggtggaagtacactacttccctcaaagccattcccatcgttactanagtcatcaattgcagaaaaaagtttatccgatgaaccatccttaagggattcaatttggattgggtgccctattattgacttcccatctaacttactagtgatagaaacaatggggacaggtgctttccgatagcttgcttgaaccttcaagtccacatctaccagcattgacctcatccttccatcaaaatgataactatcactatataatcgagcaaaccctttattttcccaatatcctttaaaagcagtctgatcctcccaagcccattcatcccaatcaacaccatgaccaattttattttgaccttttgctagtgctttggaagttggagaatattcatcttcaaacccaaacatttgatcggtgtcagcaaaaacatcactaataccattcccataataatgcatactaggcaccaacctcttgtgatttaaacggcttcttaatccttcaacatctgcttcatataaaacaacacctttcccatcagcagcaccaacagacctttttacaagattacgattattcctttttccttttaacttccatttggatacagcttcattgcatgatatatgcggacgaggatagaggtgaggcatgtctctagaaattgccaactcatcaagttcctcactgctagtgctttcttgttcttcagtatcgcaaccagtttctgaaagagtagtcatctcatcatccttgtcaagttccatttcaaaggaatcagaatcagcattagcagaac

SEQ ID NO: 91417 - DNA, 444 bp, Glycine max
  Clone ID: PAT_MRT3847_53560C.1
caatataggttattgatttgttgggggggaaaaacggccttaaccacaacaacatcttccaatgggcatttcatccacctcaatttttaaataaaactaacacggtctaaaaaaaaccagcatttctgcaaaaaaaacactacccatgtaactcgggttcccagccaaaaaaaaaattaattccccttcctttcaatttcccaaaaggtcgcttttttaatttttttaaagcttggcccggcagggatcctattgcgaatggaccactgggggctgttgatggtttctttccagggccttgaaccaaacccttttctttcctagcatttttcctttccctgctagccttgtttttggccccctttgcctcaaactgggcagacagggtttttttttttgccttttaagccttggacttgggtttgctctccaaaaaaacttttt

SEQ ID NO: 91418 - DNA, 229 bp, Glycine max
  Clone ID: PAT_MRT3847_53561C.1
cccacgcgtccgaaacaaatactaaagaatttacaaccataaaataaaaaactctgaaactgatacaaataaaaacggtgctaccttaaactaacaccccaacacacacttactctacagaccctgtaactctaaagttcatgcacacaaacaaactcacatataaccacacccaacgtcgcgctcttttaagtgttccaacattcccccgcacatgtgacctgtaaag

SEQ ID NO: 91419 - DNA, 475 bp, Glycine max
  Clone ID: PAT_MRT3847_53562C.1
ggctcgagggctgcacatcatacaccaacaacagttccagaaaatgaaacatccgaggtaatcaagacccagtaaacaaccccggaaccagtaccagcctctgaggctcttgcaacagaacaagcggcagctggggcttctgctcaggacgaacagcatgcaactgaggctcctgccccagaatcaaccatcgtagcaccaaaggaggaaaccaccgtagcaccgacaacagaatcagtccaaacgacagctacagaagaagccgagcctgaggagcctatagaagttgcagttgagaccgaggaggtggtgacaaaggagacagatgaagagatgccggctgcagtagagacatcataggagataactgaagaagtgaaagaagactcagaggagcctatagaaactactgttacaaaaacagaatcagcgccagcagtatgcacagaggaagagaacacaccagctgagacag

SEQ ID NO: 91420 - DNA, 394 bp, Glycine max
  Clone ID: PAT_MRT3847_53563C.1
ccacgcatccacacatatccattttctttttttcatcattactatctcatcttctatctttcttcctcagccgcaattttataaacaattgggggcccaacaaaactcatctaacaactttttcttcccaaaacacatttcataatacttttcatcaaccatttcatcatactcttatatcaacctttcttacatcttcctctccaattctttcatcactactaacattacaaccacataattttaacatttcctatcttataaaattttcaataacacaccctacatttttctaactcttcattttctctaatctcttaccattatccccatatttcttttactcacccccctattttatcaactcaataatcccttatcttcattccatatt

SEQ ID NO: 91421 - DNA, 262 bp, Glycine max
  Clone ID: PAT_MRT3847_53564C.1
ggctcgagaacaacgcggtgttatcgctgttgtgtccactgctgcaggattacggctgcatggcggcgtcgtcgcatgtgcagccgcgcaagtgttgcctgagaaagggttctgagtcacgccaggtgccgatataaggttgactgtcgctgtgcacgcacattgcgtgcgggcgaccagagacgcgtccactctagggtctccgatgttcggcatgcgtcacattgacttacgagttcacgatgatgtcaagcgcttgata

SEQ ID NO: 91422 - DNA, 189 bp, Glycine max
  Clone ID: PAT_MRT3847_53565C.1
ggctcgagagaaccctgatcaccccccacattctgaccgttactgccgttcatctcaaccgttgggcaccgggccctctgagctgtccccgccctaatgggccgagaagttcgatcaccgcacctcaccttcttccagaaccgaggcacttgccgtgccatctgccgaagaaagcaccaaggttgccgt

SEQ ID NO: 91423 - DNA, 811 bp, Glycine max
  unsure (1)..(811): unsure at all n locations
  Clone ID: PAT_MRT3847_53566C.1
gcgcccacgcgtccgcccacgcgtccgagaaaataataagatcctaaaaatttgtttattggtgggagcagtgtttaagttgtgtttggcagcgcggaggggcaagctagggagtaagagatggatttggaccagtggatctccaaggtgaaggatggccagcaccttctcgaagaggagcttcaacttctttgcgaatatgttaaagagatccttattgaggagtcaaatgtgcagcctgtcaacagtccagtgacggtttgtggtgatattcatggtcagtttcatgatctaatgaaacttttccagactgggggtcatgtgccggagacaaattacatttttatgggagactttgttgatcggggttacaatagtcttgaagtattcaccatccttttacttctaaaagctagatacccagctaatattacccttctacgtggaaaccatgaaagtagacaactaacgcaggtctatggattttatgatgaatgccagaggaagtatgggaatgctaatgcttggcgatattgtacagatgtttttgactatcttactctttctgcaattatagatggaactgtgctttgtgttcatggtggcctttctccaacattcgacaatagatcaggttctctctctagcttccttctcagttgctggtcaagctcaatattgtccaagtttcagactgtccatttaaattcgncgcagtaaaaaagaaggaaattttgtttgaaattttgattttatttacaaataagcaaaacanacatgtgctatgtcaacttgcaaatgtattttgctt

SEQ ID NO: 91424 - DNA, 340 bp, Glycine max
  unsure (1)..(340): unsure at all n locations
  Clone ID: PAT_MRT3847_53567C.1
nntnntntacctnanttnanactncggttngnntcccgctcnaggcccatcttcgttngtactannntccccgncntttncnnacancaattnncngntcctcncntaacctctncntnctanganggngcganggggccnaangtnacancngggcnantgaacttgnttggttccnntcngcgggacagggcatcagctattgggttgatnncattcgtggntagttgctggggnattatttgntnananggtggcangntntgttggnnttccaggtangggggnangangcagtcttctgncatggnaactatnnnnntggttggtntttaagttt

SEQ ID NO: 91425 - DNA, 275 bp, Glycine max
  unsure (1)..(275): unsure at all n locations
  Clone ID: PAT_MRT3847_53568C.1
gngtttggggtgggatttttttttttttttttttttttgtcccaggggaaatatttatattctaatatatatctcccttacagatacaagacaggagggaaactccttttgactatcaaatcccagataagattaattgacaaaaaaagaaacttgcttatgcaacgcgttttttctaagccgcacaatttttcacactagaagacaagcaagcaacaaccgggggcctaaataaggaaaaatgtatcctcctattaaattaagcccaaattttt

SEQ ID NO: 91426 - DNA, 775 bp, Glycine max
  unsure (1)..(775): unsure at all n locations
  Clone ID: PAT_MRT3847_53569C.1
ccacgcgtccgcgtcgacactctgacccgtgacccggtttacttaacttggctccggcgatgtcaatgagaagatgaaaaatgcaatattccgacctttcttctcgtcgcgtggcttctgcacttcgctcatctcacaccatcaaccatttccgcaaaaccatgacttcattcctccctctacttcgttttccaatgctctgcagctttacattaattccgagactccttcccacggccaaaagatccattccagcattctgaaatctgggtttgttccaaacacaaatatttccatcaaactacttatattgtacctcaaatgtaattgcttgaggtatgcacgccaggtgtttgatgatttgcgggacagaactttgtctgcttataattatatgattagtggctatctcaaacaagaccaagttgaagagtctcttggtttagttcataggcttttagtgtctggtgagaagcctgatggctttactttttcaatgattttaaaggcgtctacttctgggtgtaatgttgcgctgcttggtgatctgggtagaatggtgcatacccagatccttaaatctgatattgagagagatgaagttctttgtactgcactgattgactcttatngtaagaaatgggagggttgcttacgcgaggactgtgtttgatgtgatgtcggagaagaatgtggtatgttcaacatccctcatctncggntacatgaatcaagggtctattgaagatgnctgatgtatatttctgaaaacgat

SEQ ID NO: 91427 - DNA, 189 bp, Glycine max
  Clone ID: PAT_MRT3847_53570C.1
aagaaacgagcgctctgagattacatggcaataatggactgcttaaccgcaggatgtatcattggcaacgattattcgggactggggactaatcctatgctgatcactacagctattttggcagactgcaacggccaccgttacttcattgtgaccattagctcgtgacgttctttaacgttactagaa

SEQ ID NO: 91428 - DNA, 424 bp, Glycine max
  Clone ID: PAT_MRT3847_53571C.1
ccacgcgtccggtcctagaaaccacgaccaattgagcagttcctccgaggcaccagggactccaacccatgccatggcggattctgagcgcctctcggctcctggctgctgggccgcctgcaccagcttctcgcgcactcgaaagggaatcctcctgtttgctgagattatattatgcctggtgatcctgatctgcttcagtgcctcgacaccaggctagtcctccctgtcagtgattgagatgatccttgctgctaatttcattgttgtctacatgtgtgacctgcacaccaacatagcattcatcaactggccctggagtgatttcttccgaaccctcagagcggcaatcctctacctgatcatctccattgttgtccttgttgagagaggaaacactccaaaatcgtctcatgggtactgg

SEQ ID NO: 91429 - DNA, 1015 bp, Glycine max
  unsure (1)..(1015): unsure at all n locations
  Clone ID: PAT_MRT3847_53572C.1
tttttttgatcaacgactataatagaataacttcaaatcccctnggctaccagaaacataaaacaaaaaaactcgaactctccttacctagctatatagatggatacctttttcagaccggatgggctgatcatatcactaagagatgaatactaaagatctttcggagggcaatttctcagagcggaatagcagttgtagagttggggaccaacattctaatcacttcatagaacaaaagaattaaataccgctacctaaccatccaattcccttaaacattacaatttcacacaccaaaatatggcaggattgctctacactgcccctaatcaggtattaacacccataaaggttaggctttattttcttcctttggcttggtcaggcaggtaacatctacctattttcttttccatcacctttctacttcattgtcttgtctttcctttgtttctttcccatcatagtattattatatctcttcctcactttctatatcttccatttcttttttctttctgtgacttattttcatccttcccagtaacccccagcatggaatgcatctatggcatttccaattccacaataagtgggataggctccttgtgaaagcagctttgttggatgtcaaagaagccatcaatatgtttagtgcctgtgacttcctgattttcaccaaatgttcctccaaatcatccaacaaccggtcattctccataaatggacatggaatgcttgaagaagtcgtcattgctttcacttccagattatcgctaacaacaaaaagacatggcctcttcataaatcccacatcagattttcttgctctatctgaggatcttgggtccaaaagtttgatatcttttggatcttttagcatatcttttttctttgaaatcatattcttttcatagatgatacgtcctctattatccttcactatgccagttccataccaatacttggcagtgtcttcttctgaagcatttagtggattgctcccacacca

SEQ ID NO: 91430 - DNA, 419 bp, Glycine max
  Clone ID: PAT_MRT3847_53573C.1
taactcggccgggaatttcttacagcttggccaactcatgtgcgtcctgcaacaactctgatggctgatgggcgtccatatatgaatgctatggtgcatgatagctcagtgtctacaataccaggagagtatggcattggagttaagttgacaaccataaacaatatgagtgcatatgggctcaatcctggtattataggctgtcgacttttgggcaccattcctgagtctatgtcacagcaaactgtttggaatcaaatggcaacagcgagaacaccattgaattcagatctctagcaagcagagctttagtgaatccactattgaccttgtcggaggaggaattttagaggacaaaactggagagtggatcacacttatacaaaattctccaattagcaacttggcgagagaagctg

SEQ ID NO: 91431 - DNA, 153 bp, Glycine max
  Clone ID: PAT_MRT3847_53574C.1
gcgaggcaaacggaatgaagggcccgcattttctcatagccggggcgggcaatacatcaatactatcatgtttttcgcttcatgagcaaccaccccaatcattattgtagaacgctttatccgggataacaaggtagtctcgtttcttgcatg

SEQ ID NO: 91432 - DNA, 104 bp, Glycine max
  Clone ID: PAT_MRT3847_53575C.1
ggtcgagttccgctcgagctagcctagcccaagcatcttcttcggctcgagcagatcgtgccctaattcggttattccccaatggcatcgggctagtcagttga

SEQ ID NO: 91433 - DNA, 247 bp, Glycine max
  Clone ID: PAT_MRT3847_53576C.1
tccactcgtccaaaacatagaacaaaacataaaacttcatactaattaacatactggagggtacttatcactctgatgacgtggaaaaaaaaaatggaacgaatactgactcaaattcagatcagaaatgctaactgataatcttagttcttctgctttcccagttcactagcatgtaaaaaagcatgatacaacgatttataatacatttcaacctattctttatcaattatttacggaagaatta

SEQ ID NO: 91434 - DNA, 243 bp, Glycine max
  unsure (1)..(243): unsure at all n locations
  Clone ID: PAT_MRT3847_53577C.1
ctcgagccgattcggctcgagcaacttttaggttatggtacagtacttattgcagggctgnatgcattattagagttggagaagacattacaggtaattggggcattgggcctcgggtngaccatntattngcgggaaactggatatgaaaactcagaagatctaaaacaagatgtgagagagatgctggcggcggggagactaggagcacaagcaggggcctgggcagccgccaaaagagaa

SEQ ID NO: 91435 - DNA, 223 bp, Glycine max
  Clone ID: PAT_MRT3847_53578C.1
tcatataatgcacacaggaaattgcatcatcatctgtagtacatttcttatttataggttatttattggcaactccaaacattcataactttatgcatccaacaactttacaagttctttttaatgcccataggagaagttgtgggtgcatagtgataaaccaacattcccctctttatcaacaagggaacttggggaaatttcattttgatggccattcccc

SEQ ID NO: 91436 - DNA, 582 bp, Glycine max
  Clone ID: PAT_MRT3847_53579C.1
tccgcgtccgctacagctctgtgctcaagctctctgcaaaacgaacgcgaacgcggcttcgtcactggcgaatctcacattccgagctaccgattagaaccgttcgctgagtcgcgtcaccgagtccgatcttccagcatgttggacggcctgctcggtcgaggattcgccgcgaaatgcaaatcgttgatgaaattgacgaagaatcggatcgacttgataaggaggaagagaaaggcgacggagaagtttctgaagaaggacatcgctgatctgctggcgaatggtttggatgaccgtgcttatggaagggctgaaggactctttgttgagttgactttgtcgtcttgttatgattttgttgatcaatcttgtgactttgtgttgaaacacctcccagtgctgcagaagctgagtggatgccctgaggaagtcagggaggctatatcatctctgatgtttgccgctgcattgtcttctgatctaccattacgacgtgaccttcgtcaaatatttcaggatagtggaagttctttctaatggtatgtatgtcaagaaagagtttgctacgaattttgattc

SEQ ID NO: 91437 - DNA, 411 bp, Glycine max
  Clone ID: PAT_MRT3847_53580C.1
ttgtggtttttttttttttttttgggttttttttttttttttttttttttttaaagccaaattgaagcatttcctcagccttccaaatattttaattacttgaagctggggccgcccaattaaatttgtaaagggtttgattaaaaagcactaggccttcatttttgaattaatttttcgaaccacttccaaagacgttacaggggattcaatattcattattggtggtggtggggcaaaggaatgtgttaaattggcaattgggggaaatggggtgaatcaacagcctccccgggggcttttgtttaacgacgggaccgttcattttcacccacgcaggacccacaattcggttgtagtcccccccccccccggtcaaaaaagggaccagggcggcctggacggggccca

SEQ ID NO: 91438 - DNA, 252 bp, Glycine max
  Clone ID: PAT_MRT3847_53581C.1
cgcactactttgcatcatatggagcacattttaacatacatctatactcctgctgtctcggtcactctagttcatgccttggattaccttatcctatccaattcatcaatcattgatcaacccgaacatcattaaatctaacagcttcatcactgcacattcattgaacattcgtccgatgctcgctgtgatctctgaatctactccagaagacgatccctatccttcacctaatactgctaacacaacatc

SEQ ID NO: 91439 - DNA, 221 bp, Glycine max
  Clone ID: PAT_MRT3847_53582C.1
ctggctaataaaagcatttgcactatagaaccagagacatctagaaaagcacatggaacttacacaaaaggcttttcatgtgccttacttttttaaaaaggagtttattgtattcattggaatatgtgacgtaagcactaaagggaatgttagaaaaaaaaaaaaaaaaaaaaaaaaaaaaaacaacaaaaaaacctcaaaaaaaaaaaaagactactaat

SEQ ID NO: 91440 - DNA, 279 bp, Glycine max
  unsure (1)..(279): unsure at all n locations
  Clone ID: PAT_MRT3847_53583C.1
gcctaccatatacaaatgaaaaggtttaattgaatctatttagccattaaatgttgtagttaatatttgataatgtacttcgattgttgcagaaattcaaaattaaaattttaatttgttagcagatcggtgcatatgctcattatgatagaagatatgtggattgaggtatgaagctagctggtttgtttatggttaagaggaaatggctcggtccggttaaaaaccagtagantccaaactggttcggtttcacacccctacaagaaatacacttta

SEQ ID NO: 91441 - DNA, 283 bp, Glycine max
  Clone ID: PAT_MRT3847_53584C.1
atgcttaatctgagcgatgaatatgagaccgctcaatctttcactaatggctgcgcgagtcaatgaaaactctaacaaaacatagatatccctacaaccactgatcccagtgacctttattgtaaactcctgttacacacacacttgcacggcccaagaccattggtaaaaacataaatggcttgaacaatgagtgaaacccatggcggatcaatcttattaacgccaccaccacttgtgacagtgcactcattacctctgcatttgcacgaaaattagacat

SEQ ID NO: 91442 - DNA, 736 bp, Glycine max
  Clone ID: PAT_MRT3847_53585C.1
ggctcgagctcgagccgattcggctcgaggttttgcaattccaaacacagtttcaaaccgtggaagcaaaggcaaaaaatcaccgagatatttgcatcatcatcccttttgcttcactcacactgatactgatcctgatccaatccaatccaatcttgtagttgttgctctataaactataaagggagctcacacaattgcagcttcagagcacacacacccctttttaactacttacttcccactttacccttctcaactctcttactgttactattactgttactccacctaaatcaaaattcaaacatacctattgcatttgcagatagattgaatgttgtgaacaaacaatgggttcatccaaggccttatgcagtgtttctctgctccatttgttcatagtggtttgccttgtcttccaatgctttgctactaaaaaccatgctgacctgaccacaactctaactgtgaatgcttctgatgcatctggaaagccaataccagagacactttttggcatattctttgaggagattaatcatgctggagctgggggattgtgggctgagcttgtgagcaacagatgatttgaagctggcggtcctaacactccttcaaatattgatccttggtcaattattggaaatgaatcattgataaatgttgaaactgatcgtacctcttgctttgaccgaattaggttgcacttcgattggaggtattatgtgacagc

SEQ ID NO: 91443 - DNA, 780 bp, Glycine max
  Clone ID: PAT_MRT3847_53586C.1
caagttacaaattacaagaagtaagtcacatccatgtagttatagtgattgcgtttgtgactttgtaacttggtctcgtggtatggagagggtatagcttcaaaggactcgtctctcggttcctcaggctctgataggctataggatttgctggcggtgattacaaatcacaagcatttatcatggtccttttcccatcttttgtgaatggattggtaagaactgtgtcaatcaagaaagagaagaattgtcaaaaggaggatggaagaaaagctgtggaagaattggcaaaggaagcaaggaagaatgaattgctattgagttcatctggagttgtgaagtcaaccaaggccaacaattttgtttctgtgttcactaataggggccagaaaggagtcaatcaggatcgtcttcttgtttgggaggaatttggttgccaacaagacatgatgttctgtggagtttttgatgggcatggtccatggggacactttgtagccaaaagggttaggaagttagtaccagccgttttgctatgccattggcaggaaaatctggctgcaacatcacttgacctggattttaaaatggaagctgacaaaaatatccatggattggacatatggtaacaatcttacatatagacttgtgctgcctgtgatcatgatctgaagcagcacactgggattgattcctttctaaagtggctctacagcatttgacattatcatacatggtgaatatcttactatagccaacataggtgattgtatggctgtc

SEQ ID NO: 91444 - DNA, 225 bp, Glycine max
  Clone ID: PAT_MRT3847_53587C.1
aaatctgggctctatgagacggggtgatctcggtccaaacatctatgtgattgggttctacacccttatagatttttcagggctcagactgaggagggagctggaaagagtgttgtctgttatctattggatgctgtgttgacaaagagcactcctcttgggggaggaacacagagattgattgacctatgcatggatgggtatggcggaccatggtctggcctg

SEQ ID NO: 91445 - DNA, 707 bp, Glycine max
  unsure (1)..(707): unsure at all n locations
  Clone ID: PAT_MRT3847_53588C.1
cgtaagnctcggnaattcggcttcgagaaaaaacccgcacgttaactcgagaaaaatattgtctccaatggtagatatcaatgatctatataaaaaattctaacgttgttttctttccttgtacacatgtgcacaatcttctcccacaatctcgctcttttggtccaaaaataaatcaccatgcccagatctcgtcctgccactgatttcgctgatcttgaatgtttgaaatgaaaatttccatgaccaaagtcttctttaccttctaatttggtttggaattttcgtgggcatgaaaacaaggcctttcatttcccaaggttgatttggattggaggatgggtactaagagtctcttaatgcttaagtcccacattgattccatcaacatacgagttgtgaatgattttgtttgtgtgaacatgttgtgggcctttgcttctctgcgggtgtttgtttgcaactatgttttctatgagtttggattggtgatcagatatattttcaggtttcttcatttgggagatgcagaagatgagatcattgttcagaaactaaaacacgttgaaaggaaccaggtttctgattctgagattgatgggttccaagaggagctggctagttttctgttttggagtgaagattttcatgaagagacagangcagaaacagagagctctgtttctttcatggaggttgctcctgaa

SEQ ID NO: 91446 - DNA, 306 bp, Glycine max
  Clone ID: PAT_MRT3847_53589C.1
gctcgagacgctgcaagaagacgacagaccgggtgtgttacacgctaaagttaaggacaccagttgctgaagattccctcgtgccttgttcgcaaggtgtgcgaggacatccaatgatttatctacaacactcaatacttctatcctctgaatatagcagcaatgtacattggccgatgattggcaccaatatacctcattaacattatttgcgcaactaataatagcattaatatcctatcagatactttctaaaatcacacatgtagcacctatcactttggaattatggtcaacttacattta

SEQ ID NO: 91447 - DNA, 381 bp, Glycine max
  unsure (1)..(381): unsure at all n locations
  Clone ID: PAT_MRT3847_53590C.1
tgcaggttccggtgcggagttcccggggggaccccgcgtgcgcccaacttgggcagttacctgacatggcggggggcgtgggggaaatgtgttggggtattgcggcagcacaaattcttcttcttttgcgatcctcatagacgaggggaagcgtgcgtcaagaaagtggtgcgtactgattgtgtccaggaactcatggggcttcaccaggaaantgaanaagagaggggggggacanancaangcgagaactgggtctctttgacttctgcgcaacgcgtatgggacatgggtcttgggcttgataaanatacaaatggggcattaagcaagcgggggcttggagaatatgcggatgcgactctgggtgggatttttatt

SEQ ID NO: 91448 - DNA, 805 bp, Glycine max
  Clone ID: PAT_MRT3847_53591C.1
ccacgcgtccgtgaagtagtaaattaattagactgtattattttgatatgatatttaaaataatacagtctaatgaagtagtaaattaattatttttatttacatcaatttttataaatttaatctagtttatagtactatcaattcaatttttatatcaaaagttcttacccgagccgagagtatgtgtaaaagtttgacatttgatatctatatatatatatatatatatatatatatatatatatatatatatatataatattaatcttaaaatggacattgacaacgcatgtaatattaaatttagcatctatgattctttccattgtaaaaaattaagtaataaaatataagtctaatccatggaccaggccacttaaagcatctttcatggaaaatataacaattcttagatcattttttataggtttgatgatgtcacataaaatataattttttttgcttttttattttgtaattaataaatctcaatttgaattcttgagtatttttgtgaatcccacaataaggcgtcacttaggtatattttatgaattagttagagagaaaaatattataaaaaaatattttttttaaaatggggtcttgagaattcttgaagagaaattcaacctccatgttaattaaagatctccaaagcatgtatatggtaagagttattgaattcaagaatccaattcaagaatatcgaataaatatgttcttagagtcaattaatctttggatagataggacaaaataagttcaaatataaattttgagctcattcaactcatgcaca

SEQ ID NO: 91449 - DNA, 1706 bp, Glycine max
  Clone ID: PAT_MRT3847_53592C.1
ccggctggagccacgcatccgcccacgcgtccgtacggctgcgagaagacgacagaaggggggctttcccttcatacaaaacctacaaggcacgaatttgagattctaagaccctcctctctctcgtacttcatcggaaccgaaacccttcgccgcaaaaaatgcctcccaaatctgccaaatccaaggaagctccagctgagcgacccatcctcggtcgattctcttctcacctcaaaattggcattgttggcttgccaaatgttggaaaatctactctctttaatactctcaccaagttggcaatacctgctgagaacttccccttttgcaccattgagcctaatgaggcgcgggtcaatgtacccgatgaacggtttgagtggctttgccaattattcaagccaaaaagtgaggtctcggctttcttagaaatccatgacatagctggattggtccgaggtgctcatcaggggcaaggattggggaatagttttttatctcacatccgtgctgtggatggcattttccatgttttacgtgcatttgaggatccggacattattcatgttgatgatactgttgatccagtcagggatttagaggtcattactgaagaattgcggctgaaggatattgaattcatggaaagaaagatagaagatattgagaaaagcatgaagaggagcaatgacaagcagttaaaaatcgagcttgaatgttgtcaaagggtgaaggcattgcttgaggaaggaaaagatatacgtctaggggattggaaggctgctgatattgaaattttgaattcctttcagttgctgactgccaagcctgttgtatacttggttaatatgaccgaaaaagattaccaaagaaaaaaaaacaagtttctgcccaaaattcatgcatgggtccaggagcacgggggtgagactattattcctttcagctgtgccttggaaaggaatcttgcagatatgccaccagatgaagcggctaagtattgtgaggagaacaaaactcaaagtgctcttaccaaaataataaagactggattttcagctattaatctcatttactttttcacagcaggacctgatgaggttaagtgttggcaaattagacgccaaacaaaggctcctcaagctgcaggggctatccatactgattttgaaagaggatttatttgtgctgaggtgatgaagtttgaggatctaaaggaacttggtagtgagtcagctgtgaaggctgctggaaagtataaacaggaagggaaaacatatgtggtccaagatggagacattatattctttaagttcaacgtttctggtgggggcaagaagtaaaaccagagattcatctcaaatagcagagctggttttgcatggggtttgtgtcttattataggcgcctaccatgttgcacaatttgtagaagtttgaaaatgtaattttgggaccattttcaatattatttacttatttaggcttattaatatctctagtggattttgacctctcagctatttttatgatttatctatgctatgctacatcttatagcggttttgaatgtgtgttgatgagttgatgcttttttatgccgggtcaattaatttaataatagatgggtgcattcacgtaaatttgatgaatttaaaaaaaaaaaaaacaaaaaaaaaaaaaaaaaaaaaaaaaaagaaagag

SEQ ID NO: 91450 - DNA, 630 bp, Glycine max
  Clone ID: PAT_MRT3847_53593C.1
caacccttccgttacggctgcgagaagacgacagaaggggatatacgtctaggggattggaaggctgctgatattgaaattttgaattcctttcagttgctgactgccaagcctgttgtatacttggttaatatgacagaaaaagattaccaaagaaaaaagaacaagtttctgcccaaaattcatgcatggtgtaaatgatgggatggaagaatgtctctatgtctggtctacgattatggcttgatgcacataggatatgccaattttcactcctaacattccattcctggtcttgactcatatcagcaatagggtccaagagcacggtggtgagactattattcctttcagctgtgccttggaaaggaatcttgcagatatgccaccagatgaagctgctaagtattaggagaacaaaacacaaagtgctcttaccaaaataataaagactggattttcagctatttctttactttttcttgagtgcaactgcaaactaatgaaggcatcttcttataggtataatgcaggaggtgcatctcacgagcacctttgtaatttattttaaaattatatgtctaaactatttataagtagaaaagattgaactgcaactatggtgctctt

SEQ ID NO: 91451 - DNA, 398 bp, Glycine max
  Clone ID: PAT_MRT3847_53594C.1
gcagtcctcaagcaacccacttgagattttccactctctttgtaaaactccttttacaaagtctgaaccacacagggacaacccttcccttgtgttcaggaatcctctacaacaagagacccacggtctcttaatcccttttcagaaataagaagaagaaatctctcttaaaagagatagattgtacaatgaagatcaatcaaaattccttattgaatatgcaagtggttgaccaaggaatctttttgagaggataagatatttcagttcagaaaaactctcttaatcttttgagaggataaaacttttgggcaatgaaaactctttttaatggccattcataaaaaacttgaatagatgtgactcttggaaattattttctgaaaatcccctctggt

SEQ ID NO: 91452 - DNA, 373 bp, Glycine max
  Clone ID: PAT_MRT3847_53595C.1
ggccaatgctgacatagtaaaacaataacatgctcacatccaatcacatgtatcagggggggtgagagagattgcgaactatatcacatcacaaggacatctggcatcagaaagcactacacaattaagttttatgaatgaacacaagacagtacacgcgtcaacttagaatttacaaatcaaggatccaagcgaaatcacagcacaggaatcaacaaactgccaacaattgactgatcaagagatacaaaaatcagaaaccgaaagtgtgtatgaaaattacgcccttcaaacattacccaatacagcatctgtacgtattgaaacttataaaagcattcaagagatacatacagaaacaaaattcgctgtg

SEQ ID NO: 91453 - DNA, 3446 bp, Glycine max
  Clone ID: PAT_MRT3847_53596C.1
ctgtgataaacattttcagctgctggtaatcgattaccagagagaaaatctcaatttgaaatgatagaattctttggtcaaaccttttgttttttcaatttggaaacttcttcctaaagattctagagatcaacttgatcatatatcttgattttcttggattcttgtcttgaataaaacttagaagcacttgatcctttagcatcatcaagacatcaaaacatcttgcttctacataggagtcatttgacttaatccatcagctgaaaaatccttcaactatttctcgtccttggaaaattcttttttgcaagaatcaactgcgtctttcattcttcctcactacgaggttgtgaaaacaagacaacaattggtacctctaagccctacactggggcaatgaaaggccccatgcataaacctcaaacgaacctaggggcagattagaagttctcactcaataggttcccagctacaaggtcatgacgaaagacaacgattggtacctcaaagccttacactggggcaatgaggggcattgtgcaggagcctcaagtgaacataggggcagatcaaaagttctcacccgtcgatgtttttaaacaaaaaaaaaggggacaaaccctggaatttcaatggattgattaaacatcaaatgactccattgccgtcactccaaaatggtcaagtgactaaatccaacagaacaaacactctgagggagttcccagagagatttgcaaagataggataaggttgcatgaattatcacctctttcaaaaggacagtcaatttgttttttcgaaaaaaaaaaaatcaaaatcacaaaatagggaaagaatgtcattgtacaactttccattgcattgcattgtttcatataaagtccgcatttaccaaatttcacgacaaaggttgcatgcatctgcatccctaaaaatcatgttaactgcatagatttcctacatctaatgtccaatcttttgaatttgggatggccggccctctcgatgagttgatctcttgctttctcataagggtggaccccttgggtactagtacctatcttcttcagaggactacacgtcctcgccttcagagggctacacgtcctcaccttcagaggactacacgtcctcaccttcatagggctacacgccctcacctttagaggactacacgtcctcaccttcatagggctacacaccctcacctttagaggactagacttccttgccttcagaggactagacgccctcgccttcagaggactacacgtccttgccttcagaggactacacgtcctcgccttcgcctttgtagggctacatgccctcacctttagagggttacacaccctcatcttcagaggactacacgtcctcaccttcatagggctacacaccctcacctttagaggactacacgtcctcaccttcatagggctacacgccctcaccttttgaggactagacttcctcaccttcagaggactagacgtcctcaccttcagagaactagacatcctcgccttcagagggttgcacgccctcgccttcagagggccgcacgccctcgccttcagaggattacatgccctcaccattagaggattacatgctctcaccatcagaggactacacgtccttgccttcgtagggctacacgccctcaccttccgaggactacatgtcctcaccttcagaggactacacgtcctaaccttcagaggactacacgtcctcgccttcagagggctgcacgccctcacctccagaggactacctgtcctcgccatgagagggctacacgccctcaccttgggtactagttaccctcaccgttgagaggactacacgtcctcgcctggagaggactacacgtcctcaccatcagagggctgcacgccctcaccttcagagggctacacgccctcgccatcagaggactacacgtcctcgccttaagagggctgcacgccctcacctttagagggctacgtgtcctcattttcagtgtgctccacatccgcaccttaagagaatttaaggtcctctgtccttaaatgcttaaccgagacttgcactcccggttaagggaccagtagtttccttttaaacggttcctgggccaccccctgatattggaggagggccaactgtgcgagcacaaccagagagggaggctatcacacagctactatgcatactggggcaagatttcacccgtgccgctgcaaagagaagagtgcggaccatgcgcaccaacatgaccactcttacacagatatagatgatattgctacttagcaacattctgcccagcgaccgcaacgccaatctccccctgcaaaagtatcagttggcctgtgccgtcatgacataggtaagtatgcacatcgctcaactgatttctgatttcatctattgtttgcagggatcgcgcctgcaagacacccagtggacccgaagaagtccaatagggtcttggagttgtcaagctctaattacgggtctctgtcagttctacggagtacctgtcacctccagcaagggcatcaggccccctactaatcgagctttcatcaagaagtactgcgcccccaggcaggcgcagggcgaaacaccacagcagcattgggatggccggtagcgggcaatagacacaccgccaccacctctagagttcacctcagctcatccgcaaaaaggttagagcgttgcctacgacacatggccgaccagcaggcgaccaagtccaaagccaaaggtaagcaaagtactaggtccgtgacctacaagccatcatgcgtccagctcaagacgttaaagaagcgctactaggaggcaacctagtaacttttaaatttctgcttactattttatcaccttttgtttctcaagtcatagtaggacacacctagttgctcatgatcctaagaatttaaataaaacgagcacaagctcggaaggtagtcatacctcacaaaatatatgtatgcgtgtttaggtagtgaaaaataccttagatatgcatgtatgtaatttaggtagcaaacaactacctcacaaaatatatatatgtatgtttaggtagcaagataccttagatatgcatgtatgtagcaaaaagatacctcacaaaatatatatatgtatgtttaggtagcaagataccttagatatgcatgtatgtaaacaaaaaatacttcacaaaatatatatatgtatgtttaggtagaaagataccttggatatgcatgtatatagcaaaaataccttaacaaaacatatatatgtatgtttaggtagcaagataccttagatatgcgtgtgtatagcaaaaatacctcacaaaaatatacacatgtttaggtagcaaaatacctcatgagggaaaaaaaacaacaaaaaaaaaacaaacaagaaaaagaaataaaattatg

SEQ ID NO: 91454 - DNA, 293 bp, Glycine max
  Clone ID: PAT_MRT3847_53597C.1
aaccttattaaagaatctttcttgaacatttcccgggtgaatagaagaagaatttttttccaatttcctttacaaagaatgaattggggcagtttcccgtcaaaaagaaaaaaagaatttggggtaacatatgaagggtgcgggggattttgccatcaatttttggggggaagaaaaatcctggcttttaattttgaacaatggtttttgcaacgatttttacatacttccacacttactaaccgggctttctttttttttttttttaaacaaaaagggttttgcataacccc

SEQ ID NO: 91455 - DNA, 761 bp, Glycine max
  Clone ID: PAT_MRT3847_53598C.1
caaagagcaaatctcaatttgaaatgatagaattctttggtcaaaccttttgtttttttaatttggaaacttctccctaagattctagagatcaacttgatcatatatcttgattttcttggattcttggattctttccttgaataaaacttggaagcacttgatcctttggcatcatcaaaacatcttgcttctacataggagtcatttgacttaatccatcaaaaaatccttcaactatttctcgtccttggaaaattctttttgcaagaatcaactgcttctttcattcttcctcactacgaggctatgaaaacaagacaacgattggtacctcaaagccttacactggggcaatgaggggcatcgtgcatgagcctcaagtgaacctaggggcatattagaagttctcacccgataggttccctcctacaaggtcatgacgaaagacaacgattggtacctcaaagccttacactggggcaatgaggggcaccgtgcatgagcctcaagtgaacataggggccgatcaaaagttctcacccatcaatgttattaacaaaaaagaggggacaaaccctaggatttcaatggattgattaaacatcaaacgactccattgccgtcactccaaaatggtcaagtgaccaaatcaaatagaacacacactctgagggagttctcggagagatttgcaaaagataggataaggttgcatggactatcacctctttcaaaaggacagccaatttgtgttttcc

SEQ ID NO: 91456 - DNA, 176 bp, Glycine max
  Clone ID: PAT_MRT3847_53599C.1
caaaaaaacttcaattacttataacaccttttcttacaccaccaacaatgaatattggagttttataaggatgtctgggacaaccaacacaaacatatacctctaataaataatgacacatatgtttctatgatccttataatttcaagatttttttaaccagtgaatcttataca

SEQ ID NO: 91457 - DNA, 389 bp, Glycine max
  Clone ID: PAT_MRT3847_5359C.1
actcccttttatacaatctgcgttggttatccttttcataattttatttcgatttcatatgtacacttccaatagtatttgggaataatttatttactcagaacttggttctcacttttgcttatcttttatcttccgctggattttgttgctggggggctgtcccgactaccagggaagtcgccatctcgtttgctcctacctgcgggtgttggctgcccatcgttgcctgcaggcgctccgtcttcttctatctcgagcactcctactgcatcgctgttttctcggcccgttctcacctctgctccttggacctcaaatctccggttcccgatcccgtggaactgggccaccccctgttgtgctcctgccgcctccctctaggtcct

SEQ ID NO: 91458 - DNA, 547 bp, Glycine max
  Clone ID: PAT_MRT3847_535C.1
aaaaaaaaaccccaacttttttttaaaaaaaaatttttaaaattttgggggtggggggggtttttttttgggaaacgaaaaaaaaaaaggggataaatttccccctttaagagggggaaaaaagtaaaagatttttttttgggggaaagggaaaaaaatttgggccctaaatattaggggcaaaaaaggggggaggggggttttttttgtcaccagggggaaaggaattggggggggggcgctttttttttttgggggagggggggggggggggttaaagaaaacgacaccttgcccgtgtttggggtcccccgctttttttggattttttttaagggggggaatgggaaacatttaatatgcgttttggggggggggggaaaaaaaggttttaaaaaaaaccctgggataaacccttggggaaacagggaaataccgggccgcctgcgggaaaggcaaaacctttttcaattgggggaggtataaaaggcgggggcaaaaaggggaaaaacttggtgtcccgtaaaaaaaatattttatccccaaa

SEQ ID NO: 91459 - DNA, 775 bp, Glycine max
  unsure (1)..(775): unsure at all n locations
  Clone ID: PAT_MRT3847_53600C.1
aaaataagtttaagagaagagagaaatgcaaacttgatttatactggttcggctatttcctgtgcctacgtccagtcctcaagcaacccacttgagatttttcactctctttgtaaaatccttttacaaagtctaaaccacacagggacaacccttcccttgtgttcaggaatcctttacaacaagagaccctcagtctcttaatcccttttcagaagtaagaagaagagaagaagaaatctctcttgaaagagatagattgtacaatgaagatcaatcacaattccttattgaatatgcaagtgtttgaccaaggaatctttgagaggataagacatttcaattcagaaaagctctcttaatcttttgagaggataaaactttttgggcaatgaaaactctctttcaattcgtgtttccaagtcacatataaatagacctttggtggtcatgtaaaaaccatttgagaagatgtgactcttagaaatatttttctgaaaatctcctctagtaatcgattacaggatttgtgtaatcgattacaggttttaaaatttgaatnnnaacgtttattaactgctggtaatcgattatcaatatggtgtaatcgattacacagtctaaaatttgaattcaaatttttaatagctnnngnnaacatnnnttnnnactgataatcgattacatcctctggtaatcgattaccagagagtaaatctcttgaaaacacnnnttaacatnnnttacttggccaaacctnnngctatatcaatta

SEQ ID NO: 91460 - DNA, 1447 bp, Glycine max
  Clone ID: PAT_MRT3847_53601C.1
gcttaagaaaaagggggttgaattaagatgcaaagactattccccaattgaactatcactctttctttttggattaacaatgcacccttaacatgaattactcaaaagacaaatcaaaataaacttctttaaagctaaagataaatagcaataaaagaagtttaaaagaagagaggaatgcaaacttgatttatactggttcggccacttcccgcgcctacgtccagtcctcaagaaacccacttgagattttccactctctttgtaaaactccttttacaaagtctgaaccacacagggacaacccttcccttgtgctcaagaatcctctacaataagagactctcagtctcttaatcccttttcagaagtaagaagaagagaagaagaaatctctcttaaaagggatagattgtacaatgaagaccaatcaaaattccttattgaatatgcaagtggttgaccaaggaatcattttgagaggataagacagttcagttcagaaaaatcttaatcttttgagaggataaaactttttgggcaatgaaaactctctttaaattcgtgtttccaagtcacctttgatggccattcataaaccatttggatagatgtgactcttggaaattattttctgaaaatctcctctggtaagcgattacaagacttgtgtaatagatcacaggctttaaaatttgaataaattgctggtaatcaattaccatccatgtgtaatcaattacacattataaattttgaattcaaatttctagtgactgttataaacattttcagttgttgttaatcgattacctgagagtaaatctcaatttaaaatgatttagatagaattctttggccaaacctttcactttttcaatttggaaacttcttcctaagattctagagatcaacttgatcatatatcttgattttcttggattcttggattcttgtcttgaataaaacttagaagcacttgatcctttagcatcatcaagacatcaaaacatcttgcttctacataggagtcatttgacttaatccatcaactgaaagatccttcaattatttctcgtccttggaaaattcttttttgcaagaatcaactgcttctttcattctcccttgctacaaggttgtgaaaacaagacgacgatggttacctcatagccctacactggggcaatgaggggcatcgtgcatgagcctcaagtgaacctaggggcagattagaagttctcactcaataggttcccagctacaaggtcatgacgaaagacaacgattggtacctcaaagccttacactggggcaatgaggggcaccgtgcatgagcctcaagtgaacataggagccgatcaaaagttctcacccatcgatgtttttaacaaaaaaaggggacaaaccataggatttcaatggattgattaaacatcaaacgact

SEQ ID NO: 91461 - DNA, 1045 bp, Glycine max
  unsure (1)..(1045): unsure at all n locations
  Clone ID: PAT_MRT3847_53602C.1
aattcggctcgagtacggcccgagaagacaacagaagggcgcccgcaagacacccagtggacccggagaagtccaacagggccttggggtttccagctcgggttacaggcctttgtcagttctacgaagcgctcgttgcccccagcaaggtcatttggccccccattaaccgggctttgatcaagaagtattgcgcccccaggcaggcgcagggcgagacaccacggcagcctagggatggctgactgcaggcaacaggcacaccgccaccacctctagagttcacctcagctcatccacaaaaaggttagagcgttgcctacgacacatggccgaccaatagacgaccaagtccaaagccaaaggtaagcaaagtactaggtcagtgactgacaagtcatcacgcgtccagctaaagacgttaaagaagcgctactaggagacaacctagtaccttttgaatctatgcttgttatttgatcactttttatagtaggacgcacctagttgctcatgatcctggggatttaaataaaacaagcgcaagctcggaaggtagtcatacctcacaaaatatatatatgtatgtttaggtagtgaaaataccttagatatgcatgtatgtaaacaaaaaaatacttcacaaaatatatatatgtatgtttaggtagaaagataccttggatatgcatgtatgtagcaaaaagatacctcaccaaaatatatatatgtatgtttaggtagaaagataccttggatatgcatgtatatagcaaaaatacctcacaaaacatatatatgcatgtttaggtagcaagataccttggatatgcatgtatatagcaaaaatacctcacaaaacatatatatgtatgtttaggtagcaagataccttggatatgcatgtatatagcaaaaatacctcacaaaaataaacacatgtttaggtagcaaaatatctcatgaaaagaaaaaaaaaacaaaaacaaacaaggaaaagaaataaacacatgatngataaaaaaataaattaataaattattaa

SEQ ID NO: 91462 - DNA, 298 bp, Glycine max
  Clone ID: PAT_MRT3847_53603C.1
gacgctcgttttattccattccataactctctttatagcgacgcgtagctcgactcgactcggatcacctagtagaggagctcgccgctgacgtcagagacgatctggtgctggccagacacgtacttgggcaggcgggctaagtaacaggcgacctgagcgtgccggtagtaatactgctgctgctgacgcgagaacggggagcccttgtggcctacggcgactttcctgaagctcatgtagggcacggagaacaagcccgagttggcgacctggctgtcaaagggtaaaccgaggg

SEQ ID NO: 91463 - DNA, 356 bp, Glycine max
  unsure (1)..(356): unsure at all n locations
  Clone ID: PAT_MRT3847_53604C.1
aacgacagaaggggggggannaaannnnggattttncannagngacgaaagcngaancnncgggagcacttccataggggggcgggggggttcttaccaacatatctacttccatggctgccactaccacctattccaatatcagctgcagcggcgggagcttcttaagtcttcgatcaccaaatttcgatgagtccagggtctcctccacccaagcctcttactacgtttgcgggaaggtagatggggcggcaatgttggtcataaacggggtcacaacggctttctttgccttctagaaccgttgttcttgcaatctcattggaaacgaagaaaactgtgatgaagccaatgaa

SEQ ID NO: 91464 - DNA, 144 bp, Glycine max
  Clone ID: PAT_MRT3847_53605C.1
gaactacccactcgtccgaatcactactattgaataatcataacgattctacccacttttcgcactcttcgccaatataggcctcatgttatctggccgtacagtcaaatacttttataatcttaggcaaaatctatgttctac

SEQ ID NO: 91465 - DNA, 263 bp, Glycine max
  Clone ID: PAT_MRT3847_53606C.1
tcacattattattagaagactaaaattggaaatcactgtctttatcaaaatgctcacataaattattgttgatataaagatggtatgttcttcactatttttttgtttaaggaaataaaatgagcaatttcctagagttaactatttgattctatatcaaggcatattgaaagaaatacttcttgtatgagggcctgtgtaattgtcattggcaggaaatgaattgagtgggaatggagttggaacaagcattacagcagagc

SEQ ID NO: 91466 - DNA, 289 bp, Glycine max
  Clone ID: PAT_MRT3847_53607C.1
ctctgttgcaattctcactcttgcagccgctggggtgattctttcagtgaccagctatgacaagctgcttgtgccagtgctaagaaaactaacaggaaatgacagaggaatcagcatactgcaagggattggctttggaatggtccacaagctatcacaatgatcggggctgccactgtggcaaaaaagaggcacgaggctgctagacaggaatggactattaaggggtacttagaccatgagtgccctttggttggccccacgatcaatgatcagtggatgcggggaa

SEQ ID NO: 91467 - DNA, 297 bp, Glycine max
  Clone ID: PAT_MRT3847_53608C.1
tgcaggcttcagagctttcgggctgagattgaaccatcactttgtctcataaaaaaggaaggagcaggaaaatttacaacagttaaaaggaaaccagttatgatagaaaggagaaacaagctcacatttactaatgcattcaatttgtctaaatcagctgaattttcattccttgaatccaaaccaatgtaaactgaatctttcctgaaaccacataatttaaatgaaataattgttatttcattgccattaacaatgatgaaatatcaattcacgtgcaaaaaaaaaaaaaaaaaa

SEQ ID NO: 91468 - DNA, 277 bp, Glycine max
  Clone ID: PAT_MRT3847_53609C.1
gattgtccactccaattcaaaccttctctgcaatcacagaggactacataacctatctaaagccatggggaactgcatacttctacaacattacgtcattcgggtcattaacactaatcgcaacatcctagaatacagcgcacacaatcatatcgatcaagtccttatcaactttccgggccacacctcaaccctcaccttaccagtcatacctctagctatgcctttttcatatcacatatcggccagttagtctaccgcgtgcctacgcgtgtac

SEQ ID NO: 91469 - DNA, 490 bp, Glycine max
  Clone ID: PAT_MRT3847_5360C.1
aaatggaaatttttgaaagaatctaacttgggggattcaaagagagatcatcaacaatgaaaagttaaaggaatttttttaagttcaacatgcctgatgaaaaaaaggggaggggattttcattttatcctcccgggaatgaaggaaggaatggaattatttggggggtcggggtttccccacgaaacatgcgggacccctaatcaaaccgttggaattgcaagacaaacagctcctgaatccgccacttttttttccaaacactttggggcttccatcgcactcggcgcaaaccacaaattttagccctccgcacaaatcacacatgttcctttgggacttcggcaaccgtctgatcaactcgggcaactcgccgttctcgtagagcttcctcaccttggcggccccgccgatgtacaccccggcgacaaaaaccctcggcagcggccccctgcgggggacgaggatcccctgcaattcctcggggaag

SEQ ID NO: 91470 - DNA, 475 bp, Glycine max
  Clone ID: PAT_MRT3847_53610C.1
aatcaatccacctcgcccacttcaaatcacatcaaccctccaccgcaaacatggtcgtctactactctctccccgccatcggcaaggtcggctctcactaccttgcgatcggtgtcctcagcaccatgttcggcggtgtcttcctcctttccggcggcagctccaaggccgtccagcagtctcctcccatcaaggcctccagcaggggcgaggaggacttcatccagaaattcttgaaggatgccgagaaggacagcgccaagagtgacggaaagcactgagcgaagcatgctgtagcggtgtaagaagatgatgggaaacgaaggagacatgtctgtctgttgtaagagctccgagaggccttttgacgttgggcgcgtggaacttttgagttggaaggacctacataccctgttgtcaggcggagctcacctgtaaatataccttgagcggcagcatctgcttcacacaaaac

SEQ ID NO: 91471 - DNA, 261 bp, Glycine max
  Clone ID: PAT_MRT3847_53611C.1
caccgtacaacatattttggaagtagagatcatggagaagaaaaaagatacaattataaagacagatccttaaatgcagctgcctacaaggatttgataaattcatacttgaagaatattaatactagaccaaccaatgaagaaccagctattgctgaccagtggaagcaaacggaaacaccaagcagcattgggcaaaagacagaaactgaggtgctccgcaaagaggaggcggaagaagaatctgaaatggatatgctg

SEQ ID NO: 91472 - DNA, 338 bp, Glycine max
  Clone ID: PAT_MRT3847_53612C.1
aaaataagaaatgataatatgggatcagacaatgggtgatgttgataatgacgaaatatatacacttaatatcttatataatatatctgatgatttttccgacaccgttaataaaatataatgacttaggcagaagatagagcaaatgtatggaggtgaaattcgaaagagatcatgtctattaagattgagaaactctggaagaggtgcttgtcagggtcaatatagataaggtcaggactgcaactcatgccaccaagattataactgtaaacattacttcttaacttgtagagattgacaatcatggtacagagtgaaggtgtggggttgaacaa

SEQ ID NO: 91473 - DNA, 222 bp, Glycine max
  Clone ID: PAT_MRT3847_53613C.1
ctcacacgtgcgctaatggctggtctatcctgagacctatactcagagtaacggcactttggacatggcaccctcctggacatgaggtaccttcattacaacaagcgtaccaattggggttccttggcatgataatcatctccccttaacaacaatacaagggatgttgcggacgctgttatgctctataagattccacactatatctgatcctataataaa

SEQ ID NO: 91474 - DNA, 284 bp, Glycine max
  Clone ID: PAT_MRT3847_53614C.1
agaagcttgaaaatggagcatatgtaacattcgtgttgggattaggagggacttgacaaacaactagacatatacctggatccctgcctactattattgccagtccaggacttagcttggctagtatacaaatagctgtcattagcactttggccgtgcattcacctagctaggctctttttcacatttgatcggaatggacagtttgaggccaagaacccatccaccaagtgcaagtaagcgccctagtcatgacaacaggccatgccagcatggggcttaaa

SEQ ID NO: 91475 - DNA, 243 bp, Glycine max
  Clone ID: PAT_MRT3847_53615C.1
agggattgatatcctcaggaattctcacattgccaaacatttggcggttagacctaagctacaacaacttttcaggtctattacctgttgagatttctcaaatgactggtctgaagtttctatgttatcctacaaccaattcaatggatccattccaaccgaatttggaaacatgactcaactgcaggcactcgaccttgccttcaacaatttgagtggatctataccctcaagccttggaaa

SEQ ID NO: 91476 - DNA, 1999 bp, Glycine max
  Clone ID: PAT_MRT3847_53616C.1
atttagcacacaatctcttgtctggtgtattgtcaccactgtttggcaatcttaccaatcttcaagtcttgaggcttcaaatgaacgagcttaatggtacaatccctattgaaattggccaacttcataagttgtcaatactgaatttgagccggaattctctgggtggatcaattccatctgagattacaaatttgagcaatcttaatttcctgaacatgcaaagcaacaatctgagtggttccataccaacatccattgaaaacttgaaacttctaatagaactccaactcggggaaaaccagctaagtggtgtgataccaatcatgccgcggagtctgcaggcatcactgaatcttagtagcaaccaccttagtggtaatattcccagcagttttgatattttggatggcctggaagtcttggatctctcaaataacaaattatctggtccaattcccaaggaactaactggaatgtcaagtttgacacaattgttacttgccaacaatgcactgctgtctggtgaaattccaaaattcagtcaacatgttgaagttgtatattctgggactggtctgataaataatacttcacctgacaacccaatagccaacaggcccaacactgtctctaagaagggaatatctgtcgctgtggcagttctcattgcaatcgtagcggctattgttcttgttggccttgtcaccctgctcgttgtgtcagtgtcacgacattattacagggttaatgacgagcatttaccgtcaagagaagatcatcagcatcctcaggtcatcgaaagcaaattattaactcctaatggaatacacagatcaagcattgacttctccaaagccatggaagttgttgctgaagcatcaaatattactctaaaaacaaggttttcaacttattataaggccatcatgccctctggatcaatgtattttgtcaagaaactggactggtctgacaagatattgccagtgggaagtcatgataaatttgggaaagagctagaagtcttggcaaaattgaacaattcaaatgtcatgactcctttgggctatgttctgtccaccgatactgcttatatactatatgaattcatgtcaaatggttccctctttgatgttcttcatggaagcatggaaaactctttagattgggctagcagatacagtatagcggttggggtggctcaaggactttcttttcttcacggattcacctctagtccaatactactccttgacctgtcaagtaaaagtattatgctgaagtcccttaaggagcctctagttggggacatcgaacactacaaggtgattgatccctcaaagagtacaggaaatttttctgcagttgctggttcagttggttatattcctccagagtatgcatacacaatgacagtaacaatggctgggaatgtgtacagctttggtgtcattctgcttgaactgctgacaggaaaacctgcagtgacagagggaacggaattggtcaagtgggttgtgcgtaattcaacaaaccaggattacattcttgattttaatgtcagtagaacatcacaagcagtcagaaaccagatgcttgcaattctcgagattgctcgtgtttgtgttagtacatccccagaatcaagaccaaagatgaagagtgttctacgaatgctcttaaatgctagatgaagtcggatttttcaaggttgcactgcatatttaaggaattttttgttttgttttgggtaatgctttaattctagaaaatatgaaaggtagaattaatgataggattggatttgctcaatacttctatggtgtgtcaacagtgtacagtaaatcagtttactagtggtagacatatagctcacagatataataatggatggatgtcttattcttatgaatgcagagttagtagacttatagttcaaggtttaatgttcccattttaacttattttagattaataaactttattttttatgcaa

SEQ ID NO: 91477 - DNA, 387 bp, Glycine max
  Clone ID: PAT_MRT3847_53617C.1
atagctaaaattcggaattagaatagagtgtaatgttgtccatttgttggttttgaagtgtgggggtctgatggggaataccttacttcatggcatttgagttttcttattgacaattccaaacagtctacagtttttgatattctcttgggaatctctgaagactacgcaatcgctgacaatactcttatgccagctttttatgttccacaggctactgccagatcttctgaaaatgcggaatcctctgcatgatctggaattcgcgttttctttcgcttgtcactgcgttcctctattccttattgtctaggcatgaccctcttgttgagtatgctctgcctatctgaaaattttcacaccttttttaattgtccgaatgatgtg

SEQ ID NO: 91478 - DNA, 490 bp, Glycine max
  Clone ID: PAT_MRT3847_53618C.1
ggccaatggtatcttgaatgtctctgccgaagataaaaccactggccagaaaaataagatcactatcaccaatgacaagggtagattgtcaaaggaagatattgagaagatggttcaagaggctgagaagtacaagtctgaggatgaagagcacaagaagaagattgaggatgcaattgagcaagcaatccagtggttagacagcaaccagcttgcagaagcagatgagtttgaggacaaaatgaaggaattggaaagcatctgcaatccaatcattgccaagatgtaccaaggtggtgctggtccagacgtgggtggtgctggtgcagcagaggatgagtatgctgctcctccttctggtggaagtggtgctggccccaagattgaggaagtggactaaatgtagttgctttccttcagatacctgttttaaaaacttattttactttatgcttttttaattggattttaatcgcatgatttttgttgg

SEQ ID NO: 91479 - DNA, 281 bp, Glycine max
  Clone ID: PAT_MRT3847_53619C.1
ctggcagctatattccctctctgttctacttgctttaacgcagggctagcacctggcaaagtgtacattattggaggactcaaatctgtatgtgacatgtcccaactactgtccgctaactagttatccaaattgttaagctacagaagcccagttgaggggtaagtgtgcctggctcacacagcctgcaccctgtcacctcggcaatgagccagtgtggggctctggggacttctaacccttggattgctctttctgacctgtgcataccttctaattgt

SEQ ID NO: 91480 - DNA, 502 bp, Glycine max
  Clone ID: PAT_MRT3847_5361C.1
aatttatatttgatgaagccgcaagaattttctggagctgacaatgagcagccatctccgagtcgccactcaataattggtgttaagcgcaagttcagttcgattgattatgcgtcatctaacagtcctgtaaaagtgctgccgagttttactagcacatttctgcctgatttatcaaatgcgcaagtgttgaagccaaagcccaccaatgttgatcgtcttcctttatcaaatgaagaatttataactccaactcagccaaaaaagcagcaaagtcgtccaaattccccagcaaatggcgtatccaaattgatacttccgagaagccgagtcgcttcaatacgtcgtgagtcggattgcaattcagagaaaggatttggtgaggcggaagcggcacacgaaaaaatggtaaaatcggcacagcaagtcgcgatgggttttgaggattttgtctcgaaacaaggctatcgaggagcgcaaaagggccaagtcgttgtctgag

SEQ ID NO: 91481 - DNA, 2450 bp, Glycine max
  Clone ID: PAT_MRT3847_53620C.1
ttctcgcgtccgggctgcgagaagacgacagaaggggacttgaatcacagtggtgccttatcgctgtggttatcatcttcttccttctcttatatttctttttttttttttctctacgccgcacgccgaaacaatggccggaaaaggagagggtcctgctatcggaatcgatctcggaaccacctactcttgcgtcggtgtgtggcaacatgaccgcgttgaaatcatcgccaacgaccaagggaacagaaccacgccgtcttacgtcggattcactgacaccgagcgtctcatcggtgatgcggctaagaatcaagtcgccatgaaccccatcaacaccgtcttcgatgccaagaggttgattggtcgtagattcagtgattcctctgttcagagtgatatcaaattgtggccttttaaggtcattcctggtgctgctgacaagccaatgatcgtggttaactacaagggtgaagagaagcaatttgctgcagaagaaatctcttctatggtgctcatcaagatgcgtgagattgctgaggcttacctaggctccacagtgaagaatgctgttgtcaccgtccctgcttacttcaatgattctcagcgtcaagctaccaaggatgctggtgtcattgctggtcttaatgtgatgcgaattatcaatgagcctactgcagctgccattgcatatggtcttgataagaaggccacgagtgttggtgagaagaatgtgttgatttttgaccttggtggtgggacatttgatgtgtctttactcaccattgaggagggtatctttgaggtgaaagccactgctggtgacacccatcttggaggtgaagattttgataacaggatggtgaaccactttgttcaagagttcaagagaaagaacaagaaggacataagtgggaaccccagagcacttagaaggttgaggactgcttgtgagagggccaagagaacactttcatcgactgctcagaccaccattgaaattgattctctatacgagggaattgatttctactccactgttactcgtgccagatttgaggagctcaacatggatctcttcaggaaatgtatggagccggtggagaaatgtttgagggatgctaagatggacaaaagaagtgttgatgatgttgtccttgttggtggttctaccagaattcccaaggttcaacaactgctgcaggacttctttaatggaaaagagctttgcaagagcattaatcccgatgaggctgttgcatatggtgctgctgttcaggctgcaatcttaagtggtgagggcaatgagaaggttcaggatcttctcctcctggatgtcacccctctgtctcttggtttggagactgccggtggtgtgatgactgtcctgatccctaggaacactacaattccaacaaagaaggaacaagttttctcaacatactctgacaaccagcctggtgtgcttatccaggtctttgaaggtgaaagagcaaggactaaagataacaatttgttgggcaaatttgagctatctggcattcctcctgcacccaggggtgttcctcagattacagtgtgctttgacattgatgccaatggtatcttgaatgtctctgccgaagataaaaccactggccagaaaaataagatcactatcaccaatgacaagggtagattgtcaaaggaagatattgagaagatggttcaagaggctgagaagtacaagtctgaggatgaagagcacaaaaagaaggttgaggccaaaaacgctttggaaaactatgcatacaacatgaggaacaccgtgaaggatgacaagattggtgagaaacttgacccggctgacaagaagaagattgaggatgcaattgagcaagcaatccagtggttagacagcaaccagcttgcagaagcagatgagtttgaggacaaaatgaaggaattggaaagcatctgcaatccaatcattgccaagatgtaccaaggtggtgctggtccagacgtgggtggtgctggtgctggggcagccgaggatgattatgctcctcctccttctggtggaagtggtgctggccccaagattgaggaagtggactaaatgtagttgctttcctccagatacctgttttaaaaacttattttactttatgctttttttaattggattttaacttttatgatttttgttggatgggattcaaactatttttcccttctgatatgaacgttgctttaagcattatgttatttgcgttattttcattattagatgagaatactcaattgttatgcactttacctgtaggaattattctgtcttgttaaatgacatatcttgtctttagtcatcatatgtgtatgttttattggcaagttattctctttaagtatacacgataattcaagtttttaatgcttgaaaaattatttttgtaacaatattttaa

SEQ ID NO: 91482 - DNA, 511 bp, Glycine max
  Clone ID: PAT_MRT3847_53621C.1
gtaatttttcatgttttgggggttttatacatatatgatgtgtgaagtgatattattggttgaccctttacatgtcaacgatgtggatattagtgaagacataattgatggatagtgtgtatcttaatggaaaatcattcatgtattgaacaaccaagaatggtatgtaaatgtaactggataagccagattgacgattcaaaggaaacgtggaaaatggcaatcaaaataaaaaaaatttggaatgtttttagaactccaagatccaatattgaaatgatcttcatggaccagacggtgcgaatttctttgtttaggcgctaagattaatacaacggttcacagttatgagattctcttataatttgcattgctgcatattgaaatgatcttcatggaccagacggtgcgaatttcgttgtttaggcgctaagattaatacaacggttcacagttatgagattctcttataatttgcattgctgcatgtgaaattagggtgacaaaattc

SEQ ID NO: 91483 - DNA, 473 bp, Glycine max
  Clone ID: PAT_MRT3847_53622C.1
ggaaggttgcccgtcatcactgtatgacgtcctccttctttggggggggggggggggggggggggggggggggggggggggggggggggggcatttaaagaagacaaattacgaaggaaccccataagaaatagaccctagaccctagacactagacccttagatattacgtaggagtaatgggtgcccccggagatccaagcgtactacccgagggcttatgcccgaaacagtatgggggggccctagtcggaggttccgggtaggcccccgtatatagggcggttggcgtaaatttgggccttatggtttaagtaaatcgcgcaacgataggcctaccacaacctgtaataggtagaaggtttacccatggcctcccatataggcgttggttcaaattaaatcccagtattggaaacgtagaaggttttgggaatgttagtcaatgtgtaccgaattgggtcccaaaaagg

SEQ ID NO: 91484 - DNA, 247 bp, Glycine max
  Clone ID: PAT_MRT3847_53623C.1
ggtcgttggtacgcctgctagtaccgggttcgggaatttcccggtcggacccagccttccggaaaagttttgaccaaagcacctgttaaaccaaaattttatttatcatgtagccttgtacagaaaaatctcatcaatcaaattggttagctttggtactccagtaggatcttggggaaacttgcatgaatgaagctgccatgctcacatgtcttatgatgcctgtgacaggaattgtgttggacat

SEQ ID NO: 91485 - DNA, 121 bp, Glycine max
  Clone ID: PAT_MRT3847_53624C.1
caacgtgatttagttcaggaccggcgcctgcaagctgtcaatcgagccccatagtgtgtcgtcatagtgcttcgcgtactacatagtctcactggtggcctgcagtgatattgttatccac

SEQ ID NO: 91486 - DNA, 197 bp, Glycine max
  Clone ID: PAT_MRT3847_53625C.1
agcacacataagcagaagcagaggcctgaaggtgctcaacaggactgagttgatcttccatagaacccgactaggtcactaagagggaactatacatcgagaatacaacacattgaccatgagcccaagagagtcgaaccaggcgagcttgactacgataaggacaactttatgcgacaactttgaacgtccgatcg

SEQ ID NO: 91487 - DNA, 610 bp, Glycine max
  Clone ID: PAT_MRT3847_53626C.1
cctcgtgccgaattcggccaggtcttccttgtttcacattttctaaagagtcaaatcaggtgttaggaggtttattaatccgttatctatctggtgatgaagtactttggggagagatgattggagcatatagtgaccctaccgacagaacaaaacaaaaggcttggttgaatagtcattctgtaaattcgaagttgtcaccacagaaaacttttgattgctctttagttgtatatgatgagaatgagattactatcaacgactgcagcatgtggataaggaactgtactgttgttggactacttccattattcttgctttccaaagagatcgctgttgctctagcaaaggattgtacagagggacacgagtctatatcttctgataatttagttagagtaatcatatagatcggtggctttattttgagtcaacagcacttgatgcttctcagatgaactacgtgagagagtgattatcagcagcaattttatacaaaagtgacacattcaaccgatgttcttcctcatattctactgtctgctgtggatgccttagcttgcattctgtcccgtcatgggctttctggcataccacagacctcagattg

SEQ ID NO: 91488 - DNA, 1212 bp, Glycine max
  unsure (1)..(1212): unsure at all n locations
  Clone ID: PAT_MRT3847_53627C.1
gcaaaatgcaaaatatatatctgttttagtcatcaataatagtacagaaatcttaaacagcatataatncagtcaatatanancattanaacctcatagatagatcctgtagtgacagaagaatcactgacacacggatagtaacaagtttacactaacatatctcagcaagttgtgttcccatcaaccatgaaaacactaatattttcagctanaaccagagtagacaacgcagttttagccattttgatcttttttcagcaaaactttgaacattagaataaaatcaagtgcacaaataatattgatacaatggcccaagacataacaaattttctttttcttaaaaaccatttttttttatgttaaagaaaagtgtaaatgataaataaactcagtatgtaaaaaccacaaatgcaatacctagttcacaacttccaatctaaagtgaataactcatcaataatatgtttatcttggaggtggcgggggaatgttagatttggccattcccacccatgctactatacccactgcaagaataatccatccaaatatgtcatacttaaagtcattgctcttctgctttttagattccttttcttttgaagtagcagaggatcccgcattactcatcagaccaagcccatttttatggatctccatgtgtagttctggggccttcacggcaacttgcaaggactttctatagaggtcattctcgggatcctcctccgcagctttctggaaatactcaagtgccttgtcaaaataaccctttgcctcagttatatcagggattagaaaagcataagacgtgtttgcatttcccaagcaccaaagagtgtcatgcttagttggattgatcagcaaagactcctccagcttcgaaagggcatcatcaatcatcgccttggcatccctaggagcttggaatgacgacaactcgatcaaagctcccccccacctggtcagattatcagcgtcttgaggattctctgcgtagtttgcttcagcagtctttcgcgtgtgttcgaataacagtaaccgatcaaaatcatcttgagaaaactccattcccttctcttctgtgatcgccaaacgttaatcgaacgcctcactctgcagcaactgcacctcccccttctgtcgtcttcttgcagccgtacggacgcgagggcggacgcgtgggtcgacccgggaatnccggac

SEQ ID NO: 91489 - DNA, 304 bp, Glycine max
  Clone ID: PAT_MRT3847_53628C.1
gaagaaaccatatcatgggttcagaaaatactatatatattaatctctttctgcttgtacataaggggtgccatggaacatgtggtgggtgtaagctcaatccactcttgtaatcttcttcccacaaagtcacattgctttaccttgcaacttctgaatccatcatgaagaaaattgaagatgttgacactttttcacagtatactgatcctttgttggttctattggacacaattccctcaaatgaaaaggtacttctagtttgtcacatcttttgatggcttaacataccacttaccattgt

SEQ ID NO: 91490 - DNA, 207 bp, Glycine max
  Clone ID: PAT_MRT3847_53629C.1
aacaacaccggagaacatgatgattgactccgacgcccacaggaaggaccaagacgagccggacgccatacagaggggtgccgctgccacggatgaggtcaagcgcgcccacagcgtatcattgctgcgcgcgagaaagacgatatgaggctgaacacccctaacccgctgctctcgagggcccacatgaccatcactgaaacgacc

SEQ ID NO: 91491 - DNA, 182 bp, Glycine max
  Clone ID: PAT_MRT3847_5362C.1
gtaacaacaattaaaatcataacaaaatataaaggggggccaaaacatggggggaatgtctggcgcctgcactcagatgccctcacccgggttaattgcctcccggacaaggggcgaccagtttcgtctaggagatctttataacttggcataataccgtatatttgtttctgcagaatttg

SEQ ID NO: 91492 - DNA, 595 bp, Glycine max
  Clone ID: PAT_MRT3847_53630C.1
tattcgctgttttcctctctgttacctcaacgaggtttctccactctctctctctctctacatgtttctaccttgtcttctttttcttcctcggtacttcaccctctctaccctcataaccttaaacttcacaactggggcagcacttaatcctttcttacttctgcatattcttcagcctcgtcacattgctttcatcacctaagccatttttccctcctttttttcatctgtttgaatggagagacatataaaccaaaacatgaaactcaacagaaattaaggttgtcctgttctgagacagaaaattgtcttctaacttaacactcagtcctcacacagttcgttcatgaaagtaagtactaaggagctttgattgaaagaaggaacaatagacagtgtgacatcaattcagaacctttgtatccgtgaatagagaaagcttcatgaagttgtgagctttgtcccaacaatgagagatgagaactcgaagaagagcaagctttcttggtcaaaatcattggtcaagaaagggttcaatatcaagaacaaagctgaggatttcactcagatgagttctctcccaaggtgtgat

SEQ ID NO: 91493 - DNA, 223 bp, Glycine max
  Clone ID: PAT_MRT3847_53631C.1
gtaaagatggtgtgaaccgtttgcttgcttcgtgtacgtatattctcactcggaggcaccgtcgtgagcttttctctttggttcattttgctgaaacctctttgacctttccaataaatcatttgtttcaccctgtcaatgagaggaaccattggaagaaagatcccaaaccccgatttttccaatgccactagaaaaatgctagttccattctctatatctt

SEQ ID NO: 91494 - DNA, 309 bp, Glycine max
  Clone ID: PAT_MRT3847_53632C.1
aactcgctcgcccactctttctttttacgcgaacggaaacgtgtactctctctgagaaagaggcagaatccaccgttggggtgaccgccaccgactacaccaaggaaggaggtggaggaacgcccaaagagaattaccaatcctcgtagaagctcctgctaaaggaccacgacagccgcaaacgccaagaacgcctagagaactatgccgacgacaaatgccgccttcaagggcgccaactccgagctgcagtccgcgcacaataaagataacacacagctccaaaccctctgcgcataagatggaccg

SEQ ID NO: 91495 - DNA, 427 bp, Glycine max
  unsure (1)..(427): unsure at all n locations
  Clone ID: PAT_MRT3847_53633C.1
gacccacgcgtncgnccacgcgtccgcccacgcgtccgnaaaaaaaaaaaaaaaaaaaaaaataaaaaaaaaaaaaaaaaaaaaaaaaaaaaaaaaaaaaaaaaaaaaaaaaaaaaaaaaaaaaaaaaaaaaaaggggggggccgtttaaagggaccaaagttaactaccccggcctggcaacgaaaaagttttttaaaggggcacccaaaataaaatcaacgggccgcggtttaaaaacgcgggaacgggaaaaacccgggcgtacccaaattaaatggcttggaaaaaaatccccttttgccaagtgggcgaaaaaccaaaaaggcccgaaccaatggcctttccaaaaagtggccaaccctaaagggcaaagggaaccccccctgaaccggccaataaaccccgccggttggggggttaacccc

SEQ ID NO: 91496 - DNA, 256 bp, Glycine max
  Clone ID: PAT_MRT3847_53634C.1
gcaagattgaagatatgctgaaatcaaatcctgtgtcgcatccccagcttccttgtagaaaaagttaaaaacacatttatttgatgatttaacagttgtcactcaatctttctttataattacttctgtgcatggcattccctgttgatcataattataattttgtaccttggttccttcatatttagaaaccgagggtggtgtttacttgcttcttgttttaacccatgctggcaaatgccctgtgaaagttttt

SEQ ID NO: 91497 - DNA, 424 bp, Glycine max
  Clone ID: PAT_MRT3847_53635C.1
tgtgtccgtttctgcgtccgcccacgcgtccggtcaatccttatcttgaccccaaggcctcaacccctcttttcaccagcactataccccaaaatgcgtttcagctctttcgctcttggcctggccggcgtcagtgccgccgctgccgccgcagttcccaccatccttgagatggacgacgtcgtcctctatggcgagggcaagacccagatcgtgaagcgccacgagtggcaggctatggaagaagagcgcctggcccacctcaatgagaaggtccgccgccgccaagtcgagttcctcccggcccacggcccgcccaccaactacgagggcccggctgcgcctctcaccaagcgccagtgcagcgactgcgaggtcgacgaggtcaaggtcaccaacgaggagcactctctgcagtgggacg

SEQ ID NO: 91498 - DNA, 299 bp, Glycine max
  unsure (1)..(299): unsure at all n locations
  Clone ID: PAT_MRT3847_53636C.1
caacgaagctgcggaattcgactcgagctgacttatcacattccttccataaaacactattaacagattttttggcacctaaanttcttggcacatatcgggtggtttaagggagcaaatcagtctctcctcctctcaattcctcaaactatccatcaactgttgcatctataccatccccactaaagttcttcttttactttcttacttcttttacccttcttattttatactaatcaacttttaatcttatcttttaacttacattaaatatcatttttcttactttcttttctttc

SEQ ID NO: 91499 - DNA, 255 bp, Glycine max
  Clone ID: PAT_MRT3847_53637C.1
ggctttgtgatcggttggcgattccgtctcatcctattcgtggtgtcccgactgctatgaagtgcctagcgagactacttgaggaatctgtggctaggacttccacggtgcgagctgatggggtctcgttactggtacccttgatttcgccagcatctactcgacagtctatgcagattctttatgaaccatgtctgtgcatatggctctgatcctactatgcgccagcagtcgcatattctgcgacgtctaggg

SEQ ID NO: 91500 - DNA, 2578 bp, Glycine max
  unsure (1)..(2578): unsure at all n locations
  Clone ID: PAT_MRT3847_53638C.1
gaagctcgaattcggtcggaacaggaagagttggatgacatcataagatatggctcaaaggagttatttgcagatgagaatgatgaagcaggcaaatcccgccaaattcattatgatgctgctgctattgatagattgctggatcgtgatcaagttggagatgaagaggctactttggatgatgaagatgaagatggatttctgaaggcttttaaggttgcaaattttgaatatgttgatgaggctgaggctgcagcagaggaggcagcacaaaaaagagcaatggagacacttaacagttcagaaaggacacattactgggaggagttgttaagagacaagtatcaagagcataaagttgaggagtttaatgccctgggcaaggggaagcgaaaccggaagttgatggtttccgtggaggaggatgaccttgctggtctggaagatgtaagctctgatggtgaagatgacaattatgaagcagagcttactgatggtgattcaaattccactggaactacaactgctagaagaccttataaaaacaaagctcttaccgcctcgggatagcacagagccacttcctctgatggaaggtgaaggaaaagcattcagagtccttggttttaatcaaaatcagagggctgcatttgtgcaaattttgatgaggtttggggttggtgattttgattggaaggagtttacttcccgcatgaaacagaagacttatgaagaaatcaaagactatggaacccttttcttgtctcatattgctgaagatataactgattccgctacattcacagatggtgttccaaaagaaggactccgaatccaagatgtacttgttaggattgcagtcctgctcttgataagggacaaggtgaagtttgtgtcacaacatcctcaaactccataattttcagatgatatattattacgaaagcgagtaatcttgcctgccatgatttggaggacgctgcctccctaatgattgctccacttccgcatgtacaatcaatagcttcagttgaaatttcagctgaattcgaatgggatgaagatcgagtaggtcatatgcccctagttgaatctttccttaataaactgaccaaatacacgatgaattaatttccagcctcattttggagaaaaatccacaacagaggacgttttcaatgcaaaattttacgagcctgtgggtgcgtgatattgagtctgatggggcaccttgtcccggtgatgagaagaaccaagcacagatatatcaagattggaccctattatatcatcatagagatatgcagagaagacaggttgagtctataaaaaaaagacttttcctcagaaagactgcgatccaaactgattaccggaaagaatactttggtgatccaaaatagaatcaagttccaaaagaagaacttaaaagtgccaggtaggatagtaatatgaaagactataaattcgggatcaaggacatagtaatgcagaaattgatgaaactatgaatgatgccgagttgaatgaaaatccggagaaatccggatctggattgcactcgattaaagttatttctactttacagatagttgttgtaccgtgtaatcatagttgtctccatcaccatttttatcacattaatagtgaactaaattataaacaggaaggcactacagcatatacggtagttgttattcagccccgtgcaacttactcgattagaagttgttccgtggcggaagacgccatggatttagttcaaacttatttgacaaaagaaccggcagagctcaatgtagtgaagaatttccctccactagaaactctttgcgaagacattaacaaaattctaacacccacacaagaacaacctattgcagaaatgccaatatcgaattcagataacaaatcagaggctatgtcacatggtgaaaatttgggctccaaatcaccgccaatccctcaagactgcaagcctaaagattcagaagacaatgagaataaagatatgaaaatagaatctgaatctataaaagaaagctgttcaagcctgttagaagagaagaatgaaacaccgactcttccggataaagaggaaagtaaaacagaaatggatgaaactatgaatgatgctgagttgaatgaaaacccggagaaatctgacgctgtattggaaggttaaagtcaatgtctattagacagatatttgtcgtaccgtgtaatcatagtagtctcaatcagcatttttagcacattacaagtgaagtgaattaaaaacaaaacaaaaaaggcactacagcatatgcggtagtagttattcagtcccgtgcaactaactcgattagaaattgttcattttcatgtgttgtattagacgaatttatttttcaaggaattgaagagtatgaccaattgtatactatactacacggcatgtcacccttcattatatgagtgagcagagaactgaagaaattccgtgncccaaanaancaacgtgtagaggatctaaaccatttgttgatggctgcgaaagatcacatctggtgggatgtgccaattgaagcattaaaaa

SEQ ID NO: 91501 - DNA, 246 bp, Glycine max
  Clone ID: PAT_MRT3847_53639C.1
gccattcggaacaccacgaaccgcttgtgattcccggcgtgcgaagcggatcggatcgaggacacacttaaaccgtttttatcgcctataggggagatgtacaacagttacctcttaccgagataggaactactaaccggagactgattcatgatgaacacgaggcaagaactggataccgctgtaactaaggcggcgtgagaggaccggatataggtccattttacaaaaggagctgagtgttca

SEQ ID NO: 91502 - DNA, 437 bp, Glycine max
  unsure (1)..(437): unsure at all n locations
  Clone ID: PAT_MRT3847_5363C.1
attttataaagcacaacaaagttgcttcaatctggacaacaatataccccatntaagcatccaaatcagtncaaatatagaagaaaaccacaatcttcagttntgtacaaccactacatatttggactttagaatcagaaatatcaaatagatcaccgtaaatttgataaatttgttaattctaacaagtctaccaaatttacaatcatatggtctatgtaatgacttgggtgtaattcggttggcaacacacactaaccttgtgggagaggaggacctgggtttgatcctgagaatacactcttggggaggggcgataagttttaagtgactaagccccggattgaggattagtctcccagttggtccaaaggacttgtggggatgcctcgagatcccatcggagagccaaaggccccaattacggtagttgaaac

SEQ ID NO: 91503 - DNA, 304 bp, Glycine max
  Clone ID: PAT_MRT3847_53640C.1
acccggccggaaccgccggggagacccaggcgcgcgcctcccggccgttctccgcgaagaggaaacccgcaccagagaacagatgcaagcaagccccccgcgaaagcccaaaaagaagccagagcgccccacgccccaaggacgacaagggcacagacaaacaagcaggcactaagggagaaaccaccacccaggggcaagaaggccccgaccagcagagaaccaaggacacacaagccggcgcacgataggacaaacggcgagaagagaacaagaatgggcccaacgagcacatctgagctga

SEQ ID NO: 91504 - DNA, 259 bp, Glycine max
  Clone ID: PAT_MRT3847_53641C.1
ctatgatcatctttcattcaggacattaggggtgaatgggaatggaatggattccatgactattttttctttgaattatggctattcacacagggaaaagttgaggttcccagcctaaaagtcgagggctgtgaggttttctcctactgctgattcactacctaactatggcagcggtattaatgggcctttgccaccaatatgtatatcatatctactggtatatcaaatgagtccacaaactcaggaaataattaaa

SEQ ID NO: 91505 - DNA, 338 bp, Glycine max
  Clone ID: PAT_MRT3847_53642C.1
ggcaactccggcatccatggcagtaggaggggtctgggagcgttacctgacaatgcgacaccggttctgttcctaacgcatcctgtctccgctcactcaccgtgcctccgagttccgaacgccaacgctgtctgcctcagttgtcaccgtacgcgcctctgtctcggcgcaatggcccgacctgcgctatgtctgttggcggaaaaatgacgaccactgcgacgaagacaatgatggcgatcaagatgacgatgataaacaacaggattatgttgatgacgacgacgatgattacgaccctggggtcgagagggaaagcagtctacactgccaaggag

SEQ ID NO: 91506 - DNA, 703 bp, Glycine max
  Clone ID: PAT_MRT3847_53643C.1
aaatgtactcaagagatgatttaatgaacatgaagaattttggtggtgaagatggcgatgaagaagatgaggatgatgatgatgatgaggccagcttcccatcgaaattgggaaatgttttgagagcaaaagaaagtggaaaaagagactggaaacaaatggtaaaaaagggaattgaggacgcaagcacacgcgtccggaaacatgcaaacaaagtttctaaccatatacgacagtggtggaggggaaagaggagaaccaattcaaagaaaggagggaagacagaactttagtgctgataatctatctcctgatagttgaacaattgcacaacatttccaccacgttgggttattgatattactacaccaaagatggacaagaatttagaagggaatcaaatgagaacttcacaatcaccacttggaatgatttgttttccagtccaggatttgctatctaatgatgagtatgagggtggatgtatactcggtaaccttttagaggctacacttttttgagatttaatcatggatattttttagacaagttttggaaatgtattgtgccctcaatgataatgtttagcaaaaataacttagttgaaaactgaaaagttaagtaaaaattgaaaagtatttttttaattggaaattgttaagttggtttattgaattgaaaaaaaaaaaggaaagataagtaa

SEQ ID NO: 91507 - DNA, 379 bp, Glycine max
  Clone ID: PAT_MRT3847_53644C.1
ttttaacccaacaagccacaaatttatttgaatttgagatgctccatatcaccgcaaagactaagatgacagagccaaaacgatgctttactctcgttaacaatgaataagctaactaactaggtcggaacacataagttgaagggtagctatgccaatcaactagacagaatacttaaaatgaaggggagggacataaatccggggcatactgccacactcttaaaaggaacgctgaagatacaatacaaggcagaattattggaatggggccgtgatgatgacaacagatattcttgaaagacccttgcccttgcccttggagttctttatgaccctgtcacaagggcactggtccttgtttacctaaagaccacat

SEQ ID NO: 91508 - DNA, 975 bp, Glycine max
  Clone ID: PAT_MRT3847_53645C.1
ctggtacgacctcgcaggtacccggtccggctcactcccggacccgactgtgtcgtccgattgatctttcgtgcggaagagcgtgtgtgtgttgagaagatgaagggggtgttgtgggttgtagttgtatcagtggtggttgcagcatggattcccttctcacactgttcaaagaaaccggtgggggtggctagaaaggaggacattccgtacatcaagtgtcaagtgtgtgagaaactcgctaaagagttgtatcagcaggttcaaaacaagcaagctgagatcgctcccaaaaagatctcggagtaccaaatcattgagatagcggagaatgtttgtaatctgaaaaaggctgaagcggattggatattgcgcatagatattgtggagaaagaagataggctggagctggtggaacaagactctgaaggacaatgtaattctgaatgcaagacaattgaacgagcctgtcaggaggtcataggatattctgataccgatgttgctgaatatttatatagttccaagcctgatattgattcattgcgcaattatctctgcaaagaccttactaatgcatgcagtaccaagccacctcctgtccctaaggacagggctcctggtgaaccattcgttgcaaagtcttccaaggaggctgaaatggaaaagctacttaaatctatggagggcatgccaggagcacccggcatgaaaatgtactcaagggatgatttaatgaacatgaagaattttggtgatgaagatggcgatgatgaagatgaggatgacaatgaggaggcgagcttcccatccaaattgggaaaagttttgagagcgaaagaaagtgtaaaaagagattggaaacaagtgataaaaaagggaattgaggacacaagcatgacactgaagaaacatgcaaacaaagtttctaatcatatacgccagtggtggaggggaaagaagataaccaattca

SEQ ID NO: 91509 - DNA, 143 bp, Glycine max
  Clone ID: PAT_MRT3847_53646C.1
aacactagtaacctggggtgcccaaaaacatctgaacgattactggcatcagggaccctgactcacaagggcacagaaactgaacacagaccttgggtgggggactcatttactggtttaaatccagaaaactatcaacccac

SEQ ID NO: 91510 - DNA, 684 bp, Glycine max
  Clone ID: PAT_MRT3847_53647C.1
tggatttacaacagatcagaatgctcaagttatggtccttgcagcaactaatcgtccttcagaacttgatgaagcaattcttcggcgtcttcctcaagcctttgaaattggagttccagaccaaagggagagggctgaaatattgaaagttgtcttaaagggtgagagggttgaagacaacatagactttggtcatatagctggtttgtgtgagggttacactggttcagatctatttgatctttgcaagaaagctgcctattttcctattagagaactactggatgaagagaagaaaggaaaacgatctcctgcccctagacctttgtcccagttagattttgagaaggcccttgctacttcaaagaagacaaacgttgctgctagtgaatacggtggattcagccttcagtcaccttcaagatggacagtgcctggtgagtcaggtgattctcagtttcaagctgcaatccatgaaatctctaagcttgtggtttctcacatgattaacctccaatcagattcccaggatccttaaaatgtttgctttagagcattcttctactgtcatttagcctagttcagattgtaacagtgattacatccttagttatactaattataggaacatatatatatatattatacattggttataaaattgccattgttggctattgcatt

SEQ ID NO: 91511 - DNA, 297 bp, Glycine max
  Clone ID: PAT_MRT3847_53648C.1
ctcgatcctacttctctggatgcgactctaccaaccaaagctaactctgttaaatctgcacctaacaaagcaggtgctgaattggcttaccggggaaaaccactcacattttatccccaccactggaatgagcaattgtacgaaccgaccatggagctcatcgccactctaacctgcattctggatgggaaaaaataaacttaaaaacagacaaactatcatcattatagtagctacgaaactgactaatgaaattatcactgaccattgatgaacactaactcccacattatgtgc

SEQ ID NO: 91512 - DNA, 184 bp, Glycine max
  Clone ID: PAT_MRT3847_5364C.1
gcctttattgtatgcaaggataatatacatactcaatgaagagcacattatagtggtagcatataatttgatcctatgatttgacttgagtttaagtagtcacttttttttatcaacaaatgttaatttgttagaaatgtcacttgggagaattcaagcccgaattactggaccaacattatat

SEQ ID NO: 91513 - DNA, 493 bp, Glycine max
  unsure (1)..(493): unsure at all n locations
  Clone ID: PAT_MRT3847_53650C.1
ttggtctttctaaaaaattctgagctatgtttggctgttaatagtttattgtatgatttctttgcccccctgaatgatacttgtacgccgtggagggtggccctgagcctgagaatgtgtcagtgaatggccacactcctgagacctgctgaattgacatatgtacgcgaggttatcttacatccaggcaattgcctcatgaatagncaatgaagaaaccaaagagggagtatcggactagagtgttgcagccacacatcttcttgaatgagggaatgtggatagaaattatcaaggaacaatggagcccgagtctactacatgataccgggtccgtttgacaggaggaacattgatgtggggtcacaacactggttatccacttgtaggtgagattgcagaatgtgcttgtatcgagaggactgagtatgaagctacttgcacatatgtgattgcgaaaggatgccaagggaggaccgggatgagtattttt

SEQ ID NO: 91514 - DNA, 287 bp, Glycine max
  Clone ID: PAT_MRT3847_53651C.1
cgctggttccgccatgaacggaaacgtgaaggctcttataaaggacaggattgtccacgttgctcaagtcacaagcaacgctctcgctttggttaaccgctttgcctcaagacacccaagtgctactcaaactccttaactcttatttcatgcctttctgtctttttaaatttcttctcttggaaaatcctacctatgctactaagtctttgtaatatagggcttttttatgaaaaaaggccccttgaacgcacgaaaagaacagatcgaacaacaaaacagtagag

SEQ ID NO: 91515 - DNA, 211 bp, Glycine max
  Clone ID: PAT_MRT3847_53652C.1
tcgatttactcaccattgtacaaatcaatggcgttgatggttgtcgagtatgagagcagtgacacgtaccaatgaaaccgctggcatgtccatcgtaggaaaggctatgacgaatcctttgggaaacaaagtcgctcacatgtcaaagctgatgaccggcgtaatgaagaagacgcaccgattgaggacatgaacggcagatctgatggag

SEQ ID NO: 91516 - DNA, 984 bp, Glycine max
  Clone ID: PAT_MRT3847_53653C.1
gggggcccctttttcttgtttttgctgttcaggggtctttttttgagacccaaattaatatatatatatattggacttctaaccccctttatatgggagctagaattgaagttggccatataacataatacaacactatccttgcttcttgttagacatggcaactactacactcatgaagcttgctttcatgcttctcatgaaccttgttatctgcagcgcagaatcttccatcggcagaaagtccaatcctaacccagaagagttcgtgaagtcctcgtgcagggcaacacggtaccctgttctatgcgtcaagtctctgttggcctacgcaagcgtgattcgccgaagcgaccgacaactagccacgaccgctctgtcggtaagcatatcgaggagccgatcctccgcatggttggtgaagaagatgttgaaagcgagaggcatgaagcctagagaatacagagcggtgcaagactgcgtggagaacattggtgacagcgtggaccgtctcaggcaatcggttacggagttggggcggacgggcgaggacttcgtctggcacatgagcaacgtccagacttgggtcagcgctgccctcaccgacgacagcacttgtcttgacggcttcgctggttccgccatgaacggaaacgtgaaggctcttataaaggacaggattgtccacgttgctcaagtcacaagcaacgctctcgctttggttaaccgctttgcctcaagacacccaagtgctactcaaactccttaactcttatatatttctaatatccccagcatgcctttctgtctttttaaatttcttctcttggaaaatcctacctatgctactaagtctttgtaatatagggcttttttatatatgctgtatctaactagttcctattcaataattgaattcccttttgtcagacgcaattcaaagagggaaataaatctcaaccgtcaaggcttggatcatcttac

SEQ ID NO: 91517 - DNA, 700 bp, Glycine max
  Clone ID: PAT_MRT3847_53654C.1
ggctcgagggcactacattttctcgtactccaaacaacaccaagtttccaagcttatccgtcaacaagaatccaaactccgatgccttcttcttcttcctttctgtttctcttcctctgttttttcttcttaccttccgcaccttccgacccgagagcccagcgagccgcgctgctgtgcacgaaccgcaccgttttatccctctcccggcgccaagtcttcgtcgcgaacttcctggccgcgatggacgcgctgacccctctcaccacctcgcacggccacggcgccgtctttaacggctcccaaaacgccaccgttttcgctttcggcgagtgcatgagggacctctcgcagaacgactgcaacctgtgcctggcgcagtgcaagacgcagctcctcgcctgcctccccttccagagaggcacacgtggcggtcgcttgttcttcgatggctgctacctcagtctcctacttcaggtacgatgactacaacttcttcggcgaaactcgaagcgaccaagacaccaccgtgtgtggaaataatagtagtaacaacaattctaacagtgctgcaaatagtgctactaacagtagtagcggtgtttataaggcaaatgctatggccttggttcggaacctgagtgggttggcgccgaagaacgatggttttttcgttgggtcggtggagagaaagaacgtg

SEQ ID NO: 91518 - DNA, 273 bp, Glycine max
  Clone ID: PAT_MRT3847_53655C.1
ggagttcagtccatcataatcttaccataactaggccatcataacactcacgattctattgctcatactctacttggccatgctcctaccgcatgcgacatgagtatgagcaacctaataatgacacctagaaaaatccctacgaggtagcccccatgatcgacgagctgacgtatccctgtcgtttacaagctctacctgcattgctagggatgcttcaatacgatccaacgcacctgtcgccacttcgaatgtctggaaaccgttatggca

SEQ ID NO: 91519 - DNA, 396 bp, Glycine max
  Clone ID: PAT_MRT3847_53656C.1
tcttttttgactacaactgatgagagattggtagggacacatcttgtggcatttgctcctttcattcggggaacccatatatacggcactcccatgatgaatttacaagaataagttctttctaaggctacacatgacatggatgaggaatgggccgaacgcgtgagagagatcaatttctcaaatattcctcgaattaggaaggcattatacggacgcttgggatattcctctataacaacaacctcacgctgctatagatatcgtttttctcatgtgacagaaccaaacatgggcgaagaacaccaatgccaagctcccgaaggtcacagactatggttcaacaactgttgcttcttcagtagccccgacacaatgaatctgtgtttcaaatgc

SEQ ID NO: 91520 - DNA, 319 bp, Glycine max
  Clone ID: PAT_MRT3847_53657C.1
ccggtggcagaagacacaccgaagggggtgcagcacagcatctgttgagataatctagtcatgctgtttatcacttaccgtgccggttaatgagaggcaacacttctttctttagctctcgcttgtccatgccaaatcagctgggactggtcctgctgagtataacggattcctgaggtcaacgaacattcaatgtgaatgcgttgcataacatatagtgcactaccactggtacatgggatagaaagaatatggctggagatgaatctagcaggaggatggcgcatcagcatctacgcgtgagaatggcgcctgccgt

SEQ ID NO: 91521 - DNA, 280 bp, Glycine max
  Clone ID: PAT_MRT3847_53658C.1
gccaacatacagtggataattatatatcagcctcccaaatggttaacaaccagtattaacattaatgggacattaaagttcaacacaaaccaaacttattttcaaaggttattacaaacccattacacatcacatttctttttaaaatgttggggaaaatccaacattgaacatcacacaaaaatcatttccagcttaaaaccgcccacgaagactcaacaccaatttgcacagttccctccttctggatgtttaaaacagcgaggggccttccatcctc

SEQ ID NO: 91522 - DNA, 239 bp, Glycine max
  Clone ID: PAT_MRT3847_53659C.1
cgttctttttttttattttttaaactcattgcttgggtcgacaacgggacattgtatccttgtgcgatccaacggattccatagaattacacaaaccttacagatggttcttgttctttttttcccctatccatataacacttgagacgaaactttcctacatagttaaactctctttgtgtatcaacctaagggagactcccactcaccggcttacctatacaccttttgtttattta

SEQ ID NO: 91523 - DNA, 498 bp, Glycine max
  Clone ID: PAT_MRT3847_5365C.1
atggctgggaattctccatgtgcttcatgcaagctgctgagacgcaggtgtaccaaggactgcatctttgctccctatttcccttccaatgatcctcaaaagttcgccttagttcacaaggtttttggtgctagcaatgttagcaaaatgcttcaggaacttccggctcaccagagaggggatgctgtgagtagtttggtgtatgaagcacatgcaagagttcgggacccggtgtatggttgtgttggagccatatcccatctgcaaaaccaggtttctgagcttcaaatgcagcttgcagtggctcaagcagagatactctgcatccagatgcaacaggagccactgatgccaaacccagaaatggaagacccagatcagaaatcttaccttctccaaaatgaactccctcagtacctcaactatgcctcttctagcaacgtaatttatgattctttctcaagagagagcatttttggacatgacatggtttcttga

SEQ ID NO: 91524 - DNA, 281 bp, Glycine max
  Clone ID: PAT_MRT3847_53660C.1
atacatacttctaaatattgttccctaactatctcgcaatacaatggggacacttgcggggaaatctaagaacaccaacaatatggctcccaaaaattgtgatcacccttgaattttgccaatatgacttactattgctaacttaccaccaccctctgaactaacttccatacttacaccaacataatgtcccgttggatatgaccaaaggagcactacatttaactgacgatataccgactgaagggggtgacaacgatatgatgtagaggtgaagaata

SEQ ID NO: 91525 - DNA, 411 bp, Glycine max
  Clone ID: PAT_MRT3847_53661C.1
tccaaacatccacgcgtccaaatcccgtgggcgcgctgttctggctgttccacaacgctaacaacttaagtgtgaaaagaatgtttcgttctatagggggaggagctggtgcaaagaatgctatactcatgaatatgccaaatgctgttctttcaatgaggagatatttggttggagatctcgtcattgaagttcctaagacgacttctccactcttatagggagacagactctatactgatagaatgggtgagatgggttaaaaggaccatcacttgggagattaagcccaattcaactggggcagtacgtcaccctgaagtaaaaaagttggcttgaaattttcacaagaggaatttcttacagctaggacaaccaggtgccgtctgcaacaactctgttggctgacgg

SEQ ID NO: 91526 - DNA, 448 bp, Glycine max
  Clone ID: PAT_MRT3847_53662C.1
catcccttccgcacctcccgagtctatctttctctcttacacttcaattttcctctcttcaaaacactttcacatgttctcatgatgaactcgcacaaacaactcttccccctcttctcatttttcttagttctctatctcttaggacaaagggtagtgctgcaagctgaagcacaccctcgacatcgtccaacaaaattgttcgttttcggagactcatatgctgacacaggaaacattcagaaaactttctcaaattcatggaaggacccttatggcatcacctttcccggcaagcccgccggtcgtttctccgatggaagagtcctaaccgattacatcgctaagtatttgagagtgaaatcgccaatcccctacagattgaggaaactgatgccgcaacatctgaaatatgggatgaactttgcgtttgggggcactggtgtct

SEQ ID NO: 91527 - DNA, 404 bp, Glycine max
  Clone ID: PAT_MRT3847_53663C.1
gcaatccgaatccctcatttccgacgccagttccaggttacaatcacccaacgcgacctcgttcttttctacggcaaactcatcgattcacactccaagcgaaactcccacaccgccttcgacgccgcttttggttacctccataaccttgtccgcacttcctcctcccttcacgtgaaacgcagggcctaccagtacatggtgagcggcttatgcttaatggatagaccccgtgaggccgaggatttggttcttgggcttcaaccttcgggcttcgagtacaagtccattgtgtatggatacggaaggttgggtttgtttaacgatatgaatagagtggtggatgaaatggagagtcgccggtgagagtgttggttcagaagatgattgggaaaatggggagt

SEQ ID NO: 91528 - DNA, 268 bp, Glycine max
  Clone ID: PAT_MRT3847_53664C.1
aaaaggctgtcggggattgattgaacagaattaaaaaaaacttatgaaatgcaaatacaatagtaaagggtgtatgctattacatgaacttaaggactgacttggtaattagaagaattgaaatgttcatagatagagatggagtaatatttcagaaattacccaacattcagtaaaaaaaaaaaaaaaaagtccccaacataaccttttaaccagaaagagcaacagaacttaatgattacaaataattgaacaaaataaaagttga

SEQ ID NO: 91529 - DNA, 299 bp, Glycine max
  unsure (1)..(299): unsure at all n locations
  Clone ID: PAT_MRT3847_53665C.1
gtcgcatgcacgcgtacgtaagctcggaattcggctcgagattcaaggaagctttctccctatttgataaagatggggacggcaccatcacaacaaaggagctggggactgtcatgcggtcactgggtccagaacccaacagaggctgaactgcaggatatgatcaacgaggtggatgccgacgggaatggcaccattgactccccagggttcttgactatgatggctagaaaantgaannccccgntagcgaaaaggaatccgtgnggcattccganttttgacaaggatggcatggc

SEQ ID NO: 91530 - DNA, 466 bp, Glycine max
  unsure (1)..(466): unsure at all n locations
  Clone ID: PAT_MRT3847_53666C.1
tgaaaatgtggagtttaactgtttgttttatgctttgatgggttttcttcaaattccttctttttttcttcttttccttgctatggggggagggagagagagagaatttggacgtgaattgaatattttttagtaggggtaaatagtttatgacttttcatgaattgagaaaaagctgatacaattttatggcttctgttagtattcatttatttacagggtggctttctgagactaatttagacagtgctttctggattcatttttaactacaaaaatctcgcattttcgtttgatttctgtttctaaaagtaaatatatgtttggtaaaactatattatagaaagcttaggaactataagctaggagttcanaaattgaaaaattataagctaagtagctaactgatttaaaaattaataaacagtttcctatttggccaatccaatcagaaaaacgttgtcta

SEQ ID NO: 91531 - DNA, 219 bp, Glycine max
  Clone ID: PAT_MRT3847_53667C.1
ggatgtgaaagctgcagtcctttttggtggatttgcttcgggtttcctgggtatgctttacaaactgatgggctcctgggtcattggtggtttgggtggtcccttctggattggggggattgggggcttgcaaaccttcttgggtgctcttttggcccagggggtcaaggcttcccgagaggcctaccttaaaagacctttcttaagagctatcttata

SEQ ID NO: 91532 - DNA, 452 bp, Glycine max
  Clone ID: PAT_MRT3847_53668C.1
tggggagggagaaagtcctagtgaggtgtgtatacaattactatagccacatatatacacacagtagtagttaaagtcttaaagattagaataagatcagtgatggagagaaagttcatttcagtagttgttttgggagtatgtttggtgctgggaatgtcccaatatgttgatgcaaggaacttggagaaaaaatcaaaggaagaggtgaagaagccagaatcgtgcttagatggagggtccattggtggtgttgggggcattggcggcattggcggtgctggtggaggtggtggtggtttaggaggtggctatggaggaggagctggtggtgatagtggtttaggtggtggatatggaggaggagcacgaggtggttgagttggaggtagacaaaattgcctaaagttcttttggtgttatagattttgtattttttttttttatttttt

SEQ ID NO: 91533 - DNA, 266 bp, Glycine max
  Clone ID: PAT_MRT3847_53669C.1
gttatggacttaaggggtaaacccttcccgtccaaaccaatttgaaaggaacgcctaaggcctggaaagacccagaaggcccatggggcaaacaaggacaggccgggctccccctggtggaagcctgaagaaaagggaggaaaaaacaaggggccacaccggaaattggttttgcgagccctttggacccaaccggagccagcgggggtggaataccggggggggttacggtggaataaaccgaatactgagccaagggccccgtg

SEQ ID NO: 91534 - DNA, 198 bp, Glycine max
  unsure (1)..(198): unsure at all n locations
  Clone ID: PAT_MRT3847_5366C.1
cattatctctaccttgaacaacaanccggacaatgactatggctgttgttggcattggtggtgaaatgccgcaattataaccatatactattactgttccaaaaaacgtaagatatgaagatctgacccaagctcttatacatacacatgtgctttggtggccgatgagacctacattagtaactctgttatacaaca

SEQ ID NO: 91535 - DNA, 795 bp, Glycine max
  unsure (1)..(795): unsure at all n locations
  Clone ID: PAT_MRT3847_53670C.1
atcatcctttaggtcattagagaaagcaacgggataccagaaattcttcaagtggggatggtatgactgaactggaccagatacattcaagcttttccgtggctgccttctcttttctataactaaagaatttgcagaggtactgggagaagaggatgtttgggcaacttcagctgtgcttctgtcttgcaacagcctatcatttaccaattcttccatgtaagcaagtttatccaaagcagtggtaacccttgcttcagatatatgaacctgtctgtgtgcttgtgctaattcatcctgcaacccagctagttcctttttcagggtgcctattgatttatattcacgagctagaggattaagaacttcgaccaccttttcatggaggtgcatgattgttagcacatcttgccgagctcgccaatctaagtactgaatatcatgtcttgccacttccagggcttgatatatatccaaaaccttccctttattctgtggaaacttggatctcggatcctccacgtcaaatagcgcagcccatgcatttttcttctcttcttctccaaatacagcaaacactctaaatctacctttcaaatcctttaaaaaaaaagcacctagttaagtgcaaaacagcacacgttgaacaaaaacaaaggttacccttttggtgtcaagttttccagctctaagaaaaatcggaagagtgagagcagaagcagtggctatggcattcatggcggtgaagaacggacgcgtgggtcgaccgggaatncggacggtagccgcaggcgt

SEQ ID NO: 91536 - DNA, 2088 bp, Glycine max
  Clone ID: PAT_MRT3847_53671C.1
aacaaacactattgaaaatatataaaagtctgaagttgtaacccaaaccaatcaggtattctgaattaaattacattgccctgaatattgtgtcagacaacattcccctttgaataagggtaaggttaaggcaccagatgagagatggtgcagatatcacaaggggaaaaaaatggtttgaaactgtacacatttaaaaaaaatgaaaaaagggtgaaaaggtgtcaagactcgactattatagggaaaggaacagcctctgatgaatacaacagtttccggaagctcttgtagagatgatgaagccttgagttgaaaaaagaaaaattccttatcgaaggatttaagaagcatcactgagtgagagaaaaagaaaataaaaattgttcactctgtacttaatctatgtgttgtggtgagaatggtagttgtttggctcctctctccaatgcatctctccacattctgtatctcaccccaagcttgtcgtaggctactgggaaattccatacgtttgcaccattgttcattctctcttgctgccccaccactagccgtagatcctcatttaaaacctgttctgcaaaatgcctccatagatatttcattaaaggtatatgcttaagcagaggagcaaaatccagtgacattctgtatagcaatcttgtcttttgttttgaagatggtaagcagacatgaagttggtgcaggtgcgttgaacattccctggtactttgtccctccagtttcccaggctttgaaattccaatggttgatagtaccatgcaaggtggtcgaaactccatatcaataggatagggatcccagtatccttgcaggccagatgcaggtgtcaaaaaattcaccaagctgggaacactccatcccttagcaaatgttgaggtgtgcgtaaaaggggcatgtgcaagatccaaaagattgtccaaaagtaagccatgttcaattggaagttccatcacaatctcagcgtggatttcaaatcctgaaggaggtagtaaagatggaagtgttgctgctggtggatcattgccaggccaaatccagatcattccctccttttcaaagcatggaactgactttattttcacatttagctgtcgagtagatggcattttctcacattttccatcagtagtatattcccagccatggtagggacattggatacgaccctcatttactgaaccaaggtgcagagggcatgctctgtgtgcacaggtgttctgcacacatccaggcttcccatctttccctcgaaagataacccatggttcctcaaaacattctattgggatcattgtatcatccttcaagtcagtagaaaaagctacaggataccagaaattcttcaagtgggtatggtatgactgaactggacccgatacattcaagcttttccgtggctgccttctcttttctgtaactaaagaatttgcagaagtactgggagaagaggatgtttgggcaacatcagtcgtgcttcgatcttgcaacagcctatcatttaccaattcttccatgtaagcaagtttatctaaagcagtggtaacccttgcttcagatatatgaacctgtgtgtgtgcttgtgctaattcatcctgcaactcggctagctcctttttcagggtgccaattgatttatattcgcgagctagaggattaagaacttcgaccaccttttcatgggtgcatgattgttagcacatcttgccgagctcgccaatctaagtactgaatatcatgtcttgccacttctagtgcttgagatatatccaaaaccttccctttattctgtggaaacttagatctcggatcctcaacatcaaaaagcgcaccccatgcatttttcttctcttcttctccaaatacagcaaacactctaaatctacctttcaaatcccttttggtgtcaagcttcccagctctaagaaaaatcggaagagagagagcagaagcagtggctatagcattcatggcggtgaagaagtgacactgagtgagaaaagaagagaaacccccttctgtcgtcttctcgcagccgtacggacgcgtgggcggacgcgtggg

SEQ ID NO: 91537 - DNA, 2055 bp, Glycine max
  Clone ID: PAT_MRT3847_53672C.1
gttctgctcttgcccagaaattgtggcttgctggattttcaaagggcatacaggaaatgcatagaaaggcttctttggttcttgaagatgcagttaggaatatttacactgttgttgcattttgtgctggtaataaggtgatggaactctaccagttgcagttaaataaaatatttaagcaaagcttttttcatggagtggccattggttttgcatttggcttttcgcagtttctgctctttgcttgtaatgcccttctactttggtacactgcaatatgtgtaaataagagttatgtggatctacctactgctctcaaggagtacattgttttctcatttgctacatttgcccttgtggagccttttgggttggctccttacatacttaagcgacgtaaatctctcatgtcagtgtttgaaattatagatcgtgtgcctaagattgatcctgatgatacctcagcattgaagccacccaatgtatatggaagcatcgagttaaaaaatgttgatttttgttatccttctcgtcctgaagtgttggtattgagcaattttagtctcaaagtcactggaggccaaacaattgctgtagtgggagtttcggggtcaggaaagagcactataatatctttgattgagaggttttatgatccagttgcaggccaagttttcctggatgggagggatttaaaggaatataacttgagatggttgaggagccaccttggtcttgttcagcaggaacctattatcttctcaacaaccataagggaaaacattatatatgcaaggcataatgcaactgaagctgagatgaaagaggctgcaagaatagcaaatgctcatcatttcattagtagtttgcctcatggttatgatactcatgttgggatgagaggtgttgacttaaccccaggacaaaaacagagaattgcaattgctagggtagtgcttaaaaatgctcctattttgttgttggatgaagctagttcatcaattgaatctgagtcaagccgagtggtgcaagaggctctagacaccctaataatgggaaacaaaaccacgattttaatagcacacagggctgcgatgatgaggcatgtggataacatagtagttctaaacggaggaaggatagtggaggaggggacccaggattcattagtggcaaaaaatggtctgtatgtccgattgatgcaacctcattttggtaaggctttgcgccagcatcggcttgtatagaatgggagtatataatgtgagcaggcgcaactaatgttggttcatgagaatcgtttcatatactgaatgagttgaatgactggtgattgctgctcctgatggaattttccattgtcaggtggaggcttgcatgtagcaagaatgggagtattggatcagcactcgacattggtaggcataagaagagggtactctggcaggggtagtgtaggaattaaagataggaatttggaatttggaatttggttggtttgagactcgagtattgaagctgtggatgcatattcttttggaggcaagcagtttagactgacggtgttgtttccacggtatattttgatagaggaaggcggcggaatcaacactatttcagctgagttactcttctataagactttcttttcactcttcctgtctctcaagcgtggatgacgacttgttcactactgtatttattttctcttcatttgtgaaaattgtagaaaatacagtctcaagtgttataaaatctctgtatatacacagcgatagtctagaagcaattcctttagtttttgaattacccgaattcacgagttttttgtccttggataatagatgcaaatttccacgtgtattttgtcaagtagtttgagatattcttatagttttttaaataaaaaactagtttgctatttttgttgaacttttctacttatataaagttataaacagacgattgtggactgtggagaattacactacattattcaacctgcaaatgtgagattcacatcttttaatgaaaaaaaaaaaaggcgccgttaag

SEQ ID NO: 91538 - DNA, 719 bp, Glycine max
  Clone ID: PAT_MRT3847_53673C.1
attgatgcaacctcattttggtaaggctttgcgccagcatcggcttgtttagattgggagtatataatgtgagtagttgcaactaatgttgcttcatgagaattgtttcatatattacttgagttgaatgactggtgattgctgcacctggtggaattttccaatgtcaggtggaggcttgcatgtagcaagaatgggagtattggatcagcactcggcattggttggcataagaagagggtactgtggcaggggtagtgtaggaattaaagataggaatttggaatttggttgctttgagactttagtattgaagctgaggatgcatattcttttggaggcaagcagtttagactgacggtgttgtctccacgatatattgatttgttttacaaagagaggaaggcggcggaatcaacactaattcagttgagttactcttctattggacttttcactcttcctgtctctcaagcgcggatgacactactgtagttttttttctcttcaatcttcatttgtgaaaattgtagaaaatacagtctcaactgttctataacctatgtatatacatagcgatagtctagaagcaaaattcctttagtgcttgaattacacgaattcacgagttttttgtccttagataatagatgcaaatttccacgtgtattttgtcaagtagtttgagattttatgaaactaatttgctatttttgttg

SEQ ID NO: 91539 - DNA, 321 bp, Glycine max
  Clone ID: PAT_MRT3847_53674C.1
aagacaggaggttttaccaggccgggcgattacggcaaccgcgaccacgaacaaggcgagcgcgctgccgctcaaggagcacgcggttgcatcaacagcagacacgccaagcaaatcacgcggcaacacacacgcagagagggccaccaggcgcaccgacacggaggagacggcaatgtacaaggagaggccgatgaaacacgacaaggcgtgcaacgcgcacggtgagaacgagaacaggatgcaaaactataggcgcaatcggcgcagagaacgtgaacgaagaggtgagaaccgaacggagcagatgggactcaacgt

SEQ ID NO: 91540 - DNA, 264 bp, Glycine max
  unsure (1)..(264): unsure at all n locations
  Clone ID: PAT_MRT3847_53675C.1
gancannttaggncactggntnngcgccnagaagtnancncagnccagcnacacacnnacagnnacnaaaacngnaccanaaaatnngancganncaatgnannaanncaanaacnagagcnganggccaagcacgnngnnccgtgtgtcggncggtcnanngnanaggncnntnanaggagtanngcncccnancanngggnagcggacagnccaagncnangaggnagaacgcggaancggganntgggngangccagccnn

SEQ ID NO: 91541 - DNA, 1332 bp, Glycine max
  Clone ID: PAT_MRT3847_53676C.1
gtcttataggcttcggggtcttctgtaaatccttgatctagcttgtttcactttgcttcagtcaagaaactctcctctctataaatctactacgcaaacacaagggacagtcacaattatatttttttttatatgtctaaccacgcatccgaaaaaaaataaaaaagaaaaccaaaaaataatgtcaatggaaatgatggcaacggaacgtgtttgttatgttcactgcaacttctgcaacaccattctagcggttagtgttccatacagcagtttgctaaccatagtgacggttagatgtggacattgtgccaatttgttatcagttaacatgggagcttcacttcaagcatttccccctcaagaccctcagtcacagaaacagcacctaagctttcaagaaccaagcagcaaggaactgggatcatcttcaaaatgtagcaaaatagcgccatttgaggcagtagagcatgaactacctaggattcctcccattcgtcctacagagaagagacatcgtgttccttctgcttataatcgcttcattaaggaggaaattcaaaggattaaggctagtaatccagatatcagccacagggaggctttcagctcagcagccaaaaactgggcacatttccctcacattcactttgggttaaagaacttaaagctggatggcaacaagcaagaaaagttggaccagggggaaggagctgaaaagtctaatggattctactgataatggaagcctgtgagtatgaacttgtttttttcatgcttgacctaaatcagtgaaaaaatgaggttgatcaaatttcccaatatatcgtacaactggatgggagactcctgcaaattaacctcagcctctcacaccaatgtttaatagtactacatatatgtattgcccttttctatatatcgttgttatgaaatgattgctattcttgtgattgaatttattgtgttgaatttcttaagtatatattattattattttatgtatgcatgtgttgcgcgccctattttagatgttataaaatgattgctattcttgtgattgcattaaattactatgttgaacttagtttcttaagtaattaaacattattgtaagtttccttctctttataaaaatgtgtctttctatttagtaacgttgagagtccttcaagttaacctcagccttttacaccaatgtttaatagtactacatatatatgtattgcccttttctatatatcgttgttatgaaatgattgctattcttgtgattgcatttattgtgttgaatttgagcacttaagtaaacaacacgttcctctatatatc

SEQ ID NO: 91542 - DNA, 428 bp, Glycine max
  Clone ID: PAT_MRT3847_53677C.1
cccacgcagtctttgtttttttgaaacacaggcgcccacagacacggtcacgggggttgcacgaccaaaggcacttgtgctgccacaataagcgacgacgctgggaacccccaactccgccttgattatgacaaagacgccaattcactttcgatcctcaaggatgcggctgaacctgaacaagtttggcgtacgctcaaacgtaagcgcatacatgagcataggatccttaaccgcgacggcacccaactgagtgctgctaacagcgctgaggtatagcgctacatgtgtgctggcacttggtacagaaccaaaaatcgctgatccctggctactgagagcctagctcccgcagacttcactagcttacactctaacgcgcatagcattggcgcagggactacggagtgaataatgaaagagcaccc

SEQ ID NO: 91543 - DNA, 1080 bp, Glycine max
  unsure (1)..(1080): unsure at all n locations
  Clone ID: PAT_MRT3847_53678C.1
aggaagtagtaactaacagtcaatagaagaaaactgatgtttatgccacatgacatgcagccatagaaaaatgaaagaaaaaaactccaaatctaatacctttaaaagaaacaaccacagaacttctacaacatctttggctactgttcatagttcatgacagcacttcatacaatgaaatgctaaattatggttgggtggtttgaagatagcaagcaagcattgcaaaattgaaatgagaagatgaccattctttttttcttttttttgccatttcccccacccattgatgggcataatatctgaattgtttaacttctatggcaacaaacaaaagatcaaaaaacaaaacagtttttgctgttccttgaaccaatgaacaagcatatcatgtaagtaatggatgcgctaaaattattgtgaagacaacaacacacaatacccaaaccagtcacaacaggctaaaattttcaactttcaaacatcaaacttaattgggtcatagaagaaggtgatttcaaagcatgtgcaagtcctatcctacttcttagaggacttccctttttttttagggcctttccccttggtggcgtccccggaagaatccccaatactactgtccttcacattaatcgcgccatgaccgaattccggagacagtatcttcgcaatctcaggaaaaccaacattgtttctgccacgcaacagtgtctgcaaattctgctcccaaatcttgtccttcttaatgccgggactcttgaaattatagagtttgatgaacttggagagaatgagagcgatttcggaacgagattggcgagggatgccgaggaaggtgcagagctcgctggaagatttgcggatcttggtgttgccagtgccggtgatttcctccaccgctttcgccacagtggacatgcttctccgaccaaacgaccccatctcaatctgattcgctacctcttgcttgcggctgctcccacccttccttctaacttatagaaatcaacaagaacattgtgttcgtcccctctgtctctctcgcaaccgaggagcggggcgaccgggaatncggcccgg

SEQ ID NO: 91544 - DNA, 391 bp, Glycine max
  Clone ID: PAT_MRT3847_53679C.1
gaagcttatgtcatagttactctgatagggtcgggactgaagggcaagcagttggtggtgtacccctgccaaacactttggagggccctcagttttgcccacaaccacaacccttgcattttgcggtgggaagagcccctcctgctatggatgaaaagggaaagttggatcagatagaggaaagactaagggccgttgaaagaggcaaagattatgccctcgctgacgtggaagatttgtgcctagtacccgacgtggtcattcctccaaagttcaaggtatcggacttcgataaatacaaagggactacctaccccaagaatcacctaaaggtgtagtgcaagaaaatgggaacatatgcgaaagatgacaaattgttgatgcatttctt

SEQ ID NO: 91545 - DNA, 728 bp, Glycine max
  Clone ID: PAT_MRT3847_5367C.1
aaagaaaaccatgatatttacttaattaagttctagttagaaaagcacaaatcaatatagtcaatctatatcattcacagcaattatagctgagaaagctcaatgtttccttacatatgtattcacatatctgcataataacgaaaactttttttatgtatttgttctccaaaacaaaacattattaaacagtaacacattcctcaccgaatagatagaaatccaagcttttgttgggcatatattcgtaaattagaatcttctcttcttcatgaatgcaacaaccaagtagttgtacgagattcatgtgctgaagttcacatataagtgttagttcatttttaaactccataattccttgtgtagaagtttttgaaagtctttttacagcaacctcctgccctgttggcagaattcccttgtaaacgggtccaaagcctccctgtcctaacttattttcagatgaaaacccatttgtagccatcataactaatgtataatcaaatacatttaactcgtgtccctttttgaaaacatttccaaaatcttcgattgaagataacccatcacaaattggagaatgtggcatcttcatcaccatttctttccgtttcttctcttgacccaaatatttttcgtttctttcataggcacagaatggacaggaatattatttagtaaagtaggttgctattactgcacttaaccataacccccttttttgaccg

SEQ ID NO: 91546 - DNA, 523 bp, Glycine max
  Clone ID: PAT_MRT3847_53680C.1
ggttgggcctggtaccagaccttgaagaacaaaataaagaaggttaaggtagagagcaatagggggcttgttggagggtggcaaaagcgccaaggccaaggttttcaccaaggttcagtgtagggttgggcctggtaccagaccttgaagaacaaaataaagaaggttaaggtagagagcaatagggggcttgttggagggtggcaaaagcgccaaggccaaggttttcaccaaggttcagtgtagggttgggcctggtaccagaccttgaagaacaaaataaagaaggttaaggtagagagcaatagggggcttgttggagggtggcaaaagcgccaaggccaaggttttcaccccagttgtgacacgtcattgctagctagctaactggcgtgtgtttgggacgcacccggactggcctatgccttcgtcggggataatcgtcgcatgcccaaaatttgcctcggatttaatggaagtcttggctactatagtttttgggtcgtactgcctcgaagactca

SEQ ID NO: 91547 - DNA, 152 bp, Glycine max
  Clone ID: PAT_MRT3847_53681C.1
gccacgcgtacggctgtggctgctgatctagcttatggttcgggagctgaatgggctgagtggtgtaagtaccgtgtaccaagcactgtagtcatttatgaccttatctcgcgacatgcgcaggcttaaggacgggtggatgtagtatggga

SEQ ID NO: 91548 - DNA, 295 bp, Glycine max
  Clone ID: PAT_MRT3847_53682C.1
tattctctctcccccctttttttttttttttgtgaaaaataacatagccaacataccatgagaagtggcatctcatgtgcagtgtttatacattttatctcctctccccgagaaaaaatccaaacagaagcaacatggtctaaacaatatttggacccacaatattctacaaaaataatggaatccactccaacaaaactaaaattttgtatttgtctctttacattcacttaaaaaaaaaaaatcattttctaatttattttttaaaataaatttttacaaaaccttaattttc

SEQ ID NO: 91549 - DNA, 621 bp, Glycine max
  Clone ID: PAT_MRT3847_53683C.1
tttttagactatggagaatttaaataatttatataatccaattacaaggataatagcaaattatcaaggggtgcacttgggcaacaccctgagaatatagaataacttaattttaaataatttatataatccagttacaaggatttataatacagcagtactgaatttaatcacttcaaaattaagttatgctatattctcaaggtgtctaggtaagactttccatcaagtttacgagcaaataggttcttcaaaaactcctttaattcgattcttttgaaccgtgctggtgttttttcagtgatcaagcttattgcaggacctatcaccccatcatgttttgatgtgtggaatgttgcaattgaaatcctttcttttgcagagttcaccattgcacgatgctcaacacttcggtatattccattacttataatctcgagcatgtccccaatgtttataatgaaagcattaggcaagggtttgataggaacccacatgccatcttttgttatctggagcccttctacttcagtggcttgtaagaggatagtgagaccaactccatctgaatggggtgtgaggccaattaccttctctggttgaggacatggtgggtaatag

SEQ ID NO: 91550 - DNA, 272 bp, Glycine max
  Clone ID: PAT_MRT3847_53684C.1
tcgtattcgtatcgcgcatccttccatcgataagcccatatatgccaagacttctgaccaagatggatataaatctaagctcttgggcgtaccttgctgacaacgtagggcttggcgtggtctcccttgataccggcggcaccaaagggcttctcggcctctctggcagcaacgcttccgtgaacaaggacggagttgcttcccttgggggcacgtagagcaagtcgatcgaaagtgatgacctcacctaccaccttgacgatgcgagcacg

SEQ ID NO: 91551 - DNA, 175 bp, Glycine max
  Clone ID: PAT_MRT3847_53685C.1
attgagataccatggaaccggggggcttaattcattacaaattcgctgacaaactcaacatatgtcattggcttagaaaagttccaccgtgaaagagaacaactggtaacaagtttgtaatggacacggatgaaataaagatgacaagcatattcgggcgaagttggctgtataa

SEQ ID NO: 91552 - DNA, 469 bp, Glycine max
  Clone ID: PAT_MRT3847_53686C.1
gcctctctttctgtctatacatgtcgatgacacaattacacttgaggttgaaggacaattagaacattcttaacaagaatttcatttgcgccagctcatgagggctataaaagatgaactgggctatactgatgatgatgaggatgacctggctgcccttgacagtaagatgcatagggcatgaatgccacagaatatatggaacgcatgcacacactgatgttgtgcggcttaaaactgatgcatgcttggcgtccatggcataacagtttatgggtttatctagagcttcttgctgatctgacctggcggaaggccacttacatagattgatctggacttgagaactgcacggaatcgactggatagagacacctatggttcatatgctggcaaacagccaataatagaatacactgctggacatacgcttacaacagatgcaaggggtgcagtgtccagctttgct

SEQ ID NO: 91553 - DNA, 254 bp, Glycine max
  Clone ID: PAT_MRT3847_53687C.1
atttttgggtaaactatggttagtagctacagtttatcatgttggatttttttttatttagcattttttatttggtaaggctgatagttttctaaaggattgttgaagtttgtgttgttatttagttcattttacttgttaaatattcatttaatgtgactcttgccatctttatatttacttgattttggtcacgaatagaatcataagataaatgttctccagcacgcagttgagtgttatactgcttatgt

SEQ ID NO: 91554 - DNA, 330 bp, Glycine max
  Clone ID: PAT_MRT3847_53688C.1
agtctcccatttcacctgacgaatgacattaaagatctttactgagtgaattgccgttcctatttattcaaatacagtggtccacagtttgcggaaactgatggaattgttgagcgtgtgattacaggatacataggactttttacttaaggtgaaacaaatactacggaaattgtggggcgggctcacagaaagttgactacgcatgcagattgaaatgtggatttaggttttctacactgggtagattggcataggaagatcacgctcagatcattagtgcgcaatcagaacatgataggtacctaactatctactgatgcgttgggg

SEQ ID NO: 91555 - DNA, 280 bp, Glycine max
  Clone ID: PAT_MRT3847_53689C.1
ggaactttggcgacgcaaaaactgaattcctttgagagtgggtttggaaccatgtaacaccgattattcactgttcaaagagaataaacaattaatcttgtagatataggggccttctctttggaacaccgttataattaccttaaattaaaacacaaaagtgttatattgtggctatcaaataactcatacttcacataatttcagcaatatgacagtgcaaacaacaggggatacctaactcaaggtgtttaaaaaaacatgtcaatatctgatgctt

SEQ ID NO: 91556 - DNA, 736 bp, Glycine max
  unsure (1)..(736): unsure at all n locations
  Clone ID: PAT_MRT3847_5368C.1
gtagaataagaacaacaacaatactcctactgcaactgcatagtttggtgagttgtgtaattttgtttgttcatcttgtgttgttcactgttctttcccagacccacctcaaagttgaaagcagccatgggttttttcttcaaatgggtcaacttgtttgtcttttttcatttccttgctgcaacacccatcttctcagattcctcctccagctcaaatgcattcgtcaccaccaagttcctagatttagccaaggatcctctggtatttgattggatgattggtatcaggaggaagattcatgagaatccagaactgggttatgaggaatttgagaccagtaagctgataagaactgaattggataaactgggcatctcatataaatacccagttgcagtcacttggtgttgttggcttcatagggactggactccctccttttgttgcattaagagctgacatggatgctcttcctctgcagggaactgttgttcttgtttttcaaccagcagaagaaggaggtggaggggctaagaaaattttagatgctggagtcttggaaaatatctctgccatatttggattgcatattgtacctacctatcctattggntgaagtggcctcaaggtcgggtcccatatttgctggaagcggcttctttgaagcaacaatanatggcaggggaggccatgcagctatccctcagcactctatagatccaatattggctgc

SEQ ID NO: 91557 - DNA, 494 bp, Glycine max
  Clone ID: PAT_MRT3847_53690C.1
aattcggctcgagatctatcatttatcagttatcacaaattaagcaaatttattcattttcatggcctccaacagctgtttcattttgggttttttcattgctatttccttctcaagcatggatattggcctagcagctcgctatctgatgcaaacaactgtaccaaatttgcctaaaccaacattgccacctttgccttcacttccaacattgcctacaatcccaacactgcctcagggtaatgttccacctttgccaactatcccatctctgccacaaccatctcttcctaacattccaactgtcccacaggtgactcttccaccacttgctgccacttcacttccaaactttcccacaatcccaaccactatcccctccttccctttcttctccccaccaccttcctccaccagtccctaaatgaagctataccctgcttatgttggatatataggcactcatccttggattttggttctggctttcagtg

SEQ ID NO: 91558 - DNA, 556 bp, Glycine max
  Clone ID: PAT_MRT3847_53691C.1
cccagcgtccgcccacgccgtccgaaaaaaactcttatctatgcctatgtctctgtctctgtcaaccgtgcctgcgttcaattctctcacaatggctgaatcctgcctcctatctctcccttccctcttctacgccaaaaacaaaaccctttctctctcaattcccactaatcctctcaacctgcaattcccatgctcaaactcttcgctttttcccctcaccaccaagactacgcgccactcttctctcctcacattcgtggctcagacatctggttgggccaaagaaggggaggaggaagaagccgcgtgggagaaccaaggcgacactgcgtggggaactgaagaaggtggcgatgatatagaagatggcggcgaagggggtttcgctgaagaagaagctgaagaagttaagatcttcgttgggaacctgcctttcgacttcgacagcgagaaattggcctcgcttttcgaacaggctggcaccgttgaggttgctgaggttatatataatagggccactgaccggagtcgcgggttcggatttgttaccatg

SEQ ID NO: 91559 - DNA, 160 bp, Glycine max
  unsure (1)..(160): unsure at all n locations
  Clone ID: PAT_MRT3847_53692C.1
gttggtggattnaaggtttataaattttttngttnngaataaattggatttggagaaaggaatgatggaatggttatatggaaaatggnannnttgtattggagagtgtgtgatgggagaaattgagagggtggggaaaaaatattgggtaggttttaag

SEQ ID NO: 91560 - DNA, 586 bp, Glycine max
  Clone ID: PAT_MRT3847_53693C.1
ttgttttgcgtccggaaattttgatcaaccgggatcacaggttgtcggacctcaaaaccggtaacaacagcaatcgatgcttgatttcaagaatctctcaatttctgcgtactattttgtgtgcgattgcttaagggactgtagattagtctctgtgctggccacagactttgtgaatcattttttgttccactgttggacaatttgctgaacactctactatttgatataggacttagtgttagactgaaactttttctgtctcttgcttagttctatgtttaagctgaagtacaagctggtgaaatcttgaattagtgcttccactatactatttgggttagggctcttggggtaggacttttttttttattcttttttttatatctgttttctaactgattcgaagtggccttaattgtggtcattatttgataactctttgacgttggtcaatgttttgttctgtaatttctgtgtatctacagctaattttatatttttttcttcatgtttgtgtatttttcttttttttttatttttatatttttatttttttttgtttcttgttgtcttttatatcttt

SEQ ID NO: 91561 - DNA, 436 bp, Glycine max
  Clone ID: PAT_MRT3847_53694C.1
cttaataagttaattttcactcacccaatgaaaatatctcaaatgggacctattttcaggtggaatattattcacaacactaaatgcacctggacatacaaaagagagcatgccacgaatgaaacgctcaagcatgacgtgtaaatggtctatacggtgactcatctgctaacatagtcaaacttaaagctgttcctcttcagaactcacttgtaaaaatatgatgacaatgacctataaaataacggacagaatagactctacatacaacttgcagctgagctttcttactagtacactataaacagtgaacatatagtgcaccaagtagcggctcaagccaaagaaccattgggcgcgtcactggcgtcatcatcaatgagagaaacgaatgaacctccaatttccgtcacccttgagctcttaataaatgaca

SEQ ID NO: 91562 - DNA, 304 bp, Glycine max
  unsure (1)..(304): unsure at all n locations
  Clone ID: PAT_MRT3847_53695C.1
cgcctgcagtccgttcggaatttcgggcgatcatgcgttcggaagagnnnccngaaaaaggagaccattggaaaacttaaaacgagngacgccagancgagacaaagaanaganccccaaaacaaagagggccaggcacagacggaaacaaacccgcccaaaccggcacacgaagaagccgaaacacccaaagggcccacgacggagcaaaaaacaccacaaacaaaaaangcacancccaaaaacacagcgggaggaaccacncngcgcagagacccacaggcaaacacccagacagagggca

SEQ ID NO: 91563 - DNA, 1953 bp, Glycine max
  Clone ID: PAT_MRT3847_53696C.1
gcggccgcggccggattcgataggtcggtggagaggtcgatgtttcttgagcttgccttggctgctatggatgagttggtgaagatagcgcagactggggagcctctttggatgaggaatgttgaaggagggagggaaattttgaacaatgaggagtacgtgaggaccttcactccttgcattggtttaagacccaatgggtttgtgtctgaggcctctagggaaaatggaatggtcatcattaacagcttggcacttgttgagactcttatggactcgaatcgatgggcagagatgtttccttgtatcattgcaagaacctccaccacggaagtgatatctagtggaataaacggaacaagaaatggggcacttcaattaatgcatgctgaacttcaagttctttcccctttggtgccggttcgtgaggtgaatttcctgcggttttgcaagcaacacgcagaaggggtgtgggctgtggtggatgtgtccatagatagcatccgagaaagttcgggagcacccacttttgtgaactgtaggaggcttccttctggttgcgtggtgcaagatatgcccaatggttactccaaggtgacatgggtggagcatgcagaatacgatgaaagtcaagttcaccagctctatagacctttgttgagctcaggcatggggtttggtgcccaacgttgggtcgctacccttcaacgccaatgcgagtgccttgccattctaatgtcctcagcagcaccctctcgagatcattccgcaataacagcagggggaaggcggagcatgatgaagctggcgcagcggatgacgaacaacttctgcgcgggggtgtgcgcgtcgacggtgcacaagtggaacaagctcaacgccggcaacgtcgacgaggacgtcagggtcatgactcgcaagagcgtcgacgatcccggggagccaccggggatcgtcctcagcgccgccacctccgtctggctacccgtctccccccaccgcctcttcgatttcctccgcgacgagcgcctccgcagcgagtgggacatcctctccaacggtggccccatgcaggagatggcccacatcgccaagggccaagaccacggcaacgcagtctctctccttagagccagtgcgataaattccaaccagagtagcatgctgatactgcaggagacatgcatagacgcggcggggtcgcttgtggtgtacgcgccggtggatatcccagcaatgcacgttgtaatgaacggtggcgattctgcttacgtggcgttgttaccttcagggttcgctatcgtccccgatgggcccgggtctcgtgggccaccgaacgggcccacttcctcaacaacaacaacaacaaacggcggcgataacggcgtgacgcgcgtgagtgggtcccttctgacggtggcgtttcagatccttgtgaatagtctccctacggcgaagctcacggtagagtcggtggaaaccgtgaacaacctcatctcgtgcacggttcagaagatcaaagccgcgctccactgcgaaagttaaacgtcacgtgatcggtcacgtgagtctggttttttttttgttattttgtatttattgaggttcttgttgaaaattttaacgttgttgacgatggatggatgggtggcgcgtgtgaaagacgcgtgggttggttgagtcaagaacgaaccgcgcgtggggaaaaaaagagaaaactccttgcatgggttatgttccttaacacaaggcaagggtcgtggttcgggtattgactcgggtcgaccttttttgtttgctcgagtacaagaaagcaatagaggaatggaaaaaaaaaaacaagaaaaaaaaaaggttttgttagcttttattaattaaagtgttataacttgtattgattggagtctgagccgagttttagtttggtgtatgaaatgaaattttttttctatt

SEQ ID NO: 91564 - DNA, 356 bp, Glycine max
  Clone ID: PAT_MRT3847_53697C.1
gagacatggcactgtatcctgctgatctctacttcctgaaccttagagttctaggggtgggtggtataacagggtggaggactcttattttattgaatcatgtgaacaccaaaaacgttactattcttgaccagtcggctcaccatctcgtcaaggcttctcagaactagccatcattggcatgctagaatgttgaacgggatgcttgagatcttccattttcaactgattatgctgatatatatgtatctgcttgaagtattgaatactggccagatccagagcgtggcattacgtaagcatacagagcgctaaggataggtggaatacctcgtgttattgagtctgtacaccca

SEQ ID NO: 91565 - DNA, 383 bp, Glycine max
  unsure (1)..(383): unsure at all n locations
  Clone ID: PAT_MRT3847_53698C.1
caaaaggagaagatttcacctgaacttccctaaaagaaaaaaaaagggttccatattaaatttacttatttcccctgttggcctttttaaaaattttggcggaggccccattttttccccattacttgtgttttgaatcggggggcttgtcggaattttttcatttcctcttattttctttgggtgtttggaaaagggggcccgaaccccatattttagttttttttaaggcaaaagcggagtgcgcacactttccccatccgaaccttgctttttcaccccaaatgggtttcctttccctgaacccaccggggtgtgttcctccttacccgncccccccactcggacagaatttctacgggttttttnttttaaaaaagcta

SEQ ID NO: 91566 - DNA, 2787 bp, Glycine max
  Clone ID: PAT_MRT3847_53699C.1
atgcatcagagaagtatgaatgctgccgttgaccaatctcgcatgggttcttcagctggccaaactatggagagcaatgctagaaaatctcaggaactagatgttaaaatagaatctcaaggattgcaaccaagccaattgacatcttccagttccaacaaaattgctcaagaaacagaaagaacatcagttcacatacaagggcttaataagcagcagcaacaacatctacatttcccatcagcatatggaaatagtggtggtaactataaccctttttctgggacaaccagtagttccacttcatctatcaaatcacaatcgcatgattcacatatgagtcaaatttcgtatcaaagtattggttcaaatcatcacttaggtgggtcaacacatggtttgaatgtaattggtatgtcaaaacttgaacagcagaattctttcaatgatcccaagagactgccaggtggatctgtgtctcctgctgtaaacaatacagtgtctcaacaaactaaaaatgcttggcaaccatcaccaaacaaagaacaaaatctgggcttaatgtcatctgtttcttatgtcaaaaaggaacctagtgacttatctactgagcagcaaaataggcatagtttgtctaaattgcatgggtattctcctgttaattctgctcagcttgaacagggtggtgctagtcaaggaactgtaaaggatgagttttcaagaggtcaagcacctccaagcatgcctcctacatctactggcttgctgccacaaagttctgcttccccttctgtaatgacccaactagaccccagtgtctcgaagctctcagatcccatcaaatgcttctggaattggtgcaaggacatctcttaaaaagcctgctgctgcccaaaagaaaccacatgaagcacttggttcctcacctcctcctgcaaataaaaaacaaaaaacttctgggggatctgtagaacaaagcattgaacaacttaatgatgtcactgctgttagtggagttgacctcagggaagaggaagagcagttattttcagggcccaaagaggatagtcgagtgtcagaagcttctcgaaaggctgtgcaagaagaagaggaaaggctgatcttgcagaaagctccattgcaaaaaaaattaattgacatcatggccaagtgtggcttgaagggtatgagcaatgatgtggagaaatgcttgtcactgtgtgtggaggaaaggatgcgtgggctgataagtaacctgattagaatatcaaaacagagggttgattttgagaaaacaagacatcggactgttgtcacttcagatgttcggcagcaaatcatgacaataaataggaaagggcggaaagcatcagagaagtatgaatgctgccgttgaccaatctcgcaggggttcttcagctggcctaactgatggggagcaatgctagagaatctcaggaactagatgttaaaatagaatatagaggattgcaacaaacaggcatgagcagagaaaattaggaaacgatggagacatggagaaaaatgaggggcggacggaaaccaggagaaggtcaacagcggagtgaatgacaagatgaggaccaaggatgaggatgtgaagatccgaactgctgttgggagagttgatgctcgtgctgcttatgggggacatgacattaagtcaaaatgacaacatatggctgagcaagccaagcagaaacgtgaagggggggtggatgtgtcatctggttctcaaccagctaaagatgtgaaccgcaaatctttatcaacatctggaagaagtacaaaggataatcaggaaggggagaaaaaaggttcatctacttttatagcaagttcagtggctagaaaacttgggaggagtcatgccatggcatctcaaactagagtagctcgaagcatctctgtaaaggatgtgattgcagtcctggagagggaaccccacatgtctaaatctccactcattcatcgcttgtacgagagaattcattctgatgccccagtttaacaaagttaagcaaagtacctaggggggatcttggttttttaattttgtcgctgagcttattaagttattctcttatgcttgctgactgacagaaattgaaaggtttcctcaagaaggaatcggctgttttgacttccacttcacataaccgggataatttacctgttgaatttgatttttctcctttatttatgatcggcttgtgagacgtttgcctagtttttggttccattgtgtgtattcttttgtatagtgatttggtaaaattggaaattagtgccattaaaagataagaaccgcatgggctggcttttatctggagggagtacaaaagcaaatcagcacccctaaaaacttggtccattgttgtttaaatttgctattaaaccaagatagagccggaggagtcatgccatggaaaaaaaaaaaagggtaaatcgaagcatctctgtcaaggatgtgattgcagtcctggagagggaaccccagatgtctaaatctccactcatgcaccgcttgtacgagagagattcattcggatgccccagtttaacaaaggttaagcaaagtacctaggtgtctgggttttttaatgttgttgctgagcttgttaagttagtatcttctaatgctgggacttgatataaactggactttatttaatttttaaacgacttgtgatctacatttctataaaaccctggatagtttacctgttgaatttgatttttctcctttatttgtgatcgccttgt

SEQ ID NO: 91567 - DNA, 509 bp, Glycine max
  Clone ID: PAT_MRT3847_5369C.1
ccacgcgtccggccagaagaaaccgaaactccaacaaagaaaagactctccaaagagtgagtgtgtgttttttttttgtgttggtgtgtgtgtttgcgcattcattcagtgagtgatgtgcaacaagaacagtccttcttcttcggacattcaaacaacctctattatgaagaggacgcggaagccgaatagaaggtattatcataactcttcttcatcctcttcttcttcttcctcgacgacgtcctttaagctccgtctttaagggaacagaacgaaaacgcggaagcccaagttcgtgagcctgaagcttcagttatccgagcctaagaagaagatggcatccaccaagcccaagcccaagcccaaggctgaacaactacaacaacagcagcagttacagcaacaacaacaacaacaacagccgcagctcaatctcttccctctccatccggaccaccacgacatgcacgaggagcagaacatggcgcttctcttcagctccgacg

SEQ ID NO: 91568 - DNA, 352 bp, Glycine max
  Clone ID: PAT_MRT3847_536C.1
ggctcgagatatcccaactgccttgttgcggttgctggcacctaccaagacaaagacgcgctgggggagattacctaaggcccaccaaacgatgcccatcaacacaaaactctgttgctgccacctgcaaccgatatgatgcatctgacgtcaaacactgagctctaacgtccagccgtggactaaaaaaacaaaactgtgggatcactctgaggcatgggctacctttacccgtctctcacaacaagcccagcaccaataccaatgtgtgaccgaccctcatgcgaaagaccacgcgtccttccccgcacgccttgccgatcggaccctgagcctctctccgccccgtgcg

SEQ ID NO: 91569 - DNA, 334 bp, Glycine max
  Clone ID: PAT_MRT3847_53700C.1
aaaaaaaaggaaaaaaaaagatttattcatgggcaatagaatggagaggggggggaagaggatgacggagggagttctgcgcataaagaaaccctgacgtacgcacgccacgaaagtgaaactgaaaaagatccgagagacgattctgaagaaaataaaaaaacggaaaaaaaataaaaaagaaaaaagaataggggtcggaagccaaggaaagtaaaaaaagggggaaacatcgtatagagagcgtggagaaaatatggaagtagacgacatgaatgggtggaaaattgtgggcaaagaaagatactggtgagcacgggcatacgatgcaaac

SEQ ID NO: 91570 - DNA, 643 bp, Glycine max
  Clone ID: PAT_MRT3847_53701C.1
aggggaggaaaattattacaagtttttgagacttaaattttacactttttgaccagagttcaaatgctagcaaagtttctaaaaggaaaaccgttgagagaatcaaagaggatgcagaaagataaaatattatacaatctaaacattgattaaacagattaccaaactttctcattccacagtttacactctaagctacttgtttcatataggcaatgaaacaacattgacaagaacaaaagtaacaaagaaaaagcttcaagatacaaatagtcatttgaaattttcagtggttcctctactttctgctgaacaagcttctcaatttccctctttccaatcgctctagcagctttttagctcctggaatgtccatctctgtaagcttcttcagatacccaattgctccgtatgaaatcatcagtttcttacatttcttacttggagaaagtgatccaaggcaagaaactgcatacttttttgcagtgttctgggggcttggatcaagcaactggaccagatttggcacacttttatcatccttcttaacctctctccgattctgggacagaaccattaggcttgaaatcgcttgagcagcaacctctctagcattatttgctttagcctcaagcatctttat

SEQ ID NO: 91571 - DNA, 428 bp, Glycine max
  Clone ID: PAT_MRT3847_53702C.1
cgcactcctaatgcatgtataattgaacacctcacacaattatttttttcgaacttacactacaccctaagacttgtctcttttacgagatggggaggacgaccttgactacaattaactccccccccatttccaatgctttttcttcaatccaaagaacttatgctattacacatcctactactattaattgcaaaccaacaacttatattctttttcatttcatgtgaaactcattccaccatgcgctttcataaaagtatcactagcacaccatacctacgctttgacattaaaagtaaaagctccacctacaacaccacctcctttgcttaacaactcggttccgtatcatcacgctccaatagatctaatgaccatgctggacgtatgtagaaacatgaccggcggtaagcttcacatgctta

SEQ ID NO: 91572 - DNA, 729 bp, Glycine max
  unsure (1)..(729): unsure at all n locations
  Clone ID: PAT_MRT3847_53703C.1
gttggtgatggggtgccgtgggttcagcagctcagtcatttattggccagcaaaatttctgtttggcccaaaagttatgtaatactcaagattttttacaaaaatggacttacttgcaatcaagttgcgctaactaaatatggatcaatcatctctacattttggccatctcatcgtcatcatcactggcaagaagagagtgaagctgaagcacagaactaatagcaagaggctcacctttcttgataggcaatgtctcagggtcaaggttctccaaactgcttacaacaggattgaattggaaagggaaaagcaacctttgagcttcaactccaagatgcaaccccattttctctaacacctccttcttctcatgtatggctgtgatagtaattttcggacatgttggtgtgcttggttttaaacacttgatgagattagtccactgaagagcattattagatggactgagatcaaggacattaatggctgtttccccttgcaggcttcaataatggtctgatttgtgatggtgtgtgctatctttatgaaggggtagaaatcaaagaatagcttcttgactaattgnnnnncaggagttgatagtnnntttaccaaatggagaactttgggtacaccacgcnnntttttgnnnacttnnncataggctagnncctcaatgaaacaannngnnacgcgnngcattgaatcaccatcaggggaagcaag

SEQ ID NO: 91573 - DNA, 473 bp, Glycine max
  Clone ID: PAT_MRT3847_53704C.1
ttttttttttttttttttttttttttttttttttttttttttttttttttttttttttttgggaacccccccacgttggttggaatctggtcaaaccaaagtttttgggggaatcaaaaaaagcggaaaggcaagggcatttaagggggaaaaaaacaccggaaaattttagggaccaagggggggcaaaaaaggcccttaacaccgggtgggactggggaaaattcctaattgggaagccctgagaaaaaaggcaactttttctggaacgggaaaaattggggggggggcctaagggaaatcaacctcccattaaggggggggcctcaagaacaaaaaaccacccccttaaccggggttccagggggaaaaaaaaacaaaaacccgggctttaatatgatgaaaccccaccagcagaatttcccccctttttttttcaaaaaaaacaagggagggatctggttcccaccccc

SEQ ID NO: 91574 - DNA, 296 bp, Glycine max
  unsure (1)..(296): unsure at all n locations
  Clone ID: PAT_MRT3847_53705C.1
tttatttgaattttgttctcttttttcttcccgcgaagaataaaatattggagataaaattgtttttgaagtgttggaatctatatttgggttttttcattctaaaatcaaattaatgataaaattgcgtatagttttgtttatttagagcaacaactagtncgaaattgctcaaactcaaatcaatttggatctaaatcaattctgcggtattatgaatatttacctatgatcacttaattctgaatcgcgtgatgttgtgaaatttatctgcaggataagcggtgagatcgtga

SEQ ID NO: 91575 - DNA, 274 bp, Glycine max
  Clone ID: PAT_MRT3847_53706C.1
gaaaatcctcaatcatctgtgtaaccaaacgctctctctatgtctctggaaaattctcggggtgtagataaaattttaatcatgtcacatcaagcgtatgctgacaatcaccattatgcttgacatataacgtcaccacctcactcacgctgctatcattctgcatcacggcatcgttcggtatcacagtaccatctagcatgacctcaaacctctcgagataactgccatcatgaatgactttaatgagactgaatcacttgctacaactgga

SEQ ID NO: 91576 - DNA, 1660 bp, Glycine max
  Clone ID: PAT_MRT3847_53707C.1
cggacgcgtgggaatttttcagctgatcaagtcaatcataaggctcatgtaccctatggatggatcgttgggggtttaggagttgcgcttgttctaataatattaactgttattctttgtgtttgtctgagatcatcaaattgttttgctgataccagaactcatgagaaagatgctgagggcaagatctctcataaattccatattcttcggaacccaagttttttttgtggttctggaaggtacatatgtggcaaacatgttgatcagaagcaaacagatggtgaatccagcaatcacacaattatggttcccaaagcttcaactctttggcctgacgtatttgacatggataagcctgttgtctttacatatgaagagattttctccactactgatggtttctctgattcaagtctacttgggcatggaacatatggttctgtttattatagcctcctccgtgatcaggaagttgctattaaaagaatgacagctactaaaaccaaagagtttatgtttgagatgaaagttttttgcaaggttcatcatgctaatctggtagaattgattggctatgcagctagtcatgaggagctttttcttgtatatgaatatgctcataagtatccccttgattgtgtatttaatttggccatgttggcaaagcaatgtgtggatgaggaccccatcttacgacctgatatgagacaagttgtgatatccctttcacagattctgctatcttcagttgagtgggaagcaactctagctgggaatagcagtaacattttacttgatgcttcctttagagcaaaaatttcagattttgggttagcgaaacttgttgggaaagcaaatgagggagaaatttcaactaccagagttgttggtacatatggatatcttgctccggaatatttgagtgatggtcttgcgaccactaaaaatgatgtctacgcatttggtgttgtcctttttgagatcatatcaggaaaagaggccatcatccgatcagaaggcacaatgtcaaaaaatgctgatagacgttcactggcatccataatgctgggagctcttaggaattcgcctgattctatgagcatgtcaagcttgagagaatatattgatccaaatatgatggatctgtatccccatgattgtgtatttaagttggccatgttggcaaagcaatgtgtggatgaggaccccatcttacgacctgatatgagacaagttgtgatatccctttcacagattctgctgtcttcagttgagtgggaagcaactctagctgggaatagccaggttttcagtggccttgttcagggaagatagttacatagaaggatagattcttttttcttttttatctgtatcctgttctatacctttttcgttggttgcttgatagtgatggatccataggaactgggacatggtggtgggtcaatatctatttttggccatttgttttccttaatgctttattatgagctataccttgattttgtttagctgcattctaatatgtcgaaattttttggtgtaatgtagagtgtgttatgacggagctaaagaagaaggattttattgctctgtgatttgtattggtataagttgtaattcgaatttaatctatgcatgtttatattctttg

SEQ ID NO: 91577 - DNA, 416 bp, Glycine max
  Clone ID: PAT_MRT3847_53708C.1
aaaagctagagctttgcaaaatattgggcaaataaccagagaaaatgatggaagctacatacccatggtaggggaaataaggggtaatttgggaaaggacgagaaaaaataaaaggaaaaaaataaatctaagcctttaatttagaagtaaaataaaatctggcagtccaaatacactttcccattatgggatatatacctttcccatgctagccgtcgctatgttcccttttttctattcctcacgtcaaaaactcttttctttaattatcaagtcacatgcatatagcagttaacactcttttgaacaccatcttattggaaatcacaataattaacgagttgtacatcttatttaatgacctctcatatatatatatatatatatattacctcttatcttaaatttaaataac

SEQ ID NO: 91578 - DNA, 540 bp, Glycine max
  unsure (1)..(540): unsure at all n locations
  Clone ID: PAT_MRT3847_53709C.1
ccacgcgtccggccagattgtattagactcacaattgagggcactcttactccacctaagggcttcttaaaatcactctggaaaacttggtactaaagcactttgcgaattggtggacttgctggtgtgtgtcatgtgactgaccagcagttcgatgagttgaaggaattaactggatgcaagcaagtatttgcaacagggagaccagaagccacaattctttggagagtattcacatatcatatgtgaagatgaccgtgcaattgacatagaggtatgtccaagatgcaagaaactgagacctgtttatgattgccctgccgagagctgtcaacagaaacatcaggcttctcagctgtgttagggggttgcacaatatgcatagcacgttgcatccattggtggaagatgcattaaggactttgattatgaagaacatttntgtttggacttgctttgtttgaattgttgaaatcagttcctgcattgtccggagaaaggagggaaggaagctacaaagtgtactattattagtcagag

SEQ ID NO: 91579 - DNA, 705 bp, Glycine max
  unsure (1)..(705): unsure at all n locations
  Clone ID: PAT_MRT3847_5370C.1
aagactccagcatctaaaattttcttagcccctccacctccttcttctgctggttgaaaaacaagaacaacagttcctcgtatctcattttcatgctctttgaggatctttgcagcaccaagaagcatggcaacatgagcatcatgaccgcatgcatgcatctttccaggtactttactcttgtgctcccactccaccatttcctgcataggaagagcatccatgtcagctcttaatgcaacaaaaggaggaagtccagtccctatgaagccaacaacacccgtgactgcaactgggtgtttatatgagatgcccagtttatccaattcagctctaatcagcttactggtctcaaattcctcataacccagttctggattctcatgaatcttcctcctgataccaacccccttctgtcgtcttctcgcagccgtacggacgcgtgggttaatccaggaacttggtggtggccattgcatttgaactggaggaggaatcttaaaagattggtgttgcagccaggaaattaaaaaaggccaaccagttgacccatttcaagaaaaaacccatggctgctttcaactttgaggtgggtctgggaaagaacagtgaacaacacacccatgaacaaacaaaattacacaactcgcacggacgcgtgggcgtacgtcttccggacgcgtggagtcgacccgggnaattccg

SEQ ID NO: 91580 - DNA, 195 bp, Glycine max
  Clone ID: PAT_MRT3847_53710C.1
cgctgataaaggcgcttaatgtagtgcttaacgcagatggagcaactgcttctcttgtataggatcttgatgctggtattggcatgttcactggacaagacttagttgagatagccgatattgcatctccgactgctctctctgtgctggcgcacactgtcgatctgattatgcacacacttgcgaccagactcg

SEQ ID NO: 91581 - DNA, 178 bp, Glycine max
  Clone ID: PAT_MRT3847_53711C.1
ggctgagctcaccccactgaacacaatgggtcacgcatgcggtctccgcgcgggtacgcgctatgctttctcgagagacattatagaagaaggggatgacccctctctcgaactaccttaagcagaacaagggcggtgatattcgaccaagtcatacccaatggtgcgggccaaaagg

SEQ ID NO: 91582 - DNA, 733 bp, Glycine max
  Clone ID: PAT_MRT3847_53712C.1
atctccatcaacatcctcctcaccaaaccctaaccacaatcatgcaagactttttgggctcccttcgccgctccttggttttccgccccggcggtgacgattcaccttttgccggaatcgccaacaagctcggctccgccattcgcaaatcgcgaatcgccctcgaacctcctcctccgatacggtggcgcaagggcgagttgatcggttccggcggcttcggtcacgtctacatgggaatgaacctcgactccggggagcttattgccatcaaacaggttttaattgcacctggtagcgtattcaaggagaatacacaggctaatattcgggagctcgaagaagaaatcaagcttctcaagaatcttaagcatccaaatattgttagatacttgggaaccgctagagaggaggactccttaaatattctgctggagtttgttcctggtggatctatctcatcgctcttggggaaatttggatccttccctgaatccgttataaaaatgtatacaaaacagcttttactgggccttgaatatcttcacagtaacgggattattcacagggatattaagggtgccaacattctagttgataacaaggggtgcattaaactcgctgactttggggcatccaagaaagttgttgaactggctaccatcaacggtgcaaagtcaatgaagggtacaccacattggatgcctcctgaagtattttacagacaggaata

SEQ ID NO: 91583 - DNA, 204 bp, Glycine max
  Clone ID: PAT_MRT3847_53713C.1
acatacgggtgtgagaaaacaacacaggggactccttggatatctaaaatagggcatcattttctcggggcacctatttatgcgattcgagcgtcgtgttctataatctctatttacagagaacacaggtctctcacttcacccatttttaacagtgccctctctaatataacacataaatacaccggacccctctaaaacccc

SEQ ID NO: 91584 - DNA, 252 bp, Glycine max
  Clone ID: PAT_MRT3847_53714C.1
cgctgccgatggttggtgggatgattttttgtggtgacatcacggttatttgcaatacaatttttactggcatggtcattgacatttggtgtgaatattacccgagcccggctcaagctacaagattgttaccgcattacatcaggaggcatgtgtctacgcgtgtgatcggcgttgatcactctattagcgctgatgaaaatgacaagcctcactataggggttacatacagataagcggcctatctggcc

SEQ ID NO: 91585 - DNA, 330 bp, Glycine max
  Clone ID: PAT_MRT3847_53715C.1
gggaggggggggaggatgctaactcaaataccccaaattttatcctccacaacatctacaaccatcggtgttttttaacattctcacacccccccaaaataccaacaatacttatctccaaaactactattatcttttcacatttctacacccaattaaaattttctaattaataacccttcaaaaccatatctttaaaaataccaaccaattatctacaattttttcacaacatcatctaattaacattcattcatataccattcttacttctcaataacaacccatcttctctataaatattttatatactttaaataaatcatacct

SEQ ID NO: 91586 - DNA, 190 bp, Glycine max
  Clone ID: PAT_MRT3847_53716C.1
tttaggacatgtttggtttgagaaaatgttttctgtattcaatttttaaagtgatgggatgggagtttaagttattttaaatcttatcttacatttactttgtttactattttccatgttcaacaaattattttcgttggtccctgcacaaatccttgacaatgggaacaaagtaatataagatgatatt

SEQ ID NO: 91587 - DNA, 133 bp, Glycine max
  Clone ID: PAT_MRT3847_53717C.1
atactacaagaaccaattttaatttggaagcattaaacaagggcggcgagaacggccctatgattgtctacactcatactacacaagtctccacaaattcaatattcctaaagggatacatttcatatatgaa

SEQ ID NO: 91588 - DNA, 239 bp, Glycine max
  unsure (1)..(239): unsure at all n locations
  Clone ID: PAT_MRT3847_53718C.1
tcctctatagcggccgctccgtgtgtttttttttttaaatanttttcgagcgaaacaaaaacatatccatgtttttagaacatcaaataaaacaacaaaaatattttaataggctgaattggttctcttccacccaaaaaaggaccaataatcccccaacaaaaaactaccccgacccgcggggagaatgaaactaataccctcccttgaggggattgaccacatcatagggaataggg

SEQ ID NO: 91589 - DNA, 176 bp, Glycine max
  Clone ID: PAT_MRT3847_53719C.1
ctataggctgggccatacatggggctctgagtctgatgggctctttaggccacctaaaactccttggcttagccgcgacgttaaactctaataggataatggcactgactctgggacccactcccgctgatatacgcagccaccccgtgaccccctgagaaatcttacgcggttcc

SEQ ID NO: 91590 - DNA, 258 bp, Glycine max
  Clone ID: PAT_MRT3847_5371C.1
gcactagaaaatgagaatggaggcaaaaatcaatttaaacaggactcactataagtaaacaaatagaagttgtcggacatgtttacacccatgaacccttccctgccagagaaaatagaagttcctagcggaacggataatctgtggggggttagcagaagagcttcttgacattctgatccaccgagtaggaagagagacaatctcttagtcagagccctgggctttcttcttacgaagctgcctcatgtaaaattc

SEQ ID NO: 91591 - DNA, 341 bp, Glycine max
  Clone ID: PAT_MRT3847_53720C.1
cagatccattaggagtgatcgttatcatcccacaggtagccaaaaaaagtatgggcggcgtacaagcttgcaaaatccttgggttcatggaacatgtgagttatcgagtgagcacctgccacagctcaatcgaactacgttaccgttagcctttgcacttgccatgaccaccaggaacacgatggaagacgcctagaagaacactatgatattcgccttaatctgctggctcgactggctcaagggtgccttcgtaaactgaattttcaaagctgttagtttgatggccgtctatagcatcctgggctctgccttgggatccacctctcaccgtacatatc

SEQ ID NO: 91592 - DNA, 422 bp, Glycine max
  Clone ID: PAT_MRT3847_53721C.1
cgtaagctgcgcacttacgttcgcgctcgagccgatcgggctcgaggcttggaaaagctagtggtctgaatgaatctgatgcagaggatgatgatgaccatcacgatcatgctgatgaagatgttggtgtccctcctgtcattgctacaaagcaaaaggatgcccttaaggaagaacccattgacaatagcccttcaaagccaacagcaacaggacctgctcgtggaacaccttcttcaaagtcttcaaaggggaagagaaaattaaatgaagaaacaaagccatctaataccgcaactccaaagaaggaaccaaaattgtccgccaaagatgtaaatggatctgcatctaaaagtagtgcacctccaaaaggtacacctccattgtcatcaaagggcgggtcttccacaacaacaacagct

SEQ ID NO: 91593 - DNA, 1189 bp, Glycine max
  unsure (1)..(1189): unsure at all n locations
  Clone ID: PAT_MRT3847_53722C.1
ctcgagccgagaagccataaaaaaactgatgaggatgatgaaggtcatgtgtctgataagggagaggaggatgaagaggaggaatcagaaaggaagagtagacttggacttaataaaagagctggtgaagatgatgaagaaggtccaaggggaggggaccatgatctagatgacgacgatgttgagaagggcgatgattgggagcatgaagagattttcactgatgatgatgaagctgttggcaatgatcctgaggaaagggaggatttggctcctgaagttcctgctcctcctgaaatcaagcaggatgaggaggaggaagatgaagataatgaagagggagaaggtctgagtaaatctgggaaagagctgaagaagctgcttggaaaagctagtggtctgaatgaatctgatgcacaggatgatgatgacgatgacgatgatgtggatgatgctgttggtgtccctcctgtcattgctacaaagcaaaaggatgcccttaaggaagaacccattgacaatagcccttcaaagccaacagcaacaggacctgctcgtggaacaccttcttcaaagtcttcaaaggggaagagaaaattaaatgaagaaacaaagccatctaataccgcaactccaaagaaggtgaaagcagaaaatttaagtcactgatttttgtgagattgcttgactattaaaattattgctttacttttccttttcataaaaatgttggctgcttggttaacttcgataaatttagcactgagcaattaccttggtttttaggtttatttaagaaagctattttattgcgaaagtcgatactactgaattggaaaacttttttgagaagatttggacaaaaatgctcttaatttaacttggaagcaatttttcctttgatggattcaaacacattatggcttttattgtttgtttataagatgagagatttttaaaagactcttttatcaaagaactttttctgttacaaaaagaacttgattttagatgctaatccaaaaggttttcctataaatatcattgaaattctttgttatcttattaaatcaggaaccaaaattgtccgccaaagatgaanatggatctgcatctaaaagtagtgcacctcccaaaggtacacctncattgtcatcaaggngcgggtcttccacaaacacacagctct

SEQ ID NO: 91594 - DNA, 454 bp, Glycine max
  unsure (1)..(454): unsure at all n locations
  Clone ID: PAT_MRT3847_53723C.1
ctcgagccgttcaatttctatacttagcttagttatcttccgttagtttgcgttcgtatcaaactggtccgacctgcttttttttcccagccatgcccgaccaccatacccgccagacgaccaccgataagctcgaagaggccgtccttcgtctttcccagacccaagccgccctgaccgaaggccaaacttccttatcacaaggtcaccaatccctcaattccaaaatcgataccatccacaattcactcacctctcagattgaatccctcttcgactgtctcgcggccatctccctgcaacacacaaactctcccacccccaattcatccccgttaatacctncggcccccgttgcccggcaccaccacctgaaactcgatgtccctcgcttcgacgggcacgacccccttggttgatatttaaaaaatccagttctttgattaccagggga

SEQ ID NO: 91595 - DNA, 1068 bp, Glycine max
  Clone ID: PAT_MRT3847_53724C.1
ccacgcgtccgcaaactcctgctcatgtaaacagaattttatgaataattcagcacgtgacacgattccaatcctcatttgcaaaattaacaactcactttttatagtgttccattataaaatatcctaaaaagatactgttagatggtgtactaacatgtaagtgtaagtgtgcagttgatcgagttgattacggctgcgagaagacgacagaaggggatgtcattggcgagtgatcaataaaatactaagttatttagtattatgttctgtcgtaatcctttcaagtcacaagctttaaaagagggtgtaagtgtaacttttcaattcctcaacctcaagataataataaagctaaatcatagtagtgaggagtgactagtacaaacagaatccaaagctttttttttcttcttcttcttcttctttctaacgccatgtctgggagccaccaagagcagccactgttagagaactcgttcatagaagaagacgagccgcaagaaacagcttatgattcgtcggagaagatagtggtggtcggagtcgacgagtccgatgacgaggagaattgggggagagtgccccgattctcgtggaagaagctatggctgttcaccgggccgggctttctgatgagcatagcgtttctggaccctggaaacttagagggggaccttcaggcgggtgccattgcagggtactcattgttgtggcttctgatgtgggccacagcaatgggcctcctgatccagctcctctcggcacggctcggcgtggccacagggaagcacctcgccgagctctgccgagaggagtatcctccgtgggcccggatagtgctctggatcatggcggaactcgctctcattggctccgatattcaggaggttattgggagcgctattgcaatcaggattcttagtcatggggttgtgcccctttgggctggggttgtcattactgctcttgattggtttatttttctctttcttgagaactatggtgtgaggactttggaagctttttttgctattctcattggtgtgatggcaatctcgttcgcat

SEQ ID NO: 91596 - DNA, 1371 bp, Glycine max
  Clone ID: PAT_MRT3847_53725C.1
cttgcgtgtgtatgtgcaaagatgaggactttaaaggctcaagtacgtctgcagtgtgcacttctcttgcatagggagggaaagagcgaagactagagaagaaagagaagcttctgctgcatcactatggcgttggcgctgcttcttcctgttcttcttcttcttcccacttcgctttctgtttctgctcaaactcaaccaaactaccactacgcctcccaaatcagccaaatcaacctcaaaatcgctcacttagaatcggttcttgaagaaagtaacacaagattaaaggaaagggatgcgcacctggaagagtgtgagaggcgaatgaatgaattatcggaaaaaattcaccatctgcattctactctctctgcaatgaaggctgattcattgcatgctgagagacagtatacagctctggaggaagaggtacaacttctttggcataccttgagaaggaacaactttgatcttcatattttggaatctaaagcacaagatgctgaagagagactggaagagcttacctcaagagttgaaaagatgggtgacattgtgaatgaacagtggattcaagttcagcatcttgagcaggctcttcacattaccaaaatgaggactctaaaggctcaaaggctaacaagtgtaacaagatgcacattcatgaagtttatcaacgtccttcttgatgatcttcgggcacttcattcatatgtatttggtgaaaggactatagtcagttcactcatctcacagactttggatcagttgaagagatgctcttcattgaccaaaaaatatcaccatcagcttcaaggttttatcaaagatctgatggagagaaatgaattgactgcgtctattgcaaatgatgaattagtcttcttcctggcttctgctctaatcacctttccattaatgagtgcctggatgttgctctcttcataatgacctggcaggcaagtttgttttttttttttttaaaactgaacagaaaattgtccccgtacttctttctacagctacaaactgctgacaactttcttcgaacatttctgcttcaagaatgtttttcagtgatggtggactactgtagttttgatcttgtatcagtgtatggttgcaagtagccgagaatactgagcattttatataactattttgcctgtacatatccatctggatagtaaatccctgtgtttcgaaatacattgagtagggaaagaatcttgtcaaatcaacaaatgatgcaagagttacaattagtagcttcaatttagacatggaaaattacatcccagatgtgaatcagatattcaatatctttttagtttgtataatctgagtatttgtttttagtctccataa

SEQ ID NO: 91597 - DNA, 419 bp, Glycine max
  Clone ID: PAT_MRT3847_53726C.1
tattttttttttttttttttttttgggtcccggcaagcactaaattatgccatgatcacatccttaatatcaatattcaacagatactaaagttttttcatggtgatggccccttggccagcggagtttttattgctcgcatttaaaggctcaaatgaactgttccgtggtcttcgtagccctcctcaaagaagctacccgattgcagcaaaagctcccagtggcccatattggttgccacaactttccaccagatgaagggcaaaagattcaccttgacgcccaaagcagtcgattgcaacatgccaagtataggtgtgttccccacttcagactgagtaaaacatgcattttccgtttactatgaaggataatctacacctgcgggtctggcgaatgcgagtcaatttggtgacaaa

SEQ ID NO: 91598 - DNA, 141 bp, Glycine max
  unsure (1)..(141): unsure at all n locations
  Clone ID: PAT_MRT3847_53727C.1
aaaaactttccttgcctggcctctttcccattnnaattcttccttcatgatcatcntctcgctttgcttganttttatgattattcattggtgattcttccacttcaattctttngttaccgaattncacaaccttacnag

SEQ ID NO: 91599 - DNA, 463 bp, Glycine max
  Clone ID: PAT_MRT3847_53728C.1
ctgatgacaagctcatcttccaagttctaatctcaaaatggaagcaattccttattcaatcccctccaccaaattgcactcatctcttcatatttacaccggcgttacacgaattcgatccctccctcttcgccctcccccaatctcaatcaaacctctatattcccccaatttcctcattctccatcgccacagacttcgctgcgtcgctgaatcctccaataatcatcatcatcatgaccacgaccatcaccacggccaccaccaccaccatcatcatcatcaccactcccacggtgctaatctcaccgggcctcaaaaagctgtcatcgctttcgccaaagccaccagatggatggacctggcagacatcctgagggagcacctgcatctttgctgcttctgcaccgctctcttcgtcgccgccgcaatttgccctcacaccttgcccaagccactcgtc

SEQ ID NO: 91600 - DNA, 876 bp, Glycine max
  Clone ID: PAT_MRT3847_53729C.1
ggcgttttgaataagcatttaaccgaaaacagggagactcgccatgttttgcttatctaacctttctactatcaaacccattgtggctaatgccactcttccccagaacaacgattctgatcaaaccaaaccttcaattccagttcccgccacaaaatctttacctcgcagaaacaggcttcggaatggagccccaaagccttctgtaatgcaaatggaacgcattgttggcgctggaagcttcagagtcaccgaaccccctcctctccgggattctgacatgcggaagacggtgatggacttgttcttcgggcaagcaatggaaggggaggtgcaaaagaagatgagggagacaggagagtggcactccaccaatgctgagcctagaattacttctgttagaaaaggaattttaatttatatgtttcaatggattctttcaatttgggctatattactcctaaaagcctttggagccatcaagttaccattcaacagcccttttcttgatgatctgctcatgtgagcataggtccatacatgcagatggtccaaaagccaaaatttaacatgtccgacttcaatgagttagcatcccctctagtgattggaaaacactagtagaaaagagaaaaatacaaacaatttgtgggtcccaccatgttggtgggtcccacattgtttgtgtctcctactggtattttctagtatcaaagatgagttgttttcgggttcaattacctgaacactgtatagattttccctttttgtgataactgtgtatagatgtttcattgctctacaaatgcaagtagatttccatacaattatatacttgataatatcatgcagtatatttggatgtggtatttaaac

SEQ ID NO: 91601 - DNA, 2169 bp, Glycine max
  Clone ID: PAT_MRT3847_5372C.1
tttttttttttattattatttttttttttttattttagctttactgttgtttcatggttttgggattcacatcatcagactaattcacacagttcttacaaagatatcatctaaaatagtcctattttaatttactattatatttcacttttgaatacaataacagttaactgatatataaaaagttaaatatattatcaaaataaaaagttgtctgttctttcccatttgatttgtaccctaaataaacaggggttaatgattataatgtggaagcactatggatttattttaatttgaatgcaatacatttagaactaaggatgtaaccaaccaatgcctcactacggcgtgattgcacctacaaataacccaacaagggctttcaacaatctgcgttgtaaactataattcatcgtgatgtttcccctccactactggtatgtcctgatttaatttgagaagatagctactagctaatgatacatgaagtgcagctccataaggaagtgcatcctcattgattttgaaatatggagagggtggagatttcaagatgttcaatagagacattctcacattccaaggaggaagatagtatcccggaaaaacctcttgatagaatgcaaagtccctcagatcccatcaatggttgcatgtccttaacattattagacgccaagcaaactcccagcaacacttttaaagtactcatgcaagtcaccattgtttactgtaggagggaagaaaggtttcctcgtcagtcaagaaagttgaccgttgcattgcatctctgcactgcagcttgcccagtgataacctgttcaatcctctgttctcagttgcatgaagctttcttttgaaaaagctcggaaggtgccaccaattgcaacagagtctggaataacattgaaagcaccacctccttgaaactttcctacagtcacaacctgggagtccagaatcaacctcattgccgagaaacacatatgctgtaaactaaacaatcacattggaagcagccaatattggatctatagagtgctgagggatagctgcatggcctcccctgccatttattgttgcttcaaagaagccgcttcctgcaaatatgggacccgaccttgaggccacttcaccaataggataggtaggtacaatatggcaatccaaatatggcagagatgttttccaagactccagcatctaaaattttcttagcccctccacctccttcttctgctggttgaaaaacaagaacaacagttcctcgtatctcattttcatgctctttgaggatctttgcagcaccaagaagcatggcaacatgagcatcatgaccgcatgcatgcatctttccagggtactttactcttgtgctcccactccaccatttcctgcataggaagagcatccatgtcagctcttaatgcaacaaaaggagggagtccagtccctatgaagccaacaacaccagtgactgcaactgggtgtttatatgagatgcccagtttatccaattcagctcttatcagcttactggtctcaaattcctcataacccagttctggattctcatgaatcttcctcctgataccaatcatccaatcaaaataccagaggatccttggctaaatcaaggaacttggtggtgacgattgcatttgagctggaggaggaatctgagaagatgggtgttgcagcaaggaaatgaaaaaagacaaacaagttgacccatttcaagaaaaaacccatggctgctttcaactttgaggtgggtctgggaaagaacagtgaacaacacaagatgaacaaacaaaattacacaactcacaacaccaaaactcccggacgcgtgggtcgacgtagtaattccgtcaataaaatgggtcctagagagagtccatctattccgaagctccagtaaaagtcaaaaaaattgatccatttataattttctgtctattggattagtggatcatccagttcgaaatgattaacaaaatacataggatgttataaggagatcaattaaacatattcagatagtatcccatttaattaccttatttcctttatggggaaataagaaaattaaggagcccccgactattggcaaaattacaactgttgttaaccaaggaatataattccggacgcgatgagcgc

SEQ ID NO: 91602 - DNA, 527 bp, Glycine max
  Clone ID: PAT_MRT3847_53730C.1
ggaattcttcaccagggaacaaaatcgacgtcgtgaaagaagtgcacaaaatcgacgtcgtctattacaccatataattacactgtgaaccgacagttggtattaacacaatggcccaatagagtagaccgagaaataattatctgacaaatatactgttcactaaaaacaaaaaaatgatgagaaagcctgaaaattacactatatatatatatatatatatatatatatatatatatatatatatatatatatatatatgaaatataataactttatactatcatttaattaaaaataattatttaaattattttaaaataattattttaaaaatcaataaatttatcatacataataaatatttaatataaatattgattaaatgattatataaaaaatttatactatctttgtataatccttttttcatataaaaatattagtgaatggtgttttgagtttcaaaattttataaaatttcgttttaatttctaatttataaatattactcttttaatataccc

SEQ ID NO: 91603 - DNA, 123 bp, Glycine max
  Clone ID: PAT_MRT3847_53731C.1
gggtcgtgtacgaatggatacaagtgcgttctaaccagtcttctgtaactgaggtgcatactttatgtactagctagctgtataagacgacgcccgagcacatggacgaaaaagttcaacaac

SEQ ID NO: 91604 - DNA, 277 bp, Glycine max
  Clone ID: PAT_MRT3847_53732C.1
gcaactttgcaatttaaaaagttagcaaattgtgatttctctaaagaaaaccttaaaccaaatgtctaatgttttggggggggctcctggggacagggcgagtttttggtcacacctcctttatgttgcgtgtaataatctgaaaacgcaaaaagcttatcttgcaaatctcgaaaatgtgtaacgagatttgtttttgcacatcccagagaaagctccccatttgaaagggaaagctctctctcgtattgaatggctgcaaaaagctgatgtgcct

SEQ ID NO: 91605 - DNA, 987 bp, Glycine max
  Clone ID: PAT_MRT3847_53733C.1
ggctcgagaaatcatcaaccttctacctagtgatgatactgattccaatggagaagccaacccacatagtgattgttccaagtcctggcttcagccatttactttcactcattgaattttccaaaaggctaatccaccactccaatggcttgcaagtcacatgcatgattcccacacttgactcaccctctgaaccctccaaagccatacttcaaactctcccttcaaccattcactccatttttcttccctcaatccacttcaacaaagagacacagactccaatagcagtccaagttcaactcgcagtgactcactctcttcccattatccgtgaggctttgaaaaccataagtttaagctcaaggctagttgccatgtttgctgatatgttcgcaagtgatgctcttatttgtgctaaggaactcaacttgttgtcatttgtttactttccatcatcggccatgacactctctttctgtttttatctaccgaagttggatcaaacatttccttctgaattcaaagaccttacagaacccatagaaattcctggctgtgttccaatatatgggaaggatttaccaaaaccggttcaggatcgaaccggccaaatgtacgagttctttcttaaacgatgcaaacaactccatgaaaccgatggggtcttggttaacagcttcaaaggcattgaagaagggcctataagagcattggtagaggaaggaaatggttacccaaatgtttatccgattggacccattatgcaaacaggattaggtaatttaagaaatgggtctgaaagtttaaggtggttggagaatcaggtaccaaattctgttctttatgttagctttggaagtggagggacactttcaaaagaccaactcaatgagctagcttttgggttggagctaagtggtgagaaattcttgtgggttgtgagagcaccgagtgagtcagccaattcttcttaccttaattctc

SEQ ID NO: 91606 - DNA, 402 bp, Glycine max
  Clone ID: PAT_MRT3847_53734C.1
cattgtttcacatatccgtatctgtagaatatttgtttctctaagcaatgcactttactctgaaggcttcttatgtgaagatctttttatccaaaagttaagcaggaaatcttcttaatttgaaagaaggaaacagcctcattatgaaattatcagcagaatgcaaaagtttacaatgtaccacaattctggtttatacatagcaccgcttatggataaaccttttgctggattgaaccgtttttgctcgttctcattaaaagctagtgccattgtatagctggattttgcctttgttttcacatcacgctaaaccttacgtgtcattttactttcctttgtagatctatgattcttgtaatgacacataatctgatcttcttggttcttcttttggaattt

SEQ ID NO: 91607 - DNA, 399 bp, Glycine max
  Clone ID: PAT_MRT3847_53735C.1
ctcattcattattcctcattacataacgctaattcactctgtgacggtgaaacactgatgagataggggtctttcgaaggaagatgaataactctttttaaaaaaacagttttatcattgagagtattgataatgattacgagaaggatttgcttaaacgcggacttgatggaaacgattctgatttgttcaacgacttgaatgaaaaccctccagagtgaagacgccatgtctacaacatccgatgagctcactgacaccggcagctgatggaactacatcgtcgactgtcctgcgtaatcagagcgtattttctacacccttgccttactcgactgaccagtgctcaccgttctacttggttaactgggtcgcacactcttgaaacactcgctttac

SEQ ID NO: 91608 - DNA, 736 bp, Glycine max
  Clone ID: PAT_MRT3847_53736C.1
ccacgcgtccgatttttttccccctctcagataataaaatgcaaaaactgggaattttgggagctagaaggtggctctgtcggagcatttcttcaagtccattgcgggtgtgtgttgttggaagtggccctgctggtttctacactgccgagaagatgttgaaggctcaccaacaagcacaagttgatatcattgacaggttgcccacgccttttgggttggttcgctccggtgttgcacccgatcaccctgaaaccaagaaaacttgcaacagattgtcatcaaccagttttcaagagtggcacaacatgaacgatgctcatttttggggaatgtgacccttggatccagcatttctctctctgaattacgcgagctgtatacgccgtgggaattttgggggctagaagttggctctgtaggagcatttcttcaagtccattgcgggtgtgtgttgttggaagtggtctgcgtggtccttgcatatggtgcggaaatgaaggcgaagtcttggtattccaggggagaacttgaaagggatacattcagctagggagtttgcgctctgttattgtgcccacccacatggacaaaatcttgagccgcaactaaatgtcactgacccggctgtaatctggcacaacatgaatgttgctcatttttggggaatgtgacccttaggacctactacagagtcagcaacaactgatattgccagtcatgcattggctacttt

SEQ ID NO: 91609 - DNA, 676 bp, Glycine max
  Clone ID: PAT_MRT3847_53737C.1
cccacgcgtccgcccacgcgtccgcccacgcgtccgctcaaagctattatttttctcctttgttgcaatgaaacaccaccccatgttgtctaaatggcttcttttcatctttctcacgtactactcaacctatctcactgtatcacattcgttgaaaattccaaggttgagtcccattgctgaatgggaaacaactttacacaaccgtgcaactgtggttgcaactgatacagatacagagaacctcataacattttactacaaacaagttcttgatcacttcaactatagacctgaaagctacaaaacctttcaacaaagatatctgatcaatttcaagtactggggtggtgccaattctagtgccccaatatttgcctatttgggtgcagaagaaccaatagatggttcccctgaactcataggatttctcactgataacgctgcttcctttaatgctctcatagtatacatagagcaccgttactatgggaaatcagtaccatttggatcgagggaagaagcactgaagaatgcaagcactattgggtatttcaactcagctcaagcaatagcagattatgcatcagtcctcatacatattaagaagacattacatgcccaaaagtccccggtgattgtgattggaggatcatatggaggaatgcttgcttca

SEQ ID NO: 91610 - DNA, 1629 bp, Glycine max
  Clone ID: PAT_MRT3847_53738C.1
gccgacaagtggttagaatgcctatcaaaaatttgtgcctttcataatttgccacttcccactgacgatgaaaggcttccagtcggtacgggtagcaatcctgtttatttagtgggaaactctgttgttaagatttttgttgaaggaggactggaagcttcactttatggttttgggacagagctagagtttcatagtctgttgcatgaagccaactcccctctcagtaaacacattcctgaggttttggccagtggaattatttatcttgaaaatggatcttataccaatttaagttgggatggaaaaggagtccctgatgtcattgtgaaaaataatctgatcagggagaaatgcagtgttgatggtttctcatttggggtatggggaaagaaacagttagagtacagaaatgctgggatgccggtggatggatcagttagcttagctggtaactcaagcatatggccatatatgataataaaacgatgtgaagggaatatgtttgcagacttaagagacagactaacatgggaagatacaacaaacttggcctccttcttgggggagcagctacgccaccttcatcttttatcatatccacgtctaaatatttcatctttctctgatattgaacatgaattaggcttgggtgaaggctaatggttgcattgcaactgttcactgtaaatctaacgctacagcagaatggaggctctttaccagaaccttaacaaagatgaggaaggatgtgtcaagccgtttgaccaagtggggagatccaattcctagcaaactgatagagaagattgatgaatatatcccacctgattttgctgagctgctaaatataactgagaattttggaaatggtgcttgtaaaccttgctcctggatacacactgacattatggatgataacatttacatgaaaccatcattggtttgctctaccaccagtgggaatactgaagataccaccatggtggacaatggtttgttgagtaacgatgaagtaaaatcatggtgtcctagtaatattcttgattttagtgatctttcgataggtgatcctcttgttgacttgataccaatttatttagatgtgtttagaggtgattcttatctccttaagaagtttttagaaagctacaaacttccttttgctagtaacatatcaagatatgagtcaacagagggtgatcaaaagttcggccgactttcatatgttgccatgtgctattgtatcttgcatgatgacaatgtcttgggagctctttttagcatatgggaagaactgagatcagcaaagtcatgggaagaagttgaactaacagtgtggggggaattgaacaattacaaaggctttccgtgaccattggctgcatttaaatatttttggagcctgattgcacgtcggagcccctgcaataataaatattcaacttgttctgtagctgtgaaggaggagagagaggagtttagctcttcaattagttccgtgaccattctgtttgaattttgatattcataataaagtttccctccgaatatagttgatgtacttgtgaagtaattaaattattttttccccaaaatcacatttttcaacctagcctcttcttgagt

SEQ ID NO: 91611 - DNA, 399 bp, Glycine max
  Clone ID: PAT_MRT3847_53739C.1
atataccgacaggggaacaccgcacactttccaaaacgcatccacctctccacatgtaaaaccctgcctttacccaccttcaacgcccagcagctcacccacctgtcaccaacagacacaattgccaataccaccacaccaatcacccttcccacactgttcacatccctaacggcgaaattaacgctcactctacctgcccttacagcgccgaacgtgtcgatctcacgctcaacgtaccctctacacatcacatccaacaatctcccgacactaccactgacaaccctcacttctcgcctcacaaatccgctttccacaaatacctctaaaccaacaactctccttatcattcaactgtagatctttacatacattttacccactaaaactacttta

SEQ ID NO: 91612 - DNA, 232 bp, Glycine max
  Clone ID: PAT_MRT3847_5373C.1
gctgtgcctctcttatagagcggccccctctttttttttttttatatcttaaatgtctcgactgcacatcttatataataactctatataagtactgtcctgtattaagacactgataaggtaaaacgcatggaagcatatatgaatgtataaagttcagctacatatttgcatgagccactgtaatgtgatatattcctactgtgtcctaaggtgcccataatggcaggac

SEQ ID NO: 91613 - DNA, 125 bp, Glycine max
  Clone ID: PAT_MRT3847_53740C.1
cgtcgctaaagcaccacaaaaaggggagcagggggctcatctctatttgtcgaccgcaataactgtcaataatgcgtcgcttctctgcgtcattgatgtctacgccgctagacttcttcgaccat

SEQ ID NO: 91614 - DNA, 216 bp, Glycine max
  Clone ID: PAT_MRT3847_53741C.1
cgatctaggttgcgcgaaatatgaagatgaatactgagatcgaccaggcagtaattgatacctgaaaggtctcggcaggcgcagaaggtcactttagaggaagtcatggtaaaactgtgtctggggatagtaaaacctgtgaccggcgtcaaagtgtgataagctcacaatcctatacagtatactatgcagaagcacaaagtatggattctagca

SEQ ID NO: 91615 - DNA, 484 bp, Glycine max
  Clone ID: PAT_MRT3847_53742C.1
agaagacgacagaagggtaggtataatttttaagataattgttattaaaggaagaatttattatacatgataatatgtggtataaattctttttataatgtcaatacattttaattaaattcttcaattcttcaaaggacaccccaaacactgtaaaatcttttgatttctcctttattttattatattttttagttcatttatatcgataaagtggcttacgcatcatttctatcaaagaaaaacttaattgaaatacagtaccatctaattatgcattgtcatgtaattaaaatattttaatattttatttaaaatattttttatttggttgatgtgtaaaaacatttttattaaaagaccacatgtattatccatgaaagataattttattcgagttggaaaagactaatacaaacaaaaaaagtttcaaaaatatttaatgtaacggtaaattcaaaatttaagttgagatcactaattt

SEQ ID NO: 91616 - DNA, 299 bp, Glycine max
  unsure (1)..(299): unsure at all n locations
  Clone ID: PAT_MRT3847_53743C.1
ccgcccaaaattttttttanaacgattttttaaacccttgttctctgcacaaaaaancaccaaaatccccgccctttttaaaaaaccttatggcaattataaaatctctcaagaatttcaacttctcaaagtttatatcgcaatcccttataccacaaatctcacatgcattgaaataaaacacccacccatactactccctttacctgtcacccccgcataacttcactccacacctgcacttaaacccggtcagccccacgcgctttcgacacctatcacacccttttccatttccc

SEQ ID NO: 91617 - DNA, 136 bp, Glycine max
  Clone ID: PAT_MRT3847_53744C.1
agatactgccacttccttcttaagccataatatctccatacaattaatcagtactactcagactaataacagtagaaatggaaaagttgaaaaagaagtctatgtggaaaaacatcttccaaccttgccaacatta

SEQ ID NO: 91618 - DNA, 242 bp, Glycine max
  Clone ID: PAT_MRT3847_53745C.1
ggaagatatagacaccgctcctggcttcagtagattcaattcattcatcgagagcaaacgtatgcggtccagtcgtgtagcattgcttacatgtcattaactgcatcttctaactggtggagggagataaaacagtcttcgttcaggcaggatccgattttcgacttacttacaatcatctatggcattctctgcacggtctcgcacgctcactcactgtggatatggtgatcagtgacggc

SEQ ID NO: 91619 - DNA, 809 bp, Glycine max
  Clone ID: PAT_MRT3847_53746C.1
gagaatttgttctaccctcagaaagtactactgctagcttacttggaaacgcagagggtgaaccatccacacaatccagtggcatcatatctccctcttcgtccacggttctgagctcagatgtgggaaatgcttcccatggaaggcctttattacctaaaatctccgaggaaattgttaaacttgctgatgcaagttctgaaattcaaaaaagcattcaacaatattctccttcatacatttcatcaagtatgaaacccaactttgaaagatctttacagcctcaagtgactcaagaggatagcatgactcaagaagatggcacaagagatcagagatttaataaagattctctggagaaagttagtaatgtttctaaaactggagttctggatgacaaagagaaaatgaaggagggaaggaaaggacaagaacagtttactatgaggaatgaacttttagaaaatgagctcgttaagaattcatctgatgatgattctacaaagaaagggaaattcaatagtactactcatttgctaaacaagaaattacatgatcattcaacaagtattttgatgaatgataaaacagaggatgtgacaaatgtgaagtctcctccacaatcttctgagaactatgggatgttcatcagcaatcagaactttgaaagatctttacagtctcaagtgactcaagaggatagcatgactcaagaagatggcacaagagatcggagatttaataatgattctctggaaaaagttagcagtgtttctaaaactggagttatggatgacaaagagaaaatg

SEQ ID NO: 91620 - DNA, 633 bp, Glycine max
  unsure (1)..(633): unsure at all n locations
  Clone ID: PAT_MRT3847_53747C.1
tcactccaccaacaaactgattaagaattgaaagacaacaattgcacattttttaagtagctaagataacaaataatatatattatttacacataaaataaagattttgtatgaagtagcaatgaacaaatcaaagaactagctctacccatcaaagaagagctaacaacacactctctaacactttttctaattggttaaaatttattaaaaactacaacattaagagaaagaataattaaatatgatgtgaaacccataaatttttctcatttttaataaatttcaaccaacaagagagatggtgtttaaaagggtgtgacagagagtatgtttctagcatttctcacccatcnnntatctttcatgtttgtacaaggaatgtaggttgttgaagaacggtgtttcttctgtttggagttgcgcttatgcttgtgcagattagtagaacatggcaacacagggctctctatagaacaaagtttatgcttcatacgccacgggaagagtagttccaagccacaaccctttggagaagaagcatatgaatgccttgtgtaacaccctggatagctacaagtatcacaatctttctcttctaagttagtagaaaaatgcaaagcagatgatgca

SEQ ID NO: 91621 - DNA, 396 bp, Glycine max
  Clone ID: PAT_MRT3847_53748C.1
ctggtacgcctcgctgttaccggactcgaattaattccgcgctcgaccatctcctaggacgcggccgcgccggccgttccttttgagggtgaccttgtttccttgactgagaagggaccaatgcatggtcaaaaaggctcctcaacgcctgctctcgcggaaataaaagaagaaatccagctaccagagaaaagggtggggtcaaagaggaaacataacggactattcatgaaggggcgagctttggcctttttacttctaacccgttcagaaaggaggctcctttctgctcagggaattcacttctacttggggttattccagggcatatcaggccattaagataggcgtatactagactggtgaacaggctgattgattctgccagggattaat

SEQ ID NO: 91622 - DNA, 246 bp, Glycine max
  Clone ID: PAT_MRT3847_53749C.1
aggtgctaactaatcaactgtctttagggtaccaattaaagattttaaaatatttttttctagaaaaatattcccaacatatctcaccatagtttttcatgattttttcattaattttttaactagtgttgttagaacacccaattacaggactcttttgttgatcattatccttaagaaaatgatttttttggcttgtaacatttaattgttactaattcattaaatatcatgatttaaaataac

SEQ ID NO: 91623 - DNA, 774 bp, Glycine max
  Clone ID: PAT_MRT3847_5374C.1
cagtatgggctggacttgacatcaccacaaaagctatttgagttcttgaaaggcttggttggtggggtcatcttcattttttcaatccatgttgtgaatgcattacttggttgtgcaagtttctcttggcctcatattccaacttctttagatgccataacttggctaaaagtgtatggacatatgggtctggtagttgttcaaggaactgtgatggcaagtgctattgcagtggtggaagaattgctttttaggtcatggttgccccaggaaattgaagttgatcttggatatcatcagggaattattatttcagggctggcattttctttcttgcagaggtctctgcaagcaatacctggactttggcttttgtctatgtctttgtcaggtgcccgacagagaaatggaggtagcctcttcatccccattgggctacgcacaggaatgatggcatccacttttatgttgcaaaagggtggatttttaacatatcataataagtgcaaccttcctctctggataatcgggaaccatccttttcaaccatttagtggtttagttggtttggtattttctttgtcattggcaatacttctctaccccagacagactttacaaagaaaggaggctcaggaataagtagaaaatttattagtgatatcattacagttatgaatttggcgatgccagttgtgttaatatgccaaaattagaggtagcctgtggggcattttgattctactatacacagtataagtttctcttgtactg

SEQ ID NO: 91624 - DNA, 254 bp, Glycine max
  Clone ID: PAT_MRT3847_53750C.1
cttcggttatcgatacccttttgtcttctgaaacgaggctgcaatagaaattgtaaggaaaagaataattgacaccaccctgggaatcttaaaaaattaaatatgaaaacatcaagtataatttaatatccattaacaccttgaagagtcctgtgggaacccattttatattcatttaaaaacctgttttattacccattgagcttagcttccataaaccttgaggcctattgtgtgatctaattgaaatcaat

SEQ ID NO: 91625 - DNA, 382 bp, Glycine max
  Clone ID: PAT_MRT3847_53751C.1
cgatgtcgggtgggttcgtgttcaacaaccagcacattaatttttcaagttaacaaagcatagaaaaaataatactactatttcacaatataaatattactagaaaaaaagaatagctttgatttatatgccccgggttaggaagacccagtatcactagcttcctagcgggattattgccatcacatatcatagctatacatattaaagacgctgagttcaaatccaccttattattaaagaactaaaagtatgttttccttttcttaaatataaaactatgtaaaagatattagtgcgaaaatcttgagatagagtttattctcataaaactaaaatatatgcgtgttttcaaaataggattgaagacataggaatgtat

SEQ ID NO: 91626 - DNA, 160 bp, Glycine max
  Clone ID: PAT_MRT3847_53752C.1
agacgttaacagagtttactatgatgttatacgttagaggtgtctatataccttaaacgaaaactataagaacagtgcaatactgtcaacagctcacaatgcgcaacataaacataccacgttttcttacacataatatataatagatgagatgggatgg

SEQ ID NO: 91627 - DNA, 301 bp, Glycine max
  Clone ID: PAT_MRT3847_53753C.1
tttcaccactgattttttcgaccaaggatcacaaaatttaaggggggctgggatttttttttatatatttttggtccgaatctcagtgcaagataacatgtttttttctttttctgttatcgaaatactagtcacttctcatacacgatcaatcctagagcaaatcataatatattttgattgcgtggtgatttttctttggaaaaaacaaacaaaaaacccccccacaaaacaaaaaatctcgatccgagacctacaaaattaccccacaaacaattttataaaacacgccccgcccccc

SEQ ID NO: 91628 - DNA, 455 bp, Glycine max
  Clone ID: PAT_MRT3847_53754C.1
ccacgctccgtgtcgatccgatgcatcatctataactacaccttacctattaccgctgcccgtgaggtaggactcgttctctaactcgacaattatgcttaggttggcacccgcggttcatggaaacgcctcttatggacttggcctcctgggaggttgattaaagacccagactctaacctctcttacaactgcaccaccggaaaactatttcataatatcaggctccagctattggttatcgctctaaagctgcaaagactattccgatcacaactatgacaatttagggggctcttactcgacaatactgctcagaactgcacttattgcaactaggagagctcttgctaggtgaaaaactgcagattactgagagcacaattgctatgtgtggtgttaaagatccattccacattatgatatcagaaactgcactacagtggattgatact

SEQ ID NO: 91629 - DNA, 515 bp, Glycine max
  Clone ID: PAT_MRT3847_53755C.1
tttttttttttttttttttttttttttttttttttttttttttttttttttttttttttttttttttttctaaatttttaggaagcacataaagttgagagccatgatcacaattactactaccattctccactacacacaaaaattctcacaacgatgtaatcaaaagaatagtacattttcgaaaccacaaatgacactagctagaggattcatcaacagataacaaaacttagggagggcacatatttagaatatggcttcacacttatcctgttgcataatgtatcaatcaaaccctggaatctagggccatgatggtgctaagattcatggggtgcatgtactggtcagagccagtcatcatctgttggactatgattcggttagctttctccgatgggtgaaatggatcccaaaacgcgtatagctctctatttggacacaagttggaaaggggtgtgcagagtccaaccccattaaacgggccttgcccacaacaagctatctttgat

SEQ ID NO: 91630 - DNA, 255 bp, Glycine max
  Clone ID: PAT_MRT3847_53756C.1
ttccacatgttaagtctcttgtgggccatctctacctaaagcatttagtgatacactgtgagtccaagatagcaacacatacaacacaatatcagaaatgaaaacagtgattatctcatgatgaggaacaattataaaagaaagagtgaccaaagaaatagagatttaaagcaatgcagcaattctgtggtgtgatttttctatctggtgtaatttgtcttctgtataaaataatattcctttggacaatcttta

SEQ ID NO: 91631 - DNA, 1121 bp, Glycine max
  Clone ID: PAT_MRT3847_53757C.1
ttggacgaggttctcccttgacattaatgccatctatctgtatataaacataaagtgaagtgttaacatgttctttgtgatacacttcagaattaaaagaagaaaaaaattacacaatcatgaagatatatcttcaatgactccctgttgttttcagtcttgtaaatcatgtgatattccccggaaaacttcaaaacatgttaccctataacaagaaaaactttataactacaaatattagcaatgctctgaatttttaattttttacagtaatagcattgctaaagatcaataaataatcaatgacatcagagtgttaattgtttgagttggctgttatttctgtctgtatctgtaccctctttggctgccttcccaattgatcttcaagcgatctttcatctccattcctctttcttccttttcttttggatggatcttccttctcatcaatgagtgtaagaaatctatgaaaacgaccagaaattgagctagcactagaagcaggttcagaaggaggagattgccgtaactggaacataagctgcataaaatgcaaaacaagagcaataaagcaagctatcccgcaaatgagaaagagaccccagaagcttttaagctgaagacgatctgaatcaatttcagcattctctaaactacaagagcttcgtgtcatccacttatcatgaatccgctgtagatcaccagtttcagaaagctgtagaatggcagttgacatgtctacagccaaaggagagtccctagggaatgcctagcatggcaaacaaaacgagaattattaattttgataacacaaacaccttatgatgagttagtcagatgcatatatattaaaaaaactccatatctttaagcaacttgaatgggtaaggaagaaaagaaaatcaagggaaaatgcagctgatatgattgattcaattttttcaattaaagatatttgaaagacaatctaatcacctaatatccatcttaacataattaaaacaaaatgagtcttctgttgtgaaaaacattattgaatagattaaataatgagttggcctcagccacaggcatatataagcatattaaagcggacgcgtgggcgaacgagtgggcgc

SEQ ID NO: 91632 - DNA, 222 bp, Glycine max
  Clone ID: PAT_MRT3847_53758C.1
cccacgcgtccgcccacgcgtccgcccacgcgtccgacggctgcgagaagacgacagaaggggttgttggtggttcatgattttaatatatctctgaacactgaaggatatttttagatactcttctgcaaatctgtcataggtttttattctactgtgattggatgtttcaagtttgaaaatagttagttcatcgtgcattatttagagctacttttccaa

SEQ ID NO: 91633 - DNA, 403 bp, Glycine max
  Clone ID: PAT_MRT3847_53759C.1
attcccgggtcgacccacgcgtccgaacaggcgtcagtacagcagcgagaggagcacagaagggggactatagatcggttctttgcttggagtgaatacgaatcaatttatggtcacttgcgttagtcctggaagaaacatatacaccactcacacaatcagattctcgatttcttggtgggtttgagcgatctcgttagtgtgacaaaataagtgaaatgtctcagacgatgaaattgacgccgaatctggatcagcacagcacgaatgtactgaacctcatggtgctccagccaatcgatccgttcatccaacagattctcttaacagccgcgcatgtctccttctactacttcgacatctatagcaaccactacagtcgcaacgatgttgaaggatctct

SEQ ID NO: 91634 - DNA, 369 bp, Glycine max
  Clone ID: PAT_MRT3847_5375C.1
atcgttttctcatgggtgagaatgcaggtatagcctcggcctgtgctgttaatagagcttcaagggggcgggccaattctgatatggacactatctgctctcaagactgggaattatagactcctgcttgctcaaaagcgaagactatggcatggaaaccaaacccgtgtgctgatgcatggagcttggaataaatgaagcgtacctgatttcattgggatatcatttgtgacactggatggactgccaccccaatgcaggatgttcatgttacaatggaatggtttatttgctttcatgaatgtgtagccaggacctattgtgtttcgtatccacaaaatccattctttttaaataggtggatgggaa

SEQ ID NO: 91635 - DNA, 510 bp, Glycine max
  unsure (1)..(510): unsure at all n locations
  Clone ID: PAT_MRT3847_53760C.1
attggataatgaagctccctttgacttgcttacagctttgattactgaagagagagggcgtgtgcatgatgacaagtttctaagggatgctgcgtttaacttttttgtggcggggagagaaaccatgacttcagctctcacgtggttcttttggcttgttactaaacaccctttggtggaagccaagattctggaagagataaaagataattttgaggctaattatgaaggggttgtaggaattgaggaggttaaaaaagctagtttatctgcatggtgcattgtgtgaagcattgaggctctttcctcctgtgcctattgagcggaagcaggcaattaaagatgacacacttccaagtggtcaccgtgtgaatggaaacacaatgatattgttntctttgtatgcaatgggaaggtgtgaagagatatgggggaaagattgcttggagttcaagccagagagatggatatctgagaggggagaggttgtttatgcaccagcttacaaat

SEQ ID NO: 91636 - DNA, 160 bp, Glycine max
  Clone ID: PAT_MRT3847_53761C.1
tcctctagagccgccgcccttgggttagtggctaccttaatttttttctcctctttttgtgtttgcgccccaaaaactttagacttttaaccacccggaattaaattacactcccggttataaattgtttcacgaacgcggactttatttatacccaatc

SEQ ID NO: 91637 - DNA, 442 bp, Glycine max
  unsure (1)..(442): unsure at all n locations
  Clone ID: PAT_MRT3847_53762C.1
agagtctccaattagaaaagggcagaccttccaattaagtgtgtgactgaaatcaaattgaagaattacccctcaactcaccttcacttacacactctcaaacgtgactgcttctctttttttctcttcccctgaaccttgtgtttttacccgcgaattcaacgcgccgactgtgatagctgagaaacagatgataaaaaaaatgaacaaagtttaagatctgccacaagcaataacaatcaccaaaccaaatcagagtcaacctatgaatgctttgtaccataacagaattaacaagcctgaaattttcgccgccacagatagctggtttggtgatgtgaaagtaaatagccgtcaccgtcgccaccgtcaccaccgtcaccgncaccgatactggtgtattgatttggaaagggggaagctggactcgctggaatgaatt

SEQ ID NO: 91638 - DNA, 103 bp, Glycine max
  Clone ID: PAT_MRT3847_53763C.1
ttttcgtccgccttttataatggtgtccaatccatgaatatggaacagaaagacatagggaaggttatttatgagaacattgatcccagcagcttgtatgatt

SEQ ID NO: 91639 - DNA, 765 bp, Glycine max
  Clone ID: PAT_MRT3847_53764C.1
tagttttaaacttacctaggataattgtgaagttaataatctctagtgttgtttgattcaatttatttggaaaaataatcgcttatttatgttagtttcatgagagtgtttaaaaaacaaatgatttttttaaaaaaaatagtttataccaaacatgcactgctagcaaggtgagcaaaccttttccttaatatctacctacgcatttttgtcttctacgtcctttctcttacacagattgaagaatatggttgtttattttctaattaagaaggggtataatggatgggccatgacatttaacactattttttttttctctcttaatgatggcaggttccaggagttatcatcagattatttcaatttgttcttaggtaggaaaatttgacagtagtaatctacaaaaaagttgatcaaagtctattattgtagaaatatacattaaaagtatcttttttgagatattgatccattgatgttatttattgtcttcttaaaatcatgtttgctatcgtgacataggtgatgtctagggtgagagaccaggataggtctccctccgactgtgagaaagtagtagatttttaccgttggatctatttattttttaaatggatggtttagacttttttcctttttctttttttttttactcatttctttgtctttcctagtttactcctttgtttgccacacacaattcaccctaatcagaccgtgacttctcactccaaaaccccccattctccccaaccttaacac

SEQ ID NO: 91640 - DNA, 1048 bp, Glycine max
  Clone ID: PAT_MRT3847_53765C.1
ggagcattggtggaccccaaatgccatcacttatggtgccgtgatgcatgggctccgtagggagggaaaattgtccgaggcgtgtgatttgaccagggaaatggttgaaaaaggctttttccctactccagttgaaattaacctgctaatacagtctctctgtcaaaatcagaaagtagtagaagctaaaaaattatttagaggaatgtctgaataaggggtgtgccattaatgttgtaaacttcactactgtaattcatggtttttgtcagattggtgacatggaagctgctctatccgtgctagatgacatgtacttaagcggcaaacatcctgatgctgtcacatatacggcattgtttgatgcattgggaaagaaaggtagactggatgaggcagctgagttgattgtaaagatgctcagcaaaggtttggatccaactcctgtaacatacaggtcggttatccaccgttattctcaatggggtagagttgatgatatgttgaacttattggaaaaaatgctcaaaaggcagccatttagaaccgtatacaatcaggttattgaaaagctttgtgattttggaaaccttgaggaggctgagaaactactggggaaagtattgagaacagcatcaaaagttgatgctaatacgtgccatgttctgatggaaagctatctgaaaaaaggggttgccatatcagcgtataaagtggcttgtcgaatgtttagacgtaatttaactcctgatttaaaattgtgcgagaaagtgagcaagaagctagtgttagatggtaagttggtggaggctgataaccttatgttacgatttgttgagcgtggaatacaacaaaaatgagatgcacaagttatctgctcttctaagcttaagcctcatagcaatgattttgttttcaattttatcattttcttttgttggtattccatcttgtttcctaaaatgtggcgaggcattttttggggaaaaaatgattttgtcgagaatgaaaatttcactcgtataactatcatatatgcgatttagat

SEQ ID NO: 91641 - DNA, 488 bp, Glycine max
  Clone ID: PAT_MRT3847_53766C.1
aattcggctcgagtacggctgcgagaagacgacagaagggtctccaataaaaaataagtaaagaggggcaactgtcataccctaatttcatccggggaccattgtttggtggcatgcaaccttcgcttgaccacctcgaggtacttaacacccgtcgttaggtaatccgtcaagtttctcaacattctgaaaagaaaatgtgtatcattacgaaatttgtaaagtttcgggaaggaatcagcaaaaaaacacaaaagggatgtatttagtaaaaacataaagggggtgcaaatagcaaccaggcccactagggccttccaggatgttccaaccttctagtggaagcaacctagctcgcctggacagcaaccacctccgtcttttgtcctataaataggggaaagaggatagagtaaattgttcaacccttctggtagtttaagattctctcaaaattagtgaagacaattttttctgtggaaaaaata

SEQ ID NO: 91642 - DNA, 1193 bp, Glycine max
  Clone ID: PAT_MRT3847_53767C.1
aacacaacttccacattccgatggaggagtcatgggaaaattggcatcttcatatggaaaccggttgcgagaacgatttcttaggcaagtgtcacggcactgacgatgacgagttcttcagagacatccttcagcaaccaccacctgcggctttctcttccgaaagcgaaagcgatcactccttcctcgctgtccaaaacacttctagcatccccaacgacggtgccgttttgtctcctaggaattacctcgtcaaaagcagcagctccaactccttggtctctcaaaacgcttccaaacgacctcgtcgtttgtcctctcccaggacttacattctgtccttcgacaactcaaccatggttccggccacacccgaaacccgcccccgctcctccaataattcccctctgcctgccaaacgggccctggaaagcccaggcccagtagcccgaaggcccaaccaaggagctaagaagataagaacctcttctcagaccatcgatcacataatggccgagagacgacggaggcaggaactcacggagaggttcatagcactctcagccacgattcccggcttgaacaagacggacaaggcttctgtacttcgagcagcaattgattacgtgaaacaacttcaagaaagggtacaggaactggagaaacaagacaaaaaaaggagtacagagtcagtaatattcatcaagaaacccgacccaaatggaaacgatgaagacaccacctccactgaaacgaactgtagcatccttcctgagatggaagcaagggtgatggggaaggaggtgctcattgagatccactgtgagaaagaaaatggtgttgagctaaaaatattggaccaccttgaaaatcttcatctcagtgttaccggaagcagtgtcttgccatttggaaattctgctctctgcattaccatcacaactcagatgggtgacgggtaccaaatgactgtgaatgatctagtgaaaaaccttagacaattgttctcaaaatcacatgtgctaagcgacagcgatccgtactagtgtatcaaacaatgagttgtagtgtatggaaatcgaaagttttggatttattactctctttgattttggcttgttttcatgttgatcgtaacgttaataaacaaatactaaatgtctgacatgaatttatgcccggcatctaccctg

SEQ ID NO: 91643 - DNA, 378 bp, Glycine max
  Clone ID: PAT_MRT3847_53768C.1
gtccagccacgcgtgcgcccaagcgtgctttgatctctcagatctaaccttacccactccatcatacaactcagcctattgcgaattctttaatatgcccatgtcaaccttcgttttagcctctccataagagactacacatcgctacacattcaaggcttcatttgaagatcacagttcaaatatcttaactggtgtctaaaacaaccaacacacactagcatcggaagcctagacaacaacgtacaattgccatccaattcatctatagcttacatacttgctaatgcgttcgttgctgttcaccaccgtcttcgtggctccaacattggtcgcaagctcacccaacttgggtcactaatctagtcttgcgctccc

SEQ ID NO: 91644 - DNA, 467 bp, Glycine max
  unsure (1)..(467): unsure at all n locations
  Clone ID: PAT_MRT3847_53769C.1
tagtataggggaagctggtgcgcctgccggtacccggttcggcatttcgggccagacccacccgtctcgcttatcaaccccaaaccgcattggaccgtngctcgaagtggagaccaaggtctgggaaccctcgcaacagtgagagtgtaaactaggtacgggctcgtcttggatgatgtagatgctctgtatttcacctccctccgtacttcgcgacggatgagaggctgctcgcacttcagggcttgtggtttgggctaagctgagccaatcgtggatggatcacgttcaactctgtagacaccttatggtggtactgagttacaaccaaaagggtcgcgaaatacctttggagacacgttgggggtgggcaagagtagatacggcgctcaccatgggcactgacaatgagagtaatacttattggaggagtcaccttacaaagagaaaggctctggagaaaaagc

SEQ ID NO: 91645 - DNA, 188 bp, Glycine max
  Clone ID: PAT_MRT3847_5376C.1
tgccgatgccattagacgatggcaagattgaaccacgggatgaccccaagattcgctccaagatctagtcagaagagtttggttagcacaatgatctcgacaaaaaaatctactgctctggccctgaaacccttgaacccaacatggtgggagatatatttcaaggaatacagtatctgaatcaaatc

SEQ ID NO: 91646 - DNA, 1045 bp, Glycine max
  Clone ID: PAT_MRT3847_53770C.1
aaagaggagaaggtatagactatagagagagagagagagagagatctgatccggagcgatgagtgagagtgagaagcagagagtaacggggaaggtgaagtggttcgatgaccagaagggttttggcttcataaccaccgacgacagcggcgaggaattcttcgtccaccagtcctccatccgatccgacggcttccgcagcctcgccctcggcgagtccgtcgagttccttattgactccgatcccgaaggccgcaccaaggccgtcgacgtcaccggccctgacgaatcgccagtccagggcacccgcggtggcggaggaggaggaagaggaagctatggtggaggtggcggaagaggtggctatggtggtggcggacgcggcggaagaggtggatatggaggaggcggcggaggctatgggggaggtggctatggcggaggcggtggttatggtggaggtggcggcggcggcggcggagggggatgctataagtgtggcgagactggtcacatagctagggactgcagcccaaggtgggggtggcggtggaaggtacggcggtggtgggggtggcggcggaagctgctacaactgtggggagtccgggcattttgccagggactgcccttccagtgctcgttgatacaatagtacgggggtgtggccttgcttttgtgttctgtggttcttttgttttcttttttctaaatctgaatattaccctttagaaatagggttagctagggtgtggcttctttgcgttttcttttttcttttttcgggtttacattataagcaattagcttatgattagctcttggatttattggtttgctttttgggcttagggaaatgagagttttggtgaggttctgaaaccatcgactaaatactctgtttcctgtcgtgaacgtaatatgctctgccttaccttattttgttgaaatctttgaatatatcatggtatcatggtcctgctgttcggatggatggttgtgtatattttgaatatattgtgcaggaaatattgatttgttgtcg

SEQ ID NO: 91647 - DNA, 1253 bp, Glycine max
  Clone ID: PAT_MRT3847_53771C.1
ctagcttgctaaattcccttataattattccttcttgtgttgagttgattcaaacataaacacggtaaggtcggctcgagggatagctaaatttttcattagtattccttgtaggccacctagctttcctctcttcttactatttttgtgttcatgtgaaggttaattgaaacataaagacacactcacacaccctgggttcataaatttcattttgcagtaacaacaaaaaataagcatgagttgcaacgggtgccgcgttcttcgaaagggatgcagcgagtcctgtatgttgcgcccttgtttgcagtggatcgaaaccgcccaagctcaaggccacgccactgtcttcgtcgccaaattcttcggccgtgccggcctcatgtccttcatttccaacgttccagaaaatcaaagacccgcgctgtttcagtcgctgctcttcgaagcgtgcgggagaacggtgaaccccgtgaacggcgccgtgggacttctctggaccgggaactggcacgtttgccaggccgcggtggagacggtgctccgcggtggcacgctgaggcccatgccggagctcatgggcctcgacgctcccgccgccgcggccaccgatgaagcatcggaggccgaagtggcctgcaccgacacgtggaggatccgaaacccgaacccgaattgccggttcacaagctcgcggtcctccggctgcggcggcggcggcaaacgcaagcggtcggaggagctggcaaagcttcaggcgcagccgaatctcgatctccggctgacgccggttttttcgcagaaggaggagagccgccggccggaatctccgtcgatgacatcggaggagtccggaacgacgacggagaacagatttggggatcagtggggtcaccggaaagttctcaaccttttcatttgagaactctcctatatgtttcttcgagggttatgttttttgtgaatctaattaacgagttattattagttttgttttgttgttgtaatagtccttttgtttttggaggggttgttcccggatttgaagtccggcgagttttggtgagacactggcacaggatttctctagagagaaaaatgagagttagtcggtggtgatcccttttattttttattttttttctgtcaaacatggaatatgtaaacagtcctgtggtcgtccgtggcatgaatattattaatatgaaattatgaataaagactagatataacgtttgtttttgtttttgtaa

SEQ ID NO: 91648 - DNA, 242 bp, Glycine max
  Clone ID: PAT_MRT3847_53772C.1
aacaaagagaaaaaaaacccttagccaacacaaccatcatggccacctctgctattcagcaatcagcattcactggtgaaactgctctgaagcagatcaatgtgttcgtccgcaagaccggtggcgccgactaaggtcgcactatcatgcgccgcaccgtcatgagtgctcctcagagcatttggtatggccctgacggtcccaagtacatgggtccattctgcggagcagattcgatcata

SEQ ID NO: 91649 - DNA, 1121 bp, Glycine max
  Clone ID: PAT_MRT3847_53773C.1
ctggttgaacctgcaagtgaaagttaccggccgtccccgtggtggaccttcgccgcacgaaaattttcacacctcattaagccctttagccaagagtccctagccaaaaaattaacatggcatggtcaacttcctcctctagcacccctcatcaaaagcatgaagtgttcctcagcttcagaggtgaggacacacgctacaccttcactgggcaccttcatgcctctttaacaagactccaagtcaacacatacattgactacaaccttcagagaggtgaagagatatcatcctcacttcttagggccattgaggaggcaaaactctcagtcgttgttttctccaaaaactatggaaattccaagtggtgtcttgatgagcttctgaaaatacttgaatgtaagaatatgagggggcagattgtgttgccaattttctatgacattgatccctcgcacgtgcgcaaccagacgggaacgtatgctgaggcatttgctaaacatgagaaacacttgcagggtcaaatggacaaggtgcaaaagtggagggtggctctcagagaagcagctaatctctctggttgggattgctctgtcaacaggatggagtctgaactaatcgagaaaattgcaaaggatgtattagaaaaactaaatcgagtatacgttggcgacctagatcagcagattgcaaagttagagcaacttgcacagcttcagcatcaatttttgcaaaacataccttctttggaaaatgtgagaaatcatagagcaactgttcagcgtatcacggaacttaaaatggagagaagtgtccgcatgcttcgcctccctcccgacatgctttcacatttggagaattcaaacaataataattattttcctttgtaatgtgcaaagaaattaattgttgttgtcacaagttttaatgagatacgatttcttaatttcaaagtccctttgtagtttattttgtattgaaaccttttggaaaatttatgtcccatcatatgacatctttctaactttgtaaaaaattaaagttagataaatagtcattttgtccctcaatgtttaattcgctctatccttaaaagatgaaactacaaaatttaatttctc

SEQ ID NO: 91650 - DNA, 365 bp, Glycine max
  Clone ID: PAT_MRT3847_53774C.1
gattggttgggaagaagtattgtttcagctgttcgcgtcattttctcgggattgcatgtaacattaacaacttgatgtgaagtgaatatggctttgattggatatctaaatgctgtgtgaacggtatggaataagcgaagtgtaatggatcaatgtagaacagaataaaattaccattatcttgtttgaatattttataaacagtgaaatggaaaataagtaagtaaataaggggtgaatacattttatggtgtgtcaaggatgtgtgatggattggagaggttgagacttgagattattgtttgattaacgacagaaaagaaagtttatttgtctgactattgtacaaatcaaacacaccatat

SEQ ID NO: 91651 - DNA, 387 bp, Glycine max
  Clone ID: PAT_MRT3847_53775C.1
gaatgcacagtagtctctcatcttcggcactgctccacgatcctatctgcgacgccgctaatatcaaagtggggagattcgtatttcgtagcgctatccacctcctctttcgttcattcaatttcatctctgtaagaacttatgccttcaagaaagctggacagacaaacaaaaggaaatgctagaggatgagactggttatggatttatatctatcactccattctttgtcaggtgctgattacacttcccttgcacactacccaaaatagtgtctaatctcctacattccctccttggtttcttaatgtgtgctatcatgacaccgctaagttgggagatgagctagtgcagatcatccttggtccaggtctggaacctggaatt

SEQ ID NO: 91652 - DNA, 503 bp, Glycine max
  unsure (1)..(503): unsure at all n locations
  Clone ID: PAT_MRT3847_53776C.1
ggaatgggaccctcgggccggccccgacgtatttgtgaagggattgttgatgcaanaaggagttntgggtataagtaaagagaagaagtgagtgtattgtataactattatgaatatggattgtaaatacatagttttaataacttggttgtgttggaaggaattttggttttattggtgtagttantggttactaggtgaggaatantagtgctgtttatttgtagttgaaattgaaagttgaaagtgttggattgtggaatgggttacaaaaggtttgttttggtgntgatggtgtaaagaaaaaaaaaaaaaaaaaaggggggatggaggttaaggttttgttagatttagtgagggttaattgtgtggttggtgtaattatggtgataggtggttagtgtgtgaaattgatatggggtgagaattttatagagtataagagttggaaggataaagtgtaaaggatggggtgggtaatgagagaggtaagtgatatttaa

SEQ ID NO: 91653 - DNA, 668 bp, Glycine max
  unsure (1)..(668): unsure at all n locations
  Clone ID: PAT_MRT3847_53777C.1
tgcaagagaaacaaatgtagtaaaatccggctatggttaatccacagtctgttccaacattcacgaagtattgctccttccacctcatgaatatgtaaggatagttgctcaggtccaaagacttgccaccatcagcctccacttggcccaataagggagaaaaagatggaaatttagaccagtgccttatatcatcctctggagatgcctcccatttnccggtgaagaaagtatagttctttgtatcaactatctccccttcccagnncgttactactggtgtgtctgccataggaacattaagagcttccatggtgccacacaaatacccatgctcaaggtcacatccctgcaaacggacatttactctccatgcttcatccttttgtacacttgagacattctgggtgccagaaaaggcctgcccaacgcctagaagactacaagattggcacgaactccttcccgaattagcacctgaaacctgagaagaaggtgctgcggtgttctccaatactctcacgggcatgtttctgtgattgtgatgtgaagaagaagatgcagagattattgctgagcagtgtggcaattccctgaaaaaggaaaaaacaagacatgaggaaataatgaatcatgcccatccatttgtcttctaaaccggacgcgtg

SEQ ID NO: 91654 - DNA, 461 bp, Glycine max
  Clone ID: PAT_MRT3847_53778C.1
acggtgaagtgctatttggattatctgccgaattaatttattttataaaaaaaaaaaaaaaaaaaaaaaaaaaaaaaaaaaaaaaaaaaaaaaaaaaaaaaaaaaaaaaaaaaaaaaaaaaaaaaaaaaaaaaataaccaaaaaaaaaaaaaataaaagcaaaaaaaaaaaaaaatggggggggcccttttaaaaaaaaaaagttaaaagaaccaggaatggaaatgccaaactttttttattgggaaccaaaaaaaaatcccccggcccggtttttaaaaactggggccgggaaaaaaccgggtttaaacacaaataaaaagccttaaaaaaaatccccttttaccccattggtttaaaaaaaaaaaagcccgaaccgaatccccttccaaaaaagtccgccaccctaaagggaaatggaacccccccttaatgagataaattaaccggcgggggggggg

SEQ ID NO: 91655 - DNA, 270 bp, Glycine max
  Clone ID: PAT_MRT3847_53779C.1
ggcatgcatgaagagagaggaatcgtactacacaagtttcatacttcccctcatttttttactgcatttgggactgttcactcttgtgcacaccttcatgtgtgtcaagttgccatagcatagagacaaaaccgggtgctttgagataataatgctgaggaagaggaacaggtcagtgcagaatgatcaacacctcatgtgtgaagtcaattgagagcactattctcaatctcatcatgctttgaggcgaaacatcatcaatggccactc

SEQ ID NO: 91656 - DNA, 290 bp, Glycine max
  Clone ID: PAT_MRT3847_5377C.1
atcgatcgatcgctctaattcgtaggtgacttcctttgtgtctattctctgctaattctgagtcgggagatattctgggctgtgcaggctgactaacactacaatcatatccatgtaaataatgaggctgttcactatgatcattaacataattcttgcggacttcgtatgcttaaggttcattacatacggaagtgcatcatatcaatatctgaacgtgtcagacacaagcgttcagcaatggacactatactatgttgatgaaacattggcagcatcattgggacata

SEQ ID NO: 91657 - DNA, 489 bp, Glycine max
  Clone ID: PAT_MRT3847_53780C.1
aattccgagaaggggcctaattaaaatctcccctcagagagatgactgagttgcaaaggtcagtaacatcattcagaagacaagggtcttcgggattggtttgggatgacaaattcatcgctggaattgagaatcagaacaaacaagaaagtggtgatgatggatcaagtccctcgttgcagcgaagcagatcagcgggggcaccaccttatcggacggtcaacgttgcaccacaagccatggaccctccttctcccaagctagcaacttgtggcttctgtgctctctttcggaaaccggtttctgccaaacccaacaaatctaaaagacgtactaggtgatgtaaaccggttcatcatcctcttttttctttctgattttctccaacttgtaaatttgtgccgcttcttgtttatcctatattgtttgtctctgtttcgattttgttgtttggattcgggcttattaattattttgtaaattccttgg

SEQ ID NO: 91658 - DNA, 1094 bp, Glycine max
  unsure (1)..(1094): unsure at all n locations
  Clone ID: PAT_MRT3847_53781C.1
taattttctttgttccttttttggaaggaaagaaagaaagacaaattctttggcttctttgatcagaaattgcctctgtacctcatcctcttctctctctcgcaggctgcagaacagaaacagccttctagccttagctcaccatctaacttggtgatgcaattttgggcttagagttgggtggctgtgatttgattgatgacttnccttgtcttgtcatgaatgttgtggatttgtaagagcaactgtggtggagatggcatcaggtggaaaggaaacttcatttgtcaaagcaaggagaatgaaagggttcatttcccttcttacatctgcagcttgtgagtggcttttgatatttctgctgctactcaatgccttgctatcatatatgctcaccaagtttgcgagttattgccaactgcaaatgccttgcttgttgtgttctaggcttgatcaaatcttatgccgtgaaaggccggagttctatgtgaacctgttttgcagcagtcacaaatcagaaatatcatctctgattttgtgtcatattcatggtaagctggcagatgggcataggatgtgtgatgattgtcttttgtccgtcactgcaaagaccaagtgcaatgcagaaacgcacaaattgttggtgggtaaatttgggctggttcttggtggttctggtttcaaaagtccatcactaagtagagatttgtttgctggctctaagggtgcaagactatgtacaagacaatgtacttgttgtggtaagctttggaagtcagatcacaactccccaagatctatccaactaaaatcacctgggagagcttttcttaagccaaatattccttttccatgtgcaccgaggcaaaaccgtttaaatcaccgggataacttgaagaaaatgagggataaatttcctggatcagagtggaaaaagcagttttcagccactatttcatattggggacactgagctgaaacttaattctgactctgagtccgaatttctattttctgatgatgatgatggtagtagagtgggtcatgagaacgttgaattcagcaatgacctaaaagcttaagtaacatttgca

SEQ ID NO: 91659 - DNA, 388 bp, Glycine max
  Clone ID: PAT_MRT3847_53782C.1
ttggtcgcgtgggcggtgatggacattctaccatgtatgcttactgctgcagttaagtatgagcgggctctgaaaaatattcatgtttgcggcttatgttacgactgcagaaacaaaggctggactaaacacgagaaaaattatgattctgacagaagaggaaaagatggaagtgattagaaacaaaggcattactgctgatgtgcttgcaaagcgagctcatgaatttgaaaaacatgttgctcacgaacgcctcaaggatcaaaggcctgatgttgacaagtcgcatactactaaggataataagttagcaaaaataatgaaccttagacaaagtgatgtaggagagcttaaacttcttactgatgggaagtacactgaaggtaag

SEQ ID NO: 91660 - DNA, 943 bp, Glycine max
  Clone ID: PAT_MRT3847_53783C.1
atttcactgaaatttatatttatatggtaaattaaccatactttcacctgtctctccttttgcattcaaggcatcataccttgtctaatttgctggcgtttggacaagcgccgtggctactcactatacctgcaattgccataattggtagagagataaccatgtctgcagtcagggagtgggctgcttcccaggatagcaagcttttagaggctgttgctgtaaataacttggggaagtggaaaacagccacacagatgacagcattaaccatccttcttgcgacccgggactggagccatggaggaggagctgccattgtagtaggctctggtgttgctttgctttatacttcagcagggcttgccttatggtcgttggttgtatatatgaagaaaatatggagggtgttgttgaggtagcttgcgaacatttaccaatgtcacgaaagggggctgcaattttagtggcatgcaaatgttttttttttttcctgcgcaatctctaaccccatgcagtgtcatttctcctactcgtgtattttctgcgcatttttttggtcctctaaaaaagataagggccactagccatgcttaagcgttacagcagtgattgtgttgggaaaacgttgtgttgtaagttgtaacccacgttttccccaaatccatgaaggcacttgcttctccgtttgatgctttggaaagtgtgaacacacgcattttgttttaggccctaactcaatttagagtcattgaaagtttgagaattgcgaccagagaaaattcacaacaggtcaggaattattgtataatggttgatttgttctgatatagttcaacgatgcctaaacacaacagtcgaatttcatggtggtcgctcgggtcatgcgccgtggcttccccgcgctcccccgcctttgccataattggtagagagataccca

SEQ ID NO: 91661 - DNA, 393 bp, Glycine max
  Clone ID: PAT_MRT3847_53784C.1
ctgctgagaagtgtcttcttttgattggtatgatccgctagatacagtatagttcagcttatagaaatgactattagctgatactctctagttttgaaattgtgggcactatttttttgagtcgcaattttattgagttttagattcaatgagttaaatagctcattgtatatacttcttgtctattgaataattagctctacgtgttaaagagcatgcacccatcattataggttaactagatacggcatcaacgaccacctgtatggcgctgctggactatctttagaaacactctgcatgctctatctactgaggcattaagcttgcaagatggaggactattcacactacggagacttcttatgccgatgatctgtgaataccttgact

SEQ ID NO: 91662 - DNA, 152 bp, Glycine max
  Clone ID: PAT_MRT3847_53785C.1
acgcgtcagaacacgactcaacggtaacgtcgctacagcagcaaaaaaagggaattctggtaaggctgctatacaatcaccgtcgggatactgatgaggttattaacacagcgtaatttttctttacagtacatcgctaatgacatagttat

SEQ ID NO: 91663 - DNA, 145 bp, Glycine max
  Clone ID: PAT_MRT3847_53786C.1
ctcgcttgtgctgccttcgtttgcctttttatcacgacaggaattaacatatgatatagctaagcactggcagtacacacttctaacgagccttaagctgctttcctgctgggggttggagcaaaagtttggatgaagtaacctt

SEQ ID NO: 91664 - DNA, 335 bp, Glycine max
  unsure (1)..(335): unsure at all n locations
  Clone ID: PAT_MRT3847_53787C.1
aacaggcnaagcnggngagggttctttcaaaggacaggtggggacacaacaaacccaaacagcaantggcccaggctttactaggagagggaagatagtgaaagcaatggagtaagtgggcggctcgcattaaagtactaatcacattctaagctgattgcttgccctggccatagggtggaacattgaaccatagagcatgcggggggaaaacatcaatcaagagaggcactgttctgcgacaaacttggatgtggaatgtaaagttaggactggccgcacgcaagtgcttgaacaggcttgaacgatgaatttcacgtggctctaaccggacg

SEQ ID NO: 91665 - DNA, 101 bp, Glycine max
  Clone ID: PAT_MRT3847_53788C.1
ttgcgaacaccgcgatcgaggaggagatgatccgaaaggcggcggatggagatccggtgcagcgaaagatatttgtccatggattgtgctgggacactacc

SEQ ID NO: 91666 - DNA, 837 bp, Glycine max
  Clone ID: PAT_MRT3847_53789C.1
cagttagtcaggccctcatatttgttacacgggctcggagttggtcttatgttgaacgtccgggtttgttacttgttgcagcttttgttatcgcccagctgatagctaccttaattgcagtttatgcaaattggagtttcgctgctattgaagggattggatggggttgggctggtgttgtttggctttacaacctcatcttttatatcccacttgactttatcaagttcataattcgatatgccttgagtggaagggcttgggatcttgttattgaacaaaggattgcttttacaaggaaaaaagattttggaaaggaagaacgtgaacttaaatgggcacatgcacagaggacgcttcacggccttcacccaccagagactaagatgttcaatgaacgtacaagttacacagaacttaatcagatggctgaagaggctagaagacgagcagaaattgcaaggctgagagaactgcatacacttaagggtcgtgttgagtctgtggttagactgaagggtcttaacattgacacaatacagcaagcatacactgtctagaatgttgagtttcatgcatgaatcgtgtatgtataatgtgtgtataatgccgttagaagagtgtgatcatagagcagcaaaaaatatatactttaaatgtttgttaaagcagttttggtggacttttttagacatgaaattattggtgcattaatacttaaatgttaaaaagagttccatttatgctttcaaaaaaaaaaaaaaaaaaaaaagacgagtgaaaaacaatacaatgattatgaggttagtaaaataagctgtattctgtggtattatt

SEQ ID NO: 91667 - DNA, 442 bp, Glycine max
  Clone ID: PAT_MRT3847_5378C.1
gccatgcgtccggcgtagtgatctattggcagattttttgacagagggcatttttagagcaagtgtcgatttgctgcgcactgatcgtattaaaggaatgattaaaatggtggccacagttggcattactgagagtacaggcatagcagtcgcctgtgttatgaatagatactttagggggcgtgcctgttctgttattcacaccatctgctctcaggactgtgaatactggaatactgcttgcacaaaagctatgactatgtcatttaatgcaaacccgtgttctgatgcatggagattggaatttctgatgcgtaccggctttcattgagatgtcatacgtgtcactggatggactgtcactccaatgcaagatgttcaggttacaatcgattgggttattctctcttaggaatgcgttcccatgacctatcgtgtttta

SEQ ID NO: 91668 - DNA, 276 bp, Glycine max
  Clone ID: PAT_MRT3847_53790C.1
tacatagatatccatacgcttcctgcatcttatttaagagacgaatagcatcacacacgctgcaattcatgcaactattgacatggagatccctcatactaccgaccattattgatcgtacctgcactcccatcatgccgagtatatgtggatgatgtgaaaacagatacatgggcttcatctttgcacaaagctgtctaccctgacaatatcatacataatactgaattatcttatccacgcacatctcactgtcttgcttctgctgatataagg

SEQ ID NO: 91669 - DNA, 230 bp, Glycine max
  Clone ID: PAT_MRT3847_53791C.1
cggaaacttcatttattttctttctcacattttacaatattgtttgagcccacaaaccccttaactaactcccctagcggttgccaacaatccaccacagccccaacttgtaaaaaaaacccaaggggggaaaaaaaaaggcggaaccccccccccgacaaccaaaatattgctctaacccatggaaaaacgcgaataacccccccgggtgacggagatgccacaaatcc

SEQ ID NO: 91670 - DNA, 518 bp, Glycine max
  Clone ID: PAT_MRT3847_53792C.1
aaagaaacattgggccccttaaaaaaattttggttaaggcaatggtcccaaaaacccaaaaaaccggggttgggggaaaagggaatttgtccctctttcctaacaggtaaaaaaaccctggaatttggaaaaaaaatcttttatttggaaaaaggtttttctttaagggggcggaaaaaaaaaaacgatttttttttaaggcaaaggccccaaacaaaccgcgggcttaaaacccatgggactataaaggggaaaaaaaaaaaccccaaaacccccccggggcatggccaaattttaaaggccccccaaaaaaaacaaaaaaggtattaaccccccacctttttgggaagggccggaatggaaaaggggaccaaacccgggcccctttagggaaccccccccaacaaaaaacccatcaattttttttggtttggaaagccaagcacgggggctggaattaacaaacccccaaaaaaaaatgggggtttaaaaggcaactttaggggaaacattttttt

SEQ ID NO: 91671 - DNA, 909 bp, Glycine max
  Clone ID: PAT_MRT3847_53793C.1
gatgcgtccgctggggatcccacttcttcttgagagttctgtattctgttcttcttttctcagctatgcacccaccaccacctattctaacagtaaaaccctcccaaaacccacactgttctaaaccccttttagcactctgtttctctgcttaaccatgtcccaatcactgaagctaatcaaggaacacgcctccaaccccaaactctggttggtcattggaataggagttgccggaatcgtggttctggtggagacacggcggagaacacggcggggaaagacacacaaacaagactttggtgcttttgttgagcgttttgagctacttcccttccctcagcctcctcctcctgctgccaagcaatcgctctctgctctaacctttgccataaacgacacatttgatgtgaaagactacgtgacagggtttggaaattctacctggaagagtacacacaaggcagcggagaagactgcagttgtggtgactgctctgctcatgagtggggctacttgtgttggcaagactgttgtggatgaattctcttttgggatttctggtgagaacaagtattatggaactccaactcatcctcagatgccatcatgtaaactgggagggtcttcttgtggttcagcagtggcagttgctgcggggcttgttgactttgccgttggtactgatactacaggatgtgtgagaattccagcatcattctgtggtatttgtggttttcgtccatcccatggggctgtatctaccattggagttcttccaaatgcacaaagcttagacactattggatggtttgctcgcgatccatctatcctgcatcgtgttggacatgttttacttcaattgaattcagtggagaccaaaaggtccagacatttcatatttgcaga

SEQ ID NO: 91672 - DNA, 243 bp, Glycine max
  Clone ID: PAT_MRT3847_53794C.1
tggggacagattaattcaaacactcaatgaaatttcacaaattccatatttatgcttacagaatttatgttccaccaactacacttaatgttctttcttctccatgtcccttatctatgtggtacataaatatgattgctataatttaacctaaaattttaaaccttcattgttatattctacttgctatttattactctaccaactggtttgaaacaatttttctagcaaatgtgactaaac

SEQ ID NO: 91673 - DNA, 386 bp, Glycine max
  Clone ID: PAT_MRT3847_53795C.1
gagatgaggaatatgcccgaagagttgggtcaggggtgccatttgtaaaatgaagatctatcaattaagtgagctgagccatatcctgtcagacctaattcaactgtgcttgtgtgaagcatctgaaaataaaaatccagggttgggttagatggtgatcatgttaagtctcatggttggacgagattgttgcagattattcatgggcttctagcaagcctactgattttaccactggcaacgattctggaatgcactgatcaggcatgctcaaacacgtaaaattagtttggctactatttaactaggattttgttgtttggttatcctcttttggtgatgaatcttgcttcaacatttgcattcttgttgtaaccttacatcac

SEQ ID NO: 91674 - DNA, 1573 bp, Glycine max
  Clone ID: PAT_MRT3847_53796C.1
cccacgcgtccgacaagttgaaacgtgcgtttcgaaatgaatgaatgggtgtgaccattttgctagcgcaatcatcttgttccccaattaattaggttttttcagagtatcacattttgcatcgattcctctacgcacgccaccgtcaatcatctcagcacaacgttgcgattcggacaatcgcaatacggtctgacctgtacctcagatagtttcaccagtcaagtctttctgtgtggcatatcaaatttcattaggactaaccagactgcaaaacaaggcatacttattgactccatttggctaaaatgacagaaatccttagctacaccgcttccagacagttatctcaaatgttccttgccattgccttctttcacggttctgaatattttctagcagttgtcattcatgggagatcaaatgtaactctaaagtctcttttgattagcaaacattatattgtggcaatgattttttcgttgctggaatacatcattgagattgttttagtacctgagctaaaggaacattgggtgatcagtgatttgggcctggcactggttctgattggggaaattataaggaagataggaattttaacagctgggaaagcctttacacatcttataaagatttatcacgaggagcaacaccagctgattactcatggtatatatagttatatccgtcatccagggtactgtggtttcctcatttggtcggttggtactcaaataatgctctgcaatcccatatcaactattgcatttgcagctgttgtctggcgcttttttgccaagcggataccttatgaagaatactttttgagacagttttttggaacacggtatgaggaatatgcccgaagagttgggtcaggggtgccatttgtaaaatgaagatctatcaattaagtgagctgagccatatcctgtcacacctaattcaagtaataaaggaagtttgaaccatttttctcttgaacagttttgatccatgcttcacatttctggaggtataaactgcttgctttcagcttgtggctgtactaacacctcctttcattatatgcagctgtgcttgtgtgaagcatctgaaaataaaaatccagggttgggttagatggtgatcatgttaagtttcatggttggacgagattgttgcagattattcatgggcttctagcaagcctactgattttaccactggcaacgattctggaatgcactgatcaggcatgctcaaacaagtaaaattagtttggctactatttaactaggattttgttgtttggttatcctcttttggtgatgtatcttgcttcaacatttgcattcttgttgtaacctttcatcacttgctggaacaaaaatgctaaaaactagagaaataaaatgtaatcacaatgagcaacagcggaacaccattagattccatatagatgttctaaatgcattgatatgattaatgcaaaaatacaagtatggaagaaataatattaagacttaagtgatgctttaagttttcaatgaaaaaaaaaaaaaaagggcggccgcccccccgccgttgt

SEQ ID NO: 91675 - DNA, 350 bp, Glycine max
  Clone ID: PAT_MRT3847_53797C.1
aaaaaaaaagaagaaaattgggctatagagactttgtagggggtagtggacaaaaaaaaactcttgtttctctttttttggatcaggtacattagcgcatgtcttatatgtcttttgaaacatcatttccctactcttaaaaaagggttctatctaagacgacccattaaatgggctatgcaatcgtttctccagtgtatgaaatataaagggggaggcaaccataattttttcaaactaaagattcgttcataatagcgtgtatacatgataaatgacaagagcgtgcagtgttttgggggaacggtgaatcgagaagcctgtggacttattggaaattccttaaaggg

SEQ ID NO: 91676 - DNA, 206 bp, Glycine max
  Clone ID: PAT_MRT3847_53798C.1
accgctattatgttaaattgatcactgactgcttgtgctcgaaaaaggaactatctttagcgttatgatctgactcaaatgcattaatacgcggatctacataagtcggctataacacaaagcacaaacatgtgcgccaaaggccaaactacggccagcaaccttaaaaaggtctcctgagactggttcgaccataggctccgcca

SEQ ID NO: 91677 - DNA, 186 bp, Glycine max
  unsure (1)..(186): unsure at all n locations
  Clone ID: PAT_MRT3847_53799C.1
tatcttaatactnnnnacctacngagtttattttctccctacatgcagatcaantccccgcgcgatttttaccatcaaacatacctcccaaaaatatcctttaccaatcttcattcataatgataatacaaaactatcaccttttatccaacatttaaacaaaataaaactttttacttaacatac

SEQ ID NO: 91678 - DNA, 354 bp, Glycine max
  Clone ID: PAT_MRT3847_5379C.1
cgtcttctcatatcaacaaaaggcaaggcacagcacgtggcaaatgttagcaacgcgggtctattactagaaatgagcctttcgcaggacctctactgcctggcctacctggcttcaagaatggaattctgtgttctaacgccactcattctatgctgacacgaatcctagacaactgtaagagagatcaaagctttgatacgcgagggcccttcttcattcgataactagtatgtaatctggtattcactcatataaagctcattactatgtgcaatgagggcgttttactttgcacccactctcatgcgtgcaatcgtagactgactgtaagaagtatgctcaagaggagga

SEQ ID NO: 91679 - DNA, 637 bp, Glycine max
  Clone ID: PAT_MRT3847_537C.1
ccacgcgtccggtcgtccggaaaaataaggtcttattcgctgcttttgttaatgaatgaaaggcaccccatcgccatcgcttccaagccaaggcaacaacctattctaacctctctctctctctctctctctctctctatctgctgctgccgaagatgatgatgttctattttctctttagtctctcttgactcattctgactcgcaatctctcacaaacactttaccttctcttttggatctgtcccttccttttcaacgcgatctcttcccttactccacaatgtgcctctgattccttcctttcaggtttgaggaggagtgccaatggcatcgaagcaaggtgtgatgaaatcgaggaggttcggattgagtggctctaaaggtgcgaattcgccttcgtcttccaccacgtcgtcttctaagcagtttcaggagacatcggccgatggcctgagctcgccggcgtcttcgtcggctcggagtaagccgcagcattttactccagaaactgcgggtgcgctacctttggatggaaagagagtgaaggaaaatgtcacagtgacgggccgattccggcctctgaatccaagggaaattcgtcaaggagagggagttgcttggtatgcagatggag

SEQ ID NO: 91680 - DNA, 242 bp, Glycine max
  Clone ID: PAT_MRT3847_53800C.1
tgagagatgaggtcgctgtcacagcagtcatggtgtacgtcaaggctcataaatcaaaagcctacgtcaagagatatcaagtcgagttcaagagaagatgagatggatgaaccgattaccgtgccaggatgcggttgattaatcaggacaagttcaaatataacactccgaaataccgatttgttgttcgctttagcaacaaggacattgttgcactaatactatctgctagcattgctggc

SEQ ID NO: 91681 - DNA, 705 bp, Glycine max
  unsure (1)..(705): unsure at all n locations
  Clone ID: PAT_MRT3847_53801C.1
gacgatcttctggtcctagccagacccatcggtccgggagaggatagttgagagtttctgaaagggttttctgagcgatggcttttggccaccaatggtcttgaggcaagccttggctggacttctcactctctctatgttcatcatgctgggaaacatgatcaagaaggaccattttgattccatgtatgatgttaatattgaagctgcaccagcatcccagaatgcctctgaagtagtcactgaacaatcccttgcaacggtttcacatgtaagcaaaaagtctttgatggaaaatggaaaaggacttaaaccatgtatgaacccccttgcacttgaagaggcaccgcaatctagaaggttgcatcacattctccttaacaaatggccctgagtatcatatctcacagattgctgatgcagtggtggtagctagaatcttgggagccactcttgtgcttcctgacatcaggagtagcaaatcggggtatagcatgagccttggagatatttatgatgttcccccctttctcttgaggcggcacggcttgctaagggtttcttcgcctccgcctgtacccatggccctgagtatcatatctcacagatagctgatgcagtggtggtagctagaatcttgggagccactcttgtgcttncagacatcaggagtagcaaattgggatatagcatgagccttggaga

SEQ ID NO: 91682 - DNA, 907 bp, Glycine max
  unsure (1)..(907): unsure at all n locations
  Clone ID: PAT_MRT3847_53802C.1
tacggctgcgagaagacgacagaaggggtagtaatagttcttatctgtgaatcttgtgttctcatgttctgctttcactgatcaagctttttactcaattattgaagccacgtgatagaatttaacataaattgaagtggggtctgttatagtaccatatctgcttttctacacaatgtgacaacaggaactttcacatgtcacaattgtagattaagcactcatgcagtccacctttcccaaatgatagctccctagctagtggcagcatctcaacttanattcggtcatatagatgttgatatatatggcaactccatcaagtgtaaagtctttcaatataaaataaaatactatgtaatttcttttgtttcaccttttttagttactcagtggttgatatgctcatccttttcttttcacctaaactataaatctttaaaagttttctgcatggcatcaaaataatatatatggagattccaaaagagtcaaataagtcagttctctaaagagacctcttgtcaacaacagtcgcttctagattaatgtcaaagatgggctattggttaataacaaatggaaaggagataaaaattacctagtttaaaaggtttcatgcgaattccatgttttcttttagtgacatcctaatttaagcatctatctgttaagactaagacttaagagtttacaatcttttcagttatccatagttatttacctttaaataataataataaagagtttgcaaatttaagccaccaactttacagactttttttcctttcttttttctttcgataaagttgtaattagtgctaactaattaattttatatatgtcatgttgaagtgggatgcatatatctacaagccaaatgaaattattgggggaaatgatttct

SEQ ID NO: 91683 - DNA, 294 bp, Glycine max
  Clone ID: PAT_MRT3847_53803C.1
cattcgaattcattttatttatatattaatattatattcaaatgaaataaaaagatattaaaagatactaattataagaatttgaaagggaaattataaagttattaaatgattaatcaatttttttctacctgttcctggagaaaaaagagttccatctgttcttgaatagcttccttcaaaaggacttctgcttccccaatgaatggcttggtaaaaaatatgaattctttgaattgaaggttattcggggttaagtaagcacctaactcaacaagaaatttccttacctgg

SEQ ID NO: 91684 - DNA, 1621 bp, Glycine max
  Clone ID: PAT_MRT3847_53804C.1
gctcctcctcagtctttcagttgctatcttcacatcagcgtgccaatatggtggccgattcctagcaaaatgtaccccttgtgatccatccctctcagatgtgtgccccaccaacgggcgttctggaaacttcaaacaattcaactgcccaaaaggctactacaatgatcttgctactcttcttctgaccaccaatgatgatgctgttagaaacatattctggcccgacactcctcttgaataccaaccatcgtccctcgtaattttctttctactctattgcatactaggactaatcacttttggaattgcagtgccatctgggctcttcctcccaatcattctgatgggctcaggttatggccgccttctcggcatctacatgggacctcatacaaacattgaccaagggctgtttgcagtacttggtgcagcctccctcatggctggttccatgaggatgactgtatccctttgtgtgaatcttccttgaactcaccaacaatcttctcctactaccaataacaatgattgttctcctaatagccaaaactgttggagacagtttcaacccaagcatctatgagattatactgcacttgaaaggccttcctttcattgatgcaaatcctgagccatggatgagaaatctcactgtgggtgagcttgttgatgtaaagccaccagtggtccccctcgatagagtagcaagagtagccaaaatagtagatgccttgaaaaactcaacaagaatatttcttcccagttctgaacaatgggggagtccgaccagtagtaggacaggccaatgggggaacaaactgaaatggactgattccatgagtacatctcatccacgcaataaagaagaagtggttccttaaagaaagaaggagtgtgaaaggaatgggaagtgagagagaaatttacctgggtagagctggctgagagagaaggaagtattgaagaggtggctgtgaccagtgaggaaatggaaatgtttgttgatctacatcctcttaccaatacaactccctttacagtgctagagagcatgtcagtagcaaaagcaatgaccctcttcaggcaagttggacttcgacatctgctcgtagtacccaagtatcaagcctctgggatatccccagtaattgggatcttgaccaggcaagatctacttgcccataacattctgacagtctttcctcacctggcaaaatctaagggtagagaaaagacgaattgaagttttcctagtcattgaatggcaaaacagctctcttgggacaagttggtttcttaattccataagttattcctcaattttgtattacttggatcaaaagcacggagatgaataagatacaaaagcagtgtaaaaactatattcaaattttaatattctttcaacacaatttatcaaatgaagaaacataattcccttttccaccagttcaatcaatttccccccaccctcccgccccaagtctctctattcgacaggaagctcattctccattttgcattatttgggccaaatgaatggagaaaacaaaaatttaaaaaaaaaaaaacaacgatgttaaaacatattcagcttccgtaagggtaaaataacgtt

SEQ ID NO: 91685 - DNA, 432 bp, Glycine max
  Clone ID: PAT_MRT3847_53805C.1
tacgcaatgcaacgccgtaacgtaagcctcggaaactcggcctcgagcggcttcgcgatgtagttcaagacttatgttgattacaaatattgatactaacttaacactttataacaccaaatgcattaatataacaaataataacaagcgcggcaaccaacaatgaaactgcacacaacgaaataaaattaaaaacgggaacttgaaggggaaaaagttttcctaatagtgaatcaaaataaaaacttgaaaaaataaaagccaaatctattccaaggagaaaaatgcaatcctgtaaccattccacacaaaataaaaaccgaaacaataaagacaaaaccctggggcccctaacaaacaaccaaactaaaattaattgggtcgctatcactgaccctttaaaacaggaaaaacctgtggaacaacttgaat

SEQ ID NO: 91686 - DNA, 271 bp, Glycine max
  Clone ID: PAT_MRT3847_53806C.1
aagcttgtaaaaaaaacactgccccttctcctaagtgtgctttttataataagaaattctcacttttctaccactttaaatctaaatttttactgtgttaaaaaaattatatagatttttgaaaaatttattttaatcgcgaacaattaaactttttggcatttaatttttaaccaacattttaaaatttgtaaaaccaatttgtttcttaaacaaattaaccctaaaaccgggcttaattaatttttttaaaaaaaaaaaaataaggttg

SEQ ID NO: 91687 - DNA, 163 bp, Glycine max
  Clone ID: PAT_MRT3847_53807C.1
ccacgcgtccggtcttctttgtctagaccgacttcggtagcactgagcggaaatcgaggggggacagctataggattctgacacgcaaccaactactgttgggtactattgcctgaacatggcggggctgaaagaatcctcgagggcctggtgaactgaagcc

SEQ ID NO: 91688 - DNA, 286 bp, Glycine max
  unsure (1)..(286): unsure at all n locations
  Clone ID: PAT_MRT3847_53808C.1
ctgactcgagatgcggacgcaatgggttcctttctatatgctantatttttgccatatctcataaggtatccaccctctctctcatgcatacttgctctgacgagttattctataccagggacctctaatgcttcgctagatttggagccttggtgagagtggaacatagctaatgacaccaccctgagctatgatgaaccgagcccatgtcgaaagttaacagctttaccggaaatgacgatttataccatgggggccctaataatcctaacccgaaggaaccat

SEQ ID NO: 91689 - DNA, 371 bp, Glycine max
  unsure (1)..(371): unsure at all n locations
  Clone ID: PAT_MRT3847_53809C.1
tacgtaagtcttgatcctctagagccgccgcttttttttttttttttttttttttttnnnggatttttgaanncaganntnnntattatataggggggttttttataaatttggggccccttctaacattcataatttttaaaaaaaaaaaatcccacaatcatcatttacttaatttacttcaattcaaaacaattaggatgnncnngttatgggccttngttgataatgtacgtaaaaaccttttacctttttcccgcctaagattattccagttcctttttaattactaccaaacacaaattcctttcatttacacaaaccaaagcccccaaagaaggccaaaccctcaacctccgaaaccataaaaa

SEQ ID NO: 91690 - DNA, 153 bp, Glycine max
  Clone ID: PAT_MRT3847_5380C.1
ataaacaggggaacgcgggggaatatcaaaaattaaacaacaatttaaagttatgggctctagacatcagaaatattagggggagagactattttgtatgcaagttctggcttaaaataacatggacactaggtttaccaaaaaccctatcct

SEQ ID NO: 91691 - DNA, 449 bp, Glycine max
  Clone ID: PAT_MRT3847_53810C.1
tacggctgcgagaagacgacagaaggggccccaatcaatgtttttagccctaagcaggatggggcaatggtctgaaaaattcctttccaagatgaattgggtgcagcctggccatttgttgatccattcatgggagacaaaaaatctgtctaatttgctcgtagcagccccatttggtttgaaccatgtgaattttctccccacactaagtatttcttcaatctctaggtcagctatccattcattgaaatcaatgatattgttggcttccattcccctatgagacacaccctctctttcagattgatgtctgatgctgttaaaatctcccaggaagcaccacaatccatcaagaccatgatgtcttagttgcttgattgattcccataattccctcttattcagattatcacatggggaatatatgtttactatagttgctttttgat

SEQ ID NO: 91692 - DNA, 2049 bp, Glycine max
  unsure (1)..(2049): unsure at all n locations
  Clone ID: PAT_MRT3847_53811C.1
accagactctcactaatttactagcagaccaccatagacactacgttttgagtcacactcacacgggactcgaaacggtacctgtcgcttcgtgatgagaggaaatttaaagacaccttctgcataacatttctccgcgttcatctagattagtactcagaccttataaaaaagaaagaataagagagagaaagcggagatgaaggatggagcccaagttgtgctgaatgataatggtaactacggcaaattctcacacctacttgcttcccaagatcgtgattatcttctctctccaactggggctcaggtgaaagtttctgatcttgaagggagagtagtgggtctattattcgctgcgaattggtacccaccatgccgtggattcacccaaatcctagttggaatctacgaggagctgaaaagcagagtccctcaattggagattgtgtatgtgtcctctgatgaaaacttggatgcctttaatagcttctatggaaacatgccgtggcttgcaattccgttctccgatttggaaacaaagaaatccttgaccagaaagtacgacgtggaagccgttccgtgcttaattttgttgcaacctgatgatcgtaaagagcacgtaacagttcgtgatggggttgaacttatttaccgttacggaatccaagcttatccattcagtaacgagaggttggagcagctgcaaaaggaagacaaaggggtcttccagcactggtgtttaatcaattgcatcgacatgatcagagtttggttgcttttggtaatgctggagcgcccctcatctgctgcccgtggcttggctagtgggttagacaattggactctacttctcagcgtggcgatgaagtgcacgcaaaatgcgtcagaactgtgtaacgcgattttaagagattataaagcacgagctagccggaaagggagaggaagacttcgaagttgtgctaatatccagcgaccgctaccaagcatcctttgactcctactacagcaccatgccttggttagccttacctttcggtgacccagaaatcaagaacctcgttagacactacaacgtgcaagggattccctggttggtgatcataggccctgatggtaaaacaataaccgtacatggcaggagtttgataaacttgtaccaagaaaatgcgtaccctttcaccaacgccaaagtggaggagctggagaaacagcttgaggaagaggccaagggtcttccggcattggtgtatcatgaagggcaccgccatgatctgaatttggtgtctgatggaaacggtggagggccctttatttgctgcgtatgtgatgagcaagggtctagttgggcctaccagtgtctccaatgtggctatgaagtgcacccaaagtgcgtcagaactgtggaacgtcatgacaataatgtctaggaattttttaattaaattcctgtggcaattaattctatatcctgtgttaccgtccaagaggggcgataacttgacttggctgtatcctaatctgcaccagggaagggactggaatgccctttagataaattagattacgtatctttatggtgcttttctacttgttcagaatatgtgtgactgagagtcataagaaggaaaggtgatacttggggaatcatctatttggttctccatagcttttaagaaaaactgttgttacttgttcgttatcaagtgtctttctataactaacaatgacaataaaatttatagtacgtactgtatttgatatgtttaaaagtgaacaagttgctttgaagcgtgataaccagactctcactaatttactagcaaaccaccatagagactacgttttgagtcacactcacacgggactcaaaaaggtacctgtagcttccctagggtaaatttggactctactctcggctccaacgcctttaattatctcgcttgcatgcatgctactgttttccacgttttgntatttaattatctaatcctncattaaagattacactatataatagaaagttaattttcattatgcaactaa

SEQ ID NO: 91693 - DNA, 941 bp, Glycine max
  Clone ID: PAT_MRT3847_53812C.1
ttttctttttctatggcaccgcaaaagcattggagtcaattggaaaaactttgagcagtcagtatgaaagatggcaaccaaaggcccgctataaatgtcaacttgatccgacagtggatgaggtgaagaagctttgtactacttgtcgtaaatatgcaaagtcggaaagagttttattctattacaatgggcatggtgtgccaaaaccaactgctaatggtgaaatttgggtcttcaataagagttatacacagtatattcccttacctatcaatgaacttgattcctggctgaagaccccatcaatttatgtttttgattgctctgcggctgggatgattgtgaattccttcattgagcttcatgagtggagtgcttccaactcctctgtgtcccaaagggattgcattctgcttgcagcatgtgaagcacatgagactttgcctcagagtgcagaattcccagctgatgtatttacatcttgccttacaacacctataaagatggcattgcgatggttttgtactcgttcattacttcgtgaatcacttgattattcacttatagacaagatccctggccgtccaaatgaccgaaagacacttctgggtgaattgaattggatctttacagccgtaactgatacgattgcctggaatgttcttcctcatgatctttttcagagactgtttcgacaggatttgcttgttgcaagtctgtttcgaaattttctacttgctgagcgaatcatgcgatctgcaaattgttctcctgtctctcacccaatgttacctccgacccatcagcatcatatgtgggatgcatgggacatggctgctgagctctgcctctctcaacttccatctttagttgaggatcctaattctgaatatcagcgtagtacatgtgtcaccgagcaggtgacagcatttgaagtatgg

SEQ ID NO: 91694 - DNA, 845 bp, Glycine max
  Clone ID: PAT_MRT3847_53813C.1
gggtcttccagcactggtgtatcgccaagggtatcgacatgatctgtattcggtgtctgatggaaatggtggagggccctttatctgctgcgtgtgatgaggatccagggtctagctgggcctcccagtgtgtcgtcctgatggtaaacaatacgtacagggaggagtttgataaacttgtaccaagagaatgcgtaccctttcaccaaggccaaagtggaggagctggagaaacagctggaggaagaggccaagggtcttccagcattggtgtatcaccaagggcatcgacatgatctgaatttggtgtctgatggaaatggtggagggccctttatctgctgcgtgtgtgatgaacaagggtctagctgggcctaccagtgtctccaatgtggctatgaagtgcacccaaagtgcgtcagaactgtggaacgcgatgacaatgtcttggtggacaccactggttgcttctaggatttaattaactaattcaattcctttggcaattaattctatgtcgtcctagagggcgatgacttgagtgcacaagggaagggactggaatgcccttaaattagttagatcacgtgtctttatgggtgcttttctacttgttcagaatatgtgactgacggtgataaaaagaaaaggagatacttggggaatcaactatttggttctccatagcttttaaatttttttacttgttcgttatcaagtgtctttctataactaacaatgacaataaaatttatagtacgtactgtatttgatatgtttaaaagtgaacaagttgcattgttcgttgatattggtcaatatatggtcatgatgcatgtatctgt

SEQ ID NO: 91695 - DNA, 647 bp, Glycine max
  unsure (1)..(647): unsure at all n locations
  Clone ID: PAT_MRT3847_53814C.1
tttttttttttttttttttttttttttttttttttttttnttttttagagaatccaaaaccagattttattagattgaaaagcgtaactgtacattgatagaaacagtaaatcctttatctgatgaacagagttacccccctacaatccccattccagtgatgactccccgtgccaattcaattacattgcccctcatgcataccttttacagtctccactaatcatcatatagcatctcaccagcagaaaggaaagtctactgtctggctgcgacaactggcccttccacctgatatatcatctcaccaatttgaaaatcagtaaaagtaattggaagtggagagctgaatacacaagattatgcatgcaagaaatactggaaaccaagtggtatgaaaattaaacagaaattaattagattaaaagacaatagaagcgcttcctacatgtaaataaaggacattaagtgagcacgaggatgattccctgagattattacccaaatggaatttaattacaatcttggtggcatcctatatgactctagttttaaagatattctataggacaactaccatttggttcagtgaaatttcgttcaaatgagttctaaggttaactttaaaagactttgagaatttatga

SEQ ID NO: 91696 - DNA, 253 bp, Glycine max
  Clone ID: PAT_MRT3847_53815C.1
attggaagcttcattccgatgcccgggaaggttcaaataaaaagcaaaagactatacattaagagttagaccaaatttagaaatgtctaccttgtatttgtaaatatatacacaccagatcaattgacttttttttatagtcgtcaagcttgtacacgtgtaaaagtcttcggattttaccttatttgagattcacttaatttcctttcttaaaaaaaaaaaaaaaaaaaaaaaaacaaaaaaataaaacggg

SEQ ID NO: 91697 - DNA, 258 bp, Glycine max
  Clone ID: PAT_MRT3847_53816C.1
tattcccggggccacagaacttcatatagcggggcggcgccctcttttttttttttttttgagagaactgtaaacaaattctttatttctaatatagcattaagaatgatacctgactcaaaagaacgcatataaggtcatagggaaacccatgaggcgcaccgaattgaaagcaccagtagagtaatggacatggagtccaaaccgaatagaaggaccatagaaggacgcatcccaagagggagaggcctgctacaa

SEQ ID NO: 91698 - DNA, 478 bp, Glycine max
  Clone ID: PAT_MRT3847_53817C.1
agggatttgtccagactttaacaaatctttgtttatggggagccaaccatgtttgtttgacatagtcaacaaacattggccatggtgagcaagcaatttcaaacttcataaggcagtcattaaactcttgctcaaaaggacaatcctccagactctcctatgcttccatgacataatctcatacattttttttttacccacaagagttttacattttgtcttcacattcttattaatgtgaaaccgacacaacaggttggttgactcaaggaaaatagtttttactacattcatcaatgctgaatctttgtcggtaacaataacttgagggattgtatcacgtctcagaaaattacctcgaaaccgttccagagcccatgttggatcaagtggcctcggaataattaagaaggaggggttgaattaattattaacgaccctttactaattaaaaatctatccttcttaatacgcttaa

SEQ ID NO: 91699 - DNA, 561 bp, Glycine max
  Clone ID: PAT_MRT3847_53818C.1
ccttccccaaaaaaaaaaaactatttccccattaagtggggggggttggcccctggggagcaaacgacggaagacccccacccgggttttttatgggggcggggggggggaaaacccttttaaaagaaaaaaaaacccccgagcgggggggaggagaacccccccccctttggggtaaaaagatccggggaccccggggggggaaaacgccccccccaagggggatggggcttcaggcccccaaaaaggggggggggggcttcaagggaaaattggaggtttggggcgccaaaaaaaccaggaatttttaaagggcccgggggggggggaaaaccggccaaaatccccgggagctttttgtgttgcgaggggcctttttacgggggaagtccccccggggggcccccgttaacccccccccccttctttgggggcccccaaaatttgggggcaaaaaaagtaccctggcccccctttggacccacccaaaaatttatcaaaagccggcggcccaaaagaacccggggcccccggttttaagtttttcatctgggggggggt

SEQ ID NO: 91700 - DNA, 678 bp, Glycine max
  Clone ID: PAT_MRT3847_53819C.1
atgacaaaatcgttccaaagttacgctgaactgaagaaacaggctgagaaggacgaccttgaagactctcatgacattgaagcagggaaactcgacaaacccacggaagaccataaccacctctctcagttcttccaagaagttgaagcaatcaaggcaaggatcatcaagtcaaggctcgaggttattgaccaatccaacataaccaatcgcactttatcagaatcctacatagaagtaacccaaataagaatgtctgtcacaaatggtttgagggcaaaacttagggtcatgttgatgcatggatttcagtccttgagagacaagtttctcatggagaaaatgatttcgaggagtctcaaagttgagtttatggttgctgcagcagggaaaacggatattgataatgctgatttgggtgttaggcatgaggaagtgatcatggatatccagaggagtttgaatatgcttgaccagatttttgttgacatagctattttggttgagacccaaggagaaaacttggatagcattgaggatcgtgtggccagtgttgttaacaatgctaaccaaatgaagaggaagaacaccaacacagaatggctctgttgggttcttgtggtgatgctgctgactgtgtttctttactgggggagaaatttggagggagtggtttag

SEQ ID NO: 91701 - DNA, 269 bp, Glycine max
  Clone ID: PAT_MRT3847_5381C.1
tattttttaattattttaaccaagcacactcaacttataacttaggggaattttatttattctgcccgccccacatattcccacttacctttacaagaaaatttatttcttcactcccccatttttatttaccctatcttaattctttcctaaataaacaaataaccagcacttgtattttttcattattcaactaactcctccctaaactctttaaacctactctccaccattggaatgcaattaaaaccaaacttactcctttttaa

SEQ ID NO: 91702 - DNA, 832 bp, Glycine max
  Clone ID: PAT_MRT3847_53820C.1
gaatggtgcctatttcacaccatctggtgctggagcctcagcaagctatgcaagagcctctagcttaggagcaaaatcttcttccatggttggttccatgacttccaatgctggtgcactaggttgcaaaagaggcagtcagtgctagcatatattatcatcaaccacaaccatgtgaatgaaagaggtcatccattatttttcttttgttgtttgattctcaaggttttaccatattatagtagaacatcatcatcatcatatatccataatccattgctttctttcctcacacctccatcatcatatcctgcagtattcttgacaagtgtacattaaattacacatgtcaatatggttttatgtgttacccctttgccacaccgtgtgtattgttgttggtcaaccttagctgctcgacttgctccagctgaaacaagcaatgcaattgtaggagcaggtgcagaagcgccatccattgttttcttccctttttcattcttactctttttttttttgcctttttcttcctttggtccttcccatctcatcccccccccccacaccaattcatatgcatatttttctcatgtctccttacatactgttcaatcattttcagttttataggatttgaattgaatgagtccaatatgatttttcttttactcccctgttattaatttactatttgttttgttagttaattatacaagcaaaaaaagcatgattgtcaaagtctagttacatggaaacactttatcaaggacgattatggaattgtaatagttgtggtgttgctttttaactttctcacctttttagccactta

SEQ ID NO: 91703 - DNA, 280 bp, Glycine max
  unsure (1)..(280): unsure at all n locations
  Clone ID: PAT_MRT3847_53821C.1
gtgtttttgcatttcatcgtgcattcaatggccaccacagcagctctntcccggaaccatggtgagcacctaccttcatgnggaggcaacctatgacnancacaagtcctaaagncattccccaacgttggtgaagctctttttggtctgaaaagtggacgaggtggtcgtgtcacttgcatggcctcgtacaaggtgaagctcataacccnngaaggagaatggagttttaatgcccagatgatgtnttcatngnggncaaggnnnnaggccnaggntt

SEQ ID NO: 91704 - DNA, 261 bp, Glycine max
  unsure (1)..(261): unsure at all n locations
  Clone ID: PAT_MRT3847_53822C.1
gtcaaatttacatttataaacaaaaaaggcgcagggggagtggatcctggtatccaaggtcctcgcctnaccngaacaactattctgggcatggtacaccaacatggttgggatgaactggacaccactagttatcaaacaagtggtattattagtatgctgggttccagagaggaacctataggttggatgggttacctgatttttgagaaaaacttatacgttgaggtaccatctgtaatggcaatgactgatgctgaa

SEQ ID NO: 91705 - DNA, 2380 bp, Glycine max
  Clone ID: PAT_MRT3847_53823C.1
cccctcgacgcgattccgcgggtctctctcccttctctctctctctcttctcttttcctcttcaacattcttctctctcacaaagcaacaacacaaacaccgagcgaggggaattcaactttcagcaatggcggtttcttcttctgcaacaaaatgggtcctcttcttgcttctggcgctgctcattcgagaagaagccatggccatggctactacaccacagatctctgacctcaggaatcttgaagttgaaagacacaggttgccgagcttgacgaactcgtcaatggtggagagggcaaaagaggctgacaaattaaatgaacaagctgctgtggctaacccagaggaagtggtttcaatggttgagatgagcatccagaacagcacagagaggaggaagttgggatatttctcttgtggaactggcaaccccattgatgattgctggcgttgcgaccccaactggcaacgcaatcggaagcgtcttgcggattgtggcattggttttggccgaaacgccatcggtggccgtgatggaaaattctatgtggtgactgaccccagggatgatgaccctgtgaacccgaaacccggcactcttcgccatgctgtgatccaggataggcccttgtggattgtgttcaagagggacatggttattcagctgaaacaagagctgatcatgaacagcttcaagacaattgatggtagaggagtcaatgtgcacattgctaatggagcatgcatcacaattcagtttgtaaccaatgttatcattcatggcttgcacattcatgattgcaaacctactggaaatgctatggtgagaagctccccaacacattttggttggaggacaatggctgatggagatgctatctccatatttggctcaagccacatttgggttgaccacaactccttgtcacactgtgcggatggccttgtggatgctgtcatgggctcaacagccattactatttccaacaaccacttcacccaccacaatgaggtgattctactaggccacagtgactcttacacaagagacaagctgatgcaagtgaccatcgcatacaaccatttcggagagggacttatccagagaatgccacgttgtagacatggatatttccacgtggtgaacaatgactacactcactgggagatgtatgctattggtggaagtgctaaccccaccatcaacagccagggcaacagatacaatgctcctactaacccttttgccaaggaggtgactaagagagtggaaacagcagaaacccaatggaagggttggaattggaggtcagagggagatttgttactgaatggggcctatttcactccatctggtgctggagcctcagccagctatgctagagcctctagcttaggagcaaaatcttcttccatggttgattccatgacttccaatgctggtgcactaggttgcaaaagaggccgtcagtgctagcatgtattatcaaccatagccatgtgaatgaaagaggccatccattatttttcttttgtgtttgattctcaagtttttaccatattatagtagaaaatcatcatcatcgtatccattgctttctttcctcacacctcgattaccatatcctgcatttttcttgacaagtgtacattaaattacacatgtcaatatggttttatgttgttaccccattgccacattgtgtgttttgttgttggtcaaccttagctgctcgacttgctccaactgaaacaagcaatgcaattgtaggagcaggtgcagaagtgtcatccattgttttcttcccttttcaatttttttcctttttcgttctttggtccttcccagctcatctcatctcatcaacctttgtcccccccccaccaattcatatgcatatttttccaaatgtcaaatcatgtctccttacatattgttcagtctttttcagttttataggatttgaattgaatgagcccaaatatatatatatatatatataaatatatatatgaattttcttttagccccattttgttatttttttactatttgttttgttgagttaattatacaagcaaaagcatgattgtcaaagttgagttatatggaaacactttatcaatgacgattatggaattgtaataaaaaaaaaaaaaaaaaaaaaaaaaaaaagctttttagccttttttttctttttgcccttgtcaatgcaagtaatctttgatttttttatgcaattatggttgtaaatcattaaacatatctgcttgtgtttgtttctcttaatcaaatataaaaaaaaaaaaagggcggccgccgccaagtcactgagctgtcggcattattccggccggtccggcaggggggcggcca

SEQ ID NO: 91706 - DNA, 368 bp, Glycine max
  Clone ID: PAT_MRT3847_53824C.1
gggacattggggggaaaatattatattcttgaaacctaaaccctggaacaaaaaaggggctcaaaaataagggtgtcaaagaacttttgcccaaccgtgcccttacacggggggaacctaggaaatcgaccggacctgcgggcccccgggttaaccaaaagagagcccaaaaaaaaccgggggaaaaaaccccccccccccatccctgggggaaaatggtttccccccaaaaatccccacaacataccagcgggaaacaaaaagtgcaaaacctggggggccaaaagagggagcccacaacaaaaaattggaatgcgcccgcggcccaattttcaccctgaaaacctttcatgccaagtgcataaaag

SEQ ID NO: 91707 - DNA, 489 bp, Glycine max
  Clone ID: PAT_MRT3847_53825C.1
ggaaaacaaacaggggtaacattaatggggcaatagggttcaacacaaaccaaactttttttcaaaggggattacagacccattacagggggggtttttttttaaaaggtttgggaaaatccaacattgaacatcacagagaaatcagttccagtttaaaaccccccacaaaaacccaacaccaagggcagaggtgactccttttggatgttggaaacaggggggggccttccatcctttaactgtggggcaaaaaaaaaaaacctttggtggtccggggggattcctttcttgtcctggattttcgccttaacaatgaaaatggggggggggctttccaccttcggggaaaaagtcttacccaaaaggggctttaaaaaaatttttttaccccccccaaaaaccccccaccaaggggagagatgactttctttgggaattttaaaacaacaggggccttccccccacaaacttttttaccaaggaaaa

SEQ ID NO: 91708 - DNA, 664 bp, Glycine max
  Clone ID: PAT_MRT3847_53826C.1
cgcaaacaaaaaacattgcgacagttgcgacttattggagttcattcttcgcactctctcggaaaccacttgtttccaatcatctaatcagacgatagcagactcaagaaagacgtttccttcccagatccttctagaccatttgcaaaccgtctccttccccgaatccattctccaaaccctcgatccttgaggagctccaccaccgtgacggcgctccggtctccgcgacggcaatcctgcctatctcgacacggtgaacaggatatggcgctgtagggttcggcacaaggacgtttccggggagagaagccttctgctcttgccggagttggagcggtggaggagcgacatcgaagcttccctattggactcgcaagtgttggagaggttggcctccattgataccacaagcatggaccgatttgggcccttcatttattgagcacgttgccgccaatcccttggaggcccaacaccaagagagaggtcaattttgttaacttgtgattttgatcttaatggagttcattttgtaaccatgtccacaaatgatcttggttgttgacctatgaatttcttcactgtttaaggattatttttaatgtcatgtgtttgatggtttcatgtttaaaataattttaggtatattttctcacgtttg

SEQ ID NO: 91709 - DNA, 1590 bp, Glycine max
  Clone ID: PAT_MRT3847_53827C.1
ccacgcgtccggcgacagttgcgacttattggagttcactcgagccgctcgagccgttcgcactctctcggaaaccacttgtttccaatcatctaatcagacgatagcagactcaagaaagacgtttccttcccagatccttctagaccatttgcaaaccgtctccttccccgaatccattctccaaaccctcgatccttgaggagctccaccaccgtgacggcgctccggtctccgccgtcaattgtgccgtcgcggtggagcatgagcgtcttcatgagtctgaaagggaattataggaactactttcctgattaggttattggaaacaagtggtttccgagtccgaggaaggaactccaacgcccaacgtcaccactctccattcctgtccccacaagtcgcaactgttatgctccaccgcgacggcaatcctgcctatctcgacacggtgaacaggatatggcgctgtagggttcggcacaaggacgtttccggggagagaagccttctgctcttgccggagttggagcggtggaggagcgacatcgaagcttccctattggactcgcaagtgttggagaggttggcctccattgataccacaagcatggaccgatttgggcccttcatttattgagcacgttgccgccaatcccttggaggcccaacaccaagagagagaaattgagaagtgcactgctgcttctgaggaagttcatccctcaacagctgctgaggaagtgcatccctcaacagctgccgaggtccaaaaggttaggagggaatgcgattctgtggagttgcaatatttgtctaaggattctctacttaattcgttggaagtgaatgagacaccgattgaagaacagagtagagatgcagatgtaccttgcccgcatgttattaataacaatgaccctgatctgatggaaaaggatctaacttctgtccctcgtaatgattaccataggccaagtttaatggaaagaaatagtaccactcctatttctgagtggaatgattcgatagacggcttggagggtggaacatctgatcatgcaattagatgtcatttgcctagccccaaggggacaaaagtttctccattgacaaagtataaaccaacaaaaattacaaggagtagaaaaacgaaaagatggagtcagttggaagaggagactcgaaagactgctgtagacaagtttggcaggggaaaatggaagttaatgctagattctaacaaagatatattcaaagagagaactgaagttgatttgaatgacaagtggagaagcatgacaaggtacgggtgcaaatgaatcagaatgtggaatattgcaaaggtatttccttgctttatttgttgttcttgttgcttgagattgtatagactattaagcaatatgaacagtggaggttatgtatgattaaaactgaagggattttattttgtctattggttttacgttagttcgattgcttttggttggtaactcttgcaacagatatatggttgattgatttgttaaaaatgttgtgccatgtttttggcagtacactttattatggttgtgtttcgatatcaaa

SEQ ID NO: 91710 - DNA, 390 bp, Glycine max
  Clone ID: PAT_MRT3847_53828C.1
tctcactgactcatagtaatattcctaattggttgtcacttctaatttaactattaacaaaatggcatagcatcacctgttctacagtgacttaatatattgcttgccatgattccaatagttttagttatcaacttattttgtttacaagattgcaccattttgtttataaaggtcctttatacataaattttaatgaatattttgaaggtctaaatgaatatgttgatttcttgatgtcatctgaataatttagtgtctgtttgtgtttttttacccaaaggaaaagtgttttttagttaatagtaataatacatgttcataagtttttaaaaaagaaaataaaaaaatgtgttaagtgctttctttagaagccaaaagtattagctt

SEQ ID NO: 91711 - DNA, 813 bp, Glycine max
  Clone ID: PAT_MRT3847_53829C.1
agctgaaggattgtttaggctccaggtacattattatcgaaattagtggtttaagttcattcaccccaaaaagaaaatatttcttgctaacaatatttttataaggtttactggttagcaacccagtgtgtgattcctcagttcaacaactctcagcaacatgcacaatcctcccccgccaggcggtccaggccctcaccaccaccccggcccaccggctccgccaccacatgctcatccatctcctccgcctcctgggcctccacaccaccaccacggcccacccggcccaccgcatgcttatccaactcctccgcctcctgggcctccacaccaccatcccggcccacccgaaccaggctttcatcaacaccatggcccacccgggccaccgtatgctcatccaactcctccgcctcctgggccaccgggacctccccctccagggcctccacaccaccaacaccaccgttgctgatgtaatgcatatggagcttatgaataacgatcctacatatatatgatgtaatgttgaatgctttttaatttctgaacactttatatagcaagggcaaaatttggttgtgtcactaaataaaagctttgtagttcgtagttccactactatagtactacctatatttaccgtgtatcaccgtctggtgccccttgtgctttttctggtgtgtatcttattagaataagaaataaagggaggtcatttctatgtatgttgcactgattaaatctattataaagacattttaatggtcaaaaattatttttttaaaaaaaaaaaaaaaaaaaaaaaaa

SEQ ID NO: 91712 - DNA, 275 bp, Glycine max
  unsure (1)..(275): unsure at all n locations
  Clone ID: PAT_MRT3847_5382C.1
gttgtttcctgtgntgatatcctcgntcnctctgccagnncatggcattntttcgctaggaggtccccatatccctcttaaaacaggaagaagggatggtagaaggagcagagccgatgtggtanagcagttcctcccagaccaaatgaatccatttctgcagttcttgacaagtttggtgccatgggaattgacacccccggcgtagttgcattgcttggagcncacagtgttggtcgaacccatgtgtgaattggtgcncgtttgtacccaga

SEQ ID NO: 91713 - DNA, 301 bp, Glycine max
  Clone ID: PAT_MRT3847_53830C.1
ggctcgaggccatctctgtagtccgattgaccacaggctaacatttggtactaaaagccaacgatgtacctgataatgagagacttggcgatgctgctactggacatggtggacaggcacagttcaatctagcctagcaggcgaccaactgtgcaattatggtgaagtaggaatgcatactgggagcgtcagaatatataggacgacaattctccacatatggcgagaggaaacctgtggaggatttcttgatggcaggggattacctcacctcatgggatatctcatccatttcgcgaag

SEQ ID NO: 91714 - DNA, 424 bp, Glycine max
  unsure (1)..(424): unsure at all n locations
  Clone ID: PAT_MRT3847_53831C.1
cggaangaccgaggcgagcgaggcggcgaatcagccactggcactgaacaattttccattaacaagaacaacaccatcttaagggaggacagggtaatggacatggctctgcattcacccttgaacccaccatctgtgcctcgctcctcttctactactggaacaagatgcgcccacattccggcttggagctactttgattttgatgagctcgtacttgatgccttctgcactgaacgcatattatgattcttaattggacaataagaagcctctacttcttacctctgttcaagacacaccaaggggcctgttaacaactcctaatcaacgctctagtattacagtaggctcaccctaactctaaggatgcaacattggctctcaccctatcaatctctccaacttaggattgaacatggct

SEQ ID NO: 91715 - DNA, 341 bp, Glycine max
  Clone ID: PAT_MRT3847_53832C.1
atgtcgattagactcctttaaaaaactcattcagatgacgtattcaagagattcgaatgctttgcatgcattctactatggacacatcttattcatgagggcatctaggtagtactgaaagtgtcagtgcaggcatgacactaacatgtataataacaatgtgtaattaacagattatacaaattatcaaaatacgactgctaaactctaattttattgggggaataaagcatatgagaaagactattgtgtaaaatgtttctttcccttcaattatttggcactattatcatctgagtctctatgatataacttcacatatgggtctcttgcggacacgt

SEQ ID NO: 91716 - DNA, 648 bp, Glycine max
  Clone ID: PAT_MRT3847_53833C.1
acggcttgctcataatcgcgaggcctgccaggtaaatccccactgatgaaaaaggcctatgggcaacactcaaagagcatgaggttgttactgacccaccttgagcaggaactccagcgatctcgccaacagggaatatttatttgaagcactggagataaggcacagaccatgatgagtatatggcacctatgagcattgtgaagttaggagtaccgcttcgatggttacaaagagcataatactacaaaccaatgagctatgggctgcaataaattctaaagctgtacatatttgaactatccaaccattgcgtgacaatttcatgactcagtgtgatgatatcctcagactggaaaggaagtagcgcgcatgaagcgtgactgtttttccgacattcctggcacagaatgctgtggaagactgtcagctagaggaggaagctctcatgccggatttggaggctttacggacatccgcattcctaaagcttattttaagtatagtggagcctatatccgatcacagttggtgggcatactaccaacttggactggtaataccctgacactgaacatgctatttcccaaggaatggatgcattgtatcactgcttatctgatacattggataatggttccgccagct

SEQ ID NO: 91717 - DNA, 260 bp, Glycine max
  Clone ID: PAT_MRT3847_53834C.1
ctggtacggggcgcaccagctgtgatatttacaccatctgctgtcaagactgggaatcgggcaatcccgctcgcacaaaagcaatgactctctcaatgcatccaaacccgggtgctgcagcatggtgtacggcatctgtgtaccctactggatttgatcgcaatattattcgtgtcactggatggactgtctccccaatgcaggctgtatacgttacaatggactggttcatcgcctctgaggaatgcgataccaggacc

SEQ ID NO: 91718 - DNA, 368 bp, Glycine max
  Clone ID: PAT_MRT3847_53835C.1
ggaataaaataacattgaactgaatattgggtcaaacaacatgcccctttgtataagggtaaggttaaggcaccaggtgaaatggggcaaatatcacaagggaaaaaaattgatttcgcactgtacatattaaaaaaaatgaaaaaaagggggaaaaggggtcaaaaatggagtattttagggaaaggaacagtctttgatgaatacaacagttcccgcatggtcttgtaaaaatgatgaacccttcagttgaaaaaaaaaaattacttattggaggatttaaaaagcatcactgagtgagaaaaaaaaacaaaaaaaaaatgggtcactctgggctaaatcaatgggggggggggaaagactgaagg

SEQ ID NO: 91719 - DNA, 504 bp, Glycine max
  Clone ID: PAT_MRT3847_53836C.1
gatttatatttttaagacacagtaatagttgtccattgtccttaatatgaactgaccttctcattttcatgttagcacttaccttatttagctttcctttttctgctttgtcattgcaatatcacatttttttgtaagcttgtttggttcaaaaacattttcaagtgtaagcttgtttgatttaataagtcagcttagccaatccttcattttgataaatacatttccttgacctttaattcttttatgcaatgagttcaacaaacttgtgaatacattgtcttggaaatcaaccagtgccttagctatcctgctctcatttgattgatatatctgttatttgacttattacccctctaaatggatacttgtctaatgatgcagtctcttcccaaaattgcatgggggaagagaagtcgtgtgatattggatgttgggtgtggggtagccagctttggaggctatctgtttgaaaaagacgttctgaccatgtcatttgctcca

SEQ ID NO: 91720 - DNA, 387 bp, Glycine max
  Clone ID: PAT_MRT3847_53837C.1
attatctctcagctcgctcgtaccgttcctccactcgtctgcctactcgtactgacggttactaaatgataacagaaggtgacttctctggagaccttccttcactctacttttcttgcgtctaggggtttagcacatcttcttttaaatttaaagatgatgggtaaggtaatggctcacatcagtcttgtggtcatttggccatgtcatttttgggaaattcactatcactgtgtcacctgttttacaagcttggtggcattgacaagcttcttattgtgaggtttgtgaaggtatctgctgatatgtacatcattggttttatgtatgtctgggttctattctatcttaaggctgatcgtttaagatgaatcaccattgatattg

SEQ ID NO: 91721 - DNA, 576 bp, Glycine max
  Clone ID: PAT_MRT3847_53838C.1
atctcattcgatcatcaatcctcactcgtggatttcaatctcgttcagttcctcccattttcatacacaaatcattttctttatatttctgcattgctttgagtggattttgcataatcatattatcaatttttcattcatttgtaagtgggcatgtgattgtgaacttattgagctacattaattaaccaatgtgaaagactcttgtgcatgttgtgatattcatcattttatctcagtttgtctcattaaaaatggaaataatatgctaagttgctaaatgctttatgtcatctcagtgtatgtatggttagtttagtccaactgtgcaagttttcatttcgaccagtggttcgtgtttgattttgattcttcatgttatctttgtagtgggatatgcgtgcagtagtactcttgtgaaggttgaaaaaaagaaatctcaatttgatgtatggtatgccaagatggtagcctactgttgattatagattttatttgaatttgatattgatgttcaatgattttcaactagaaaaaaaaaaacagaagatggtgaaactgctttgaatttaaggt

SEQ ID NO: 91722 - DNA, 243 bp, Glycine max
  Clone ID: PAT_MRT3847_53839C.1
ttcagtctcactcttacgctctcgctctttgtggcagtgcttcctctccctctcactcttgctgtgactctctgcggtggtgctccccctcgctcttactctccgcggcggtgcttcctctcgttctcactgttgctctcgctcacaaccatctctgcgacggtgacgagaatgcatggaatggggccctggaactggagccatccaaaagtctcgcacaccacaaggtccaagttcaagttc

SEQ ID NO: 91723 - DNA, 399 bp, Glycine max
  Clone ID: PAT_MRT3847_5383C.1
ctcgagccgaatcggctcgagcggctcgagcggctctagtacggctgcgagaagacgacagagggggtacagagcatatacattaaaatgggatgtacatttttgtttattttccaaaacaaaacgctttgctcctttaatattatataaattttgggtggggagaacaattgaagaatgcgcttacctgttttgcaggcactgcggcatgtgaatatacataaactaggtgaccctctctagagcacatatatgctttcattttatataatatacatatactatgcttttatatgttactatgtggctacaccatcgcacagaaaatatcatattaattagcttgataatcggtgactaaaaaatgagcactagtacatcaggggtgaacacaacaaa

SEQ ID NO: 91724 - DNA, 1601 bp, Glycine max
  Clone ID: PAT_MRT3847_53840C.1
gaccgtcgcatggcacgcgtaccgtaagccttggatccctctagtagcggccgccccccccacccccccccccccttttagtcgcacaagcacttgtagccatgcagctttaattgaaattaatttcactgaaccagaaattgaattacatagcaagactactattaacaaatgtaaaagaatcaccatttgtaattcaacaagcttttcccatgcccgttaatttctacattttcccattacaataaatccactggtttccaaattccaggtgtaccttctttttcttttctcttttgttcacttctttttttcccaattttttttccttctttttctgtccccccaaatacttgattggaatggcaacatatctcatcagataagcaaaagaacaagaaacaaatggaactccctttatactatatttcccccaacacctctgtacaagtcctcaccaactaatggagaatgtggaagtcgacaacacaacacaacagcctcacccctttactttttcttttgagttcatgtttaactcattctcccatgctcataggcacaatttttctatcacctcttatataccaagtggcaatccaaaattttggaaaatcttaatttccccttgaaggctggcagttacaatcaccataccccaggctgacatgttttgattcaccccattagataaatccacacttacccgagggcttcggtcccttgttgttagaagtttttcctcaggccatgtggcagaaattctatcaagaaaataactatccgttgcacttgcaatggttccatgaagtggactgttgttgcaacctgaagcaaattgtgaaccctcagaacctagattttcctctacaggagtaggaggatgattggccgatgagacctcatcctcatccccatcatcatcaagctcaggttcttctgcaaaatatgaatcatgcatctcccatgtatcatccatacctgaccaaggaatggccactgacacatctttacagtgaaaatgttcatatgtgcttgtcacagtgacacctttactcctgctaggtctgcaatcagcttcatttttccagatgtatacatgagaatcctcacttgctgagacaacatatttaccatttctgcctgcctcacagcaaatggtaaatatggctatttgcattccgaaaccctttaaacttatgaactaattcaataccatcaacaagtcctcgagccattcgggagaccttacattccatcaaagaccaagaactaaatgaccacaattttccattccacgtatcattcaaataaatttacgaaatcctaccaaaatatcaaaaagaaatattcattccaaaacaaaaaagtgtgtggagaatatcaggtgagaatatgagaagaacaaagcttaatgatttaggacctactaaagcttctttataaacacttttagaagaagaaaataagaagcttacccaaacaagcccttagtcttacacggatggttttaaagtaaaattggtcttgaccatttatgtgtattgtgaaaattaaattctcttgggctctcacttaatacacaccctacacagacacac

SEQ ID NO: 91725 - DNA, 210 bp, Glycine max
  Clone ID: PAT_MRT3847_53841C.1
aattcggctcgagccatcaccaacaccaacaccaccaatagagcacaatttttaaaacccacgcgccgccgagacacgcagtctgtatgaatcatagtcaaggtgggcggaatcacctactcgatcgccgacaagttcgccttctttccgacgcacccacacgttctacacagtggtcaccgccgacgaccatggcgggttctcggaccc

SEQ ID NO: 91726 - DNA, 798 bp, Glycine max
  Clone ID: PAT_MRT3847_53842C.1
tttttttttttttttttttttttttttttttttttttttttttttttttttttttttttttttttttcgatataatatcacagttctacatttgaaatatagggtcattaatttggcaagcaagtaccatcaacctaacaatgttattgatcatttggattcagagtacaatctcaactagcaacttatgtaagtttattaaattggaccgtggccttgctgaagagtgacatggccctgcttcacaagggatgcaatgcaatcatcgaacatttcttcaacagacttaaaattgaatcctagactcctcagctttccagtgtttagttcgtaatttggcctatctagtttctcgaaccttttggagatggggagggtaggataacgatttgctagcaatgcagccaaatcatcttcatccattacggtagagctgcaaaggtatctaccatgggagccttcattttcataaacaaggatttggcaaagggcaacatcatcgatatgaacatatcccatccttccaagtagttggaatcgcttggtttctcctttgagcaagcctagcacatcagatgcagtagagcataaatttggtggcaagctgggtccaatgatgaatgatggcagaactgtcaccaaatttattccattctctatgcagtattcccacgctgctctttctgcctgtgtctttgccatcgcataccatgccttcaatacatgttacaacttagcagtttcttttgaagcctaaaaaacataaattaacatgtacctagctaggagggacaaaaa

SEQ ID NO: 91727 - DNA, 306 bp, Glycine max
  Clone ID: PAT_MRT3847_53843C.1
cccacgcgtccgaaaaaaaaaaaaaaaaaaaaaaaaaaaaaaaaaaaaaaaaaagggccgggccttttaaaaatccccatctgtgaggggcgggccttccaaattctacctttttttttggggcccccaaaattaaattacctgccccgggttttacaactaactttctttggaaaacccttgggttaccccactttaagggctttccttccaaaccccttttcccaaggttgcaaaacatcaaaaagcccctccccgttggcctttaccaaaagggccccccctaaattggcatttgaaaccccc

SEQ ID NO: 91728 - DNA, 404 bp, Glycine max
  Clone ID: PAT_MRT3847_53844C.1
gggatctacgctctctattcttcagatttatgcctttcccatttttttccttaacataataacaattcaatcacacgaactctgaaccttacctgcattttctttgtctgataaaggcaaggatttcaaccaagctcctctttctttttccatctttccaattttttagacaaaaccctgatgaaaaaaaatcaattttttccctgcccttttgttgtatgttaatttttgtaaaagggttttcttgcgcatttaaaaaagataatattttctttttgtggcaatttcataggcttctgtttttgaggcgaagaaggatggaattgtaatgctgggaatataattggagaattgggggaggagtaagggaggaaatcatacacaatgcccgagttccccttgag

SEQ ID NO: 91729 - DNA, 675 bp, Glycine max
  Clone ID: PAT_MRT3847_53845C.1
accctcgagccgattcggctcgaggcgatatcttcgactgtgggaagctgggaagcttctttttctgatatcttttacgtgcccatcaaacaaataagctctccactctatttcagtcaccaatcaccaatgactccttctttcactaacgtcaaaatcttctcttctctcgtcctagacggattcttcaacgctctcaccagacgcgggtacgcggtggcatcacaaagcgcaacaaaggaaggagtgggctttatgagcggcaagatggcaccaaagtcaggggaagacaacaaaggggtgtctacgtacaaggtttcgtgggtgccagatcctgtcactggttactacaaacccgagaacatcaacgagattgaccctgcagaattgcgcgcgatgcttctcggcaaaaaaatcgacaactaatcccaacccaattaaagaaatattgcttccatttagttagttcaaaatatatgggattaatggccacggaatattgatgctgatatgctctgttctcttcttcatgaagagaagaagaccttgattcacgtttgtgttcatttatttgctttagttttagaagtcaagcggaatgaatggccattagcagcttattgtaatgtcttctaattctgattttattaaatattgattatatcaactcgagac

SEQ ID NO: 91730 - DNA, 276 bp, Glycine max
  unsure (1)..(276): unsure at all n locations
  Clone ID: PAT_MRT3847_53846C.1
tgctcacttagcaacctccataatgcagtggagagaaggtgattccaataaattactacaattctgcaatgaaacgattatgcccttccctgtcctcaatgcaaaatctgctaaagttgatattgacactgtccttaacgatctnagttcgtggcgataaactctaggacattcgggggaagctttggcagactctcaagcatcctacaattctttaatgacagagtgttcagtctcttgagatgcttgatggtagttggcagtgtcttcacacgg

SEQ ID NO: 91731 - DNA, 716 bp, Glycine max
  Clone ID: PAT_MRT3847_53847C.1
tcgggaccaatcaccaatgactccttctttcactaacgtcaaaatcttctcttctctcgtcctagacggattcttcaacgctctcaccaggtaccgtaattgtttctttcactttaaaattgtgtttttgttcttatgtcaatgacttttttttggttgtaaccatgttattggtcgattttgttgatttttaatttgtattaaaaaaaacttaatcacttttagtgaaacctgttttcttgattatgttattttttgcctctcatgtataagacttgaatatgagatttgagtcaaaggatacgtattcagtttcacactctgactaatatgatttaatcagacgcgggtacgcggtggcatcacaaagcgcaacaaaggaaggagtgggctttatgagcggcaagatggcaccaaagtcaggggaagacaacaaaggggtgtctacgtacaaggtttcgtgggtgccagatcctgtcactggttactacaaacccgagaacatcaacgagattgaccctgcagaattgcgcgcgatgcttctcggcaaaaaaatcgacaactaatcccaacccaattaaagaaatattgcttccatttagttatttcaaacaatatgggattaatggccacggaatattgatgctgatatgctctgctctcttcttcatgaagagaaagagaccttgattcacgtttgcgtccatttatttgct

SEQ ID NO: 91732 - DNA, 242 bp, Glycine max
  Clone ID: PAT_MRT3847_53848C.1
aacgaaaggatgtcaactaaaatattaatgacataagctgctgggaagtgtaataaactgatcaagataaaagctaccccatgaaagtcctaatagcagcgtgaattatagtcacaatttcttggtagcaacagcagattttgtaatttttctttctgttctttttattttctcgttatgctatggaatgacgtatatgaaagaatttgtgcttcaaaaaaaaaaaaattaattataaaatt

SEQ ID NO: 91733 - DNA, 508 bp, Glycine max
  Clone ID: PAT_MRT3847_53849C.1
gctcaattctgagacgtcagtatggccactgagcttgcaaaactccaatttctgccccatgctttgttttgggttgaacttctaacagtacaaattgtacaacacaagtaaaagacagtgttctaccttttcttctttgctatttaagcactgtgctctattctttctaggcattttttatatctcttgctttgatcaaactcggaacaggtaatgtggttttcagagtggaagcaaggtaataggttttaaatgcagttccttgtcttcttttttcttccatactgttttttactatgcatgcatctgttgtaggttgcactaggtgaattaggcttgcatagtatttttgtcaccaaatcaaaattcataggctttaatctaataatcgttgccccactaaaaaattgctagaacctcttctgagtggattaagattttcttccttaacacttcatttgagtttattgtctctaattctccgctcaattttattattcacccattt

SEQ ID NO: 91734 - DNA, 270 bp, Glycine max
  unsure (1)..(270): unsure at all n locations
  Clone ID: PAT_MRT3847_5384C.1
gctcantacaaatatatatattaaatattagagaagtaccaggaggtacctgtagatacaaaaaatgtttaaaacaaaggtggtacagagaaataaaccccaggtaaaccccaactgaaaaaacatacatgcttcactttttggaagaggggggagacaaaaccctccctttctaattaaacaaatacatctgaaaaattggacgaccactgtttgaagtgagtatcggattctttttatataaccttgaggcaggaccaaaggataaag

SEQ ID NO: 91735 - DNA, 184 bp, Glycine max
  Clone ID: PAT_MRT3847_53850C.1
gtcttgctccaatctcacaatgatggagtccccaaaaccttccctttcccatccctacaatctatgcttccgctctgtcctcaaccctattcacctcccgtcacaagacccatcttccagcactccttcacgctcctgaaccaccctaatttagtgcggtctgagagaactcagaacccccgtt

SEQ ID NO: 91736 - DNA, 1825 bp, Glycine max
  Clone ID: PAT_MRT3847_53851C.1
gggacataccatatatacatatattatagtttagtttgcactattttaatggtggctggctaccttaattccacatgctaaaattttgcacccctttattatataaccgtttcattctctatagcatctcaaagggtgtcctgagaaggaatcacacaagagaaattttgggtggatcttggcaatttaaatttggtccaaaaatagtaagaaagaaaaccatagtttatatagttttcatgtccttgctaacggtggcgcaccaaagggggtcaggtgagtttatgcggttcacggaaagtcatggcggcggtggtggcggtgacggcgatggtgaatatggttatggacatgatgatggtagaggtggtgggggtggtggttcactagggttgaattttaaccaagtgatgcaacaaggtgaggttacaacgcaaggaggtactttggtttcagggtataacaggggtgatccagatttgagagaaatggtttccgctttgacacatgtggtggtgtcttcagggtcaggccagaggagcaccgaatggatccagcaaagtggttttcctatgatgtctgcatcttctctttcatgtttgtcttctttctcttctccttcttcttctggagcctcttgggttggccacaaaagaggcagagaagaagaagagagtagctcttcccataacatgatccaacaacaacaacaaagtgctccaagactcttcagaaacattggtgacttcatggtgccttctcaaggagactcatcttcagcgacagaagaagcccccacctccacaactacaagtgtaaccgctgtggcaacaacggttactgaaaccccacccccaccgggaggtggggaaaggaggagaaagtacaggggagtgaggcagaggccatggggaaaatgggcagcagaaattcgtgatccacacaaagcagcaagagtttggcttggaacattcgacacagaagaagcagcagcaagagcatatgatgaagctgcattgaggttcagaggcaacagagcaaagcttaacttccctgaaaatgtaagagcagttccacccattcaaccttttcaagccaccactaggctaaccgtttctgattccaccacctctcaattccggccactcgtcacggaggcgccgcccttcattcagcagccacagattcagggctcctctgacttgatcagagattacttgcaatactctcagcttctacagagtgattttcaacagcaacaaatacaacaacaacagcagcagcagcggcagcagcagcagcggcagcggcagcagcggcagcagcagcagcaacaacaacaacaaccatctagtttgcttcagcagttgtactataatgcacaatttgcttcacttcaatcaccttcaatgctatcatcatctccttcattttcttcttctgtgtctccagcaccattcccattattcacaacctctgcttctttccccttgttttcaagtcaacaaatgggctatttccagccaccggaaagccgcaatcccgctggcggcgtgccggagtttccaacgtccacatggtcggataccagtagccagccaccaccttctggttgatacagtgttttagtttccttcatattttcctttttcttttttctttctttcattcttagcataaaaaaaaaagacttgttatacttatttcttttttcaagggtgaaactatgatatagttttttttaagtatttttggtactattctcgtatcagaattagagtttcagtaatttatgttgatattcaatacaaatctttattatgta

SEQ ID NO: 91737 - DNA, 301 bp, Glycine max
  Clone ID: PAT_MRT3847_53852C.1
ctctttttttttttcgcccaaagttgaggagctgctcaacactcagacgctcgagtgttcggtccttcttcaaccattgttaacctgacagcaattatttccttacgcaggtagttgcttctgaagcctgaccttcctctcagccacaaattgaacgtgcttgagaccaccgacctttttttttttaggatagatcaggggttaaggtcgacaatcatatcttatctaaaggtttccacagtccccctgagactcactttaaaaggaggaatctttattcccacggcgttttttgcctttt

SEQ ID NO: 91738 - DNA, 261 bp, Glycine max
  Clone ID: PAT_MRT3847_53853C.1
ttttatgagtgaggccgtgagcatgagtgaccgagtgagcttgttgttctcacatggcccaaaagcatgcttgatctggtccattataatgcaaaccgcacttgggaacagctgaaatatgtgtaggcctgatgatggcgagctaaatgaggagggcacggaagcatcccaggtggcctgaccggaaggtgagtgactcatggataccggcaccgactgaaccgttggacgctgaccatgatgaccctggaacacgatggt

SEQ ID NO: 91739 - DNA, 359 bp, Glycine max
  Clone ID: PAT_MRT3847_53854C.1
gcttcaaaaatccattcctaatcaaacggaacggtaaaattatgtgtggaaaggggaaccaaaatcctaaccaccatggccaccattaaaggttcttaacctttttcccccgttgcatattattgttaacaatttcctaaagcctttttaagtttggggaattaccaagatgctattggatttaaccttgcttattataattcctcttaaaagaatcctattcataaaacctattccccaaactattgttaagaacttcttaatggccttgacaaagtacctaactatgaatttttcaaggttgttaatttttgaccccttattcctgttaaccgtataccattttttggcaaactagg

SEQ ID NO: 91740 - DNA, 265 bp, Glycine max
  Clone ID: PAT_MRT3847_53855C.1
acgggagatgtttgacggttggagaagaagcgtggaatcttccatgctgcctgtagctgttctcccttacccttcccttcccttccctcgcaatagaaaaaactccatctccttttcctcattatatctttctcgcaacccaaacactgtcttcaatcccccttgtgtcaatgaagtttcttccttttctcatttccttcctttttgcctccctaatcgcaacctcaggaacgccgcatcccaatgaagaacgcctcaacatcca

SEQ ID NO: 91741 - DNA, 218 bp, Glycine max
  Clone ID: PAT_MRT3847_53856C.1
ggtcgcgccttctttaaagcacacacgaagctagcgaccctacgacaatatctttcccactaccactataacaagctccaggttggaattaatgacgccaggctggtgactctatacatcaagagcattggagatctacgcatccaatgacgtacgcattatagtcatctacaaaacacgtgctagggactatcagctatagcgtgcttcctactacc

SEQ ID NO: 91742 - DNA, 236 bp, Glycine max
  Clone ID: PAT_MRT3847_53857C.1
ccgggagcaaaaggttcaaattcaaggttttgcattgtgtcctgctgttttttttaccatgttggatggatattatcatgtgataaattaattggaggagaggttctacataaactgacaattataacaccggtataagtgggaaattttcttcacttgactatcaatgttacatgtttctttctggatatgatccatgttcttaattctataatattcttataataatcttcttt

SEQ ID NO: 91743 - DNA, 430 bp, Glycine max
  Clone ID: PAT_MRT3847_53858C.1
gtttgaaattaatagttgaagattcatggtttgcctgtttaatccaattctattttgtttgttttcttattttagtaaaaagcactaattgttatttttatgtcagaatcaatgttagaaactagttaaacctagggagagtcaaggaggaaacttctaaatgtttgccatcaagttaaatgggaatgaagttagtgatgtggtgcttatataacactaagaaacaattttttttccttatcatttcccttttcctacgtacctatcctatataatttcaacatgtttgagtttctttcccatagttatgcaaattgtatgaagataattgctctatgtagcatttgacatgtttgagcctagctactttcaattttgacttggcgacagtcatgtcacccttcaaccaaacaaattaagataagacacc

SEQ ID NO: 91744 - DNA, 278 bp, Glycine max
  Clone ID: PAT_MRT3847_53859C.1
ttttggggaaaggaggggggactcctttgaattgagaacaattagaggacttccatgcacttccactggcggtgataacggtccctgagatatttttattagaactttcattcacactttaatggcctggccagaactggaggctttgccaggaagaaccttaacaggactgatggttttggagatattacccttttctgttcacttagattgaagaaagcaacggtcacttctacttttctttctggagccatccaaggagcccagcccaccaaaaa

SEQ ID NO: 91745 - DNA, 1415 bp, Glycine max
  Clone ID: PAT_MRT3847_5385C.1
gactttgttatggaatatgctaaaggtggagagttgtttaagaaggtggccaaaggaaagctcaaagaagaagttgcacacaagtattttaggcagctagtgagtgcagtggatttttgtcacagtcgaggtgtataccatagagatataaagccagagaacattctgttggatgaaaatgagaatttgaaggtctcggatttcgggttaagtgcgttggccgagtccaaacggcaagatggcttgttgcacacaacttgtggaacaccagcctatgttgctcctgaggtcatcaaaaggaaaggttacgatggtgccaaagctgatatttggtcatgtggggtagttttgtttgtcttactggctggttactttccttttcatgaccctaatatgatggagatgtataggaagataagcaaggcagagtttaaatttcctagttggttcccgcaaggtgttcagcggctattgcgcaagatgttggatccgaatccggaaactaggatttccatagataaggttaagcaatgttcttggtttaggaaggggccaaatggtagacagaaaacacaagaaggggaaaacctgtgtgtctctccttcagttacaaatcattctgaacaatgtggtgatgaaagtgatgatttagcagcagaagcaagggaagagcaagttgtgccagtaagtataaatgcctttgatataatctccctttcaccaggttttaatctttgtggattctttgaagacagtattcagaaaagggaagcaaggtttacttcaagacaaccggcatcagtcatcatctccaggctggaagaaatcgcgaagcagatgaggatgaaaataaagaaaagggctgcaggtttgttgaaattggagggccttcatgaaggtaggaaggggattttatccattgatacagagatctttgaggttactccacttttgcatttggtggaggtgaagaaatcaaatggagatacattggaatatgagaaaatactgaaggaggacattaggcctgctcttaaagacgttgtttgggtttggcaaggtgaccaacaagagcaatcacaacagttggagcaacagaagcagcaacaacaattaccacagtcataagtacaacattatcttagtttttaatgtctcatgccttatatttgtgcattacataatatgaaattttgttttgaataatgctgtctcttatcttctgttttacaatgccatgaccttattgtattacgtcctgtgtctcaaattctgttggcagatgtttctttagttttaatgtttagtggttagcaaccgtttctagtggctcctcgtgtttttaaggacatgactgaataacgagaatgtagttgcctatgaagaaaaactatatataaatggtttagtttctt

SEQ ID NO: 91746 - DNA, 305 bp, Glycine max
  Clone ID: PAT_MRT3847_53860C.1
ctgggaccactgcgataacaatgaatggcttagtacaagttgcatgctacattatgcgtagcatcgcagtgccattcgtacgatatagcctcatatctacacgatcaatgtctaaggctcccggattgcaacctgctgatgctcaactcacttgctcgcttcagactgacatcacagaatttgctcaagagatgattgacgcatacaaaattgcaggattcgaccttgacatctatgctcatcaatgtatatgaagcatgtgcacaaggtgccccaaaagggataaccttgcacgaaatccagag

SEQ ID NO: 91747 - DNA, 185 bp, Glycine max
  unsure (1)..(185): unsure at all n locations
  Clone ID: PAT_MRT3847_53861C.1
gtcgacccacgcgtgcgcccaggcgtccgctctcccctccgcatgacgaggggacctaaaaaatctanatgcaaaggggccctttgctggatttttttggcgtaccatagaaagcaaatgatctacttacccgtttccaacaacttgcagttttggcaaagcccattgggcgatataaaaaccct

SEQ ID NO: 91748 - DNA, 189 bp, Glycine max
  Clone ID: PAT_MRT3847_53862C.1
ctttccatcggattccagtgtcgattttctgcttctgcatctgcataacccgttaataattgctgcaaaacccttatttcccaaatcgttgattaaaggttccaagcgtttggccgcgtttggacccaacccgatcgattcccacgaaacggggtttccgaataaaagaattatgggagggttcctttt

SEQ ID NO: 91749 - DNA, 216 bp, Glycine max
  Clone ID: PAT_MRT3847_53863C.1
tgcaaggaccggaccggcaattccggaatgacccacgcgacccgagcacacgctcttttttgcctttggagcgagggcccacagagctcctgagggggaaataattataaacaatgcggactgagcatgtcctcgcctactctcaacagacgcaacgacccaactataccctacaacactgatagcacccttaaacaacaagcaggcccgggcaac

SEQ ID NO: 91750 - DNA, 506 bp, Glycine max
  Clone ID: PAT_MRT3847_53864C.1
ccggtattcctgggttttcccacgcgtttgcttagtggcaatcactgatctttctgaacacaaagatcccttcaaaatttcaccatgtccggctaccccaaccagcctcccagctacggctacggctacggcgcgccgccgccgccccatccctacggcgctcctcagcccccgcaatcctacggcgcgccgccgcccgctcagccatactccgcagcgccctacgcccagccgtccgccccctacaataaacctccgaagaacgagtcccactcccacagcggcggaagcggcggtggctactcggcaccgccggctactgcgtacgcgagcccgttcgcctcgctggtgccgtcggcgttcccgccagggacagaccctaacgttgttgcgtgcttccagatggcggaccaggacggaagcgggttcatcgacgacaaggaaatgcagagagcgctttcttcgtataaccaaagcttcagtctcagaaaccgtcattttctcat

SEQ ID NO: 91751 - DNA, 521 bp, Glycine max
  Clone ID: PAT_MRT3847_53865C.1
tccgcccacgcgtccgcaataacagaggaatccaagttcctttctagggaccgcgattcctcattcattcatccatatgcttcttcaactttctcctctctttctccctttaacttaggcagattcttccatctcagggagactctagcacagtgcctgaatcctttctagtgagttggcatcaaccatgctgggtggatttgtaaaaaaattcccttccccactgggaggctgcgcttcaacgccgcacaggaagagttatgttcatatatgagaacacataaaatttaggatacatgcttcactcggtgacataacaaagaacaggcattgcaatgcttcacccacccgccggatactctgttgttctaacatgaagttgcatctgcccaactccaacaccagagccatcgttaaaaagactctcgtgtaaaaactccatgaagacgcctggtttgactcattaacattatagaacctgaatcctatgctgactttactagcgccctggagaaggtctt

SEQ ID NO: 91752 - DNA, 181 bp, Glycine max
  unsure (1)..(181): unsure at all n locations
  Clone ID: PAT_MRT3847_53866C.1
tacaccggcgaaagtggtggagcttcttaagagccaggttccggtgagcggtgacgtgacnacgtcgtctaanggccatacatggtgcatagcaaatggcaattcttgggacaataaactacataacgctcttaactactcttgcgggaaaaatgaggctgatggcactcgacttcatccg

SEQ ID NO: 91753 - DNA, 3433 bp, Glycine max
  Clone ID: PAT_MRT3847_53867C.1
tgagggtgtttccctctgacccgtttgggttagttccaaatgtagcattgacagaagaggggcttgtatccgggtgtgaaggctgcaccaagctccagtcagttctatatttttgtcgtcaaatgactaattctgccttggatacaattgccaggaacaggcctaatatgacacgttttagactatgtattatcgagcctcaagctcctgaccatcttacccatcaacctctggatgctggttttggagctattgtagagcattgcaaggatcttcagcgcctttccctttccgggcttcttactgaccgtgtttttgaatatattgggacttatggcaagaagcttgagatgctttctgtggctttcgcgggagatagcgatctgggactccatcatgtgctgtctgggtgtgacaaccttaggaagctggagatcagggactgcccctttggtgacaaagccctcttggccaatgctgcaaagctggagacaatgcgatccctttggatgtcctcttgcttggtgagttatggagcatgtaaactgctgggtcagaaactgccaagacttaatgtcgaagtcattgatgaaagaggacctccagattcaaggccggagagtagtcctgttgagaagttatacatgtacaggactgtttctgggccaagattggacatgccacccgcgggtcagtctttgtcctcctcagctcccacgtcaaacaacacacacgcaaaagactacattattattacatactaccactctcgtagtctcgcttggtgttaatggcgtttcagatctaacagtgcaagtggttcggcgtggttgttagtgagttggttaagcgacggcgtttggttggggttagtattatgcagagaatggcgtacacgttttcgtttccggaggaggggctggagtacgtgttctcgtttatgtggaacgagagggacaggaacgcgatctcgctggtgtgtaagtcatggtacgagatcgagaggtggtgcaggagtaaggtgttcgtggggaactgctacgcggtgagccctctgatggtggtcaagcggttcccggaggtgacatccattgcgctcaaagggaagccgcactttgcagacttcgatttggtccccggtggctggggatgttacatctgcccctggatcgatgctgtggttcggtccttcccctgcttcgagcaattcaggctcaagacgatggtcatcaccgacgagagcttggaactaatcgctaagtccttcaagaacttcaaggtcttggttctcacttcctgtgaaggttagaccccgctcggacttgccgccattgctgccaactgcaggaatttgagggaattggacttgcaagagagtgaagtggaggaggacctttgtgggcactggctaagccattttcctgattcctatacgtcattagtttcacttaacatctcttgcttaaacaatgaggtgagtttatctgcgctagagcgtctgcttgggaggtgtcccaacctgcggaccctccgtctcaatcgtgccgtgccccttgatagactacccaatctacttctccgggctcctcagctggttgagttaggcacaggagtctactcaactgagatgcgaccggaggtcttctcaaacctggaagcagcattttctggctgcaagcagttgaagagcttgtctggcttttgggatgtgctcccatcctaccttccagctgtctaccccatctgctcaaggctaacatcgctaaacttgagttatgctattattcaaagctctgatcttattaagcttatcagtcaatgcccaaatttgttgcgattatgggtgctggattacatagaagatgctggtctttatgcccttgctgcatcatgtaaggatctaagagagttaagggtgtttccttctgacccatttggtttagaaccaaatgttgcattgacagaacagggccttgtctctgtgtctgaaggttgccccaagctccaatcagttctatatttttgtcgtcaaatgtcgaatgcagccctacatacaattgcgcggaacaggactaatttgactcgttttcggctttgtattattgagcctcggactcctgactatctaacccatgaacccctggattctggttttggggctattgtagagcaatgcaaggatcttcaacgcctatccctatctggtcttcttactgaccgtgttttcgagtatatcgggacttgtggtaagaagctggagatgctatctgtggcttttgctggagatagtgatttgggacttcatcatgtgctatcagggtgtgataatcttaggaagctggagatcagggactgcccctttggtgacaaggcccttttggcaaatgctgaaaagctggagacaatgcgatccctttggatgtcctcctgctcggtgagttatggagcatgtaagctactgggtcagaaaatgccaagactcaacgttgaagtcattgatgaaagaggacctccagattcaaggccagatgattgtccagttgagaagctttatatatacaggactattgccgggccaaggttggacatgcctggttttgtgtggacaatggaagatgattcttcactaaggcttgagtgatcacgctgtggattgagccaaggaaatctaatgccactttggtttctgacatcgataatggcaggtacatgctcagtatgcaattctctagtggatttactgttgcctggcttatatatatagttagttacggcttttggttgagctaggtaaaggagagtactcagaaggcttgagctcgattgccattcattttacactttggctgagctatgggatgccaattttactgataaataaagagtctgaaaccgtgttgttgtatgtgcgttagatacagttgttatattattcttcatactataatatttgcgggcttcaatttatttgtatgttaactttctctttcgtattaggatgttggacacatttgtcattgtcacttgttagccttcccaatgaataatgttcgtattctaatgcagccagcgttattagctcttcgcaaatttgatgccagagtcgattggtgctgtgaaataaacattcggaatggctaaatgacgcatatgaaccgaggaatggctctactggttgaaaggtttttgcattttaacagagtggcttaagattgtttccatcggtttttacatatttgcttccaggtcaatttttggttgcaaacgatagggcatgataaaatttctcgttcaaaaatagggttatggctgaagatagtataacttggaaatttacctaagaagtaacattaatctgtaaccttgttacaagtgaggaagctgtaatgatgtcattaatctccatcactaaaatgaagttttcttttcaagc

SEQ ID NO: 91754 - DNA, 239 bp, Glycine max
  Clone ID: PAT_MRT3847_53868C.1
gcagattacgactcttcgtcccctaggccactgacttcgtggtacttcgaacggcagcccgtttaattccttgcctcctccgagcgcggtatcgaaaggcaacatgaatatcaatgaaccagtaaagggtcgcgcatttgcgctccccttcaccaaggctgccaacccaaaagcgaggttgagccatgacgaaatgcgtttgccgtttctcaacaaagtacctgacaatattcgcaacc

SEQ ID NO: 91755 - DNA, 534 bp, Glycine max
  Clone ID: PAT_MRT3847_53869C.1
ggaaggggaaaaaaaaccacttgtatttaacccccacccgaagaataattccacaaaggggaagaacgggacccggacccgggggggcccccccggaaaaagaggacggggaccaggaggggaaaaaaaattcccaaaaggggggggtaaaaaagggggggggaaacacgggcaaaagggcaccccgggggaaaaggggaaccgggaaaaaatccgccggaaaaacgagggggaagcccaaagggaaaaaacgggggggcccaacaggggacccaacccaaaaaaaagggggggcgccaaagggccggtttggaaacggaaaaccgggggggccagggggaaaaaggaagggggcccacccccgggggaaaagggggtagacaaatgggccccaaggggggtttcctttctccccccgaaaaaggaaaaaggggaatgcccctccccggcggggccggaaaaaagtgccaaaagcgggccaggcggggttgccccaccagcaaaaaaacgggttggagggggggaaaccggggg

SEQ ID NO: 91756 - DNA, 295 bp, Glycine max
  Clone ID: PAT_MRT3847_5386C.1
cgctcgccctcctaccaatccctgctctaaattgtacttttgctgtcggcagcgggcactaccggggaggggctccccttcccttgcttctagaaggtacaggcgcctaataccgacaccgctgcggggtacctgcgtggaatagttctcgcttcagagtacaaatgggggttactgcttgggatagaacccacaggcggggctggtctacaatattgaaccatggaccgtgatatgccgagacgggacattccttctcccaacagaaacccctgcactgccagctggaaagaat

SEQ ID NO: 91757 - DNA, 2775 bp, Glycine max
  Clone ID: PAT_MRT3847_53870C.1
cggggggacgcacgcgtccggcagaccacgctaaaccttcgtgcaacttatggcctttcacttcgactctctagaattgctcactcggttgctctgcctaaagagatggcacatcatgagcgctccagaacagattcttaatctcgcacacaataaatcagacattgagcgtagagttcatgcagttatagataagtttgcagagcgtggtttaagatcccttgcagtagcattccaggatgttcctgatggaagaaaagagagtgctggaggcccgtggcaatttattggtcttttgtctctctttgacccacctaggcatgatagtgcagaaacaatacggagggcactaaaccttggagtcaatgtcaaaatgattacaggggatcagctagctataggaaaggaaacaggtcgtcgcttgggaatgggtaccaacatgtatccttcatcagctttacttgggcaggacaaggatgaatccattgttgccttgccaattgatgaactaatagaaaaggctgatggatttgctggtgtatttcctgagcacaagtatgagatagtgaaacgcttgcaagctaggaaacatatttgtggaatgactggtgatggagtgaacgatgcacctgccctcaagaaggcagacattggtatagctgttgctgatgctactgatgcagcccgcagtgcatctgatattgttctaacagaacctggacttagtgttattattagtgctgttttgacaagccgagcaatcttccagagaatgaaaaattatacaatttatgcagtatcaattacaattcgtattgtgcttggttttatgttgctggctctcatttggaagtttgactttccaccctttatggtgcttattatcgctatcctaaatgatggtactattatgacaatttcaaaagatcgtgtaaaaccatcacctctgccagatagctggaagctagcagagatatttactactggagttgtgcttggaagttacttggcaatgatgacagttatattcttttgggcggcatacaaaaccaactttttcccgcgagtgtttggagtccctactcttgaaaaaactgctcatgatgattaccggaaacttgcctctgcaatctatcttcaagtgagcactattagtcaggctctaatatttgtgactcggtctcggggttggtcttatgttgaacgtcctggtattttgcttgtgacagcttttgtgattgctcagctgattgccactttgattgcagtatatgccaattggagctttgctgcaattgaaggcataggttggggttgggctggtgtgatatggttatataacataatattctacatcccacttgaccccatcaagtttttaattcgctatgctctgagcgggagggcttgggagcttgtcattgagcaaaggattgcattcacaaggcaaaaggactttggaaaggaacaacgtgaacttcaatgggcacatgcacaaagaacattacatggattacaaccagctgacaccaagatgttcaatgagcgtacacatgtcagtgaactcaatcaaatggccgaagaagctaaaaggagagctgaaattgcaaggttgagagaacttcatacactaaaaggtcacgtagaatcagttgtgagattgaaggggcttgacatagacacaattcagcaagcatacacactctaaagatgcttaatatatttgcatacttatactgtaaagagttacattctaatgttgctgaagaaccatataatgtaatgatcacacacgttctgtcctttttactctgccgtctgtttcgagcacttaaaggagtgcttttttgaggtcaatttatgtcatcttgtttcttgttatcactctacctgtcacgcattctccacaatttcatgatgccatgaatgaagagaaattcacccttgtatcctacgcttctgaactcattttctatctatgtacctcaatttctttcatctttggaaattaattataaagttccatgtgtaggaaaggccatgaagaggcaaagaggtgctatgcacacaaatcaacaaaagggtatccacagaaacaactttgaaagtgattttgtggaatatggagatcttgatgacgtcatcctgcatgatctgtttcatacttacctggatttaactgcaaaagctgcatagcgccatagcctgttaatttttcaccactattaatttctggactctattatgttactatttgtgttgtattattgtcgtgggtgggttgtatttcgaaaatttgctggaattatagtaggcctccaagtttaaaaaaatatttaggagtactcccaacctatcaacaaaatcatcatatcgttggtgtgattcaaacacatatccttataggatatgaatttgatttttatcaacttttattgttgccatgtttaattataagtacatcttattagttttcctttaattatccaacactgtggatcacattttttttttctatatataaatttgcacactgatactgtaaagggtgggggcccaatccaatggtgctgacgacttttgagaggaatagaacctaatgatgtttacccccgagttgagttcaatgtcctctccccgttttgagcccttaaaaggagtgctttgtaaggtctatttacatatgcttcttgtttcctgtggtcactatagctgtcacttttttttttaaagtttcattgtttatactgcaacggggagaggcgttcctcttcc

SEQ ID NO: 91758 - DNA, 175 bp, Glycine max
  Clone ID: PAT_MRT3847_53871C.1
cccaaggcagaggtataagagtaggacaggttaccacaacatgaacaaggagcaccgcccaaccactctaaacggtacaagagacgcaaggcacagtgagagggctattggccacaggggaaggtacccatgcatccaaagtgtcaagacggggcccataccatcaaacccgtgc

SEQ ID NO: 91759 - DNA, 1898 bp, Glycine max
  Clone ID: PAT_MRT3847_53872C.1
gaactagtctcgtcaaaaatcaagcaaaatatatttaacaaacattaaaatatctcaaataagcagtcgtagtctgaactttgaaacttacaaatcgcatgcacctcacaggtatggtacaataataaccatgatcagagcaacaatgtacatatataagcctcactcacttttacatatgcatggttccaacagtcacaaccccacccgtcacaaccaaatttgggaccttcaaatttggggaagcagaaaagggaggcaaaaaaaacagagacaagggaaaaaaaaaaaaaaaaaaaaaaaagcagcaaaaacggagcaacgatgattaaaataaaattatcatagaagcttgtcggcacacttcgccctcaattcacctcagccattttctctcttgaggaggatgtacattgtttcctttggcactctgctgtgccttagatgttgatcgttggatgcggggagaaacttgcctaccagtggcaccaggtaaggaatgtctcttcttaacttcaatgtctcgttcatgcacatctggacttgatcttggagagttatttgcattaaccttggccctagcagattcggtagctagcatgaaatggggaagagaattgttgttagtactattatctctaggttcttgatcaatgtgatcaggctttactaagccaaaggaattgcgcctctttccattctgctgatctttaggcagttgctccctactgccttttgagcctgaatcatgatttggatttgtaggtgatttgttactcaatgataggctccgacgtttattgccagatctagtcttgctgattgtactatctttaggttttacagacacttcacttgaaggtgttccttgtgattcagggacagttaaatggcttctaggtgaagcttctggagatgatcttaaatcttgcagaacagactctggcagctctctctgcaggtcaggtgcatttttctcggtcttaatagcaggctcttcagagtccacagctaccaccgagtgacccaaattggcactaatgtcatcaacaatctctgacttatccaaaacagaattagctaggttagaagctgggatgacatgtgaaacattgccattggcctcatcatcacggtttacagtgttctcaagaataccaatcccttccactaaatctttggcatctcgctcattttccgtagctccaggctctgatatgtcaggtgaatcaagagtggaagaaatagagagttcagtgccacattcagaaccagcaaacctagaaagataagcagcaggattttcaaatgcaaactcttttgatctatatgcagtatcattgcctacagaagaggtgtctccttgtgattcaacagctgaatcttggtaggacaaactgcttgtcctaacagaatttgctattgaactaagctcttcaaattttgactgtgcagcaataaatgcaggattactgacctttcttgaaccatttacaggtttctttccttcagcctctaattggtctgaggcaaatcttttcatggatcgtatgccctgctcaccatcaatttcaggcttctgattaaaataattaggctctgatggtggggcagtttcaggacccttatgaagagagctatgctctgatggtggggcaatttcagtccccttctgaagagaatgatgctctgatggtggggcaatttcaggccccttatgaatgaaattaagctctggtggggcacttgcatctgatgctgatttttcatttaggaaggaatcagcttcgtctgaggcaactttagcatcatatgcaattctttcttcaggaggaacctgtaccaagtcatcttttacaatagatgatgtggagtagcttgcttgaaactcaaagtca

SEQ ID NO: 91760 - DNA, 324 bp, Glycine max
  Clone ID: PAT_MRT3847_53873C.1
aaaaactgattagaagggcaaggtgatgttttttttttgaaccaatcaaagcgaagcacttacctggaatatactttgaacgataaacctatacatatttacattacataaatgaagggtgtaaatttgtctaaagcatgcccttcacaaacgccacagcaaaaaataaaaagttgaagttaataatcatcaaatgaatggacatgattaaacgcagaatcaaaaaatacatttttatagggtttcccggggccataaattatgcaaattgcaaacgatcaagaacgtggagcggccatttgaaattttctttattctgtcccc

SEQ ID NO: 91761 - DNA, 399 bp, Glycine max
  Clone ID: PAT_MRT3847_53874C.1
ggtcgaccacgcgtccgataaaatctcacacaaattacacatgtcatcaactctctcggttgcatcatcatctcttttcaatttaatctcaatgtgacttcaattaagcaagacaaatccagttcaatgcccgtcaatttcaatcagtcgtcatttatataaagaggggattcagctcaagttattcatttttagtttactttcactaaaactttctagcctaatcattttgcagcttcattttatttgccattactttctttaatcactcttaacagtgaaaatgaagttcttcataacggtggcaccgttgccagaaatctcaatttcaccttcagtataatcgctaaatttgccatcttctatgcttttaccattactatttctgcttataccttc

SEQ ID NO: 91762 - DNA, 672 bp, Glycine max
  Clone ID: PAT_MRT3847_53875C.1
accatgttcattattcccattgtctacgtttactgtttataactgaatctaagacaacataaatttaacatcgtgtttctcgttttgatcttgttcctgtggttagagtttagaatttgaagtagtagctgcattccatttttctccccttggaagcacgaggtgaaacagatggcattgactttgaaagaggaagacgcagctgactgggtttacagaggggaaggagcagttaatcttgtgctcgcttacgctggatcctcaccttcttttattgggaaagtggtccgcatacgtaaggctccaaggaatggatcgcagtcaaagagtgtgagtgtgaggaatagcatagctttgactccacatgaacgtgttctctggaaagatgtgcatcaacttatctgctcttcagacaaggaaatagttggtcaactatatgtgcaccatgttatgaagcctttgcttggttccaactctgttgatgctgggatgcacgttctggtgaccagggaattccttgagttggatgagaagaatgtttctggtcaacgtgctgcgtggcgagttgaagctggccagggttgatgcacattgtgattgtggccttctcatgtcagatcattctctctttgcttatggcaggtaaagatctagcctgtgattatgtgatga

SEQ ID NO: 91763 - DNA, 434 bp, Glycine max
  Clone ID: PAT_MRT3847_53876C.1
accatgttcattattcccattgtctacgtttactgtttataactgaatctaagacaacataaatttaacatcgtgggtctcgttttgatcttggtgggtggttagagtttagaatttgaagtagtagctgcattccatttttctccccttggaagcacgaggtgaaacagatggcattgactttgaaagaggaagacgcagctgactgggtttacagaggggaaggagcagttaatcttgtgctcgcttacgctggatcctcaccttcttttgtgtgtcatttggtttctttccgttgcttgttgtagctgaattgtgtgcttatatgatttttttttttccaagcttaatgtgtattgtgtgtgtagatcgggaaagtggtcctcatacgtaaggctccaaggaatggatcgcagtcaaagagtgtgagtgtg

SEQ ID NO: 91764 - DNA, 488 bp, Glycine max
  Clone ID: PAT_MRT3847_53877C.1
gtagttgctcaatagcattgttatgcacgtgctctacatagcttgtactatacaattgcatgtaaagacttattattctccattttgccttagttgcttattcaattgtctttggccttctttcaagctttctccaactcctaacaaacaatattatttgatcaaccattttttttttaatttttatcttttaaaaatatgtgtttaatttaagtcaaattaaatcaacccaaatcgtagctaaaattaactacaaattgagtgcaatagttattaagttggatcaactacctgtacgtcctatcctacaaatttagtggttattaagttggataataaagtctagtgcagtagtgcagtgcctactaaatttgaagacgaattgagtactagatattcaagtacctacaattaattattctaacttttagcttaatcatttcataaaagaaattgacagaagatatattatagtagtatatcctagg

SEQ ID NO: 91765 - DNA, 228 bp, Glycine max
  unsure (1)..(228): unsure at all n locations
  Clone ID: PAT_MRT3847_53878C.1
agcgcggaanccggctcgagccagnccagaagaaaccaaataaacaacggcccacccacccganaaagggggggtctgtaaaagaaagggggggcaacaacacaacaaccgaagccagggaagagcggangaggcaaacaaaacagagaaaaaaaaagccgagcaaacgccagaggcgcacaaggaccaaacaaggccgacggcaaaggcgaggccaaaacaggaggc

SEQ ID NO: 91766 - DNA, 318 bp, Glycine max
  Clone ID: PAT_MRT3847_53879C.1
tgcagtgattggggtggattctaaaaagatgaaggtttggagatgggtggtgagtttgatgttagtggggttactgcccgtgtcaacaatgggtcgattcgtggtggagaagaaagcctgagagagacatcgcccgagaaaataaaagggacacacttttttgccattggcgacttccgaatacctcaatacggaggtagcatgggcgggaacgtaatttacccttaggataacaaaaaggggtgcaaaaagttttatgaattcgggatttccttcaaattaaaccccggggctattttcaccatttgttttactcta

SEQ ID NO: 91767 - DNA, 145 bp, Glycine max
  unsure (1)..(145): unsure at all n locations
  Clone ID: PAT_MRT3847_53880C.1
ctcatggccaggaagatgaaggacactgattctgaggagaagctgaaagaagtatgccaggtttacgaaaaggacatagttggttcatttcgactgtaagattcggaatgaataacnaacctgggggagaagctcaccgatgaag

SEQ ID NO: 91768 - DNA, 431 bp, Glycine max
  Clone ID: PAT_MRT3847_53881C.1
accggttgcaaaagaccaccgaaggggatcgcatgctataaaacgacaaaagagagcgggtgaagtacatacgacagatagatacttttgttagatatacaatctactttactgtttggataagaccacataaactttccgatattaatatactacataagagactggatccagaaaacaacagaagaatacatgtacgacaacacaacaaaaggttaggaatgccagaagactatgaatggtacggctagtaacagacatcggatagagacggatattacttgacgacatatgaagactaacacattaatgaatgattctgatgacaaaatgccatattactgatggaagtgcgagagcctcagcttctcaaaattacagttaaaaataagaaaaagctcattatgttaacaaccaagaatcgccagaag

SEQ ID NO: 91769 - DNA, 691 bp, Glycine max
  Clone ID: PAT_MRT3847_53882C.1
gacaatcggttccttttgccttttgtcaccttcagtttcctccctgttagtcaaattgatcataatccatagcaggacgaggacacagacaattcaaatgtgaaaaagaacacaaagcataaagcattgtgttacattaaaccatctgtgccctttctgttactagtttgaccaacaacacaaaaaataaacccaaaagaagaaaaaaaaaaaagttagtcattgttcatcaaaatgaacgacctattctcaagctccttcaaaaaatacagtgacctcaaagaacaggcccacatcgatgatgtggaggcggggaaggaaagtgtcaacctcgataaattcttcgacgaggtggagaatgtgaaagaagacatgagactagttgagaagctctacagaaaactgcaagagtccaatgaagaaagcaaaattgttcacaatgctaaaacaatgaaagatcttcgagccagaatggaccaagatgttcagcaggttctcaaacgtgtgaaactcataaagggcaagcttgaatctctcgaacgttccaatgcagccaacagaaacattccagggtgtggtccaggttcctcagcagatagaaccagaacctcagtggttagtggcttaaggaagaaactgaaggacttgatggatgatttttaagggttgagggccagaatgcaaaatgagt

SEQ ID NO: 91770 - DNA, 863 bp, Glycine max
  Clone ID: PAT_MRT3847_53883C.1
cccatgctccctaccacgcgtccgcaacatcacagttaaaatctggttcagatagagtccaacacagtgtttcttccttttcttctcatgttaagggtaggaaaagggagagggtagatcaagggcaagaatctgtaaagcgagaccgttcaaccaaaaatgatgatggggattctggtaattccaaggcggatagcattttgaagacagagattgccaaagtaacagaaaaggggggtcttactgatcctgaaggggttgagaaattagtgcagctgatggctcctgatggaaatgagaaaaagattgatttagctagccggtcaatgcttgcagctgtaattgcagcaaccgagaaatttgattgccttagtcggcttgtgcaactaaagggtttgcctgtatctgatgaatggctccaagaggcacataaagggaagcttggtgagggtattgggtctagggatggtgataaatctgttgatgactttctttttgtattactccgagcactagataagcttccagtaaaccttcaagctctacaagcttgtaacattggtaaatctgtgaatcatttgcgaactcataaaaacttggaaattcagaagaaagccaggggtttagttgacacatggaaaaaacgtgttgaagctgaaatgattataaatgatgctaggtcttgttcagttcagactgtcccctggccagccagacaacgactttctgaagttgctcaaggtgggaataaacattcaagtgggtcagctgatgttgccatgaagagctcagttacacagctttctgcatccaaaactgcctctccgaagaatgccccaggagagaatactacaagatctaca

SEQ ID NO: 91771 - DNA, 138 bp, Glycine max
  unsure (1)..(138): unsure at all n locations
  Clone ID: PAT_MRT3847_53884C.1
gccggnaaaatatacaaggaaagtgtagcgactgatatctgtctcgaaagtggtcgactgtgattgtgactttagttgacatgaaccaagtttatcagtctgtgccgagtctttcaatggcagttctgagcttctgaa

SEQ ID NO: 91772 - DNA, 259 bp, Glycine max
  Clone ID: PAT_MRT3847_53885C.1
ggtcgcccttttttttttttttgtgttacactatatttggtttttttgaaaaggaagtgatattcccacctatgctagctttaagatgccatattgccacccataaaacccaacaaagggttacaccggcaataacacaaaacttacattttacataaaaaagggaattctaatggggaaaacattggaacattcttttattttgctggttcaaaactttttttatctactcacattttacctaaaaatcacctaaaat

SEQ ID NO: 91773 - DNA, 279 bp, Glycine max
  Clone ID: PAT_MRT3847_53886C.1
gcgtccacgcgtccgtccacgcgttcgaaaaaaacaagattttttagatacagaaaacaaagttgggttcgggggttttttattccccaattattatactcattactctcagacgatgtactgatatattctatggcgggggttcgaagaacaagcaatttattttgggccgttttcacttttggtaggttctttgtgggttatgttctgtatcatattttcagatatttttggtatggattatgttccttatattttgtgaatatattttgttttttc

SEQ ID NO: 91774 - DNA, 218 bp, Glycine max
  Clone ID: PAT_MRT3847_53887C.1
aaaagatattgatattgaaaagcatactttgacatcaaggtctggaaaacttctgaagtatgggtcgcttgttattgctacaggatgtaccgcatcaaagtttccagaaaaaattgggggaaacccacccgggggtcactatattccggatgttggagattcccatgcacctattttatcggtggagaaagccaaaaaaggtgttgttggtggagggg

SEQ ID NO: 91775 - DNA, 454 bp, Glycine max
  Clone ID: PAT_MRT3847_53888C.1
caaaaaaagctccgaatcctttctctttctcttcatttttttttatctgactagcagtgacaagtagtccctggaaaattaattactctcagtctctcagctttaaattttttttcccctatggcagtgttccttcaaccctagtggggatcctactaaaaagcctattgcctcaccaacacaaatcataagtcactcatgatataatcacgacccttaaaaccctttcttttcacctctttcatctcattccattcccccatcatcaattctttgcttctctgaactcttttgtttttctacatcatatcatatcctcaattaaaactctcaagtctcacccttaatttctagctattaataattccattaccttagcatatttcaccgcctgaaaacaaacctagttagctagatcttctctatttctccatgtgcactaattcacacacgg

SEQ ID NO: 91776 - DNA, 216 bp, Glycine max
  Clone ID: PAT_MRT3847_53889C.1
tttatatagacagaacatatactaatcgatagtatgtgatgtctgactagaaggaaagagaccgaggttagtggatttgtcattgttttgcactgtcgaggatgctgctgagggaattgatggtgctgacgtgactgctattagcaacaggggcgtgtaggggcattgtagctgagactaccattgtatctagctatgcgtggtgttacatgtgca

SEQ ID NO: 91777 - DNA, 404 bp, Glycine max
  unsure (1)..(404): unsure at all n locations
  Clone ID: PAT_MRT3847_5388C.1
acgggnntggaataccggggcggaccacacgcgtccgcttttgaaaaaaaaaaaagaaataatttttttttttaaaaaaaaaaaccaaaaaaaaagggggaaaaatataaaaaaagaaaagagaaaaaaggggcgcccgtttaagagaaccaaggtttacaaccgggggaatggaaggaaaaagtttttttaagggggaaccaaaatcaaatgaattggccgtgttttaaaaacgttggaatgggaaaaaccttggggtacaccaaaataaatggcgtggaggaaaatccccttttggcaagttggggaaataggaaaagggcccgaacgaatggcctttccaaaaagtggcgaactctgaaggggaaagggaaccccccttgaaggggccatttaagcggggg

SEQ ID NO: 91778 - DNA, 397 bp, Glycine max
  Clone ID: PAT_MRT3847_53890C.1
tttatgatacccggcgatagatggggatggcgctgaacggcgtcttgtagggctatccgacttacgagggtcacatcggcacatgcctttggggggccgatagccgcctacagctagatggcagacgaacggctggcgcgcgctgcgattgtagcccggattgtgacttagaggcgaacagccataatccatggcacggtagcttcgcaccactggctaagaaaccatgcgcgaagaccaattgtgcgaaccaacgggctctctcgcactagggggaattactactgcaacactgtcatcagtggggataaactaacctgtacaacgacggcctaaacccaggtcacgtaggctatcggcgggcgaacaatccaacactagaagaatgctgctacac

SEQ ID NO: 91779 - DNA, 206 bp, Glycine max
  Clone ID: PAT_MRT3847_53891C.1
gttaaacatactgataaattgatggttaaattgattagaaagatagtgatagtgtagggaataattaaaatatagagatgattataataatatgagtacatgtattagaacattgagtgtggaagtttgtgacgtaatagaggaggatgttacagagctgggtaaatgcaggtgtgatgttgattaagcatatgataagaggtata

SEQ ID NO: 91780 - DNA, 1091 bp, Glycine max
  Clone ID: PAT_MRT3847_53892C.1
cggctgcgagaagacgacagaagggggatgctaatagaataggtttcacaccacactaaagccaattagtccctctcttctccctttccttttctctatccaataatagagctttagaagaaagaaagaaagccatgcaagcatgttcctcctcagacgctccactctccaagaggttagatggcaaagtagcactcataaccggcggagccagtggcatcggtgaagccaccgccaagcttttccttcgccacggtgccaaggtcgtcatcgccgacatccaagacaacctcggacactccctatgccaaagtctcaattcctccgacaaaaacaacaacgacgacatttcctatgttcactgcgacgtcaccaacgacaaagacgtcgaaaccgccgtcaacgctgccgtctcgcgacacggcaagctcgacatcctcttcagcaacgccggcatcacgggccgttccgactgttctaactccatcacggccatcgacagcggtgacctgaagagggtcttcgaggtgaacgtcttcggtgccttctacgccgccaaacacgccgctaaggtcatgattcccagaaagaaagggagcattgttttcactgctagcatcgcttctgtgtcgaatgcgggttgggcgcacccgtacgcggcgtcgaagaacgcagtggtgggtttgatgaagaacctgtgcgtggaattggggaaacatggaatcagagttaactgtgtttcgccctatgcggtggggactccaatgctgacacgtgcgatgaggatggagaaggagaaagcagaggagatatatttggaggcggcgaacttgaagggagtggttttaaaggaaaaggatgtggcagaagcaactttgtttttggctagtgatgagtcaaaatacgtgagtggagtgaatctagttgtggacggaggttatactaccaccaattcttcttccaaacaagctttcacaaagttttcttttaatgtttaagcccaaattgtaagtttcaatttcagggttacttcgaccaaaagttgttctgtttttaatttaaaaaataattaagtgaatggttttttgagt

SEQ ID NO: 91781 - DNA, 1240 bp, Glycine max
  Clone ID: PAT_MRT3847_53893C.1
tgccaaaagcaagagaaaaattcacacatacacacacaaagaaaattagagagagagagagaagataagatgggtgtgaacgaagatttcaacaaggatattgatgatcatcatcatgagtatgtggatgatgatgatgttcctcttccggggtttcgtttccaccctacagatgaagaacttgttagtttctatcttcgaaggaagcttcacaagaaacccatcagcatcgagctcatcaaacagattgatatttacaaatacgatccttgggatcttccaaaaaccagtgccactgcagaagagaaagaagggtacttcttttgcagaagagggaggaagtataggaacagcataaggcctaacagagtcactggctctgggttctggaaagcaactggcatagacaagccagtgtactcacatggaggagaaggaaatgactgcattggcctaaaaaaaacactggtgtactaccgtggcagtgcaggcaaaggcatcaaaactgattggatgatgcacgagtttcgccttccttctaacaaagacaacaccaccaaccttcccagctccaagaattacgtagatgttccccaagaagctgaaatttggacattgtgtcgaatattcaagagaaatgtctcacagagaaagcacacgccagacttgaaacaattatctgctaagcgccactccattcatgacaagaactcaagaatgagcaacgtggagttcaacaatactaatcaagaatcatatataaactttggtggccactatcagaatgagcagaaacccgtgattaactacacaaacagtgatcaaaggaatcagtatcatgtgatgactcatcagttgtttgctgctccagtggcacagcatcatcagcaacctcaacaactaacttctccatcttctaacttttggcttaacagccctcctgggaacgacttcttcacgtttgataactgggatgagcttggatctgtagtgaagtttgtggttgattagcctagcttgtagataaaaaagatgtggttcatgttgagttgatcctagttagatacttagatgttacttagaatgaaatatactccctcccgtcttttttataagaaacaagacttatatatactgaaatttgtttcttataaaatgaaccagaggtatatcataagagtgcgtttgcatgtattagagagtattgatgttggtgatcatgacttttagtagccatgag

SEQ ID NO: 91782 - DNA, 443 bp, Glycine max
  unsure (1)..(443): unsure at all n locations
  Clone ID: PAT_MRT3847_53894C.1
ggatggtcttgggcgataaaacttattcgatatggggacgaggtgattgctggtaattcctaccgcctggtctattgtgtcagatctaccaccaggacctgctgttaatattgtgtgagaacaaagcatgcaatggatggccggtttacacattgaaagagttcctgatgatgaattcaatagctataacctagtgatcggctcacaccctgctgaggatgacaaatggggcgatattgacattagtattgataatgatcatggaaccgagcgctaggaggtgtctaanagcacaccggtggcggttcaggtacaactactagataaagaatcactggtcaagaaaaatcatgaccttgatcgcgagtgagggagagaaaggggagagagtactagtggagtgctacggttgtgcgaaatcagtacactaaatagcataatct

SEQ ID NO: 91783 - DNA, 1576 bp, Glycine max
  Clone ID: PAT_MRT3847_53895C.1
cctaatcgtccgcaaacacaacaaaattaccctaacacctaacccctaaccccatcgatcacctccaacaacaaccttcttctatccaatcatggccaccactaatccaattccaaatctcaattccccaccctcccatcctcccaatttcgattccgattccgattccgacattgacgccctcatcgacagttttttcgaacaaccctcgccctctctccctcactacggatccaacgccaacaccactctcaagagaggaattgatgtcccctccgttgattatttcgacactgccatatccatcaagcgcggcaggattagcaatgccgccacccacggctctgatgatcaacaccacgccacctttgaaattcaaaacccttctcctcctcctcctctctcccaggatcctggaggacccatcgctgatcacaatcacggaggaggaggaggagaagatcagcaagggaaacggccagtgtttgaaattgattttatatctaaggctcttcgtgaagctgaattaggtttagcgctgaattctcacgataacgccgacgactttgacgacgacgacatggaacctaagaatgagaatcatgatttacactatgtaccaatgagtttttacagaaggaataggaacatggaacgtttccgagtgatagcgaagagaaacgccactcactatgctcggttcgacgactcggaggttggagatgaagggacatcattgtatcttaatcctcaaggaaacattgacgattccgaaactccattttcgattgccatgaaggcgatcaaggatcgagctatgaagaagaaggtgtgtgatgcctgggttcccaagaggaatccacaagggggggagaagaggttttttctggtgccttctcttcaagaactctgccttgaaatgcttgcgggtaatgctgatgcaatggtttcgcttgagggtgtaccggatgagctgagacgcaagctttccaacctgctctgtgactcgagaaagatgaacacccgatttcttgagcttcttctcagtggctctcccacggagattcggttaaaagactgttcttggttgacggaggagcagtttgccaaatattttcaaacgtgtgacactacaagattggagtaggtgctgcagcttgaccagtgtggaaggtgtatacctgattatgcattacttggtactttgagacagtcaccaaggtggttgccaaagttaattacactgtccctcagtggtgcgtgccgtctgtcagataaggggttgcatgtgctagcttcttctgccccagcactgagatccattaatctaagccagtgctcccttctctcatctgccagtattaatattttggctgattcattgggatcccttctgaaagagttatatcttgatgattgtcttatgattgatgctgcacaaattgtgccaggactgaagaaacttaaacatttagaggtgttgtcattggctggcattcaaactgtctctgatgaatttatcaaggactacatcattgaatgtggtcacaacatgaaggagcttattttaaaagac

SEQ ID NO: 91784 - DNA, 1476 bp, Glycine max
  Clone ID: PAT_MRT3847_53896C.1
aattcggctcgagcaagcccccatcaagatttcatcatcctcttcttccatgaaacaattcaattgctctaagaaaccaaaactgatttaaccttaatttcccaacctacacagttcactccctctctctctgtctttctttctttctctatgttctctcaatggtgccgccaccagagaacatggcaacaccaaaagaccaagatgccacacaaggccgaaaaatcaccaccacaacaacaaggccagcgccggaacaaggcgtaaagtgcccgcgatgcgactcatccaacacaaagttctgctactacaacaactacagcctcacccagcccaggcacttctgcaagacctgcagaaggtactggaccaacggcggagccttgcgcagcgtcccgataggcggcggctgcaggaagaacaaaagggccgtcgtcaagccctcttcctcttcgtcatcttcatcaccaagactttcaacctcggcgcgttgcccttcccctcgaggctcaacacaaaccaccacattccaacaatcataaacacagggttgttcaacaacaaccagttgtcgcctttcctggacgttaaatcagctttgtttcaacttgacgctcctccagctgctctgtcaaactccttgatgggcattgccccgcccagcgcccagaacaacaacttctgggcgctgggtcggtctcaaagctcgacactgtctgatccattaaacagtacaatgcagtccatgcagcaatctctgaatgttcatagcagccttgcttcttcaattgagtcactgagctgcgtcaaccgggacttgcacctgaagatgcagcagcagcgttacgcgacaatgatgtccggtggggacacccaccacaagggtgatgaaaacagtggcgtttcgtttcctcaaacggttaatgggttcgagaatcaaaaactggtgatgaaccccgttatgtttcagaagccagtagagagcttgccagccggcagtgccgtaacagaaggcccaagtggggcttcagttacaacagtggcaccacccaccgaatggttctttgggaattcttcttttccctcaacaggtaatggtggtggcaatggcaacaacaacattaacattaatattaatgatgcaaacaacaattggagtgatgcccttgcttgggggaattttcagcagcagcaacaacaatacagtgctttgccctagatttgactaaaaaaggagaattaagagagaggaattagatatcgaggtagagatagctagtttttcttaatcttggaaggaaaaaaatggaagaaattataattattaactaggacaaatctataattgtctaaaccccttttaattaggtctatgttaattacttaattagttagtttcttgttttatgttatgttcgaatgttcaaatgttcaaattgtgatatatatatatatatagaaaggatatttaaagat

SEQ ID NO: 91785 - DNA, 1648 bp, Glycine max
  unsure (1)..(1648): unsure at all n locations
  Clone ID: PAT_MRT3847_53897C.1
aatatatataataatcataaattatatgataaatttgataaataccaatttgttaccatatttacaaatgatttagtacatataaaaatatcaatgcgcaactcgtgtgagtgcacaagtcagtgtactaggctactagctcatttaaaaggaaaattttcactttcaaggtagagagtagaaattccgtgacaaatcagagtttttcttcaatctgtatctctctttctctgttttccctggattatgtgctggggaagggatggcaatgggccactccatacctttattttttctgcaacatcaatgttgtatcaaatttaatactagtgggccatgacatattttaagtccttgcagcgtattgaagttttatggtattaaaccatcatctttagtcatgatctgagggattgccaccagcttcaaacaataaagtcatctgtgagggctaagctagcccataaaagagccatcgaagtaatgacaatgatcataataggtgtccatttcaatgcaatcacctcaagttgtggggagcaccatattgtggattcaggttgaggagtaaccggtaatcttctcattgtttctgaatttctcttcctttctaaaattttgtaaatgtcttcagtggcaatatctaaatcttgtttccggttagcgttaagttttgataggttggcctgagttcttgtatcaatgtattgtctgctaatgtttgcgattataccatctgacaaagaaattgtgacttttttggcaaggaaatatggcaaaaacataaatgtcacaaagangaatatatttgggggggggggggggggaagtgggacctccatttccttatttagcaaatattaacaccaattgcttgacaatgatatatcattgtggcagactaatggttcaagggaattaccaaatttgacaaagctgtatggccttgtgattttgcctatgagggttttatcaaacttctcaaactccttttgtatatcttgtaggtaatggaaggccagttttcttgggtacgtggactcacacaacacaatgaaaacaactccgttctcgaccaagtagcttaataccaaaagagtatatcagtaatcaaaatttattgcaatgcaacttaagaaactagagaggagtaaaaaaccaaaaaaggcaagtgccattaatttaaagtctatggtttaaatggaatgttaatagactcgacataaactctatttcctgaaagattagcctgtgataaaagggtacaagtaaatgaagaatatgaggcataacagaaaatcgcaagcatgacaacaacttcatcgttaaaagaaccaaaacttaatttgaaagaaattaaaagaagagaaaaaaaattaaaaagggaaggatacttgaagcagaaattatcaatatgaatagtcatcttgggagctgttaatgctccccttgaaaattctcggagtatgaactctgcttgttgcctgtaacatgaaagatatccatactcttcattcatgtatctcagtccttgtgctagaggcaatccatcgcttacccttccaactatagttaccttaaccatctccttggagcttaaacaagtctctggaaatttctcttttatctcaaataatggactcgagcc

SEQ ID NO: 91786 - DNA, 510 bp, Glycine max
  Clone ID: PAT_MRT3847_53898C.1
ggaagaggaaaaagggctaaaaaaaggcggaaggaaggggcttttacaaaacccgtttttcccactttaaagcccccccttttaaaggttcattcaccccctttacttaaatggggggaaccccccgggttttgccaagggctttcccaaaactaaaaaaaccctttttttacaaaaggcccaacccaaaaaaggaggggcaagttttactttttggcccccttttttggcccccccctatggccctttaaaagacctgggggggggtcccccccctcccctaaccctttttggcaaagggggggcccccccggcccttcatgggttaaaaaatccccccccatatggcccctttggaccccaagaaacaaaacttgggccccaaggaagtccccccaggggggaggggtggcccttaaacataaggcccttttttggccccgggaccattggtaagtttttttttaaccctggcccaaacttaaaccctttttttttgggggaagggtt

SEQ ID NO: 91787 - DNA, 806 bp, Glycine max
  unsure (1)..(806): unsure at all n locations
  Clone ID: PAT_MRT3847_53899C.1
cccacgcgtccgggagccagttttggtgtcatattatcatacactattaaactcgttcctgtgccggaaacggttaccgttttccgcgttgagaagactcttgaaacgaatgtcactgccactgaccttgttgtgcagtggcagaaagtggcgccaaatactgatgataggcttttcatgaggctgttattgcagcctgtgagttccaaggttgtgaagggaacaataactgttagagcctcggttgtggctttgttcctcggaggggctaatgaggttgtgtcgattttggcgaaggagtttcctcttcttgggttaaagaaggagaattgcactgaggttttctcaaaagaaaatctgattacgtccagaatgctatttccagagatgggttggagtggctatttaaaaggatgattgagttgggaaaaacggggcttgttttcaacccttatggagggaaaatggctgagattccttctgatgccacgccgtttccgcaccgtaaggggaacttgtataagatccagtactctgtgaactgggatgatccttcacccggtgctgctctgaatttcacgaaccaggctaagaggttgttcagttacatgaccccttttgtgtccaagaatcccagaagtgcgtttttgaattatagggatcttgatattggggttaacagctttggtgagaatagctttcaggaagggttggtttatgggaccaaatacttcaatggataatttcagaggcttgtgaagataagaccacggntgatcctgaaactttttcaggaatgacagagt

SEQ ID NO: 91788 - DNA, 198 bp, Glycine max
  Clone ID: PAT_MRT3847_5389C.1
ttgactcgttcgtacacttacacgttgaacaccattttatcactaacggcttcgggaaggtttacttagccagtacagttcgctcaatttcactgacctttaaatgagtctaatgtagtctcaactcgtgctcattgatggaggcaatgaacatgaccgatgtgttctgactcgtggtactgcatgactgatgcattg

SEQ ID NO: 91789 - DNA, 305 bp, Glycine max
  Clone ID: PAT_MRT3847_538C.1
cggctccaaaattggcatatagcgtttttcacgcgcttttaccactatcccatcccaacattgggtgttctaaaatcacaaaagccacataaacaacccccctcaatcgtgcctccctactcctcatatatctctgctacaaccctcttgccatctttggttcctctgttgcctaccacacattacctccttttgctattacaccacaaaacttttaccttctaagtcacatccttccattaatttcttcaccaatggcccctcaatctccgtatggacctcattacacttctgcaatatattac

SEQ ID NO: 91790 - DNA, 202 bp, Glycine max
  Clone ID: PAT_MRT3847_53900C.1
cacgcgtcaggatagtacctacattttactaatggtataagttgccaaggcaatggaaaaaggaaatggttcctttcggaggtggttatcgcatgggttaattaaaagttgagtatttgcttgtgcagtaattgtagcgatgataattctctattacatgaaaaacggctgcttttttaaaaaaaaaaggcggcgttgagtc

SEQ ID NO: 91791 - DNA, 2325 bp, Glycine max
  Clone ID: PAT_MRT3847_53901C.1
tacggctgcgaaagacgacagaaggggaccaaggcaactcggattaagcacagatcgcgagtgcaaaacctcgtttggcttatctccctgccatttttgttcttcttctagttgtcttcacttctgtgacggcacaatccccagggccagaatcttcatcactccacgacaccttccttcaatgcctcaccaaatacacaaaaaactcctcatctcaactctccaacatagtcttcgctaacaccaaccccaagttccccactgtcctccctaactacatccgaaacgcgcgtatcccgttcgcgtcggtgtcggcacaagccccagaatccccatcactctacaatacattccttcaatgcatcatcaacaacacttgccatagaattcacaaccgacaatggcgacaaaacctcgtttggcttatctctcttccacttttcttcttcttcttgttgtaactgtctttacttcggtgtcggcacaagccccagaatccccatcactctacaacaccttccttcaatgcctcaccaaatacacaaataacccctccaacatagtcttcgccaacaccaaccccaagttccccactatcctccaaaactacatccgaaacgcgcgtttcaacacctcctcgacgcgaaaaccattactcatcgtcactccccagcaagaatcacacgtccagggcacagtaatctgcgccaaaagcgttgaaattcaactcaaaatcagaagcggaggccatgattacgagggcatctcgtacatctccgaggaacccttcgtcatcctcgacatgttcaactatcgcagaatcaccgtggacgtaaaaaacgaggttgcagtggtcgaagctggagcaacacttggagaagtttattacagaatctgggagaagagtaaagttcttggctttccagcaggggtgtgtcccactgttggcgtcggtggccatttcagcggcggagggtacggcaacatgttgagaaaatatggcttatccgttgataacgtcatcgacgcgcaaattgttgatgtgaaaggaaatcttctaaacagaaaaacaatgggggaagatctgttctgggctattagaggaggtggtggagcgagttttggtgtcattttgtcgtttactattaaactcgttccggtgccggaaacggttaccgttttccgcgttgagaagactcttgaaacgaatgtcactgccactgaccttgtcgtgcagtggcagcaggtggcgccaaatactgatgatagacttttcatgaggttactgttgcagcctgtgagttcgaaggttgtgaagggaacaagaaccgttagagcctcggttgtggctttgttcctcggaggggctaatgaggttgtgtcgattttggcgaaggagtttcctcttcttgggttaaagaaggagaattgcactgaggtgagttggattgactctgttctgtggtggaacgatgacaatagtttgaagaatggtgacaaacctgaaaccttattggatcggaatttaaacaatgcaggttttctcaaaagaaaatctgattacgtccagaatgctatttccagagatgggttggagtggctatttaaaaggatgattgagttgggaaaaacggggcttgttttcaatccttatggagggaaaatggctgagattccttctgatgcgacgccgtttccgcaccgtaaagggaacttgtataagatccagtactctgtgaactgggatgatccttcacccggtgctgctctgaatttcacgaaccaggctaagaggttgttcagttacatgaccccttttgtgtccaagaatcccagaagtgcgtttttgaattatagggatcttgatattggggttaacagctttggtgagaatagctttcaggaagggttggtttatgggaccaaatacttcaatgataattttcagaggcttgtgaagattaagaccacggttgatcctgaaaactttttcaggaatgaacagagtatccctgttcttcatggcgaagcatagggaatcatacagatacagtgaagaatattgcttagtttttttttttttttccttgtttgacagtaaagaatattgcttagtgctcctgttagttgtggcattttcttttgttcctatagttctatatgaatagttggcccataggccgtgatgtttgtcaattgatttgattattattatatcattgaattttaaagttgaggtaaaaaaaaaaaaaaaaaaaacaattaaaaaaaaaaaaaaaaaaaaaaaaaaaaaaaaaaaaaaaaaaaaaaaaaaaaaaaaaaaaa

SEQ ID NO: 91792 - DNA, 2536 bp, Glycine max
  Clone ID: PAT_MRT3847_53902C.1
aaaagtcaaacatgcaataggcttgctacagataggcctttcctggtaaaggttaatggacctaactttcatgattgtatatgcataacctgttaaagatactggaagattaggaagccccatcattgcaggtggtggtgttctcaattgaacaagtgcaggcgcaccatctgaacccagtcctgatgttatgaataataatccagatagcaaataaactcttccaagttgatccgtccaggcatttcttggtagagcccaaattgaaagcaaagtcaggtacactactaatgcaaatctcataattatgtgtgaccttgccggtagaacaaccagagctaaaagccataccaatttgactcgagggtcgatggagtgaagaaacgtggtgggggacgcaacaaactggccaatggggctggcggtggcaccggcgattaacctgaaaactttatcggcagcgaaagacccttcgggtatccacttggaccaatttgctgcttgaacgttactatcaccatttgaagctctgagtctgagtctgagtccgagtctggcgttcctgggcaacaggatttggttcgggccgaggattgcggaagggctttttgggaaaagcacggaacttggcggtggaagagagagcgaaaggaaagtggcggcggcatggttacagttcatgaggtaggtggggtcagggtgaattgcctctcaatctctgttgtaaattgtgatcatgggatattctattcagaatcggaggttgttttgcttcaatggtagagagattgattggctcaatggatagtagtaatgtagtgctactcttggttcatgtcgactttctcattgagccttgtagataataaccaaatctcgagccgattcggctcgagtcttaaaaaccccaaacgcataaaaaacacagccaaaaataacccaaactctcttttaaaaaaaaacccgaacacatagaaacagagaaagtgtgagtatcgccgccgtagccctaccctctcttcatattattctattgcctttctttaactccctcactttttcagttttgaagcgcttccagtggcgtatttacggttatacccttcttgttatgatagcttccaatcggcgtcagccacagagccgaagctcttggcttccacacatattttcggtgctgtcgattgagatacaaagccgccaagccagccgagccaatcttcaaattccaactttacccctaccggttaatattctcctcttttaacggctatttcgatcatgccaaattcgaagaacaaccgtaacggacagggcgagcctcaccgccgggggaaattaacgaaaaaatcatcgtccttctacggtcactcatcgccggctgccatgtccggcgatccgatcctgcggccgaagacggtgccggatcttttgtcggagaggcatcgtgcggcagcgacgccgctggtggaagttgtgccaaaacagccgccgaagttgttgttgaaggttacttccatgggaagcttgggaccggtgcaggttgtgatgacgccggaatcgacggtcggagatttagtggcggcggcggtgcggcaatacgtgaaggaaggtcgccgaccaattttgccgtccaacgacccttcccacttcgaccttcattattctcagttcagcttagaaagtttggatagggaggagaagctgagggatattggatctagaaacttctttatgtgtccgaggaagtgtggcggcggcggcggcgacggtagaggaacgacgccgtttgcttcatgttcaagagaggccgacaaaacgaccaagggtggcgcgtttggttggttaaggttcatggatttctcatgatgaatattattattggaggctaatgttttccctttggcgctgccagccacagttatttggagatattttcattattatttttagaatgaatcagtgaaatggtttgttgcttgtaaaaaaatatgtgggccattggttgtagatttgtagggatggcataccgagcaacgcttggttcagtattctttgctttttggacgaatctttcttttctttaccttcatgtgaagcaattccattttgcaagttgaaatgggtgtacactgtcttgcgtaatagaagtcagtgatgttgatatatagatgtcgaggaatatcatttatcatttattcctgccgtggagtgaatgcattacttcatagttaaaaatcacgtatttgaatctattccaaatgctgtaatgctaatcgctttctttgttggaagcttctgcttgtggattcaaactgattgtaatgttttgaaattattttttttcccgttgttttaggaagagatgcgaatactggaattacatatttgaaagtgtaatattccaaaatttaaacgaaaggcacttcacacgagtaaaaaaaaaaaaaataaaaaaaaaaaaaatcaaattaaccatggaatgaaaatgaaaaatgaaaacttccgagttgaagctgaacccacgcgaccgcga

SEQ ID NO: 91793 - DNA, 139 bp, Glycine max
  Clone ID: PAT_MRT3847_53903C.1
gcgcgcacgatggaagaacacttgctgctctcaaccccgaaagtttactcgctatcaggattcccgatgcgcttgatttgcgcattttgtctcactcattgctcgtggccatgcgtcttgctgccatgcctttctagag

SEQ ID NO: 91794 - DNA, 227 bp, Glycine max
  Clone ID: PAT_MRT3847_53904C.1
atgtcgatcgaactgtccataggtgctgtcaccacttcgttgggtgcccgaacaggtcctgcatccaagtagcccagttgagcatgcctgcaccaatgacccagtttaaggcaggagagacatatacgggtattaagcgggacttttaagcagtttctaagattggggttgcatgttcagctgtgcgcttagggctacatggggatttcgatttggcaaagaggtag

SEQ ID NO: 91795 - DNA, 490 bp, Glycine max
  Clone ID: PAT_MRT3847_53905C.1
caagagttattgccatacacgatatggcaaaggtatctatcaagtgcagtctgcttgggagatcctttatcatacaatttacatttgtaccgatggaattgctgtatgtagtttcatgtattgatttctgttttacatttatctagcgatatctttattgtatttctatcttagaggatttcccagtaccttacatggtttgttatcttatttaattacactcaagtcttcttattgtgatagcagtcttgctctagaattataattaactagtacttgacctagtattttagtttaaataatggagttgaaaatcacgagaacttatttacgttctatggctaccaatttcttagatcaaaagcacgtattatccgtactatatgacatccttatcttcttcatatatttgcataggaggattgctgctgactcgatatcgttctactaaatcgaatgcacagagcctcttcatagaggatatagatga

SEQ ID NO: 91796 - DNA, 424 bp, Glycine max
  unsure (1)..(424): unsure at all n locations
  Clone ID: PAT_MRT3847_53906C.1
cttgcctgtctctagaatattcaaattcgcggagcaagatgatgcagaagccaggacccgacatggcacctcctatcatgggccaacagtcgcacaaacagtaccagcatcagcctccgccctagaatgaacaaccctacataatgatgccgacgcatcataaagcgccacaaactatgagagggccaattcgtccagacttcgatgacgaagcaaactgctagcacagacgaggtgcaaaccctgtggatatgagatctccaaactggatggacgagaactatctntacacctgctttgctcataccggcgaggtgttaggaactaaagtgattctgaacatgccaactacatcatctgaagggtatagaattatccgagctaatacaacgtgctcgagctcagagaattctacaaacatata

SEQ ID NO: 91797 - DNA, 285 bp, Glycine max
  Clone ID: PAT_MRT3847_53907C.1
catgtcaccttcatgcatccaaaacaaaagttctgagcacccagaacaaaacaccaaaacaaaagcctgagctgatgtgaagtgggaagcttcttggagcctttgttcctgatgtctgtcttctgtctgtagttctgcatatgtgttctcagtgttagtgtcaaggtttgctgtcctttgcattacagtgctgcggactcttgtggttttcctaagacaatagtgtacttgattttgtattcggagagagctctcgtacagcggacccttagagaatgtggttgt

SEQ ID NO: 91798 - DNA, 212 bp, Glycine max
  Clone ID: PAT_MRT3847_53908C.1
caaattctctgtgatgtgttgtagccttgtgcaaattgtgatgttgttgtaggaaatttaagtgcagagatgaatgatagatgaagtctgctatgtgtgcattactgcttgtggcactggttgttgttgaagtggggtccatagtctgagtctacggtcacttgcaatgcatcacagtgaactcctggttctatggcaatctgttcaggttc

SEQ ID NO: 91799 - DNA, 388 bp, Glycine max
  Clone ID: PAT_MRT3847_53909C.1
acttcaacaaatcaacaaaaaacaaagcagcaacaacagtaagtattcccatcaacacgtgggatcatccacaaaaaaagtagaaggccaaggctatgtgccatttgggaacactcagagtagccacgtgttaaatgaaggacaacatagtggaatctagggcttattggggcaaacaatgttttttgaaagaagggaacttgtacaattttttttattgtgggggaataggttgcccgtgacaccatgtaaatggatggacaatatgttttgacattatttagcctttacaataacttttttttttttttttctgtatgtggcctttgtttgttatcttatgtggccattatatttaccttttaatttgggaagtgacctttgtggc

SEQ ID NO: 91800 - DNA, 157 bp, Glycine max
  unsure (1)..(157): unsure at all n locations
  Clone ID: PAT_MRT3847_5390C.1
ngagttcgtgcagcgtacgtnngnncggaattngagncaagnncanagtggggnangaaggtgnangcgcgttngtagaaagantnnntnnnntaganaggagagctnnagnnngcgagaggtnagtgangagggntgagannggngaaggagancn

SEQ ID NO: 91801 - DNA, 1208 bp, Glycine max
  Clone ID: PAT_MRT3847_53910C.1
taagacgacagaggggaacacattcaatgcaaaccacaaagaaagctcagtggagggagagtaacatcttaggcacaagttccttatcttttgcagggtagaacctctaccctctcgggcagtcttgcactaattaggctactctcaatttcttctccttcactctcagagaactcatatggccgccacactcactcttctaaagcttccaatccttcctaacaagccattactgccacgcccatcaacctcaaaactttttccacttccttccatctattcaaaattaaatatcccaaaagattatattgtttctcctaacaacatcgatgctctcaagcctgcctttctttccctctcggcaatcacatttccattgttattagaaaccaaggatgcacttgctgttggtggagagtttgggatattggaaggaagatcatttgctctcatacaccccattgtgatgggttcttttttcttgtatacactgtgggcagggtatttggggtggcaatggcggcgagttaggactatccagaatgatattaatgacctcaagaaacaagtcaaacctaccccagtcaccccagatgggaaaccagtggaagaagcatcaccatcaccggttgaactccaaatacagcaactcacagaggaaaggaaagagctgatcaaaggttcctataaggatagacacttcaatgcaggatccatacttctaggatttggggtgcttgagtcaattggtggaggagtcaacacatggtttaggacaggaaagctttttcccggtccacatttatttgcaggagcagctattaccgttttatgggcactggcagcagccctggtaccatcaatgcaaaaaggaaatgaaacagccagaaatcttcacatcgcgctgaatgcagtaaacgttctgctctttgtgtggcagattcccactggaattgacattgtgtttaaggtgtttgagttcacaacatggccttgaatgtaagaatctaaagtgtaagttccctggtatttttactttcaattttgctttctggcaccatcaaataattttgacattttctactctcctttagccatatgtaccatgattaagtgccagacaagcattgaataattgcattacaccattctttagtgtaaaagttggcatataaagaacttattacattcgcattattacgtaaaga

SEQ ID NO: 91802 - DNA, 801 bp, Glycine max
  Clone ID: PAT_MRT3847_53911C.1
accacgcgccgtctttaagcttcatccttcctaacagccatactgcccgcccatcaacctcaaactttttcacttccttcctctattaaaataaatatcccaaaagatatattgtttctcctaacaacatcgatgctctcaagcctgcctttctttccctctcggcaatcacatttccattgttattagaaactattgtaagcaagcataaatctattatctagctcatcccattgtttgatttgattttgtgatggtgatgatgggtgtcgtgttattggcacaggatgcacttgctgttggtggagagtttgggatattggaaggaagatcatttgctctcatacaccccattgtgatgggttcttttttcttgtatacactgtgggcagggtacttggggtggcaatggcggcgagttaggactatccagaatgatattaatgacctcaagaaacaagtcaaacctaccccagtcaccccagatgggaaaccagtggaagaagcatcaccatcaccggttgaactccaaatacagcaactcacagaggaaaggaaagagctgatcaaaggttcctataaggatagacacttcaatgcaggatccatacttctaggatttggggtgcttgagtcaattggtggaggagtcaacacatggtttaggacaggaaagctttttcccggtccacatttatttgcaggagcagctattaccgttttatgggcactggcagcagccctggtaccatcaatgcaaaaaggaaatgaaacagccagaaaatctcacatcgcgctgaa

SEQ ID NO: 91803 - DNA, 369 bp, Glycine max
  Clone ID: PAT_MRT3847_53912C.1
tacggttgtgagaagacaacagaagggggcataattcatgcctaaatcaaaaacctgggaaacaaatttgaaatgggtttcttgcatcaccactttggcaggtattcaaccattgtatcacatcacatttacaaataaaactcaaaatccacacaccaccttggctatatattatcatatttattagaagcatcaccactaactgtactgctacttttacctttcatgatgattcaattttagtccaacggagtggtctttatccatatccgaggtgatagtctttacccttctgattcaaatacatagaaagggttatcttgatcacaatccatccaaaagctttgaaaaaaattatcgttgaaattt

SEQ ID NO: 91804 - DNA, 2018 bp, Glycine max
  Clone ID: PAT_MRT3847_53913C.1
acgaggcggggttgaggttcaatgctagcgtcctcgtcctacgatcgccgagcacaccgatcgcttaggctcggtcgagcggcgcaaggactcattaggttcatctgttaccagatctgtgccattcatttcttctagccatggacgagaagctcatacagcggttagaatcggcggtgttgcgcttggagtcgctatcctccggactccacccctccgcttcacaatccggcggcgcccacgctcccgatgcggcgctcgatccctccgtcgtcgccttcgccgatctgatcgaccagtacgtcggtagggtttccggcgctgcagaggttatcggcggacaggtcttgggtgtcaccaaactggtgcaggaagctttcaatgttcagaaagagcttttgattaagctcagacagactcagaagcctaacctcgctgggttgtctgaatttctgaaaccattgaatgaagtgatcacaaaagctaccaaattgacagaaggaaggagatctgatttttttaatcacttaaaggctgctgctgacagtctctcagctttagcatggattgcatatacagggaaggattgtggtatgagcatgccaattgcgcatgtggaagaaagttggcaaatggctgagttttacagcaacaaggtgcttgtggagtacagaaacaaagatccaaatcatgttgagtgggccaaagctctcaaagagttgtatctccctggattgagagattatgtcaagagctttcatcctttaggccctgtttggagttcaacaggaaaaataattgctccatcaaaagcttctgctcctgctgcccctccccctccacctgcttctctctttagttctgaatcatctcaggcttcatcttctaagcctaaagaggggatgtctgctgtttttcaacaaatcagttcaggaaacgtcacttcaggtttgaaaaaggttacgaatgatatgaagactaagaatcgcaccgatagaactggagttgttggggctattgaaaaagaaactcctgcaagttcacgtgtgttttctaaagctggacctccaaaatttgaacttcaaatgggccgcaaatgggttgttgagaatcaaattgagaagaaagacttggtcattgaagattgtgattcaaagcagtctgtatatatttatggatgcaaaaactctgttttgcaaattctaggcaaggtcaacaatataacaattgacaaatgcacaaagattggagttgtatttaaggatgttgttgcagcatgtgagattgtaaacagtaacggggttgaggttcaatgccagggtgcagctcctacaatttcagtggacaacacttctggctgccagctatatctgagtaaagactctttagaagcatccataagtacagcaaagtcaagcgagatcaatgtattggttcctggtgctgatcctgatggtgattgggtggagcattctttgccacaacaatacattcatttgttcaagaatgagcactttgaaacaactcctgctgctcattctggaggttaaattgattgccaatttggacttttggagtctctatttatatttaaatcgttttggaatactgtgggagtggcttcaatttgttgtttcgtcaattcatttacaaacacagtcatatatataggtttaccgtatacttgctgcttattctagtgatttttccatgggtttattgaaccattggaatcatccatacggtttttttttttagtagttttcttctgattgagcgtgtttttgtcgtaagttgcattatgcaattggtttttttagctttcagaggacatctacatttgtctgaacatgttggtttgattctggtgcttttgcatatttgaggatagagcaatgattatgtactcaggtgcattcggaaagatatttgtgtatctgtttttttgaatcgattagtcctcccagtttgtattgagaaaatgaaacgagttgtgaactttctcttggcttctgctt

SEQ ID NO: 91805 - DNA, 1279 bp, Glycine max
  unsure (1)..(1279): unsure at all n locations
  Clone ID: PAT_MRT3847_53914C.1
ccacgcgtccgctctcccccaaaagagtcaaagacaataatttcgctcttccttctctcactgaccattcgccattccaatgtcaccttctttttgcacatccctcttcctcttcacactctcccttctcttcttcctattcttctccctctccgtctccgtccacagcggccaccacgacgacggtgacgccgactccgacgccacccccgacctccgtgctcggcccttgattctcgcgaaggtgtggtgcctgatcgtgatcttcatcgccaccttcgtctcgggcgtttccccctacattctgaaatggaacgaggggttcttggttctggggacccagtttgctgggggagtgtttctgggaactgccatgatgcattttctcagcgacgctaatgagaccttcggggacttgactcaaaaggagtaccctttcgccttcatgctggcgtgtgcaggctacttgatgaccctcctcgctgatgccgtcatttcctcgcttttcaaaatatggggcgtcatgcccaggatgtccaaggtcaaggggctgatgtgagcaaagtaagtagcaacagcgttacatctcaatcacaacaccggagccatgacgctaatcaccatttagcaaaccctgcacttggatctgtccattcgcttggagacaccattttattgattgttgccctttgtgcacattctgtgtttgagggcttagcaattggagttgctgagaccaaagcaaatgcatggaaagccttatggacaatctgtctgcacaagatatttgcagccattgccatgggaattgctctcctcagaatgattcctaaccgtccccttgtgtcgtgtgcaacctatgcttttgcttttgccatctcgagtccaattggtgtggccattggaattatattggatgccacaactcagggtcatgtggcggattggatctttgccatatcaatgggtctggcttgtggagtatttatctatgtatcagtaaaccatctgttggcaaaagggtacatgccccacataccaacaaaggatgactcagcctatttcaagattcttgccgtgctgtagcggngngggaaaagaaaaacccattttctcccttgaatgctcagctgacttgaagaaagaattcgatgaatagaggactaaatttgcttgtacaacatgggaagcctgaggaaatccttccttctcttgcaaaatcttttcaagctcatacagtgtatgcacagaaagaaacttgcagtgaggagcctgatgt

SEQ ID NO: 91806 - DNA, 302 bp, Glycine max
  Clone ID: PAT_MRT3847_53915C.1
tttgcgtttttttgtatttttttgttccgaatataatcatactttaatttttgaattggaactagacaaaaagaaaagtctcaatacaaattactgaattaagaggataacgctccactcaaaagtgggtgtagagaaaaagacaaggacaagaaccatggatagggcggcgccgacgtgggcgcaactgaaactaagaaggaaactaataaaaaggagcctggccatgatcatggccatgacagcaataacagcggagacagtgattaaactgctgatttaactatatatttaaaagggtt

SEQ ID NO: 91807 - DNA, 243 bp, Glycine max
  unsure (1)..(243): unsure at all n locations
  Clone ID: PAT_MRT3847_53916C.1
nctctttgggtttaaaaacctttagcttagtcctcatagtataattaaaggcaaaactaaaagtatatcgtcagccagcaccttcgttctacttatgaaaaacacctcatacattaacttgcagcaataacaaaataaaacaacttaggttaacactaacgggtaagaaaaacagcgaacgctcaccatgactataccaaagaaactctctgagaccatgactgcttagggaaaaagactcac

SEQ ID NO: 91808 - DNA, 809 bp, Glycine max
  Clone ID: PAT_MRT3847_53917C.1
accctaagttaaccccggaatccggcccaaggtgaaaatgtgaacaataacccaaattaaagaaccaaacatacttaaatttaagttcattccatttaacaaaccggaaagaatacaaaaattggctcccccttgtacctatatttggagctagagatcactttcctttatttttttgaactactctagagatcaacttcttattctttagaaatcatatttcacactgacatgttagataattaattaagcactcgtatatcttcatgctgaacacattcttttttatttgtttaagttatttactatattgcattattgttgctacgccttcagagcatgggcatcaatatctttagtagcaaggttgataatgtccaagaagcgatatggaggtttagtatcttcattcagcttctcatattcaatagtccatacagtgatagcaccaccttcctccttatcaatcaaatgcaagtggagcttaaaattcttgtaatcctcaccaacgtctccatcgaagatgttgaatgatactgactttttctcatcatctatagcttcaatgctctccttatatgtagtaactttcccttctgtggtaaaagtccagctcttcacagagccaatgccatgccaatcaccttcatgcaactggccctcatgtacattgtcaacaatgttcggcaaattgtgaagttgccttgcataagcattgaagaacttggcagcaggtgatcggatctcaagttctgtaatcactttaccctttagcaccatctcttaataaataataactacacgcgtgg

SEQ ID NO: 91809 - DNA, 353 bp, Glycine max
  Clone ID: PAT_MRT3847_53918C.1
ctcaaacctctcggatggtattccaaattatgaagttccatctaaatgcgggaaaggtgatatttctcgaaatgatgcattgattattgatctatcccaaagtcaatacaagtcaacattggtttgtccagtatgtggcaaaatttcaatcactttcgatccattcatttctgaagcatggtatctgtagagatctttgccaaacattatgcactgcatgctgcttgaagagtgatgaaatgcttttgcttgcagaagtttatgagcataagatctatctatatctagagaatccgatggaaccattaaattcaataaaggatgatgaacatattggggcctatcgaatcaaa

SEQ ID NO: 91810 - DNA, 416 bp, Glycine max
  unsure (1)..(416): unsure at all n locations
  Clone ID: PAT_MRT3847_53919C.1
ttttatanttttctttttttggatcgaaaacaaaagggggtgtattcacgcaggaaggcgaaaatatgcgcaaataacgcatagaagaagccatataccaagcttaacacatacaggcggatataaacgctaatctcatccaaaacagacggtaaatggaatggtgcactgaaacttgaaagacaggggggcaagcgacagctatggaacccaggacagggcctgcacggagggcaaagagggcagacaaaaagaccagcgagggtgtagatgcactgtgaccatgcacccaggacgggaggcatggccagtttacacaaacaagaacttcgcatggatggagcactagatcttatgaggagaagctggaacacaccccagggggctaaaccaaaggtcagcagggagaccaagat

SEQ ID NO: 91811 - DNA, 128 bp, Glycine max
  unsure (1)..(128): unsure at all n locations
  Clone ID: PAT_MRT3847_5391C.1
atcgagccgcttcctttcaccaaaggcgaagatagatcggttactantcggttctggtttttaggtttcgtgctgtttttnnttcanancnganggtttttncntgntttaagttcaaantanccacc

SEQ ID NO: 91812 - DNA, 358 bp, Glycine max
  Clone ID: PAT_MRT3847_53920C.1
cggctctcatgcaacaaactacctgttcaacccaaacccaacaacaaaccaaccaacctcagaatgtctgcccccaacgccaacaaccccaacgacggcatcgtcggccaggccgtcaactcggtcaagaacgccgccaactacgtctccgagtccatccagggcaactctgctgaggcttccaaggaggccaacaagcagcaggccaagggcaacgttcccggaaacgagtccatgaccgaccgtgcctccggcgctctcggcgctgctggcgacaagatcgaccagaccaagcacgagggctctgctgaggccaacaagcgctctatctagagtgttagatcctatgttcgacttt

SEQ ID NO: 91813 - DNA, 286 bp, Glycine max
  Clone ID: PAT_MRT3847_53921C.1
aacaacaaattcgtttcatcacgcccgaatcaatttgggtgctgggctgcaaacaatgagttacaaaaaagaatttacattgcatggtagcaagataccgagtgcaaagagaaaaaaagaatcacaacagagccccatctacttccaaaagaagaatctgtaaaacatcaattatcaagttcgaatccgctaatagattctcacatgcttatgcttatacattctaattcgacttatgcaacctttaattatgtatgtccaccaaacaaatgggttagggggggaa

SEQ ID NO: 91814 - DNA, 488 bp, Glycine max
  Clone ID: PAT_MRT3847_53922C.1
ttccatgattatgtaacccctcattagcaagagtaatcagaagaacagtgtttacaaaaatgtgggcaagtagaagctttaactttaatatagcacttatcctatatgaaacccatcctgtcttaagccaatgatgccatgtatatgggcatctgaaattaattccaatttccagaaactgcatctctttctgaacaacatggtgctgataaattttaaaatagccataaactaacaacctccaaatctttatatatatatgtgtgtgtgtatatattaattatttttctggttcttttggttagttggcgaatgcatcaaatgatcagtttaagagccacaaagaagatttgcatgcctatgtgccagaaagtattggtggctgttcttatttctttcactcttgctagcttgttagatttcctgtctacagttattcattcctaaattgctcaaaaatgcatttaggggctaatgttgagcatgag

SEQ ID NO: 91815 - DNA, 231 bp, Glycine max
  Clone ID: PAT_MRT3847_53923C.1
caacttaaacgactgtagatggcagccgaaaggtgtccaacccagcttgtaaagaggctggaccatcccgcatgggcgaactccatcagaggcattctatctcttacctaagcccaaggggaataacaagccaagggggttaaaggaagaaaacacagtgacggacacttagcagcatttgcctatatcccaagaagggctgctaccggctgaactcctaccctccctaac

SEQ ID NO: 91816 - DNA, 602 bp, Glycine max
  unsure (1)..(602): unsure at all n locations
  Clone ID: PAT_MRT3847_53924C.1
cccacttccctacttctctttctcttcttttcttcatcgcgacaccaccatcccgccacaccctctcttcttttcttcatcgcggcaccaccaccgcgccacaccctctcttcttttcttcatcncggcaaccatggcggcaccaccatcgcgccacactccctgttcttttcttcatcgcgacaccacccagtgggnncngngacccnatccnccnaaccnngccaaaatttttcgcgccatgcaccaccatcgcggtttgtattttaacttgtccactcctttcaggtttcaaccttgtctattcttggaacggaatagaagattagtaaagttgagtttaactctgaatttttttgagattctcttcaagccgtggttgtatttttttagatctgtgagatggttgtatttttgggtttgtattctgagtttttttccgatgtttttcctcttttttgacatgggtggttgatgttggataataatattttatcataaggatcgatttcttatataagatgtgtttcttttttttttttttttaaagattcgatttcaccacacagacacgctccagtggacagtttctttacgaaacc

SEQ ID NO: 91817 - DNA, 305 bp, Glycine max
  Clone ID: PAT_MRT3847_53925C.1
agctactcatcataccggcgcactcaaggcgctggcttcggccctttctttcatcttcccgagagggagcattcagggggagctaacatgccgaacaatgtgtctgacaaagctgacaagggaccacgcatctgacgacgaagcatcagggcaactgtgctcatagaaacacttactgcactgtttcaactgaatgaaattttgtatgaactgaatgaccattcattgcgtttgaactgttagcgttgagattacagtcgcagtcatgttaataccttccaagctcatccagagcgcctcttacc

SEQ ID NO: 91818 - DNA, 721 bp, Glycine max
  Clone ID: PAT_MRT3847_53926C.1
aataaatgaaactcttaagccactaggcagcccaagttgtgagtgataaaattgagtccaagaaaacaatgggattgaatgtcccgcagaggcaactaacccttctgttgctgattgcgttagcagcagctgaaaaaaccctacatggctgccgaagcacttgcggaagcgtttcatcaattccgtatccatttggcataggcaactcttctgtcaccggtgaaaactgtttcttggagaaggcattgatgctcacttgcataaactccactttatatcacggaaacggtaacgtccaaattctggacataaccctcgacagtaaaatggtcgtgcttgccttcatctcgaaagtttgcaaaaacgaatctgttggtagagtagtcacgaaaggtcacgaagccggtctcagaactccggcttttaccgtctctagcgaggacaacaagttcgtaaccgtagggtgcgatacctatggctatctcaacagctttaacaacgacatcaggtctcaaatggggtgcttcacaaggtgtgacaccatagagagtgtgcaaagcatgcaggaagatggaaagtgtacggggatagggtgttgccagatggatatacctcctggaatgaagaatattagcatacaagcattcagctattacaatttcaattactcttcggacttcaacaatgcggctattcttttgtggcaaaaaacggcaactat

SEQ ID NO: 91819 - DNA, 343 bp, Glycine max
  Clone ID: PAT_MRT3847_53927C.1
ctgtttatttttttttttttttttttttttttttttttttttttttttttttttttttttttgggtttggttgttttttttgaggccctttaaaaaaaaaatttgccggccggtttacccccccctctaaatgtgggttttaaacctttcctcaaccccgatttttaggtacttgggcgcgacccattccctaccatgtttcattgccccagcccgggtggtttttttcaataaacagtatccccctccgaagattgtgcctctttaaaaggggggggccctttgtaaaataaaattccttgggtgggggaaaaaatttcgggtcctgaatttccccccccct

SEQ ID NO: 91820 - DNA, 288 bp, Glycine max
  unsure (1)..(288): unsure at all n locations
  Clone ID: PAT_MRT3847_53928C.1
caaatgcanaatagtcccgtngcttccatgtancctcaacagatncatggcaaccaattgcngaggatatggctatngtcagcaancaggagttnaatatcttgagnagcaaatgtatggtttatctgtgagcgatganngtgctccgaagattcttaccnggtntcttctccatcntatgtgccaccggggaagncttccatgccagaagatctgttatttgggganttgttaatatggcanaagtgacaccaaaacctatcctgaccagactggtagcatgtaaaa

SEQ ID NO: 91821 - DNA, 454 bp, Glycine max
  Clone ID: PAT_MRT3847_53929C.1
tttttattaatataaattttttgttttatttatgggagcattttttcttgtaaatcgttttttttcaagaaagaaaacctacatttatttaaacattaaactatatattatatattatatatagtacgttttacccactgtttccataaatgaaccttgcatattgcatggcctttcctttacattctattaaaattattttttaattcaaaaaccccccgtgccaccgaaaccaccacctatacccctacttgttccaactagacctccaattactgaaccaaattcttcaccaaaacctgaagcggccccaccacccaattgacctcttacaaaaccgagcactaactcattttcttctattttcaagcctactgttctcctatgaccaattcaaaacccacatacagtacctgtacatcactggacgattttcccatttttgcgcaaaaag

SEQ ID NO: 91822 - DNA, 419 bp, Glycine max
  Clone ID: PAT_MRT3847_5392C.1
ttgctcgcgtgggtttttgaatcctcaatatgtcctgggtaatcgcccgcgatgatctttatttgagccaatgaaaagatccagtggactcaatgtgaagattgtctcaagtggctcatattgccagcaagtgcacttctttcatcaaaatggacgtgtactgataattcgtgggatccagaaacatcttgttgttcagctgcgcaagagctgacagcagagcaacttgagaaaatgctaccttcttgtaattcagatgttctccaacaaaatgaaggctgccaaacaggatcctgataatgctgaagctttgaagggacttgacacccttgcaaatttagctatcctgtgagagggtgtggcactcctagcatccccgcttgccacaactaagcatccacgtctcagacctggctgct

SEQ ID NO: 91823 - DNA, 390 bp, Glycine max
  Clone ID: PAT_MRT3847_53930C.1
ccatgggtgtgttctaccatgaagagccaccaaaccatcccaagagatgcaaataccttgtggcaacttttattaaggaagttttctccagttgccagagttttgcagcacggctttcaacttcaagttttgaggatgagtacccagtgagcgattttgacgaggaacaagaattgtttatctcagcagtgataagccgaaccatggagaaacagaagcacaagccaaatgtgttgagacacaacttttcttgggtatactctccagcaacgaaagaactttatttcactactcaggcagtggcaccacaagaaaaggtggagagtgatcaagaaagtgatgaaggagaagagtttctgtcagttaaaagttatttctcacgctgttcaa

SEQ ID NO: 91824 - DNA, 545 bp, Glycine max
  Clone ID: PAT_MRT3847_53931C.1
acaagaaaacaatgacctagaccattgtactttattctttctaagctcaaagcatgaaggttaaaaaaaatagaattacagctaacaatgttgcaaaccacttgtatataaatagttccactttttctagcttagtggttgttaacaaaggttggtttatgctttgtcattagccttagatgctccttcagggtttagctcatcccaagcttcaatccaagtgaccatggcatcggcgagcttgtcgaagtaaggatctatctttgatagcttttccttgacttgcttggagagctcaatgtagcacttctgaacagtggtgcattcttttggaagaacaacattctggaagaatggaataatgtcttcctgccagaatatgcctttgtactctttcctgaggttaacaaatgggttactggccttgctgtgatagatatagggcagaccagtcttgactcctagccccaaatgatcagtgatcacctgaagcatgatcatgaaaatgtctcaattggtttttttttctataaaaatcatataac

SEQ ID NO: 91825 - DNA, 1474 bp, Glycine max
  Clone ID: PAT_MRT3847_53932C.1
tcgagcttcaaaccctctctctcttttttctctttctctctttgaaactctgtgagaaaccttaactttgtaattgcaatggctgatgcttctgtggccccaccacctccactgaaagatgagcttgacattgtgatccccaccataaggaaccttgactttcttgagatgtggaggccattctttcagccttaccatttgatcattgttcaagatggtgaccccaccaaaaccatcaaggttcctcctggctttgactatgagctctacaaccgtaatgacatcaacaagcttttgggtccaagggcttcttgcatctccttcaaggactccgcgtgtcgctgcttcggctacatggtgtccaagaagaagtacatcttcaccattgatgatgactgctttgttgccaatgatccatctggaaaagcgatcaatgcactcgagcagcatattaaaaaccttttgtgtccatccactcccttgttcttcaataccctttatgaccccttcagagaaggtgcagattttgttcgtggataccctttcagtcttcgtgaaggtgtgccaactgctatctcccatggactttggctcaacatcccagactatgatgctccaacacagcttgtgaagcctctcgagagaaacactaggtatgtggacgctgttctgaccataccaaagggcactttattccccatgtgtggaatgaacttggcattcgaccgtgatctcattggaccagcaatgtactttggtctcatgggagatggtcaaccaattggacgctacgatgatatgtgggctggctggtgctgcaaggtgatcactgatcatttggggctaggagtcaagactggtctgccctatatctatcacagcaaggccagtaacccatttgttaacctgaggaaagagtacaaaggcatattctggcaggaagacatcattccattcttccagaatgttgttcttccaaaagaatgcaccactgttcagaagtgctacattgagctctccaagcaagtcaaggaaaagctctcaaagatagatccttacttcgacaagctggctgatgcaatggtcacttggattgaagcttgggatgagcttaaccctgaaggagcatctcaggccaatggcaaagcataaaccaaccttggttataacaaccactcatgagctagaagtggaactatttatatactgtactttttttttttcagtatttcttctcaatgtttgcagcattgttagctataattctatttttttttttaatcttcatgctttgagcttagaaagaataaactacaatggtcttggtcgttgttttcttgtgatttttgtcccttagtagacatctgcaggaccatatcacttgcaggcactgagtttcatgtgaaacaagtgttataggaagaatattaatgtatgattcattacagattaatagtgatcgaattttcaaaaa

SEQ ID NO: 91826 - DNA, 262 bp, Glycine max
  Clone ID: PAT_MRT3847_53933C.1
gggccaaaaatcaggattcctaattaaaagcctattattttttggattccaacccttcctggaccggaaaccttaacctgggggattaccaaagtgccaaggccgaacccttaccataccccaggcatttattattaaatttgttgagaatttcattttcttaccctaccagggttttaattctaaaggctggcccccttatgctgggtattttccgatttggaaaggccaccttaccaccgccaccggttattcaaccgtt

SEQ ID NO: 91827 - DNA, 295 bp, Glycine max
  Clone ID: PAT_MRT3847_53934C.1
aaaaaaaaaaggggtttatacggggcattgggggcattgccttttccccccttttttttaggccttttgggaatggccaagtcataaaccccgttaggggggggggggcaccccaaaatttctgaaactaatctatgtccttagcttttttgatttcttctagccctgggggattttggggcatattaaactgtttttggtgacatgccggggcccccatgggtttgttgccataaaatttggacggaaaaactgccttgtacatgaacaaccaaaatcacttccttatttgggg

SEQ ID NO: 91828 - DNA, 802 bp, Glycine max
  Clone ID: PAT_MRT3847_53935C.1
ggctcgagcaaaaatataaaaaagttaaaaacagttctcctttcacttttccaaaatcttctctccccatgttcacaccctttatctccatggatgatccaattgaagttctaccaatcaccgccagccacgtggtggcgatgccatacccagggcgaggccacgttaaccccatgatgagcctctgcaagctgctcctatccaaaaactccgacatcctcgtaaccttcgtggtcaccgaggaatggctcggcttcatcggctccgaccccaaacccgacaacatccgattcgccacaatcccaaacgttattccctccgaacacggtcgagccaacgacttcgtcaccttcgtcgaagccgttatgaccaaaatggaagctccctttgaagacttactcaaccggcttttgccgccaacagtgatcatatacgacacttacctcttctgggtggttcgcgttgcaaataatagaagcattcccgtggcgtcgttttggccgatgtcggcgtcgtttttcgctgtgctcaaacactaccatcttctcgagcaaaatggtcactatcctgtaaacgtatcaggtcagttactttctattcaccataaaaccatatcaaattggaatttttatatcaattagagctgtttgattggttcacctagcaattaaatctcaatgggtaatatcgaaccaattttaacaaaagataattgcatgtattatttattcaatatgttaactgtgatatttgaatcctacttaacatatttgccacagaagacggtgagaaacgtgtggat

SEQ ID NO: 91829 - DNA, 241 bp, Glycine max
  Clone ID: PAT_MRT3847_53936C.1
tgcagtatctttgaaacattggaacgacagtttcatactgcactacaaccttggtatgctttctggtcagtacagcccactgagatcttatcctcctattatagacaggaataacaggatccatgtatggattgtaacggcctgtctttctgtccaacaaactgtcgacaaagctcgtagatgatgacatgatggattcatatgtattagatgaagtgtataatggtatacaggtatctgg

SEQ ID NO: 91830 - DNA, 126 bp, Glycine max
  unsure (1)..(126): unsure at all n locations
  Clone ID: PAT_MRT3847_53937C.1
cgtttgaagattgtgtataacatttctaatgtattctcttggatgttgatatgaaggcnnggacgtgattgatggatggtataaattatgccaaagcaagattgttttgcttactattgtatgttg

SEQ ID NO: 91831 - DNA, 204 bp, Glycine max
  Clone ID: PAT_MRT3847_53938C.1
cacattctgaagatttttatattctcctatgggatgcaacagcgcggacttgaattcaaacgggccgtctacagcatgacatgttttggattcttgctcaccatcctgaaatgaatctgctcgcacactagtcatgacagtgacatgattgtttttaatctcgcaagagaaaggcctgcatttgatgttagcggtgattctttg

SEQ ID NO: 91832 - DNA, 769 bp, Glycine max
  Clone ID: PAT_MRT3847_53939C.1
tacggctgcgagaagacgacagaaggggaatcagaaaacgaaagagggttttagcgaacgatcatggcatctgctagggttttcggagcgatcgccgggagagcgttcatggccgcggcgtcgaagagttcggccaagaagaaacccgttccgtccggcggagccgctgcaaaagccgccgtgaaaaagccggacgcgcctaggaccaccaactgcggcatacagaaggtggttccggtgtcttccgagctcggagacttcctcggcgctcctcaagtgtcgcgaaccgacgccgtcaagaaagtctgggcctacatcaagctgcagaatcttcagaatccagcaaataagaaggagatcttttgtgatgaaaagctgaagaccatttttgaggggaaagataaggttgggttcacagagattgctaaattgctgtctagccattttgtgaaatctggctgatattcacagctttgatggtactgttaatgattataacttgttctagtacattaaataggtcattttgtcttcaagtacgtggtctgtgaccaaaccggtaagagacatggaaatttgtggtatcagacttagggttttttgaaagtggtgttattttgtcaaaaaagaagaaagtggtgttatttgctccactgtcttgtttcacatttttagggttttagtatatatggatgatatttccaagcctgtgttcatcatcaccatggttattcagctattcatgattttacattacacgatttgatag

SEQ ID NO: 91833 - DNA, 1264 bp, Glycine max
  unsure (1)..(1264): unsure at all n locations
  Clone ID: PAT_MRT3847_5393C.1
acacccgcgagtagacccacgcgtccggctgatttcaatcttgtcgaaaaattaaaactcacaaagcaatgattgaaattaacaagctactgaactttgcattgcccccattatcactaattgtcatcttcatcttcacgccacctttgctcttagtgaagctgcttatgtgtgttaaaaagtttctatacaccgaaaacgtggcagggaaagtagtattaatcactggagcagcctcagggattggcgagcaagtagcatatgaatatgctaggcgcggagcaaagctgtctctggttgacattagaaaggacaaacttgtagcagtggctgataaggcacgatctttgggtagccctgatgttaccatcattggtgcagatgtatccaaggtccaagactgtaaccgctttgttgatgaaacggtgaaccactttggaagactggaccatctggtaaataacgctggaattagtcgtaagtctgtaggggtggaggattggcttgatgtttccgaattcactccgattatggacattaacttttggggagcagtttatggcactttatatgcaatcccacatctcaaaataacaagggtaggatcatagtgattgcttcaggttgcggatggttcccactaccaaggataagtatctataatgcgagcaaggcagcggtaataaacttctttgagactctgagaatggaacttggttgggatattggcataactatcgccacacccggttttgtcaaaacggaccttacattgagggcaatggaatttgagcctacggtgggaagaattccaatggggtcagcatgtgaatgtgctatagccattgtggacagtgcatgcaggggagatatgtacgtcacaaatccatcgtgggtcaaagtgttgcttccttggaagttgctttgtcctgaacttgtggactgggcctgttgcttggtctttggggtttctcaaaactcgtctagcatgaaaggcaatctgcatgtgtccaggatcccagagcttaagttagaataaaattaattaatgttagtttgtggcaaatggatgtaacttgaaagtgtttgtgacagagaaagatacaacataataacagcagaacttattatttatatataggattattaattttatttttgtgtcttctcttttttggcagggtgatagttaattaatactacgaggaacttggaaatgttctttcttacatgtgagttatgatcaccatatttggcaaaanaa

SEQ ID NO: 91834 - DNA, 804 bp, Glycine max
  unsure (1)..(804): unsure at all n locations
  Clone ID: PAT_MRT3847_53940C.1
tacggctgcgagaagacgacagaagggggctctaaataatagaaaagtactgtgggatcatcgaggagcgagggaacccaaggccaaatgcctcaactcaaccctctcactctcacgctctcatactcattcgctcactcgctcaccctctagggttttttggaatcagaaaacgaaatagggttttagcggaacgatcatggcaccagctagggttttcggggcaatcgccggcagagcgttcatggcggcggcggcgaagagcgcggcgaagaagaaacccgctccgtccagcggagccgctgcgaaagccgctgtgaagaagacggccgcgcccaggaccaccaactccggcatacagaaggtggttccggtgtcttccgagctcggagacttcctcggcgctcctcaagtgtcccgaaccgaagccgtcaagaaagtctgggcctacatcaagctgcagaatcttcagaatccagcaaataagaaggagatcttttgtgatgagaagctgaagaccatttttgaggggaaagataaggttgggttcacaaagattgctaaattgctgtctaaccattttgtgaaatcagtctgatattttgctttgatggtactgttactgatggtaactggttctagtacattaaataggtcattttgtcttcaagtacatggtctgtgaccaaccgctaagaaacatggaaatttgttgtatcagacttagtttttttatttttatttttttaaggtggtgttatttgttccaaaaaaaaaaaaaaaaaaaaaaaaaatnagcgcccc

SEQ ID NO: 91835 - DNA, 268 bp, Glycine max
  Clone ID: PAT_MRT3847_53941C.1
ataaataatcacactcagcattcttgatctataaaatccaacatatactaaaacgatctaacattatcataactcactaccaaatgatattttccaacctaaagctatatatccatgtccactacagactactaaagattacagaacaccaatcaccatttgagaaacttaaaaaaatttaatataaagattaatcataattccaccagatgatactaggtcaccaaataaaagtctactatcatctcccacaacctaacactcacta

SEQ ID NO: 91836 - DNA, 467 bp, Glycine max
  Clone ID: PAT_MRT3847_53942C.1
tacggctgcgagaagacgacagaagggcctccaaaatctggcgaaattgatcaatttttccctgcttgaagtactccctctgcacacatacatgatattagaagtccagttgagttcaattattatcaaagcaaagaaaacaaaaacagataatatgcaatctgtgcatttaaatagggaatacaatatgtctgtataaaaatacactattactcaatcataaatgagtaacagtgtgtttgggttaccattttcccaaacttaaccagcattttttttaaaaacatgtgtgttggtgtcatggaacacgtgtaacggatggtgaaacagttatacaaacacgcactaaatagtatatgacctaacggtgtaaagggtttttacattgtcaatcaatcagaaatcatcatgtgtgcaagtttgtttactttcacaataactactttcaaaaagtcatacctagcatg

SEQ ID NO: 91837 - DNA, 183 bp, Glycine max
  Clone ID: PAT_MRT3847_53943C.1
aaagatccatctaaacccagatcagcttaactaaagtgtctgaattgttctgagttaggttctactacagcagatactgacactcttcacgaatgtgatatagtgtatatgatcaattctcgactattcttttaatcctattcactatcgacagcataacttgattgtctcaacttggttaaa

SEQ ID NO: 91838 - DNA, 793 bp, Glycine max
  Clone ID: PAT_MRT3847_53944C.1
gtgttggggtgtaggaaagaagaagaatgatagaatggttaaattactatgattgatggtgctaatagcaatttaggtagtgggaatagttgttctcaacccggagtcccgaacctatctttcttctccacgcgtccgcaacgacggtgcggtgcggtgcagttctctctctcatcgttctctaatggcaccgattctatcatcagtgatgacaatcttgatcttcaagaagttatttctaagggctcattagattttgacgaatggactttactgatttcagagatcgagaaactatatcctgatgacgcagagaaaatatgtgaggtttataaccatttcttatgcaaatttcctttgtgtcatgggtattggaggaaatatgctgcccacatgacatgcttatgcaccacagataaggttgttgaagtatttgaaaaagctgttttagcagcaacatattcagtgggcatgtgggttgattactgtagctttggcatgtcagcttttgaggacccatctgatattcggagttttaaaaagttgctaacctttttggaggagggcatagcaagcctggaattgcaatctgaatcatgttttgatggtgaaattcctatgactacctgttacaaggatgatgagatttattgcattatcaatgatatcatggattcatctgttggattgactagttcaatagccctaaaaaggtacagggtcattggagaactgctttatcataaagcttgtgaggttgattcgaaaattaatcctttttgaggctaatatt

SEQ ID NO: 91839 - DNA, 721 bp, Glycine max
  Clone ID: PAT_MRT3847_53945C.1
aagcaaaaataaatatagatgatttattgtaataggacccatttaaaaatccaaaaaagtgaaagaaagaaagatttctgggatgaaaattgcctaaacccacatgatttctggtttaaaaacatggaggaaatagaaagcgacaagtgacataaaagaatttgttctttttcaagcgagttataattttgcaggctgcccccacacatcattttaatttcgatatgacaaccgaattgatgagcccaactactttgttttcttctaatgctatctagagtggccaccatttgcttggctttgtaacataaacacttcttatattggatcctcattttgagagttagaactaggagagagctccaaggtaactggacaatgatcacttccatagaaaccttctaactctatcccatgtccacgcatttcacatgcagcaatcctttcttttagcttctctgaaactaaaaagtagtctattctcattcgttttccacgataccttcccactgggtttccagaccatgagaaacctcgctccatgtcttattcatgcagaaatctgtaggcatcaccagcttccccttaaaattaccaaacctcgtaaacccaggctgcacgtcgatatgatgtgactatttatgtcatgactttcacattttcttgaataagcaatttaataggagtatatcaatcgcatgagtagagaccttctaactct

SEQ ID NO: 91840 - DNA, 333 bp, Glycine max
  Clone ID: PAT_MRT3847_53946C.1
ctgaaccgtaacaatgaagaactctatggacgacgtaaaggattagaacgccaaatgaattagaatgttgggagaccttatgggtgggaataaaagggtcaatgatggactgaaccgaatggagggcagaacagaattgagggagtaaaactcaatgtaccccctttaaaaggcaggagtgaccagacgcctaccttgacagggagaggaagattgagcatgtattctcctgcaatgattatactgaagagcagaaggtgaagttagcaacagttgaattctcacactatgcacttgtttggtggaagagatgatgagactaggagggtggga

SEQ ID NO: 91841 - DNA, 591 bp, Glycine max
  Clone ID: PAT_MRT3847_53947C.1
ctcgagccgctcggttggaagccgagccgccacacactcacacaacactctctctttccgtgtaaccccttcaatggtctctcaacactgttgaaatttgacccatgcagaccatgctacgagcaaagcagatcactgcactttctagcagtgctaggacttttctcattggtggttcgcgttgtaatgcagcagatggtagttcatgctcttgcactgaggatgaaatttgtgtttctagacgacagcatataaaaaatcatgttttacctgcacagaagccatcctccctagcatccaaagctacttctgaggtggatgaaacattggtttcagaaaactcagtaaatgggccagcttgctgcaaggctaagggtgttgaccaatctagctgtattcagcatatcaggtctgcttcaagtccggcatgtaaatcagattctgtaacatatgcttgtgatattgatggtgttcaggaacatgttgagcacttgtctgctctcaattctgaccagttatacagggccagtattgcagctataaattgtctttctgatttagctaaatataagttttctttatcaaatggaa

SEQ ID NO: 91842 - DNA, 353 bp, Glycine max
  Clone ID: PAT_MRT3847_53948C.1
aaaaccaaaaaaaaaaaccctgctttaactttcagggaaagcaataccttaaaagggcccttttcattaaaactcttatttaaaaaaacgtaacctttgcaaagcttgcttaaactcccccctggtgatgaccctgttccatttgggtcccaaatttttttgttaacaaaattttttggttcccctccgaggccgggcgggcctgcccttatttgggctgccctgaagcttttttttccaaaacaggctttttcaacttgttaagggggggtgccccctaaggggccacatgacccacccccacaatgttggtctgagccttttccttaggcattttgcaaattaaccggccc

SEQ ID NO: 91843 - DNA, 530 bp, Glycine max
  Clone ID: PAT_MRT3847_53949C.1
aaatagaaagcgacaagtgacataaaagaatttgctcggcatcaagcgagttataattttgcaggctgcccccacacatcattttaatttcgatatgacaaccgaattgatgagcccaactactttgttttcttctaatgctatctagagtggccaccatttgctgcaatggtaccatagtattgttagtgttggatgtaacttgtaagtacacacccagttcgtgccagagaaacatggtgaaaaataacttttcattaaggaaacattcagcatccagagtccagacaatagagaaaaaattatgaccgtggctttgtaacataaacacttcttatattggatcctcattttgagagttagaactaggagagagctccaaggtaactggacaatgatcacttccatagaaaccttctaactctatcccatgtccacgcatttcacatgcagcaatcctttcttttagcttctctgaaactaaaaagtagtctattctcattcgttttccacgataccttcccactggg

SEQ ID NO: 91844 - DNA, 254 bp, Glycine max
  unsure (1)..(254): unsure at all n locations
  Clone ID: PAT_MRT3847_5394C.1
gtggagatctgtcggagaagaaaanngcgaaaattatcctanttccattcgtcgttcaccntcacttctggtgagcgcaacagagnnagagaganagngagnncagngcagangggtagaanctgatnaaggagtcgttngatgaatatntaatataaattggnttgtttgatgggcaacanatgccgcggntctttganagggaaatatattcagggttcagccagcccgnagaccattccaagcgctccacc

SEQ ID NO: 91845 - DNA, 259 bp, Glycine max
  Clone ID: PAT_MRT3847_53950C.1
cgacacaagaaaagatatggccttaacgctcttcctctacatgaacctaatctcacggatgagctaatcttgccaacataactaagtctaaaatccttccctccacagagcaaaccaccttgcacaagtccttcggaaccctttacaccaatgtttttgccgtgtgctccacgcactgccccacccataagatttattgcggctgattttcttggtcccacaaccttccttcaataacgaagggcggaaaaacaattca

SEQ ID NO: 91846 - DNA, 390 bp, Glycine max
  unsure (1)..(390): unsure at all n locations
  Clone ID: PAT_MRT3847_53951C.1
ggctcgaggtgatgttcactgcttgaccctctttttttacaacatctgacaaataattcgcctcatgaggtatttcactcacaaagcacaatgctgctcctgactttcttagtccaaataccttactacatctatacnaaagggggccccatggcccggtggcctagggcaaggagcgtcaatttaatgccatccatcaccctaacaatttcaaacaccttatatatcctaatcacactctatcactctacacttatttttctggttatgcactgtgtaatggtataactccttatacctctgcacctacagatctgagttgccatagaaccttgaacgggcaccccccaacggtgaatatatctgactgtacatgtgaaaacactctga

SEQ ID NO: 91847 - DNA, 1469 bp, Glycine max
  Clone ID: PAT_MRT3847_53952C.1
ccaggcgtccgcaagttttctgatttcttctgaagaaggcaagtatagtgggtttttactccggttttgtcttccaataaattgattttaagatttttaactgaagttttgtttggttatttgttgggaagttcacggatctgagtttatgttttgattgttctcggtttataatggagatctcagatctctgattatgatgtatttgttgccccgatttagtagatctgttatttcaaaattgtgagaataaattaaattaagtaaactagagaaacaaaacttaaattaggtttttttctctggttttctatgttagtatttaattttaagattgttaacagcaattttgtttgattttttgtttgtttgtttatttttcctttttttctctagaggttcatagatctgggagtctaagtttggaagttgttagtttatagctgagatatcagattttgttgtatttggcgtccctaatttagaagacatgttgtttttaaattgtgagaatttaatttaattaaatgaagttcacggatcagtggaatgtgttcagatcttgcaattagctcaatgtatttgcaaactcggcattttgtttttttttttttcattttttttggttcaaattttgtaacaagtcacctgtcatatctttctatttaatggttatcactttctaccttgcatatgttttatgccctaaatgattatcaatgggcatttaagtgaataaaaagtcccaagtagaagggaaacacctttggttctcacatcgcagtatttggtcatgtttttcgataaataaatctgaggatgaggtttttttttttttggtacatgaagatgacgttgtcgaagaagtactttcagaaaatgaatggaacagcaattgaaagtgtgaaagcattgatatcatgttggacatggcatgtgaggaagttgtgtatttcataattcatagttcttagaatggctcaaatactttgaaaatagtggcctttggatggtcatctgcaagttccaagttttaagaggactaagtctgaacatgataagaatctgcaaaataagcgaagttcaaatttttacacctcacaataatgacattgcaaccctgatgttactcaaccaaagaaatggggaagaagttgcacaacagggaacgaagagtcttgagtcttaatttacggttaggataatctaggtgcataaattgcaggggaggaataaaatttagatatagtatcataagtacagttgatgttgttctttaatcaaatttaaagttttacctcaataatgtactgtttagaaataaataaacttaaggggttgattgagaggtgtaaaattttggtgtgtttatatatgtgagatatgtttgatttttatgaaatgtaaaattttcttttcaaggtttcgttttgtttatatatgtgagaattatgtttgaatttcatgat

SEQ ID NO: 91848 - DNA, 370 bp, Glycine max
  Clone ID: PAT_MRT3847_53953C.1
agaacccaaaagaatttagttaattattaaaaaacccttgtcacccccaaaggcggaccttaattcccccgggaccaaccggaattggttggatttctggtttggtagctttccaaccaagcagggtcctttttctttctaccaaagggaagctttgggttatctccaaagagttaatggatccaggtgggttggattacttccaggaaaaacatcctctgaaaagatgattcttttagttgccccaaacatgctggttagattcaaaattaccctctgatttgagtaactggggggcaggacaggggtcgaaaaaaaagggacccatgttggaaggaattggtggccattgtaaacgggggcatttagg

SEQ ID NO: 91849 - DNA, 150 bp, Glycine max
  unsure (1)..(150): unsure at all n locations
  Clone ID: PAT_MRT3847_53954C.1
gncacttnntctatcanaaggngngntnagagnnnagaaatacgcgaattcgcctgtgatctcctgcanagaattccaatggccnctgggatctcagtctggantcgatcagatctgggaanatgagcnctggggggcttctgnaangat

SEQ ID NO: 91850 - DNA, 1410 bp, Glycine max
  Clone ID: PAT_MRT3847_53955C.1
tcaccatccatctttgttctttctcgtgcatggtgcaaccttctccatggccaaaaaatcacagctgcgtacccagaaaaacaatgttaccaccaatgacgataataatcttaacgtaaccaacactgtgaccaccaaggtgaaacgaacaaggagaagtgtccctagagactccccacctcaacgcagctcaatataccgaggagtcactaggcaccgatggacaggccgatacgaagctcatttgtgggacaaacattgctggaatgaatcacagaacaaaaaagggcgacaagtctaccttggcgcttatgacaatgaagaggcagcagcacatgcttatgatctagcagcactgaaatactggggtcaagataccattcttaattttccgttatcaaactacctgaacgaactgaaagaaatggagggtcaatcacgggaggagtatatcggatcgctgaggaggaaaagcagtggtttttctcggggaatttctaaatacagaggtgttgcaaggcatcatcataacggaaggtgggaggctcggattggcaaagtttttggcaataaatatctttacctcggaacttatgctacccaagaagaagctgctactgcctatgacctggcagccatagaataccgtggactcaatgctgtcaccaatttcgatctcagccgttacattaagtggcttaagcctaacaacaacaccaacaacgttatcgacgaccagattagtattaatctcactaacataaacaataataataattgcactaacagcttcaccccaagtcctgatcaagaacaagaagctagcttcttccacaacaaagattcactcaataatactattgtagaagaagtcacgttggtgccacatcagcctcgtccagcgagtgccacgtcagcattggagcttctacttcagtcatcaaagttcaaggaaatgatggagatgacatctgtggccaatctttcatcaacacagatggaatctgagttgccacagtgcacatttcctgatcacattcagacgtactttgagtatgaagattccaatagatatgaggaaggagatgatctcatgttcaagttcaacgagttcagctccattgtgccgttttaccaatgtgacgagttcgagagttgaagaagtcaggtttatataatgcatggaaaaaagaaactctgatatgtttgtttatttgtttaatttgttgattatgttaaagaccatattcataaatctttagctaattaaggtttaagtttttagaagagagatcatgtcattcacaactattataataagtggacttgttttcaatttgtgaacatgaaagtttattctttttatagcaacgtcgtcattaatcacataaaaatgaatattaatgcggc

SEQ ID NO: 91851 - DNA, 493 bp, Glycine max
  Clone ID: PAT_MRT3847_53956C.1
gggcaaaaaaaaagaacatgccctttaaaaaatcaaaacaaaaaaattcctacaaacaaaggggaaaacaaggggtattctcatctaaggaaaaaaagcaaaggacataaggggtaaagcaacgttcatatcacacgggcaaaacaattagtatcccctccaacaaaaatcataaaagttaaaattcaaaaaaaaagcctcaaataagttttaaacaaaaaaaggggggaaagcaaccacccatttagcccacttcctcaatttgggggccagccccccttccaccaaaaggggcagcataatcatcctggggtgccccagcaccagcaccacccatgggaggaccagccccaccttggaacattttggcaaagaaaggaatgcaaaagctttccaattccttcattttggcccaaaaatcatctgcttttgggagcggggtggtggcaaaccactggaaagctggctcaatgggggcctcaatctttttttt

SEQ ID NO: 91852 - DNA, 266 bp, Glycine max
  unsure (1)..(266): unsure at all n locations
  Clone ID: PAT_MRT3847_53957C.1
gccacgcgttcggcggtgacatagtgtatgttatataactgaatcatagtctctgttttagggacagccttctgaatgttcagcatcttaacattcaacacttacgatctcccttaattnagttatggaaaaataaatttgtgccgatcacatttcctgaaacactggcttatacacacagatcatcatgttaaatagtatgttgtatgcttgtcggaactgccatggaagggaacatgattcttactctatggatggcttcttgt

SEQ ID NO: 91853 - DNA, 135 bp, Glycine max
  Clone ID: PAT_MRT3847_53958C.1
tggcaggaggggaacaatccggagaagcccaagagtcagctaggatgctaatggatatttccaatgggaatacactctctggaaattccagtggcagatgttcaaggaaacctttatgctgatctcaaggacatc

SEQ ID NO: 91854 - DNA, 445 bp, Glycine max
  Clone ID: PAT_MRT3847_53959C.1
gagcattacacgctctctccatgcgactaagttagattgcctgcggcagagtttgatattacagttcataactttaaatgtcgaactaatgagtggatggtgtattctatgagcagtggagccagtcgccaccgttgtggttgccgtggggaaggggttgaaactcacactccctttgatgctcgcatttaactcctgcagctcggacaccactgaccgtgatggtacgctatactaacttcacgtagactcttactgcctcccttcaccctgtacatggctgattagctgcgtccttctcacactggacagatcatttcaagctcgacgacaccacaccactctccgccatggtaccatcagaactactgccttccgtccaacagattttcacgctgccatgagtggcccagaccatgctggattcctttagcattcacatttt

SEQ ID NO: 91855 - DNA, 283 bp, Glycine max
  Clone ID: PAT_MRT3847_5395C.1
tcttgcttaggggtcatcaatgggtgtacaagtcatcgctgcgtgttcttttgcatcatgattaggatcaatgtatttatctgctggtggcatgttactgttcgagctgtcttttgctttcagcgctggtccagttacttgtcttatcatgtctgagatactacccagcaatatcagatcaaaggccatggcgatctgcctggctgttcattgagtgataaacttcttctggggtctatcttatatgctcttgctggagctaattggggcacatactctgtat

SEQ ID NO: 91856 - DNA, 248 bp, Glycine max
  unsure (1)..(248): unsure at all n locations
  Clone ID: PAT_MRT3847_53960C.1
gataggaattaggatcgagaaggatgcgagaagaagacagaagngggagggaaaggatggagaagaaggtgaaggaagtgagagtggagtagatatgagtgtgaagaaaaaattcttccaaagttttaatatttaaatcaaagggtcataaaaaaaatgatctgaacattcgatttattcatctttttctttttcatagtccaaaatcactataacacaatgaatagaacttgtttcaacaagattgt

SEQ ID NO: 91857 - DNA, 121 bp, Glycine max
  unsure (1)..(121): unsure at all n locations
  Clone ID: PAT_MRT3847_53961C.1
caagtggttgtttctctctctgactctgatcctcagtctctctgtctacgtcggcgcccgccacttcgtgctcgtcctctcccaggaagactgacaggacgacccctccgncgatcccgac

SEQ ID NO: 91858 - DNA, 465 bp, Glycine max
  Clone ID: PAT_MRT3847_53962C.1
ggctcgagctccggcaccatcagattttctttatattttttttgcgaagtaacgtatgtacatgggtctttgttattcactgcttgaaaaataaaatgataatggatattagacttatataactgctgttggtgttggttgcaggcggatcttcctttatgggtgtgcgaagttaacggaatggcacaagtgaagagccggtaattggtggatagcatcatcttggatgaattcgaagacgcgaatctcgttaattgagagcacctccctgaaaatgcaatgtggcttgtcagcatatggtcaagggatgcagtggaataataaccttattgtgagcatcctacagaaacagatggcttgtactacataaggactggactgcggtgactgggatcaacatgcatgactgaatcatccatctaggatgaggctggcttttgtctggtgaatggtaagaggtgaatt

SEQ ID NO: 91859 - DNA, 315 bp, Glycine max
  Clone ID: PAT_MRT3847_53963C.1
ggctcgtttgacttttctcctgattgggcatatactggagttagaacaaggttttaatagttggcacatttctggggagtaaaaagccctctagtgagaccaaatggggatgtatgtttggtgaaattgaggtttcagctgaagttttggcggataatgtcataaggtgtcagactcctttgcattcacctggacgtgtaccattctatattacctgcattaatattgttgcctgcattgaggtcagggaatttgaatttgatgaaaaatccaaaccaaatttttaggtcctgaggggtattaaaaatcttaacc

SEQ ID NO: 91860 - DNA, 417 bp, Glycine max
  Clone ID: PAT_MRT3847_53964C.1
tttattattgttttttttaattttgtttcttctacatttcatattttttttcttttagtacatgagcgaagcaagactacaagcattggttgtggccttatagagcacaaaccacacccagaataatccatacctaaaatattacaacgggtgcctccgattgttccgactgccattcacaatattcatgctgcggtttaagctgaagggcgagctgatactatacgactacaaatctccaaccgatgaagagcggaagaagccgctcacacaagaacagctctatattacgcgccaaaaaggaactgacagagctttgactggggagaacaagactactaaaaccccgcagatttaccaatggatatgtaagaacacagccatactcgaaccatctactacctacaataggggaac

SEQ ID NO: 91861 - DNA, 270 bp, Glycine max
  Clone ID: PAT_MRT3847_53965C.1
aatgtgtcacgtaagttttttcattaacgataacggacataatttcatggataaataaatttatcgtacattaaaatttgaattttcatttttaaaaataaatttataagcattctacacgtttaaagataaaaataactatttattctaatgtttttttttttttactgttaccgtttatttctccctttcctctcgttggataaaaagccttaattatattgaaatcttcaacatatccatcaccaaattgtccatcatcagcataga

SEQ ID NO: 91862 - DNA, 422 bp, Glycine max
  Clone ID: PAT_MRT3847_53966C.1
ccttccaaggggactatcgatgcgggctctaccagagagaggactcactgataagctcgttggcgaccaaaaaaaagtgtctggttggttcaacaatgtgaaagtcgttgatgacgctacttattcatccgagggctataagcttgacgttctgtctatggacagaataagaggaggcgactcacttatgtaagaacgacccgatactcacccatagtaagggaataaaacgcttggtgctgccagaaaacactacattagtcgatcagttacagaaatttccatctgaacaggcccagaataatcatgtagctttctgccagtgagtgagagacatgctttggttgcagcaacattggtgtctcaactaaataaacaaatcaaactttatgcttattgcaaatgttttaatcactgacata

SEQ ID NO: 91863 - DNA, 486 bp, Glycine max
  Clone ID: PAT_MRT3847_53967C.1
cccacgcgttcgcctatgcgtccgaaaaaaaaaaaaaaaaaaaaaaaaaaaaaaaaaaaaaaaaaaaaaaaaaaaaaaaaaaaaaaagaaaaaaaaaaaaaaaaaaaaaaaaaaaaaaaaaaaaaaaaaaaaaaaaaaaggggggggccgttttaaagaaccaaagtttacttacgggtgaatgcaacaaaaaaactatttaaaagggaaaccaaaataaaattcatggggcgcggtttaaaaaaggcaggaagggaaaaacccggcagttacccaattaaatcccctggaaacaaatcccctttttaaaagtggggtaaaaagcaaaaaggcccgaaccaattacctttcaaaaaaatgggccaccctaaatgggaaatggaacccccctttgagcggcaaataaagcgcggggggtgggggggtaaccccaaagggaaccgttacactggcaagcgccaaaagcccgactctttaagctttttt

SEQ ID NO: 91864 - DNA, 684 bp, Glycine max
  Clone ID: PAT_MRT3847_53968C.1
tcagtacgaagtatttatgttttcattagatagaaaaccaagaatgttccaaggttcatcaaatatgattatgatcttgcttataacaaatggctgaggttccataaagttgtacaacagctcagcttgaatgaaaatacttgaacatgggattcctttggaccacacatatactactagacttatttgatcctttcataacattgcaccgaaaatctcgaaggactgctcttaattatccgcaacaatataattgcaagattcagctaatccatacatagaagctgaaactttacctaaattgaatctcatcttcaccatgtggggactgagagctcgttgcagagaaattggaagacataggaatggatattgagagttgagttgtggagaaggctgtttggttggatctctcatcttctagaccagaccatgactccctgcttttaggccattcattaaaaaaaggtcgaagaggctggccctcctcctttacgtgttctcccgacacatattcaccagataaaaacgaatgccggggataatcactatgcaacagggaatcattacttgattttgatgtagaaaaagaggcaactctggttgacatcgaaggccatgtgttttccagctgtgactccatttggagaaccttgttgcttccagaagcttcagaaaagaagc

SEQ ID NO: 91865 - DNA, 1026 bp, Glycine max
  Clone ID: PAT_MRT3847_53969C.1
gccagaacgcatcgcagcgcatcccataaaacctgtttctattgaccatgcattcccatattgagagaattctatggagcgaggaccaaatttctcgccgtgttttcgagctcgccgccgaaatctctgacgacttcggcggccattctccggcgcccgtggtcgtcggcgtggccactggcgcgttcctcttcttggctgaccttgttcgcaaaatagatctctccatcgccgttgatttcgtccgagtcgaatcctacggttccggaaccgtgtccaatggcgcacccaccatttccttcgatttgaaggtcgacgtcaactcccgccatgtcatcgtggtcgaagacattgtagatactggacataccttatcaaaagtcattgagcacttgaaatcaaaaggagcgtcctctgtttctgtttgcactttccttgataaacctgcaaggagaaaagttcattttcagctggtgggtgaagggaaatactaccggggattcgagtgtcccaactatttcgttgtaggttatggactggatttcgccgaactgtatagaaatttaccttacattggtgtcttgaagcctgaactttacaagtgatcttatatttcttagtgaaacctgtcacacgtggttctagaagtttttctgcctcacattcttccaagagtagcagatagaaactagaagaaaactaataacatggacttgctatgcgcttccttggctaccatgaaataaattgtttcagagcttctatattttcattttaatattatcttattaaagtaacgtgacagtgtgttacttggaccaagtatcagacaaggaaaatgtttgtcaatacaagatcaaatcaacaacttattagaggggctattgtttgcaactgttttgaaaaccttaattaattttgcggttatgtatgtttcaccttttaattcttttttcagtttttccgcaatctttgactgtattctgtattgggaggaatgtattttagtcgaaatatctgagggaa

SEQ ID NO: 91866 - DNA, 353 bp, Glycine max
  Clone ID: PAT_MRT3847_5396C.1
gactacatcatacttcacatcacgggctacagctgctattcatcacatttgccaaaagtgcatggcagctaaacgactaccaatcctttctctgctattcataactctcaccctccatacgtcttgcatcaacgtacatgcctcagtaaataatccaaacctaacactaagacctacaacatacgtcatcaagtcctcatgcactgccatgcgctaccccgccacttgcgtacatacactctctcgtcactccatcactatgcgacagatcgagcaacaactcgcattcaaggttcacttcgtgatacatgtaaatactctcttatgaacgtcgatcgtgaaaagaatgggct

SEQ ID NO: 91867 - DNA, 326 bp, Glycine max
  Clone ID: PAT_MRT3847_53970C.1
cccacccatacgaccacagacgacttacagtccaaacccacgcacaaactcgggggcgtggctatcgctaaaaagcctgctatggatgcatttacttatgctcatgaccaaaattcttttaccatttttaatccaccatattcctggtatcccaagaagaacataaactatcatattgtgaggttgatgaccctctttcacctcacaaacaatccatcaattaacacagctgcttcagaaaaggaaacacctcctgtaactcatgcgcacacctgcatgctttttatagttttactgaagcctgatatactagtttacgagtgcct

SEQ ID NO: 91868 - DNA, 315 bp, Glycine max
  Clone ID: PAT_MRT3847_53971C.1
gggtattgttgggttgagcgtttcctgtttaacaggtgagaatgttatcgaaaggagatttcactttgatctgttgaaaaaaaaacgcctttaaaacaaaaaagtaccgaggcaaccaaaataatatcacccccgctcccttcgtatgggaggcctgagccgatcttgtcccacacaaacttggggcaaagaaaaaatggccggtggagaccattttatgacccgttactagacggtgtttgcccccgattattctctttgcgacgtccttatacaccctgagcttccgccccgcgagggggacccccccccggg

SEQ ID NO: 91869 - DNA, 356 bp, Glycine max
  Clone ID: PAT_MRT3847_53972C.1
aaaaaaaaaaacaaaaaaaataaaaatttaaaaaaaaaaataaaaaaaaaaaaaaacgggaaaggaaaataaaaaaaaataatgaaaaaacaaaaaataaaaaaaaaaaaaaaataaaaagggggacccttttaaagaacccaaactaccgcaccctcgcttacaacaaaaaacttttttattaggtacacttaaattaaattaattggcccaattttaaaaaccacaaaatgggaaaaacctcggagaaacccattttaatgcttctaggccaaatacccttttatccattgggcataatttcaaaaaggcccaacccttttacatttccaaacatttgcccagcctaaatgcaa

SEQ ID NO: 91870 - DNA, 264 bp, Glycine max
  Clone ID: PAT_MRT3847_53973C.1
aacaatttgactatcacaaacctggcagactttcatatatgggtggcatgaactctagcgtattgacctgtcactaggccatatatcacacaacatgctccgagctcaacgggaaggtgcacatcctggccgtctgggcatgctctggctacaagaagccaccgatcaaatccgaggcctgaggagccaaagccagacactctgggagcaggagaggcgcccttgggctgatggcagctacacttggcatatcagcagcctaca

SEQ ID NO: 91871 - DNA, 559 bp, Glycine max
  Clone ID: PAT_MRT3847_53974C.1
atggaaacgaaaaggcccccccagcaatcgaattaaaaaattaaaggggggggggttaataaaaagcggggggaaaaaaaaggggtaaaaaaggtcgcctaacacaaaaaaaacaaaatcctgcaataaaaaaaggggggcaaaacccaaaaaaaaaatttgtttgtttgaaaagggggcaaaaaaaactaaacaacgggttgcatgaaattttggggaggaaacttgggccccttttccttatgggggggggggcaacccttggccttggaaacaaaaagggccttacgggccttggccaatttgagcttgggcaacacaaccttgggggggggaaacccaacggggacgggggaaccattcaccttttcgggggttatgcccccaaagggaaacacccactttcgaggggggaccggggtaaccttcccctgggaacccttggatgttcctcgaataaccggcaccttgtcctccttccggacggggaacgacctcacggtggacttaaaccgaagctccgccgacagaggggcgctaaaaaacaccccccccaccc

SEQ ID NO: 91872 - DNA, 1596 bp, Glycine max
  Clone ID: PAT_MRT3847_53975C.1
tggttttgactctctctctctcttctttaaacacccctttcttgtccgctccatcgcctcttcaccacactttctctctcagtcacagcacggtggtgacgaccatggttagagacgatctatgcatcaccgttcccagcttcttccgctgccctatctccctcgacgtcatgaaatcccctgtcagcctctgcaccggcgttacctacgaccgttccagcatccaacgctggctcgacaacggcaacaacacctgtcccgccaccatgcaggttctccaaaccactgatttcgttcccaaccgaaccttacagaggctcatccagatctggtctgactcggtcactcaccgagtcgactcgcccgactcacctacctccaccgagtcccaatcactcctctccaaggaccacatcctcgtcgccatctccgatttgcacactcgcagcgacaatcggttcaactcgctctcgaaaattgctcgtttcgcacaagattccgaggagaaccgcgattttctcgtcagaacggaatgcttcgtgccggtgctggttggcttcctcgacaatgtcaatggcggcgtcgaatttctcgaacaggttgttacggcgttggatttggttgtcagcaaaatggaagatcgcgaggggatgaaaaacttgatactgaagaggcaaggcgagggagaaaaacagagcgtggattctctgcttctggttctgcaacaaggaagccatgcctcaaaaatcgcatcggctagggttttgaaatcagtcgccgtagacgcggaatcgaagctgctgttagcggaaaaggaaggtttagtatccgaattgctgaatctaatcacgccggagcaacatccagatctagcaagatgaagttggtgcgtctcggagcggtgaaggtgttctcgaaccttctttcggctccgggcctgagcgtgtcggtgaaggagaaggtgctgaagctggtggaaacggtgtcgtctacgaaggaagggaggtcggagatttgcgaggattcggcgtgcgtttcggcgatagtggacaaggtgctgaaagtgtcgagcgtggcgacggaacacgccgttacgacgctgtggagtgtgtgttatctgtttagggatcagaaggcgcaagaggccgttaccaaggctaacggattgaccaagattctgcttttgatgcagagcaattgctcaccgcaagtgcgtcaaatgtcttcggatttgcttaagatatttcgggttaattctaagtcgtgtctttcttcttatgacaccaaaaccactcatattatgcccttttgatcctcctcctcctcctcctcctgcctttgtaaatcagagaaattttttgttagtgattagacagaaagcaaagtgaaaacgaaaatgataattcatttggagattctctttgcctcttttttatacattaagttctggtgcgtgcaaatttcgaaacataacatgaattcctcaagtaacgagaaatttgagtgtgcagtaacgtaacagattcaactcttgtttttgttaaatgttaaattgctaatgcttgagagcctttctgtaatgtgaatgtaattatg

SEQ ID NO: 91873 - DNA, 979 bp, Glycine max
  unsure (1)..(979): unsure at all n locations
  Clone ID: PAT_MRT3847_53976C.1
tcccccccggacgacgcagggtttgggttttgacaccatgactggttcgcgcagaggcattggcgatggcggggaaaatgtgaggaaagcggcgagcgagcagaaccctggccactccgcactttcctgttcccattccctcccaaacaaattagggtttgggttttgacaacatgagtggttctcgcagatgcaatggcgattgcgagggcgatcagaacccggctactcgcagggtcatacgctcccagttcctccaactcaagaatttcatcaatgagaaaagagatgatttgatgaacacggagtccgacaagttcgacaccatcttggatgagttcgacaagttacacgtccaagttgagaagccgagggagcaagttgcagatgcggaggcactgctggatctcacacgcactctagtgggatctgttaagtcgttgacgaatgagggcgtcacaccttctcaatttgtttcatctttgctcatacgctacgcccacgcccaacactcaattgattggcaccaacttggccttgccgcctccccaatcttcctctcctttcatggctcttctaccatgcttggtcccatggacaaccagtttaagcaacgcaaaactggagtgcccagaaaccgcaatcctcgccaaattgcaactactagacctcaacaggttgatgaggctgttacagaggaaaaaactgataccgacaaaaacatggccactatgtttcacatcttaaggaggacaaagcgtgtcccacttgaaaatttaattttgaacagggagtcttttgctcagagtgtggaaaacttgtttgccctatcattcctagtgaaagatggacgtgctgagatcaggctttgatgaaaatcggttgcactatgtttcacctaaaaatgctccagctgccaacttagntatcatcaaaggaagtttcttatactcattcnncgnntaagatatgattncca

SEQ ID NO: 91874 - DNA, 703 bp, Glycine max
  Clone ID: PAT_MRT3847_53977C.1
gggttttgaaatccctcgccgtagacgcggaatcgaagctgttgttagcggaaaaggatggtttattatccgaattgctgaatctaatcacaccggagaaagatccggatctaatggagaactgtttgtcgtgcctggtttcattatcgacgccgagacggagcaagatgaagctggtgcgtctcggagcggtgaaggtgttctcgaaccttctttcgactccgagcctgagcgtgtcggtgacggagaaggttctgaagctggtggaaacggtgtcgtctacgaaggaagggaggtcggagatatgcgaggattcggcgtgcgtttcggcgatagtgaacaaggtgctgaaagtgtcgagcgtggcgacggaacacgccgttacgacgctttggagtgtgtgttatctgtttcgggatcagaaggcgcaagaggccgttacgaaggctaacggattgaccaagattctgcttctaatgcagagcaattgctcgccgcaagtgcgtcaaatgtcttcggatttgctcaagatatttcgggttaattctaagtcgtgcctttcttcttatgacaccaaaaccactcatattatgcccttttgatcctcctcctcctcttagtccctactactgcctttgtaaatcagacaaattttttgttagtgattagacagaaagcaaaatgaaaatgaaaattcatttgg

SEQ ID NO: 91875 - DNA, 366 bp, Glycine max
  unsure (1)..(366): unsure at all n locations
  Clone ID: PAT_MRT3847_53978C.1
aacgtaagaactggcaaccacaggaggagaagaggagganggggacacataaaacccacacgcacaaccacacccaaaaagacaccgcaccagaaccagagaagagaaaaagcgaaaagaggaacgacccacaacccgcaccaccaaagaacccacacgaaaccccggcgagaaaacgagagaaaccccccacacacagggcggccagagcggcaaccagaacggagccaagcaccgggaggcgaccagcgaagagcacggcaccgaccaccaccggaaagcacagcggcgaccccgaacaccaacnggaacgcaacaangccaaccacaacgaggccagcggcggaaggcacgcaccacgcgccc

SEQ ID NO: 91876 - DNA, 522 bp, Glycine max
  Clone ID: PAT_MRT3847_53979C.1
atctgactaggaatgtcggccgcgcctcggttactccactgtttttttctgagcctgaaagactaacagcccctccgttggctgataaacccccagcctgctacccccaggatgcaggacccatttggctctgggcccttgggctatggggtccgggcctgcctgggccgcgggattgcagaggtggagatgcagcttctcctggcaaggctgctccataagtacctggctggtcctggccccggagacgggggagaagaagagtgcggcccgtatagccctggttcccaaccacaaagagggcctgccttacctgcagagacagtgctgagcagattctgccccttgctggggctgggaccaaaggctacagctgcggcacagtggttcctggctgctgccgtggcccagatgacgagggacataaggatgccgccagactggagaggtgggaggaactccttgtacacaccctgagctcttgccagttctatcctctttgcccaactgcctctaagctaa

SEQ ID NO: 91877 - DNA, 366 bp, Glycine max
  Clone ID: PAT_MRT3847_5397C.1
cgactctctcgaagttagtttaggtttagggttaagttttcttttccttcaatcttgcaaattcttctccgcgcgatgcctcccgggcctctctgaaatccccatgacgtgaacgccccgatgcacgtgccaaatcgccgccgttcgtgttgcagtttagccccaattttcccacggttgatctgtgtcaaacttcttttcgaacaccacacgtgttctctgaaaacggagctagtcctaaaggcgtaaatcgaaacgcggtcgtttttcaccttggggcgagggttcttcttttgttcctccgaaaacagccatcacataactccctcaattaaggggttatttgggtaatttaaggttggtttg

SEQ ID NO: 91878 - DNA, 403 bp, Glycine max
  Clone ID: PAT_MRT3847_53980C.1
cccacgcgtccgtgtttgtcagctctttcttgcttccatagttcatggggtgtgttcaagtcatcacaggtcttctctttgcattggctcttgcaaaaattgacccctcaacatgccaaatggtgcagggcagagtcttctgcgttgactgcactcacaactatgacttatctggtttgtgccaactctaatgcattatatatctactagctttaattaaatttaaataaatgttcattctatccattactctattcgttagccaactaccatctgtgtgtaattttcgttgtgtactagtaacgaagtttgataaacctagtacttcatatgtaaactatttaaatctctcaccactaagcagactctgataagttaatctgtgtgtatatgtattctaagc

SEQ ID NO: 91879 - DNA, 434 bp, Glycine max
  unsure (1)..(434): unsure at all n locations
  Clone ID: PAT_MRT3847_53981C.1
tagatttttttaccttttaaaaatgctatgtaaaatgttgtcaatttgcatgtaagaatatagcttattcttaaatgatctccttcacccatcagattttcactttcctaaagtgagggatttactttaaggaataaagttacttattgatagttgttgataagaaaaaaaaaaaaaaaaaaaaaaaaaaaaaaaaaaaaaaaaaaaagggngnccaaaaggctggggacctactagacccggtatttaacccgggactgagtcctgcaccggtaccagcttgccctcaagtgagccctataagagctcggcttacacctggccatagcctgtgccctatgtgaaatcctgatcgaatcacaattccactcacaataccacccagaatcttaaccggtaacgcctggggtgcctcctgagggacctaacgaaca

SEQ ID NO: 91880 - DNA, 441 bp, Glycine max
  Clone ID: PAT_MRT3847_53982C.1
gtccgtcgttttgctcaatacaaatggcttgcaacaagaggagtcaatgaagaagccatacttctttcactacctttggatcttcgtcgagaaattcaacatcacttgtgtctttctcttgtgcgccgtgtacccttcttctcacaaatggatgatcaacttcttgatgctatatgtgaacggcttgcgtcatcactgagcaccgaaggaacctacctatttcgagagggtgatccagtggatgaaatgttgtttatcattagaggtcaattggagagctccacaaccaacggaggaaggtctggattcttcaattccatctcactccggcctggtgacttttgtggggaggaattgttgacatgggccttaatgccaaactcaaacctcaacctaccttcttctacacgcacagtcaaagcacttactgaagttgaagct

SEQ ID NO: 91881 - DNA, 804 bp, Glycine max
  Clone ID: PAT_MRT3847_53983C.1
cccacgcgtccgtacggctgcgagaagacgacagaaggggacgaaaaagaaaaacaacgttttcttcttctgctatctatctatctagggctcaattccgattccgattccgattcatactcataaccctttcaatgctttattgaactaacgaggttttcttcacgcaccttgttttctctgcattgtttcgaattccatggaggagtcttcgtacaccggtcttcccactagccacttgctcggttcagttcctgctgtcataactgaagaaaataatgccacgaaacatgtggccaccggtgcaaatatgcaaacattccctcccaacaatggaggagacagaggaccaggacatcaaactcttggcagtcctactgaagcttttgaacaacagccagcaaacaactggaggggaatctttagcatgtcatcatattcagagtatttcaatgtagacacagatgttgtcttaatcagattgataagttccttgaatccagttgctgcagactttttcagcaagatagatgctaaccctgatttatatgggcttatatggatctcaacaacattggtttttgtgcttgcctcacttggaaatctggccacgttccttatgcaaaaacatgcagataacagtacctcttggagctttgatgtcagctatgtgaatgtggctgcatgctctatctatggctatgcaattgtggttccattggcatactacttcttccttcagtatatgggttcaaatgctagccttataaggtttggggcttgtgggggtattccctcaccatt

SEQ ID NO: 91882 - DNA, 463 bp, Glycine max
  Clone ID: PAT_MRT3847_53984C.1
cacgcgtccgatacaagcacgcctcataaccatggacagaggagactctccttctgaggcgggtgtggtagcgttcatgacgcttccacactaaacgcgcccttgatgtgactagctccttcttcaaacacaaacctgactccgaggctggatacgattatacctaacctaaaggcgagcatggacaccacaaagagcatttatccccaaccgataactctaatgggataaacggtcgatcaactcggcacttccagccagagctgccatggtctatatgtgtaccgacctgcctaccacgttatcgacacctccaccgacgggagagccagtacgggaactactccatgctactccgagactcatccgacgctcgctactaatatgcatctgtggctcggattaaagacggcttctatacacggaaaaccagctacggttgatcgaatctattccatgcgag

SEQ ID NO: 91883 - DNA, 337 bp, Glycine max
  Clone ID: PAT_MRT3847_53985C.1
aaaatgcaagaaattttaaacaaaaatttcaattgattaaaattaaggaattctaaattctaactaaaaggaaagaatttgaaaattcttgttattctcgttcgctctttcctctttcctgggacctttcctcaaactcttgctcgactttttttcactttttcgctcgaccctcacattcactattactttcacaattccgttgctctctggttcggtaatttcttatctttggttttttttccttctctaatctatgattaacatggctcttcctcttcgcagatcgatccggggccgacagtggtgtccagatctctcgtagatcttgcaacct

SEQ ID NO: 91884 - DNA, 319 bp, Glycine max
  Clone ID: PAT_MRT3847_53986C.1
gacagacgtagaaaatccaattaagattgaccatggattattcattgacgaactcatggctgctatctccatcattaccttcagcttgcactactactccttagatggctaaaggcggaagtggagctcttggtgcagagctcactacactcaacactgctgctgacatatgaagaaccaatcgacccaccactcaccgttgaacacacccagctcttaatcgatggacaattcggtgatgctgatactggcataacttttccacagttggaccccaagacaggcgatgtgattacccatgttgctgacgatgaccatg

SEQ ID NO: 91885 - DNA, 258 bp, Glycine max
  Clone ID: PAT_MRT3847_53987C.1
gggttttcccacgcgtggtgactcccgcgcgaagacgacagaggggggggggcaattttaaaagattttccgttttttccccgacaaaggagaacatacgtgtgcgttcacggcgtacgaagtcacccgcgtaaaacggacgcgccagagcacagcaatgaccgttctgaggacccgcgggccttacagaggccaatcgctgaggcgcagatacgcatttacacagatgcccctcatacttagtaggggcgaacacat

SEQ ID NO: 91886 - DNA, 302 bp, Glycine max
  Clone ID: PAT_MRT3847_53988C.1
ttttatttatagtggcttttttacatatttgtgggtttttattcatggggatcatcggacgcttaactgatatactttttaagtgctgctgatgaccaactgttacacgaggaaacaaataggatttttcggctcctatgtggaaaggtaacaggccgagaggatgccagaattgacgtacctttattcagaggaactccatcaggaaaacaatgcaatcttttgtgtacattattccaccaggtcctatcttatgaaaagcaaaatatctcgtgtgggatttaaaacctttctctttaggg

SEQ ID NO: 91887 - DNA, 608 bp, Glycine max
  unsure (1)..(608): unsure at all n locations
  Clone ID: PAT_MRT3847_53989C.1
ggcaccctaatctgataaagtgccaaagggaaaggactagaaggtttagacaatgggcctttacttctttgggccatgttttgcattttctcaagaccaaaagggttaaagacatcaatgaagaggacataaagtaccttcatggcttgtggaaggaacttgtgaagtcctcagggtttgacctggcttggctggagccatatgttcaattagcattgggttcgagggcatatatggaaagagcaaaccaattgaagaagctgaaggacaaggtggttgctttggagattaagatgaagcggctcaggggggaacttgctgctgctgaaggagagtttgaagtggcaaggagaggcttgtctgaagtaagaagaggcttcaatgagatggatttaaatgctgcaattggttatgctatgttctgatcatccaattattttgatgtatggtcctcaactagttttggtgaaaggtcatgcacatagttntcatttaattcttgacaaattatgctgaaacagtagttaaaatttttttgttaagatagaattaaatgagatgtacattaaattgtctaattgttatataggttngtaactttgtaaatt

SEQ ID NO: 91888 - DNA, 710 bp, Glycine max
  unsure (1)..(710): unsure at all n locations
  Clone ID: PAT_MRT3847_5398C.1
tacggctgcgagaagacgacagaagggggcaccaactcaaaatattcacgactctctcgaagttagtttaggtttagggttaagttttcttttccttcaatcttgcaagaaattcttctccgcacgatgcctcccgggcctctctgaaatccccatgacgtgaacgccccgatgcacgtgccaaatcgccgccgttcgtgttgcagtttagccccaattttcccacggttgatctgtgtcaaagtaacggcgaaattcctctttttcaatttctctctcttagtttcgatttggtgttgaatggatgcttgctgaattcgccttgctataccttcagcttcttttcgaacaccacacgtgttctctgaaaacggagctagtcctaaaggcgtaaatcgaaacgcggtcgtttttcaccttggggcgagggttcttcttttgttcctccgaaaacagccatcacataactccctcaattaagggtttatttgtttattttatgtttgttttggaatttctcggcgatgatataccttatccgcgcttctgagttttctcgatgaagcacaattggttaaaatatggttgaatttcttggtatgagccatgttttgtgaaatagaatgtttagttttaattgttttcaattttcacaattgcctanatactacgtgaggttgtctaanannnnnnnnnnnnnnnnnnnnnac

SEQ ID NO: 91889 - DNA, 569 bp, Glycine max
  Clone ID: PAT_MRT3847_53990C.1
aaggcgaccggaaaaaaaaaccccccaaaaaaacttggggataaaaaaaaacggcccttttaccccgggcttttttttaaaaaaaaacagtttattccacagggaaaaacccccaaacaacatttcgacccttttggaaaaaagggggcaattcccaaaaacaaaaaaacccccaggctttttaaaatggggggggaaaaaaaaaaaattaaaaaagccaaccccagcgggggtgaaaaaaacaaaaaagggtgggggcggggaaccacccggtggaaaccctaatgggattcttcgaggtcggggaaaaacccatcccaaacccatggggcccccccggggccgaaaaaaacgccgggccccggtttctccgggggggggggaaaccccttccccggattcggggttttaaccgcgggtttggggtggaacggggggggggcgggttaatgccggggtcgggcaaccccggccctgccaaagggtgggaaaaaaaaggggagggttccggggagggggggtttggggggggggggaagttaaaaagggggaaaccttttgggggaaaa

SEQ ID NO: 91890 - DNA, 320 bp, Glycine max
  Clone ID: PAT_MRT3847_53991C.1
ggggtcatcattgttatattcaccaccagagcctctcttcaagaagagcagaacccagggacaacaaatgaatttgtcaccacttaaacggttcattatcggaattgttggcacctctccttaattaattaataccctttcacaaaccaaaaaaaaaaagtcttaatatttatttactgtggtaattaatctttccatgcatgctgctgaactatagtgccttcccctctctatgggtatctcttcatttccaacaacgtgccacattcatttaacatatcttgaagaggcaaggtggaggttcaggaatgagtggtcta

SEQ ID NO: 91891 - DNA, 529 bp, Glycine max
  Clone ID: PAT_MRT3847_53992C.1
ttctattaaaaaattcttctaattgattattttattacaatttctcttctaaacaatattttttctatacataaaacttgaatatataatataaaattaaaatgcaaagccaaaagttatatgttaatataaacattttttattattatgtcacatcatccattttcatacattcatacctttagttgttctcaattttttcattctcactctaacattacactagaatagaatttcgttttttataagtactatgtatacattaattgtatattgaaatcacataacaattatttaattttcttctcttttattacttcttttgtgttaaaacgacatgaacttagcttcttttgagtttttatctagaagatgctaaagttaatgattttatagtaattttggttgcatttttttttttgtagaaatataatagagatatgaaagtggattgaagtactgaatggtcgtgctcaacgtgaaatcctcgcttaatgcataaaggaggttttgattggccatcgaatga

SEQ ID NO: 91892 - DNA, 777 bp, Glycine max
  Clone ID: PAT_MRT3847_53993C.1
ggagaagacgaaactagcgagggcacttctccaatctcaacaactttcgtgtagtgcactgttttgctatagtaacccattaattaaaccgacctacgtagtagccatgaagagaggcagagaagagagtaagttagacatggctaattgcttgatgctattgacgaaagttggagagagtgaaaccaattacccaatatcaaagggtagtgatattggtgatttcaagtgcaagacttgcaatagaaggttctcttcttttcaagcccttggtggccatagagcaagccacaaaaaaccaaagctcatggtcacagatctttcgtgccatcaagagttaccgaacccaaccatgaaacaacaacctaggatgcacccgtgtccgatttgtgggcttgagtttgctattggacaagctttgggagggcacatgagaaagcatagaactgctattaatgatggcttgttgtgtggtaaaccttcttcttcgttgtccatcttgaaggaatcatcgaaagatggtgatcaaaagttgaatttgcgcttggacttgaacttgacgccattggaggaggatgatcttaagctcaacctaaggacgcccgtgctcaattgtttcatttgattggaaattaattttgtactaaaccagattctttttttcttattaatatagttaatgtgtatttttcgtaatttattattatacgtacgacctataggtagctcattttgtagtcatattgtgttcataatacgaaacttcttagttcttat

SEQ ID NO: 91893 - DNA, 1462 bp, Glycine max
  unsure (1)..(1462): unsure at all n locations
  Clone ID: PAT_MRT3847_53994C.1
acggcccacgcgtccgtacggctgcgagaagacgacagaaggggtctccgaactcacaaatctgcaaagtttgggtgaacaactccaacggcatttaattattcattcgcagattttcgtcgttcgaaccctagaatgccgaagcgtgatagaaccaagaaaaccgcgaaagcaaccgaatcagtacccgaacctcaacctcaactgcagccaccacaattcatcgacctcgaaatccaagcgatggagcgacaaattggcgcgatcagggcggttcgcgacgtggagatcgagcacctgctcacggagctgcggttcctgcgctcgcggttcagcagcgaagagctccggaagcccgtgctgcaggttttcgaagaaaccctaccgaatctcgctgtcgtgaacgacgagcgcagcaagaagcttgaagtgaaatggagagagacggagggttgtaacgatggtgtggatttggacgcttctttgctccagagggtgtccatggcttccatccctcgcttccctgggtttgaattttccaccacttgaagggagaattgagctcttattggggctgatggaccatgcattgcaggggacattcgcttgggggggacccatctgacactcagactctagcagtgcaagaaggtcttcagactcccggtgtgactagtcagaggttgtcagttgggatgacacccaaaacacttaggctgcccaaacctggcgagatgcttctctctgtgcatggatcacctctaggtgtttacaaggataataacatggaagccatacatgagtcagaggagggttgaatgccatctaaatccattgtcctccaagaagctctacaaatctttatgtgcaccgaacaataccgtttgtcatctctctatatgagggttacttgaaaattaatggccccttgttattatttatttttcacttagcattgaagacttctagatttgcccatgacagccaattagatgattttggccttcctacttctgcaaaatttgaaatggatgatgcaggaagtgtcctacagatttgtgtaactgctgtagtattttgtatatttttctaattgtgtggttaatttgcattacaagaaaatggcaaggttgtaaaaacacttttgtactgtaactttataatcaagcaataagatttattgagattatccttttagccgcaaaaaaaaaaaaaaaaaaaaaaaaaaaaaaaaaaaaaaaaaaaaaaattgtctttgatttctggattccacaaaatttggaatgggacgcacctggaagagtcttcccccttccagggttgcctcantactgtagcacatttgtctatgtagggctgattcgcattaggagaacgataaggttgtaaacactcttcgcactgtaattgtataatgataaccaagctgtacgctttaaatttggcttcttggagttttccc

SEQ ID NO: 91894 - DNA, 832 bp, Glycine max
  Clone ID: PAT_MRT3847_53995C.1
ggttcctttcgtgtgtgcacaggttgagatggcgttgggaaggtttgagaatgctgttgcggctgcagaaaaggctagcatgttagattacggtaatgttgaagttggtaggattgtaaatgtcgtgaaaatggtggcaagagctcgttcgaggggcaatgaacttttcagctctggcatgttctctgaagcttgttctgcttatggggagggcctcaagtatgacaactccaaccatgttctatattgcaatagggcaatttgttggtctaaacttggactgtgggaacaatcggttcaagactgcagccaagctcttaacattcaaccaaattacaccaaggcccttttccgcagggctgcatcaaacacaaagctgcatggtcggcttgaaagatggtccgaagttgttaaagattaccaggccttaaaacgtgaactccctaacgacaatgaagttgccgagtctcttcgtcaggctcaactagcattagaaaaatctcgacaaatggtgtatggtactacgtttggagttgaagttcaacatatctgttcatttcccaacttcaaggctgcattagcctctgcaggtatatcggtagtatacttcaaagaggcatcaaatgaactatgtgaggaattatctccattcataaatacattgtgtgttagatatccctcagttaaatttatcaaggtggacgtggaggagtgtctagcaatagcaaaagcagaaagcataagaagtgttccaaccttcaaaatttataaaaatggagagaaggtaaaggacatgatccggccaacacatcagttattagaggactcagta

SEQ ID NO: 91895 - DNA, 490 bp, Glycine max
  Clone ID: PAT_MRT3847_53996C.1
caaatatatcttatttgagtggattttgttctagtttactactgaaagatgggtttgaagacgaagataacattacttattattccattagccatgctcctttttgtttcctcagaggtgtcagccagggattttcaagagggaaacgttgttcaagaggctaataatgggggtgatgccaaactatttggcggtggtagcttcttccctggtggtggcattggtggtggtgctggatacttccctggtggtggcattggtggtggtggtggtggtggattcttccctggtggtggcattggtggtggtggattcctccctggtcgtggattcttcaacccaaggttttgcttcagaggatgttgttttgggaatccattcagaggttgccttaggtgttgccctatattctgaagataagacccacaaaatgagactgtagaatttctacgtatttagtaatattatatatttcatcaataaaatctca

SEQ ID NO: 91896 - DNA, 252 bp, Glycine max
  Clone ID: PAT_MRT3847_53997C.1
catcttctcgccggctaaagttattacaggcagcgggaataaggagagctggccgtgtcggatcgccgcaacccacaggattccaaccttgaggtttctggagcggttggtgtcccatccaagctgcaagcatcatttgccatctctcttctttcttctagcgagaaccacaaccacccattggtacactacatataacgtaaaaagttcgataacgaatttgaccgttggtctgcaatgccgtgtaagaaa

SEQ ID NO: 91897 - DNA, 430 bp, Glycine max
  Clone ID: PAT_MRT3847_53998C.1
caaaagattgaatatttggccctggaccaaccattttggaagtcaagggccttccaccaaatgattgggaaggtcaaaccccacccactattggctaacttcaaggggtttcaactaaaatgggcccaccagccacactttgatgcgagcccttgagggtggaacaatattgatcaattgctttgatggttttgatgcttcaattccctttggaaggtacaaaatgagcggcattggcagggagaaaggtatctacaggctaacaattaccttgaagtgaaacttgggtttcaccagtgaagaacctgcatggtgtgattgtgaatgctcaactgtataccgaatctacgtgctatcattttttcgtgagcatggctgcataatatgtgtgtctaaataaactgatagtactgacatatacagtgattat

SEQ ID NO: 91898 - DNA, 191 bp, Glycine max
  Clone ID: PAT_MRT3847_53999C.1
caggttaaactaatatctgacaatcttaaagatgtaaaaaagggagaactacttgttgcttgccgcaaaccagtttacattgtatacaccgtacttgacggtggcagcatatctatactgcggcaaggactacctgaagccctcgctttgtccgatgggatacccgacagaacctacgttatggacgattt

SEQ ID NO: 91899 - DNA, 532 bp, Glycine max
  Clone ID: PAT_MRT3847_5399C.1
agaaacctcatactctataagatacattttatgattaactaatttagctgaaaagcggagctagaagctttttttaatatacttcctaagggcgaaccaatgaaaaaattcaaactacataaaggagaaaaaaggcaaaggtttcataaaatcaggtttcatgtgttataggaacatctgtgaccacaagtacaccagcaggaggacaatgaacttgacagaactaaccctaagaccattctacccaccacagtttcactagctaccccctctattagccgtacgctttttcgttggagactttacactgtttgggttcacactcttaaatggtgctttcttagcaggcgctactttattcgatggcgcattcgaagcaagagcaggtttcttccctggagaagggcgtgttgactgccttgaagccatggcggggttcgcttagggatttgtcggggaattggcagcaccagcctttgttttagcagcggacttggtctagggcttggaagctgactaaggccctttgggc

SEQ ID NO: 91900 - DNA, 778 bp, Glycine max
  Clone ID: PAT_MRT3847_539C.1
tcgggatgggtttctgtgctgccacacgtggactccattttggtcacttttggtgacattgctcaggtgtggagcaatggcaagttaaagaaagtgagaggtagaccaatggctacagtgggagatgaaaatggttcgcgctgcataacaatgtcattgctgataactcttcctacagatagcagagtggctccactccttcccaaggtaacatgcaacaaggaccaaaaggaagaagaaattgaaggagaagaagaagaaaacaatgatggtggtgatgaagaactagagaagagggtgttcaactcttttgactttgaggactatgcttggagagtttaccatgaacgcatccttttcaaagatccattggataggtaccgtgttgtttgatcttctcagccatctatgttttgtgtgagagattcattaatttgtcatgctagtgttagtctagtaaggtttgaattttggatgagtgaaagtgaaagggaaaaatgagaggaccacaataatgagatgtatatcatatgctccatttatttattggattgattttgaagttagagaagtgtcacttagacacttattttttactttagctttcaatcaggaattcagagtttgtgtcagttactctagggactggggtccaactctgccatgccgatattgacgagacagtacagtggcttcaattatatatctttcaatgaagtatcattaaatattgaatataaaaaaaaaaaaaaaaaccaccagcggccgctctacaagc

SEQ ID NO: 91901 - DNA, 460 bp, Glycine max
  Clone ID: PAT_MRT3847_53C.1
ccaatgaaggtttcccgtcatcactgtatgacgtcctccgtctttgggggggggggggggggggggggggggggggggggggggggaaagcaagcaagaaacgcgtgatgccggagaaagaacggaaaagatgggataaaagctttgggaatacccattagagacaacccatatagaagtgatatgaaagaaggataggaatatcgctgctatggctaaccaaataccagcacgatgtaaattaaaggcatagcataaatagggttaaatgacggtggtgggttaggaaacgccaaccatgatcctggatgatgacagaatgggcggtgagcccgggccgtgccatttggtttaccaggacaaaactaacagtggacgatagttaggagccagtgaatgtaggggacctgggagagatgagtatatgaggggattgatcacgtcgggacgaggtattggg

SEQ ID NO: 91902 - DNA, 664 bp, Glycine max
  Clone ID: PAT_MRT3847_54000C.1
ggcaaagatattggcaagctgttcactatcattcttatcatgtaaaagtaaaatcatggaaactatcaaatgacaaattgacaagaaacaagccgcaatcaagtaacaaagggctaaatgccctgtcattcccaacactcaatgtgcaacaatacaatcataatcctaatagcctaattggggattttaccaataaattttttattctctcttctctctttttattcataaatcacataagagtagtctgtcccagaacacagtcatggacttttcatatccatctcactcttgcatgcggatgatacacctaatggactgtcccttcagcattaaatcaaaagctttgttgatctctgagaatggaactgtgtgagtgatgaatttgtccacttctagctccccactcatgtacttctcgacaacagatggaagatcggtgcgtggtttgtagttgccataaaaggtgcccttaagagtcctctcgttcaggaaattaataggagcagttttgaatgcatcatctttactaggcacaccaacaagtacagcaagaccccaaccatcgtggacgcattcgaatgctgaaaccatgggtttggatgctgccagtacattaaacagcccgatccccacctccattggtcatttcagcaattacctg

SEQ ID NO: 91903 - DNA, 270 bp, Glycine max
  unsure (1)..(270): unsure at all n locations
  Clone ID: PAT_MRT3847_54001C.1
gcactcangggnaaaacaanggaaggggaacggggggtattataaaaaggaccgtaaccatgaccacgggggggatcgtgctcaaggacacggccctggccgggaactccgacctagacaggacgaaaaacaaggacgacaacggccaggcggacaagggcgacacgttgcgcaccgaggaggagctgatgaccatggacgaggagaggctcgtgaagcacgggaaggagaacaacgcgcacggggagaaggagaagcgcttccagatct

SEQ ID NO: 91904 - DNA, 991 bp, Glycine max
  Clone ID: PAT_MRT3847_54002C.1
tcccaaagaaatggagaaaggtggagtttgtactccaaatgttgtcacttatacatctgtcattcaaagtttctgtaagagaggccagtggaaggaagcattggatattttggataggatgaaagcttttgggtgccacgcaaatcatgttactgtttttactttggttgaaagcctctgtgccgatggtcatgtggaacaaggttatggattatttgataaatttgtggtggaacattgtgtttcctatggtgatttctacagttcacttgtgatttctttgataaggattaaaaagctggaggaagcagagaagctcttcaaggaaatgcttgctggtgatgtaagactgggtactttggcatctagcctcttgctaaaggagctttgtatgaaggaccggatattggatggattctacttgcttgaagcaattgagaataagggatgcttgtctttcattgactctgatatttattctattcttttaattgggctttgtcaaagaagccgcctcaaggaggccacaaagctggccaagataatgcttaagaaatcagttctgctacaacctccacacaaagatgctgcaattgatatcttaataaagtctggagaaaaagatcttgtgaaccagttgaccggcatacataagaaggggctttgatgataaaatgctttatgaaagaggtcacatctattgtttatccactgcgtttgttcacaagtttgcattgtataacagcaacagttgggattggtttctgttacgcaggctgatacttgcttcatttcttccccttgtaggagacacattattcttgagaacagtatgctaacctctatttgttttgctaaacccattttccttatagattcagcttaatattgataaattgttaaacccattttcctaatacaaattaatgaaacttctgttctttgatataatgagtcgaataaaatggttaaaatatttttccctttttat

SEQ ID NO: 91905 - DNA, 575 bp, Glycine max
  unsure (1)..(575): unsure at all n locations
  Clone ID: PAT_MRT3847_54003C.1
gcatgccaccgcccgtaccgtaagnccctcggaactctcggctcgagaagaaatttatataatattttctatgagtgattctaaatttataatttgttgaaacatccttcaaaactgaataattactcactactcatctttttgctaattgataactgcacactccccttggctttcttccccctcttcttcctgcttctccttcttgcccccacccctttctattccggcttctcctttacgcacacgagaaacctttgttgtggacaattgcatcgaagtgagaagattattgtggtgaacttagattattatggtatagtgtctaacaaaagtaaaaatacaatactattcctattgccttcgccatgcccctcatcgtggatctcttggactgttcctccctctccattctcgctgtccctaatgcctaccttgcagccaacgaccacctctccccgattgctcttgccaacgtgcttcgctaccaatcctcctagttcttctccattctcgccgatgactcgccgatagtaagtcatcttcttaaactgctttgcggtgggctcttgggg

SEQ ID NO: 91906 - DNA, 367 bp, Glycine max
  Clone ID: PAT_MRT3847_54004C.1
aaaacccggcgggaccaacgcgtccgaaaaaaaacaatggcatcctcattttattttgaaattgccttaatgcaacccaccaaggtgttcatggccactcgcatcctaaaatatacacaaagcatccttaaggctaatggcttggaacccgctgctggtaaactcatttgctccgttaagtccgatctcaaagattatgctcaaaaatgcgtcaacgccaccaaaattgcgtgactcgcccttgacagctgatctctcgttgccactggagcgagtgcataatgtgctgcacagaggctaacctgcgacgaaaaccagagcaagacatactaggaagcgaatggaactggatctgctgatcactgcc

SEQ ID NO: 91907 - DNA, 257 bp, Glycine max
  Clone ID: PAT_MRT3847_54005C.1
gttacaaatgattaatttacctcaggaagggctcacctaactttgttgcgggaacccacatgatggttaattataatacacaattgctatgggatttttccaacacatatataatccaactatcctgttgggggttggtaaaaataagaccccaatagtatagaatgactttcccggcatgcaaatttaaaagatagcatctccccccacaatggtttgaaaatgaaaataattaagctttcctaatttactagagg

SEQ ID NO: 91908 - DNA, 312 bp, Glycine max
  unsure (1)..(312): unsure at all n locations
  Clone ID: PAT_MRT3847_54006C.1
gtcactatngcggccggggcaanngaaggaaagggaggcatagttagaagaaacgccccttaaaccggcgaagaggaggaagaagaggaggcaccgaagctagcgacaagagcaaggaaaaaggaggagacggcggcagacgggcgaggcgctgagacgagccaaggggaacacagcagcggacaaagagaacgaagagaaagagcaacacaaagggacgggcggcaaaacctaaggagagggagcctggaacaagaaaaggagagcggcaaaatgcaagcgaagagaaagcaaaaggggggaagcgcaaag

SEQ ID NO: 91909 - DNA, 236 bp, Glycine max
  Clone ID: PAT_MRT3847_54007C.1
ctggtgcaaagaatgctattctcatgaatatgccaaatgcttttctttcaatgtggagatattttggtggagatcctcgctttggaggttctaaaatgacttctccctaccttaaaatgtccggctttttcttcatagcatttgggaatttggcttgttaccccctcaaatttgggggtttttcccacaagcttgtgccaattggggaggatcaaggaaaaagtgtatttgaaatt

SEQ ID NO: 91910 - DNA, 206 bp, Glycine max
  unsure (1)..(206): unsure at all n locations
  Clone ID: PAT_MRT3847_54008C.1
gaaagacttttgctgctgctgaaacgtaatcgatcttatatctacacactaccatagttactgatgcatctntcgcataccagtcacgtccactgcacccgatgttcacaccacatacaagcttgattcagctaaacctgacatctccattcaagaagaatacttcaaatgccactaatactcctcaggatactagcttacccaat

SEQ ID NO: 91911 - DNA, 502 bp, Glycine max
  Clone ID: PAT_MRT3847_54009C.1
ttcttcttctggttcgcatactaccccgtttcgaaaggcaaaaacgacaacaacgaatgcgtttcccacgcgtccggagttatgaaatttaggttagattggactaatacttggacctcctccattcccggcttctccgccacctcctccaagcgctgctgttcctccgagggaaagcagcctcactacgacttgtacacgcgcctcctctgcgcgtacctacgcgcttttgttccctcttatgatcttatcgcgcaccagccctaccggacttcgattctccactacggctccggctacgacggttctgttgcggcgcgggccgagttcgtggtcaacgcgcttatccacttctggctcgtggacaacgatttctcgccgctgccggcgagtgtttgccggagcctcggggtttcgtttgcggtgggggagacgcctcccccgcccgggctcggggaggtggtgaggctgtttgtgaggtactagaatttgagcaccgtcg

SEQ ID NO: 91912 - DNA, 2247 bp, Glycine max
  Clone ID: PAT_MRT3847_5400C.1
cttttagcttctatcattcatcatcagcatcttcttattattcttctgcttctcacacagatcttcacttcacctttgagtttctcacccaacacctatacataatacgcattggtaaccagtcatcaaagcggaatatgaaggtttcttgtgacggtgcataggttgataaagttctggtggatctgagtggattggttgtcattttcaaatattttcagtaaaggaacatcgttgaaagtggaaggggtttttcattacttgaagtttgatttcagcctaccaaaatgggtattcagtgctccagactcatcccgtgctgtgtggattcacaagttaaggcctctgttattgaaactccagatgctgaaattgaggatagtagtgaggtcagtaactggcctacatttcgtgaatatacacttgagcaactcaagaatgctacatctggttttgctgttgagaacattgtatctgaacatggagagaaggctccaaatgttgtttataaaggaaagctggagaatcaaatgaggattgctgttaagcggtttaataggaatgcttggccagatgctcggcagtttttggaggaagcaagatcagttggtcagcttcgtaaccaaaggttggcaaatttgcttggttgttgctgcgaaggagaggagaggttgcttgtggcagaatatatgcccaatgaaacacttgcaaagcacctttttcattgggaaacacaacccatgaaatgggcaatgcgactaagagttgttctacatcttgcacaagctctagaatactgcacaagcaaagggcgtgctctctatcatgacctcaatgcatatagagttctttttgatgaggatggtaatcctaggctttcaagttttggtcttatgaaaaatagcagggatgggaaaagttatagcacaaatttggcatttacccctccagagtatcttagaactgggagagtgacaccagaaagtgtaatatatagctttggaacccttttgcttgaccttctcagtgggaagcatatccccccaagtcatgcccttgatgtgattcgtggaagaaatcttcagatgctgacagattcttgtttggaaggacaattttcagatgacgatggaactgagttagtacgcttggcatctagatgtttacagtatgaacctagagaacggcctaatccaaaatcattggtagttgctttggctcctcttcagaaggaaacagaggttccttcacatgtcttgatgggcatccagcatagtactacttttgcttcattatctccacttggtgaagcatgctcaagaaaagacttgactgccatacaagaagttctggaaagtattggctataaagatgacgaaggagtggcaaatgagttatcatttcacatgtggactgatcaaatgcaggacacattaaattgcaagaaaaagggagatgttgctttccggcagaaagattttagactggcaattgagtgctactcgcagttcatagatgctggaacaatggtttctccaacagtctatgcacggcgcagtttgtgttatctcataagtgacatgcctcaggaatctctgaacgatgcaatacaggcacaaatcgtttccccggtatggcacatagcatcttatcttcaatctgttgccctcacaggacttgggatggagaatgaagctcaggcagcactaaaagagggcacaacaatggaatccaagcggaatgcaactcccaagcaaaaatgaaaacattgtacagagacatattcttgctgattctgttctggctgatgactacccccaaaacattgattataaaaattcatcttttggataccaatagatccactctctcaaaaaattgcatgtgtttgaagatttcttcaagaaacaagattggatgagtgtttgtaacaccccttccccctttttgttgggttggctagggtgttcattgagttcgatttgattgattgagcatgaatccaaacttaagcattttttttgttttaatttataaaaggttaatattgagaagagttaaaagctgttgttcacggctgtgtacttaatgttggagtgccgagcaatatttccttttttgtcgggtgcaaatcattgggtttaggacaccaaaatagtgttcatttcctaccgtccatgcttataaccctaaaatgttgtggactatgataatagtatcaatatgaaaattttcatgtctcaaaaa

SEQ ID NO: 91913 - DNA, 244 bp, Glycine max
  Clone ID: PAT_MRT3847_54010C.1
tatttttttttttttttttttttttttttttttttatctcttttttggggcccttataccttaaagacaagaaaaacacatgcccacaccaagaaaatcccaaagccaaaaggacacacgcccaccccacaaaatcctgctctcatgtccaaagatgcaaaggaggacaaataaaggcccaccttgaaaatcaatatgggggaaccgagggaacaacctgtacaacataagcatggattccccc

SEQ ID NO: 91914 - DNA, 372 bp, Glycine max
  Clone ID: PAT_MRT3847_54012C.1
ctggagaccccactttatctccatagcggatcacacacaaaacaggatgatttagcccacaccattttcaaaactactacaccaaaaatcggaacagatccatgacggccacagagagcgatagccccctatacactcgctcagctacatggcgcctaaaaaccaccacccggctcaggagaccaaatacagagccgaaccatccaagcaacgcactctataccatcaaatcactgatggcccaacactcttgctagaaaaactacgactgcgctaccggagagtatcagtcacgagtgcatggttatgatgttggctctcataccggctggtgtggggggagtagctatggatcggctgacggtggaggaa

SEQ ID NO: 91915 - DNA, 471 bp, Glycine max
  Clone ID: PAT_MRT3847_54013C.1
gccgtagcagcctcaggaggagaataaggatgtctcacaggaagttcgagcacccaaggcacgggtcactgggatttctccccaggaagcgtgctgctcgtcacaggggaaaagtgaaggcattccccaaggatgacccatccaaggcacccaagctcactgcattcttgggttacaaggctggtatgactcacattgttagagaggtcgagaagccaggatcaagtgagaaccattactcttttgctaattgaagttgatgtatataatgctgtcaaccatgtgttttactatcttcttatttgataatcagtagcgggactgttactggtttgatttattttctcaatttttttaccgaactgtttcctagatttttaaatgtggaaatcatttatttatttgatatagaaaatttgtgatagcgttttcccacaaattattgagatttctagtattttgaattacaca

SEQ ID NO: 91916 - DNA, 378 bp, Glycine max
  Clone ID: PAT_MRT3847_54014C.1
acgctttgacgcgcgctaggggctgctgcggttgttgcattgatcacccaagagcctcttttttacggaaagaacggttatggaaatggatccgcttcttcatcatcatcatcatcatggatttcatgagctcttgctcttcctgccgcagcttacatgtgccaagatcaagaggcgcacgcgcctcaactggagcgcactctcattgccattaagcctgatacagagcaaaaaggcctgatttctgagattatatctcgccttgagcagaaagggtgcacgctcgtgggagataaagtagtgattcctaagaaggaatttgcccaaacgcactatcacgacctaaaagaaagaccctcctaccatgggctgtgtgat

SEQ ID NO: 91917 - DNA, 396 bp, Glycine max
  unsure (1)..(396): unsure at all n locations
  Clone ID: PAT_MRT3847_54015C.1
cccccancagacaaggcnnaagcataattttattctgttcgtaggccatattacaatggtgggtcgaaggagatgcgggggggtggaaaccgactgcctctaaacgcaaatggttttgatggaaaacatgggactggcgcggataggggtacaacttatgcttacctaccagaagcagcattgcttgcattgaaagatgcgattgggaaggaacgggaagggctgaaggaaatcagggggccagatccgaattataatggaatatggggttctggggctgggattgatgggtctcaactctctaaaaggtggccagtgggtgacatgggatttgaaaatggggaggagtacacactggcgcctgaaaactacatggttcgggattcaaaagtgcga

SEQ ID NO: 91918 - DNA, 492 bp, Glycine max
  Clone ID: PAT_MRT3847_54016C.1
ccgagcatgtgttctcgtattcagtgcagagtttcattcaaggagatgattggaatcatcatctcagttagtaggcaatcctagaagacttgatcattgagtgaggaacaggaggagtgatcatatcggtaagtggggattttttttacatccactttggaactgccaatgcaatgaagatgtcaaaagccattcggagaaattcaaatgccatgtcagttgtggtggcagatactgggagttgataatagatcctactcattttattgggtaggccctcgatagaaaagatttatattctttttgcctgatggctgataaagaatcttgaactgatgaagaaaaactattagattccacgaatctttcctttctatgtaacttggaaaaagggatatggaaggaaaacccattattcttgccaggaaaccttcattatgacagttattaatgaaaccacggttccctggcatagcaggaagcttgttacat

SEQ ID NO: 91919 - DNA, 213 bp, Glycine max
  Clone ID: PAT_MRT3847_54017C.1
atttagtatccttttcaatttcatcccattttttgtcatcacatgtgagatatatacatgtacaaatatttatatatatgatatgatatatcttactatttgtagctctaggaatctattcatagcagcaaaaagtaaacagaactgaacaactagtaatggaagatactagcttctttgtgatcttatcatcctttctgcttctcatagtta

SEQ ID NO: 91920 - DNA, 356 bp, Glycine max
  unsure (1)..(356): unsure at all n locations
  Clone ID: PAT_MRT3847_54018C.1
tacggctgcgagaagacgacagaagggcgcagctgcataccgaggcatttctttctcgctgtggctgtgcctacctaggcgtctaagaaatatgagcttgggcatgaccataaccggcnagatcatgaggctgggggtggtatggtatgacgccagattgttcatgaaaggcatttttccactcgaatgccggattgcgagctgaccaaccatgagtgatgctgacaaagctgatacttttgacaatcgtacgctctcatgataccacgttaaagaagagagttctcttcaccttgttcttatgtgacgaggaagcatgcccatcttctgtaaaacactctaccggcaggaccact

SEQ ID NO: 91921 - DNA, 578 bp, Glycine max
  Clone ID: PAT_MRT3847_54019C.1
gtttacataaacttgtgagagttttatatactaaattcgttgacttaactagtaaatttgtaagagttcactttatataaaaataataataaaatatttataaataacataccaattaaatatttcaacaacataataaaataaaatcataaatcataaattttataatacttaaataaccaaatatagtaatgcatcactactagataataatttgcatatgttatcgtagtggtagaacattttcatcaagggatgatgttgttagagaacaaaggattgatattattatacaattggagaacaacacactaaatggaaatatattaaacactaaccagataaaaaaaaatccaaaatgatttgtatttttgtctaatttttttaacttgttgacttgacaataaattcgagagtttatcgaatttacttaaagtttattgagtctatctaaaatgtactataacaaaaatttacacacaaatcaattcacaaaaagtaaataaattagtaaaagttagctaattaactcaaaagtttgataatcatatgaaaagtcacattagaaatgataagag

SEQ ID NO: 91922 - DNA, 1366 bp, Glycine max
  Clone ID: PAT_MRT3847_5401C.1
ggtaaaaatgtgattgatatcctaggcaaatagtaaaccgaaagaaatattcagggaaatcaggaaatgcctatcacctaggtttgaaattaaatatcaaggaattcacataagctaacaggtattttcactgctttgaatttgttctgataggttccttgacaaagctgcaatcctagatgagaactgctcaaaggaggaaaacagggaaaacccttggatagtttccacagtgactcaggttgaggaggttaaaatggtaatcaagctccttcctatttggtctacatgtatcctcttctggacaatctattctcaaatgaataccttcaccattgagcaagctacattcatgaatcgaaaagttgggtctctagttgtcccagcaggatctctatcagcttttctcatcattaccattctcctctttacttccctaaatgagaaactcactgtgcccttagctcggaaactgacccacaatgcccaagggctcacaagtctccagagggttggaattggactcgttttctccagtgttgccatggcagttgctgcaattgttgagaaagaaaggagggcgaatgcagtaaaaaataataccataagcgctttttggctggtccctcaattttttctggtgggtgctggggaagcatttgcctatgttggacaactagaatttttcattagggaggcaccagagagaatgaaatctatgagcactggacttttcctatctacactatcaatgggttattttgtcagtagcttattggtggcaattgtggacaaagcaagtaagaaaagatggctaaggagcaatctgaacaagggcaggttagattacttctattggttgctcgcagtgctaggactactgaatttcatactttttcttgtattagcaatgaggcatcagtacaaagttcagcacaacataaagcctaatgacgatgcagaaaaagagcttgtgagtgcaaatgatgtgaaagttggagttgatggaaaggaagaagcataagatatagtcttaaaatctcattttgtgtggcccaatatatagtgtgtaagaacaaaacattgtgctccaaatttgttaatttttgggtgttttgtcgacctcatttaacgaggacaattgtaatgtattattaagtatttacagatataaaaaaggtatagtccagtgtgcgcagtttccgtggcccaatatatagtgtgcaagaacgaaacattatgccccacatttgttaatttttgggtgtttcgtcgacctcatttaacgaggacaattgtgatgtactattaagtattgactggtataaaaacagacaaactacagtgagttgtttccaaaaaaaaa

SEQ ID NO: 91923 - DNA, 513 bp, Glycine max
  Clone ID: PAT_MRT3847_54020C.1
ggaaagacaacagcattcattgtttgtgtaaattcattttttcatattgattgaaaattatgttagaataggacaaaaatgaacttataccaagagagttttcaggcatgatgacataataaatttaaagtcgcaaattataaacgactttaaagttgtaaattataaaaaaaagattaattataattattttttattttaaaagaattatcaaatgaaatataaaatatatcaaaacaactttaatgtcgtaaattataaaaaaaaattaattacaattattatttcacctactttaaagtcacaagttataaaaaaattaattataattatttttaattttaaaataattaaacaataaaatataaaattataattaaaataactttaaattcatttgaaattaatttaaaaataaaaaatcacgattttaaagtcatgaaaaatttatgtctccatataaataattaaaaaaactaaagtcattattaatttttttatgatatcactaaa

SEQ ID NO: 91924 - DNA, 340 bp, Glycine max
  Clone ID: PAT_MRT3847_54021C.1
attccccccaagcccgagaaagaattccttcctccgccaccataacctgtccctgaggcttcgagtcactcatatagtgcactcattcacaacacacagcaatggctccttaccgccgaaacaccaacggctgttcaccgctcggcaatcaacagaatgaaataactctcttcttaaccaaatgcgattgccctgcggcctctgccactctctacacaaccaaccctaaccctaaccctaaccctaaccctagttccacccctgctactacttattctataaatcccaaacgctccaagccccttctttgtatcggggctttcactttttcaccctgcgc

SEQ ID NO: 91925 - DNA, 205 bp, Glycine max
  Clone ID: PAT_MRT3847_54022C.1
gccacgcgtgcggacctagattgcgagctgacagcccgttgcattgcatgctaaagaaagacagggatacagggagtaggcacgtgagatgatcagatcagatctacagagaagcttgaatggctgtacagaccatatgtaccagatgcactactctagtgtgtcaaaggctcaatgtagaactcggtgggttccatacctagga

SEQ ID NO: 91926 - DNA, 272 bp, Glycine max
  unsure (1)..(272): unsure at all n locations
  Clone ID: PAT_MRT3847_54024C.1
ctatctagcactcgagatatactccagagatcactggagccaaagtgtccgtagcctgacgctgaatgtccgcaagatcttctctgatcgggattctgcattttttgagaggangcgatcagaggttcagtgacgaggagctcaagcaggaggaatctgattcgaagcgagaagccctatggatgcgcttggaggaaatggccgcctcaaaacctcgcgaaaacagtcccttaggcgcaccgaatggcaaacccagccaagctgctggctag

SEQ ID NO: 91927 - DNA, 252 bp, Glycine max
  Clone ID: PAT_MRT3847_54025C.1
ggttcaacgacgatggggcatataaagcagagcatagttggagtgaatggcataagaatgcatgttgcagagaaacgacagggtccagtggtgttgttcctccacggcttccctgaggctctggtacgcatggcgcgaccagtatctctctcctcagctccctcggatatcgcgcagtcgctccagatctccatggctactgtgacaccgaagcaccaacttcaatcatcagctacaactgcttccacataa

SEQ ID NO: 91928 - DNA, 384 bp, Glycine max
  Clone ID: PAT_MRT3847_54026C.1
cttaaataactgaatttagacctttgttcatatatcattactatttaaagttcatggttttatctatttcaatttgatatttatgctattcttatatttatattgttgactggttatatatcatgattctcggttgactggttgcagcacctctagactcatgtatttaatagctctaggatgtattggaatctaatgtaccttaatccaatatgcgctttctataaaaatcatggataggcctagaaagtgttacacaaatttccaatttgaatttaatggggtattttcttttgcaagcgcaagatatttgttttgtttgtctctgtttttcttcttgttgtgttttggaagctatattcatgtagcatttgtagaaggttg

SEQ ID NO: 91929 - DNA, 220 bp, Glycine max
  Clone ID: PAT_MRT3847_54027C.1
tactgatgtcactctctgtcttgatcgatgtgtgttattgggaggtggtcagagatgcgtcatgctgttacaactactgattcatcgtgctggcagagtgtgaagccgaaattcttagacagtagttcttgaagaagaaattgggggtgtgaaatgccattttggaccaattaatgcattggcttttgaccctgatggaaaaagtttttcaagtggaggg

SEQ ID NO: 91930 - DNA, 440 bp, Glycine max
  Clone ID: PAT_MRT3847_54028C.1
cgcaaacacttgttccggtgtccctctctctttcgcttcatcttcaacattaggtcttctctgactctgtggttgtcactgttcaacgtctttggatttattgccgggccttgaggtaatcagcttaccaacatgggaacacaaccccagcaaacatttcgggaggaagaggaggaggagatgcaaggccatggaactacgatgtcaggtcaatcaatgtcaacaagcagaagtgtcgggtctccatccagccggagtgagcagacaatggcaacacctgctagtgatagcacttttcttaggttaaaccatcttgacatacatggtgatgatgctggatcacagggcaccgttgccaagaagaaaaagaggggccaacgggctgttggaagtgataagagtggaagaggtctccgtcaattcagtatgaaagtgtgtga

SEQ ID NO: 91931 - DNA, 738 bp, Glycine max
  Clone ID: PAT_MRT3847_54029C.1
cggctcgagtacggctgcgagaagacgacagaagggggtacacgcaaacacttgttccggtggtccctctctctttcgcttcatcttcaacattaggtcttctctgactctgtagtcgtcactgctcaacgtctttgagagttcatactgagtagtttggctttacgtcaactcctgttcaattgaattcagtttcccttggtaggatttattgccaggccttgaggtaagcaacttaccaacatgggaacacaaccccagcaaacattttgggaggaagaggatgaggagatgcaaggccatggaaccactatctcaggtcaatcaatgtcaacaagcagaagtttggggtctccatccagccggagtgaacagacaatggcaacacctgctagtgatagcacttttcttaggttaaaccatcttgacatacatggtgatgatgctggatcacagggcaccgttgccaagaagaaaaagaggggccaacgggctgttggaggtgataagagtggaagaggtctccgtcaattcagtatgaaagtgtgtgagaaggtagaaagcaagggcagaacaacttacaatgaggtagctgatgaacttgtggccgaatttgctgatccaatcaatggtgtttcaactcctgatcagcaacaatatgatgagaaaaacattcgtcgaagggtgtatgatgctttgaatgttctcatggcaatggatattatttctaaggataaa

SEQ ID NO: 91932 - DNA, 373 bp, Glycine max
  Clone ID: PAT_MRT3847_5402C.1
gagcgggctagctatgtaaggttaaagatgttaactcgtgaaccaattaaggtagcgacactggtgtccaatctcgactcatgaaagaaaagaagaaggagactaagctcgagcagaactagttacattgggaatctaccctgatgtatagcgtgaaagataatttggaaagagcgtttctgaagactggacatatatcacacatgaacctaaacgcaaatccaaaaccatctagacgctgcatttgtagagtttgcagcactactagagactgaggatgcattctcgagggcgcgagggctatgattgagacggcgatcgataacggcttgagcatgctcaagacgcgcgtgatcattgatctctaaaagat

SEQ ID NO: 91933 - DNA, 215 bp, Glycine max
  unsure (1)..(215): unsure at all n locations
  Clone ID: PAT_MRT3847_54030C.1
tgtgggttagttgcggacacggcgtgatgatttcataaaaatcatagtttggcacataanatattatttttatgaaatgtgggttagttgcggagcacggcgtgatgatttcagcatctgaatgaggatggaanggaggggagtgattttttggagatttaaaccattgatttcttgggttggaanccngagggcatgctaatgtttgatttggt

SEQ ID NO: 91934 - DNA, 508 bp, Glycine max
  Clone ID: PAT_MRT3847_54031C.1
ctgcttggggggggggggggggggaacaagaggcagaaaagggtgaacacaacaaaagcagcaagattgcgctaagaagctacgcaggaaaagagtgtggcgttaggtcacatggcgtaggagtaaagaggattgtaggatagaataaacatgcggtaaaaccaaatagaaaataatgaggggcataaaggccaaaccacagtgaaggaggtagtaaatgtcgctagcgcagtgaaaaccgacggcctacttactgttgtagggggcggataactcaacgatattgttaagatacggctatcagtaaagtttaggctggtcacatcggtaaggctggcttcggttgtacccgcatgcgtatgctggctcctagcctatgactgactgcgtttacgagagggtttgtatttttggtaatcccggtaggaaggacctcaaccaacgtaatggcagctgtggcaagtaagtctagaacagcaccaggggcgggcttaactgtggcgactag

SEQ ID NO: 91935 - DNA, 1285 bp, Glycine max
  Clone ID: PAT_MRT3847_54032C.1
gttccgacccgcacgaaaggcgtaacgatctgggcactgcctcggagagagactcggtgaaatagacatgtctgtgaagatgcggactacctgcacctggacagaaagaccctatgaagcttcactgtttctctgggattggctttgggcttttcctgctcagcttatgtggagggcaaagaaggccttcttctgggggggcgagaagacgacagaaggggagggaggaaaagaggtagagattagggtttggtattttccacatgagaggattggagtgaaagtgagaaaatggaggaatcaggatcagggggtgtgtggtggtgttgttccccattgaagatgatagtggagtcgctaaggattatgagctgcaacaaagtggtgttcgcatccatcatgctcctcaccacccttcctctatcgaccctggtaatttcccaatccatctccacccactccctcacctcccaaatccagcacctggaggccctcgcacacttcacctccacacgtttcgaggcccgccacgtctgccaagaatcccgccacgaagccctctccctcctccgcatcaaggccctcttctccctcccctcctacctcctctccctcgccgccgccctatcctccgtccactccaccctcctcgctctccacgccaccgccaccaccaccgccgctgctgccctccgccaccactccgcgcgccttctcgccaccaccatcttcgtctacgccatcctcttcgccttctcccccctcccgcgcgtcctcgccttcctcgccacctccgccaccgccaggctcctcctactcgcctccgcctccgccctcgaggtctacctcatggccgtgatgagcgtcgccctcgtcgtctccgtcgccgaagagagggtcggctgggaagccatccgggtcccgagccctcgggttcggggaccattcgggattcgttctgatggagggaggccggttctgcgggtgggtcctgtcgggcttgttcgtgttgggctcgagcctgatcgggtcgaagttggaacacttgatggacggtcaggattcgatcgcggttaaggataaagcgagtctgatagtttcgtacggattattagtgctgtggagttatgttgttatcactgtgttttactgtgactgtagaaaacgacatccaattagggaacaccaagcagatgatgatgaccttccacaacaacaactatctctaatgtaatctaatctaattcaaccccaccactctggaagagcttgaattttaaccttg

SEQ ID NO: 91936 - DNA, 217 bp, Glycine max
  Clone ID: PAT_MRT3847_54033C.1
tacatctcatatacatcacacaggtctacaatagaaatgcccagacgcagagaaccaccctcttcttctagtgcacaggatctctgattgtggatttcaatgcacagagcccagcaatcccaccacagctatgactatgatgatgtctgtactactcgagaaagagtcattcatctcaatcaagtacgacgagaatggagtggcatctggggaaaag

SEQ ID NO: 91937 - DNA, 479 bp, Glycine max
  Clone ID: PAT_MRT3847_54034C.1
tgttctcgtgattaaccgcgatcataggttgccgaaccttaaaaccggatacaaacgcaatcgttacttgattccaagaagctctcaagatcttcctacttttttgcgtacgatttcttaagggaaagaaaaggactctctgtgctggccacagacttcgcgaatcattcgcgattccattcttagtccatttgctgaacactctcctatcagatataggactgcgtgtcagatttaaacttcttctgatcctttttcagttctctgtttaatttcaagttcaagctggggaaatcttggattagtgctgccactctactatctggtttaggactgggtggggagactttggtatgtctctcctatctttcactctcttcttaccactgatccgcaatggcgcccaaagggggcttattgggaaatcacttgagcgtcggtgcaaatgtgtgcttcgtgaatgctctgtggagacaaca

SEQ ID NO: 91938 - DNA, 277 bp, Glycine max
  Clone ID: PAT_MRT3847_54035C.1
tcgagcttcaaagaccacgtatgcctctctctcttggctaattgggggccccctctcgcaaaaaataactcccggggggggtgcattttcgccgcaatggggcaataaaaaacaccgtacacactttgactggttacaaacaaaagcggcgtgtacggataccagctttttaaatttccacattggccctaattcctgtggataatggtttttaattattggataccatttctaatacattttacaggaaggttggttcaatcctaatgccaaaagc

SEQ ID NO: 91939 - DNA, 505 bp, Glycine max
  Clone ID: PAT_MRT3847_54036C.1
gctcgaaagagatggaagttgcttgtatgttaattgattttcatggacattgtgtcagtggttcatgccagtagaaatggacttcatatttgtgctattgctattgggttgcttatgttcttttgtgttgcctgatacgcaaggagatgcactatttgcattgaagatatcattgaatgcttcagctcaccagcttactgactggaatcaaaatcaagtgaatccttgtacttggtcacgtgtttactgtgactcaaacaacaatgtcatgcaagtatcactagcatatatgggattcacaggatacttgaccccaataataggagttctaaaatatcttacagctctatctttgcaagggaatggaatcactggcaacataccaaaagagttaggaaacctgacaagcttgagcaggttggatttggaaagcaacaaattaactggagaaataccctcctctcttggaatcttaaaggcttcaattttaacatcgagccaaaac

SEQ ID NO: 91940 - DNA, 531 bp, Glycine max
  Clone ID: PAT_MRT3847_54037C.1
ccacgcgtccggaggaggaagcctctcacctattttttgattggccaaagacacaacccttatggtgggaatccctctcctggattcaaaccatgggatttttttctattaatccaagacaacatttcatgcagcaagcaattggaacaaatggtggaaagcagtattctagatggaagtgctggtgggtggccctaacctgctctatttggcagcatagaaatcgaaacgtgttcctaaatgaaccttttaatggaagcaagttgctggaagatgcaatatttctaatctggtcatggcttagagggtttgagaaagattttgttgactcatatacctactggtctagtaatctaccagtagctttacgtacataggatagaaatgatgggtatttcactgtagttatatatcgggtctgcaatctggatcttcacactagtggatccaacagcatacctagcattaatattgtacttatagtacctttggtactttcattcatttataatataatatattttggctgat

SEQ ID NO: 91941 - DNA, 231 bp, Glycine max
  Clone ID: PAT_MRT3847_54038C.1
tgggagaacatatcacccccatgtttacctagagctcctgtaactttgaggtgcattttattaccaacctctgcaactttgcttctcaacatgaaatactatcttcttccctctattacttaactcaatatagcactgaaggtaacacattctgctttactcttgctaaaaaactggaagtttttgcttcctactacgccatcgccaaaagccatcactgattttctttac

SEQ ID NO: 91942 - DNA, 351 bp, Glycine max
  Clone ID: PAT_MRT3847_54039C.1
aattcggctcgagggtatgcggtatgccacctaaagatcattaagtcagtaatttcggcagtgattgtgtgtttgtagagaaaggaggttatgaaaattagatgattaatacaagggtattattgtctataaacttatataaatttgttgaacttctaaaaaaaaaaaaaaaaaaaaaaaaaaaaaaaaaaaaaaaaaaaaaaaaaaaaaaaaaaaaaaaaaaaaaaaaaaaaaaaaaaaaaaaaaaaaaaaaaaaaaaaaaaaaaaaaaaggggggggccccccatttttgaccttttccccccggtatttatttccggcccgggccctggggggttcccaattttcctt

SEQ ID NO: 91943 - DNA, 474 bp, Glycine max
  Clone ID: PAT_MRT3847_5403C.1
caacaatataaagtaaaagtgttattattccaatataataataataataataataataataataataataaagttcattcaccacactatttaatattatcttaacacgggaagaacttgatttggcacaacatattattctctctcccgaagcaagcatgagggattaattctgatctgatttcgtttccaaacgcggggcctaatttccacctaagtttgataactttgatttgtgttagaccaaacttttcaggggtcggttttgaataatcaatcaaattcaacccaataaaagtttttgttataataatattgagtgattattgctttctagataacggacatctggttcagttttatcaccaaaatattggccaggtccaagtaccataaaataaatgagtagatactggaaagtcaaaaacgggacagcccaatttagttgttgggtccagtatttaaagcaatcag

SEQ ID NO: 91944 - DNA, 536 bp, Glycine max
  Clone ID: PAT_MRT3847_54040C.1
agagaaccatcaactctgttcaaaccaatcaattattttccattgggtcgtttttacactgataaattttgaattttgccatctgggcatcgcgctattagccgtgtcagatatcgctgatggttctctctgaatttggatctgcacaagtcgtggccttgggttctttctttcgcttcgattcttttgtttctgtttctgcaatcgcctcgtggttgttctcagaaatgtgattggcccttttgttatttatttattatttattgatttatttattgttcctgatcttcaacgtaatttgaaatcatagactcacctattgggtgggggcctaccctgttagaggttgtgaaactttggagttgtaagatgtgatgatgtgagtggtgctcatgtgtaataaagaatttccatcctctccttctggtacaaggtaccgagtgccatttcccgagttaccagataagtgcattgatagagtgtcggaagagtatgtgcgacatcacgtaaatcatcatcctgtgtatgacaatcaa

SEQ ID NO: 91945 - DNA, 526 bp, Glycine max
  Clone ID: PAT_MRT3847_54041C.1
cctcaaccagctcgtgccgttcaagtacgactgggcctggcagaagtacctcgacggctgcgccaaccactggatgccgcaagaagtcaacatgaccgccgacatcgccctctggaaagacccggaaggcctgaccgacgacgaacgccgcatcgtcatgcgcaacctcggtttcttctccaccgccgactccctggtggcgaacaacctggtgctggccgtgtaccgcctgatcaccaaccccgagtgccgccagtacatcctgcgccaggccttcgaagaggcgatccacacccacgcctaccagtactgcatcgaatcgttggccatggatgaaggcgagatcttcaacatgtaccacgagattccatcggtggcgaaaaaggccacctggggcctgaagtacacccgttcgatctccgacccggaattcaagaccggcaccgtcgagaccgacaaggaactgctgcgcaacctgatcgcctactactgcgtgctggaaggcatcttcttctactgcggcttc

SEQ ID NO: 91946 - DNA, 382 bp, Glycine max
  Clone ID: PAT_MRT3847_54042C.1
ccctccctctctctttctctttctctctttccctgggttggagaacttgcaggtccttaaaattaaaccatggcttcatctttaaaccaacgcatgttattccctcttatgttcgttcaagccatggaaactggaagaactgaagttgtattatgatgggcaaggattcatgtctatgcagatcaccaaaagcaaagcagatatcatattttatgatgcctttggcaaagttttgcatacatggagcatatccaaagaccgtaacgtagcagcctggatataataagctaaagtacacacattaccggctctatgttatgaaaatggaggtccctctggctgacaattagggcaacttaaaaatgtactatttgtaacaaag

SEQ ID NO: 91947 - DNA, 406 bp, Glycine max
  Clone ID: PAT_MRT3847_54043C.1
ccccgaaaaaaacccaccctttttttttttttaaaaaaggggttccaaaagggtttatttgaaatttctcaagacctaaaaaaaatagggccccgttttttttttcaacctaaaaaaaaacccccaacttttgaatccctttcccgagggggggggggcccaaaaaaattttacccccaaaataacccccagtttttttgggacaaaaaaaatcccctggaaaaaaaaggcctcacctaaaacttggttagccccccgggaaggggggaccctggcccaaaacacatactgggggggattaaaacaagttcctggggattttgaattacccaccaggggtggtggttttacagtcccgggaccccaacaacctttggttgcctccaaaaaaccaaattttgaaggg

SEQ ID NO: 91948 - DNA, 1325 bp, Glycine max
  Clone ID: PAT_MRT3847_54044C.1
cgccctccctctctctttctctttctctctttccctgggttggagaacttgcaggtccttaaaattaaaccatggcttcatctttaaaccaacgcatgttattccctcttatgttcgtaattggtatgttctgcttaatggtaactccttctattgcggaacttcccatattcaaacaccctccaaaaaaacaacaatctcttaatatattggtccttggagattggggaagaaaaggaacctacaatcaatctttggtcgccaatcagatgggaattgtgggagagaaactagacatagattttgtgatctccactggtgacaatttttacgaagatggactaaaaggggttgatgatccagcattctaccaatcattcgtcgacatgtacactgtcccaagcttgcaaaagacatggtacactgttctgggtaaccatgactacagaggtgatgttggggcacaactaagttcaattctaaaacaaaaagatagcagatggctttgcatgagatcttttattctcgatggagaaattgtggaatttttctttgtggacaccactccatttgtagaagagtacttcacggacccaggagagcatacctatgactgggaaggcgttcttcctcgcctagcttacctttcagaactcttgaaggatgttgatttagctttggctcaatcaaaagcaaaatggaagatggtggtgggtcatcataccatcaacagtgctgggcatcatggtagcaccgaagagcttaaacagctacttgttcccatcttagaggcgaacgacgttgatgcatacataaatgggcatgaccactgcttgcagcatataattgacaataatagtggaattcactttataacaagtggagggggatcaaaggcatggtcgggcgatgtcaagccgtggaaactggaagaactgaagttgtattatgatgggcaaggattcatgtctatgcagatcaccaaaagcactgcacatatcatattttatgatgcttttggcaaagttttgcatacatggagcatatccaaagaccgtaacgtagcagcctggatataataagctaaagtacacacattaccagctctatgttatgaaaatggaggtccctatggctggcaaataggacaactttaaaaatgtactatttgtaacaaagtaaagaagaaaaaagaacgtttagagaagtcctaatggtcttgcagtagctgtaatattgcacccaaacacgtgctaccgaagtttgagaaacaaaggcatacagtacattgtagtaaaaaaaaaagaaaaaaaaaaaaaaaaaaa

SEQ ID NO: 91949 - DNA, 115 bp, Glycine max
  Clone ID: PAT_MRT3847_54045C.1
gtgctatccgtcagcgcctgtggccactggtgcagcagggtcgtcagcgcacagccaacctaggcgctggcgccgcccagcccctgcgcgatcgcgcccaggctttgagtgaccg

SEQ ID NO: 91950 - DNA, 194 bp, Glycine max
  unsure (1)..(194): unsure at all n locations
  Clone ID: PAT_MRT3847_54046C.1
gttcgctatggccactgttctnagaacccccaccttccggccaccgctccgccgancgccgcaaagtcgcgaaaccatcggttcgcgtcgtgtcttaacaagacactgcggaaaactctgtccttctgcgtcctttctccaggttagtgtctgttgtngacggccgagnagacgagnagttgactangttgtna

SEQ ID NO: 91951 - DNA, 501 bp, Glycine max
  unsure (1)..(501): unsure at all n locations
  Clone ID: PAT_MRT3847_54047C.1
aagttcaaaacattaactaaaatcacaaaactatctctttattattattattattattattattattattattgctattattatcacatgaactagaaatgacttctcttcaattccaccgattcaacccagcaaccgatacatccaccgccatcgcaaacggcgtcaactgtccgaagccaccgtcaacgctccgtttattggcgaaagtaggccttagcgtgccggagacggttgctcggcaccacgcgcacccggtggggcccaaccagtgctgctccgtcgtgatccaggcgatcgatgcaccggtctccgccgtctggccggtggtgcggcgcttcgacaacccgcaggcctacaagcacttcgtgaagagctgccacgtggtcgccgcagcaggcggcggcgaggacggcattcgcgtcggcgcgctccgggaggtacgcgtggtctccgggatccccgccgtgtcaagcaccgagcgtntcgagatcctcgacg

SEQ ID NO: 91952 - DNA, 106 bp, Glycine max
  Clone ID: PAT_MRT3847_54048C.1
cccacgcgtccgcgcggcactgctacggaccagatacactgcttatttgagcgagacaactctacatacatgcgggggcatcatgaccaccatacacgtgctgagc

SEQ ID NO: 91953 - DNA, 437 bp, Glycine max
  Clone ID: PAT_MRT3847_54049C.1
agccattatggctctttgcatcgcacactaacggtatctatcggattcgctctgtctcgggggccgcataagagttgagtgcattataggtgatgatataactcgcctgcgtggtatgacacgcgcaggaggaggaggaggaggagtgtagcacttctacgtcgtataaaatcggtaggagctgccacgtgtgatgtgaaacatcactgtaggagggctaaagcgaggtggaaagtgcctaccatggaccttggcatgccctgggaactatggacgacgttctaaccataaggagaggcatcttgaactctgatcatgggttgactaaggcagtcacaatgcctgactgatgcattgtctcatgcatcagtgagggacctagcaaagcctgagaatgcatacaccaacaagcgcatgaacttgacggcattgaacca

SEQ ID NO: 91954 - DNA, 2637 bp, Glycine max
  Clone ID: PAT_MRT3847_5404C.1
tcttattattcttctgcttctcacacagatcttcacttcacctttgagtttctcacccaacacctgtatttttctcttcctccattgattttgttcataaaaatctgattttttttttatctggggtttgaatattttttacttgatctgttggaacatagaggggggtgattttgtaaaatccggattctctgaggagaaaatattagtgggttttggttggatcgagggaaagactcgaactttgcagattgcaaaacgagggtctttgggggggagaaaatgtggatcttgtaaaaggtgttgttgatttgatcgagaaagaaaaagagaaacatttttttcagcttcaggtgattcaactttttcctctggcattggagaaggtttagaagaagcttaaaagatacataatacgcattggtaaccagtcatcaaagcggaatatgaaggtttcttgtgacggtgcataggttgataaagttctggtggatctgagtggattggttgtcattttcaaatattttcagtaaaggaacatcgttgaaagtggaaggggtttttcattacttgaagtttgatttcagcctaccaaaatgggtattcagtgctccagactcatcccatgctgtgtggattcacaagttaaggcatctgttattgaaactccagatgctgaaattgaggatagtagtgaggccagtaactggcctacattccgtgaatttacacttgagcaactcaagaatgcaacatctggttttgctgttgagaacattgtatctgaacatggagagaaggctccaaatgttgtttataaaggaaagttggagaatcaaatgaggattgctgttaagcggtttaataggaatgcttggcctgatgctcggcagtttttggaggaatcaagatcagttggtcagcttcgtaaccaaaggttggcaaatttgcttggttgttgctgtgaaggggaggagaggttgcttgtggcagaatatatgcccaatgaaacacttgcaaagcacctttttcattgggaaacacaacctatgaaatgggcaatgcgactaagagttgttctacatcttgcacaagctctagagtactgcacaagcaaagggcgtgctctctatcatgaccttaatgcatatagagttctttttgatgaggtaagtttttgtgtatcccctttttatacatgtccctataattagattaataaaaaaatgtgttagaattttgcaggatggtaatcctaggctttcgagttttggtcttatgaaaaatagcagggatgggaaaagttatagcacaaatttggcatttacccctccagagtatctcagaactgggagagtaacaccagaaagtgtaatatatagttttggcactcttctgcttgaccttctcagtgggaagcatatccccccaagtcatgccctcgatgtgattcgtggaagaaatcttcagatgctaacagattcttgcttggaaggacaattttccgatgatgatggaactgagttggtacgcttggcatctcggtgtttacagtatgaacctagagaacggcctaatccaaaatcattggtagctgctctggctcctcttcagaaggaaacagaggttctttcacatatcttgatgggcatccagcatagtactacttttgcttcattatctcctcttggtgaagcatgctcaagaaaggacttgactgccatacatgaagttctggaaagtcttggctataaagatgatgaaggagtggcgaatgagttatcatttcagatgtggactgatcaaatgcaggacacattaaattgcaagaaaaagggagatgttgcatttcggcagaaagattttagactggcaattgagtgctactcgcagttcatagatactggaacaatggtttctccaacagtctatgcacggcgcagtttgtgttatctaataagtgacatgcctcaggaagcgctgaacgatgcaatgcaggcagaagtcatttccccggtatggcacatagcatcttatcttcaatctgttgccctcacaggacttgggatggagaatgaagctcaagcagcacttaaagagggcacaacactggaatccaagcggaatgcaacacccaagctaaaatgaaaactttgtacagtgacaaattctttctgattctgttctgcctgatgactacccccaaaacattgattataaaaattcatcttttggataccaatagatccaccctctcaaaaagttgcatgtgtttgaagatttcttcaagaaacaagattggatgagtgttgtaacaccccttccccctttttgttgggtcggctaggatgttcatttagtcctctatgatttgattgattgagcatgaatccaaacttaagcatttttttttgtcttaatttataaaaggtttaaattgtgaagagttaaaagctgttgttcacggctgtgtacttagttttggagtgccaggcaagatttcctttttcgtcgggtgcaaatcattgggtttaggacaccaaaatagtgttcatttcctactgtctatgctcatgaccctaaaatgctgtggagtatgataatagtatcaatatgaagtttttcatggctcaaaaa

SEQ ID NO: 91955 - DNA, 952 bp, Glycine max
  unsure (1)..(952): unsure at all n locations
  Clone ID: PAT_MRT3847_54050C.1
gaatcgtccagcccccttctggccctgcagctacatacgaaataacgctacctctacctcacactgtcttattctctctctcactctcagtgcccttcatcatcagctggcctcattcactcttctctctctctctctctctctctttgcctgcccatcatcactcttacacacacatgccgtagtcaatacacattttgaaacaaaaagaagaagacccataagcagccaaaacaacccccccagtccgaaaaggcatagaagccgcaaaagccacgtcatgctcagtaattcagctcgcagaatggcgaaagcacactacncgcataccgccaaatccgccaccggctgcggcgcccatagcacctagtcgcgatgcgagcttggggtatttttcttgaacctccaattgcgtcttgttcgcctcagcataactcagcgcattcacaatttcgccttttgtcctgctcagctcggccgcgcgctcaaagtacttgagcgcattttgtgactttgccttgctggagcaacaattgcgccatggtagcgactgcaatgtcgcattcggggtcgattattgagcgcccttcttcgcacagcttctcagcctcttgtgaagttcattcttccattggaaagagcgcgagcgccctttgttgatcagcggcaggacgttcatgccgagaggcttggagctcttttccatgtctactgccgggtcgaacttctcgatggcttcttggtattttttgctggtcgaggagaagctcgccgtagtagttgtacacatcgggtactgtggcgaagttcttcatgcagcggcggaaagtggccatggacgaggcgatgctgcccatcttgtactgtgtaacgcccaattggatgtgagagaagatgaagtccttgtcgaggtcgatggacttctggtagtcccctcgaggccgaatttccg

SEQ ID NO: 91956 - DNA, 376 bp, Glycine max
  Clone ID: PAT_MRT3847_54051C.1
ctcatgacacggtacttaccccctatcaatttgttgaatgtatgattaacataggaattcgcgtggcacgcacacggcatatgatcaagaataaggacaacaatgataagacaattgagctgctacatgagtttgcacgcacacactttccatccgcgacctacatggcatatgctgttcaagttgacacctacacactcacacaggcacataatttaattcctaacgtagattgtgcaattggatctcgtctcctggatctccatgctggtagttcgctgttcaccagacacaatattgacgaaactctcgatattggctatctgaatggcctctttgtgctggaactctccattggtctcattggacacacctt

SEQ ID NO: 91957 - DNA, 102 bp, Glycine max
  Clone ID: PAT_MRT3847_54052C.1
cgtgcattatccgatagtgaccagagcagctctatccggaaccatagtgcgcagctcgggcatgacggggccggctatgacgatgaagaggctacagcgatt

SEQ ID NO: 91958 - DNA, 439 bp, Glycine max
  unsure (1)..(439): unsure at all n locations
  Clone ID: PAT_MRT3847_54053C.1
aagcaaaaatttcttctaagcattatacaatcaaggtttttaattcaaaaatcattatatcataaagtgcatcaagccacaaatgaattgaaagtgcaccaaacccaaacatatatatttagactcacaatgagaaccaaaattaaaagtcctctaaatcacaacaaacttagattaacaaaaccaatagggtcttaaaatagaccgtacttagacaaaaccaacaccagaacatatagatataataacactaaattccaacaatagacattacattcacacaaaatagatgaaatcatgcttgagtggtaagttaaagaaatcacttactgtgagaactgaacacgatgactgacaaagaacatcaactntagtgtggtggcacaaattctttgtttgagagagagagagagacaagatgagataatgaaagagagaa

SEQ ID NO: 91959 - DNA, 142 bp, Glycine max
  Clone ID: PAT_MRT3847_54054C.1
aaacaattgcctctacacggtgtgggccggggctagtacgggtggatgccgtggtctggaccaagaccaaccgtggaacctgtgtgtgaacccgaacactaccatgatccttatatggctgccaaccgggtgcaactctgat

SEQ ID NO: 91960 - DNA, 297 bp, Glycine max
  unsure (1)..(297): unsure at all n locations
  Clone ID: PAT_MRT3847_54055C.1
ggcgaagagaagagaaaaattaagatggaggggaaggagcaggatgtgtcgctgggagcgaacaagtncccggagagacagccgattgggacngcggcgcaganccaagacgacggcaaggactaccaggagccggcgccggcgccactggttgacccgacggagtttacgtcatggtccttntacagagcanggatagcagagtntgtggccattntctgtntctatacatcactgtcnaancgtcangggagttcgccggggctaagtctnantgnagtancgttnggattcang

SEQ ID NO: 91961 - DNA, 492 bp, Glycine max
  Clone ID: PAT_MRT3847_54056C.1
ggacaaatactgaggtcttgacactcacagctaatgagtttcgatgtacagttctgactaccactttgcaccacttgattatttatcttcaggattttcgctaaatgattatactctcatcttcgtgttctacaatacctaactgaagaaagacaactttgaatgcgattaacacttttgtgcacttttgggcactttttgcattttaacttgtggtggactgccgacacatgcactcaaagcggcgggggttcattttacttcaacaaagaatggatctttttgcttgtctttttttacgcctaggcctccgtgcacaagttcattgacatgaagcaaaatttgccttatttgagaaagaaaagggctggtttcactaatattaacacacccgtcacttaggagggcttgcctctgtgacaatctaccaagacattggttattgagaatttgttgcgttggaagaaaaccgagcatggtgggggacatttc

SEQ ID NO: 91962 - DNA, 233 bp, Glycine max
  Clone ID: PAT_MRT3847_54057C.1
tcgaatatacgctcctactgcctgactatttctctgcagattcttgccattcgatggagaccacggtgctctagaaatgactcagtataacatcgagcctattgcccatgtccactctgttaagttctacgaaaactggtcatcctatctacaagcttgtacgtatagactagcttgctattgaaatatactcgaatgttgccgctttaatcaacaacaggtcatttattttt

SEQ ID NO: 91963 - DNA, 189 bp, Glycine max
  Clone ID: PAT_MRT3847_54058C.1
gggagggcaacgagatttcccaatgttgagaatggacccatttcggggacaatgggctgaacaaagatacctgacataaaaaagaaggccaatacaactgcacaagaaatacttcaccttaagcttaaaaaaaaaatctggggggtcctaaagggccaatggacccaaactaacagctggggggatagg

SEQ ID NO: 91964 - DNA, 417 bp, Glycine max
  Clone ID: PAT_MRT3847_54059C.1
tttttggttagaccagagaacttttatagaattccatctgaaggggcaaatacaaatgcagatcacaattacccccgcacaaaaaagatcggcctttaaacacattggggggagggatggggtttcaaattgatcttccaagttaaaaactggtttagccactatgaacatagccttacttctaagactaatcttaaatgtgttatcaccgtataaactgacaagagctctgaaacatttttgacaacaacaagagctttaactttattaccaaaacaaaaaagccatatcatggaatgggcattacacccacaccatagtaccataagggctcatatggggatgacagatcaatggaaagataaagccatcataatgaaacacaagcttggatgattcactgaaaaatcacaaata

SEQ ID NO: 91965 - DNA, 458 bp, Glycine max
  Clone ID: PAT_MRT3847_5405C.1
aaacttacaccaaccctttttcccacccacccaaaccggaaaaccgcgagggccatttaagaaaaaacacacccggccatactcccacgagaaagacaccgcacgcccccgaccgaacaacagcaacaacacaaatcacagagaaacccgacgcaacaaccaccggaaaagaaaccgacccaccaacaaggccacctacggaaaggccacacggcgccaacaaaagaaacactcaccaccccacccacccaaccacggaccaatcaccactgaccaagcacaagccgacccccacccacaccaaaaccaccacccccaccaaatccccatgccaagcccacccggccaccggaccacaagcccagccgccaacaaacaccaggctggccaactccaggcccgagccaatacccgaaacccgaacccccaaaaaccgggcccccagcggccgagccgaa

SEQ ID NO: 91966 - DNA, 463 bp, Glycine max
  Clone ID: PAT_MRT3847_54060C.1
attgaaaaaaatggtggaaaggaggagaaagcctctgatactgtgttccaccaaacatctcataaattccactgttccaaccaacaacctcttcccccatgaatctcttcccactttccgtttacccgttgggattctccgattctccaaccccgcaaacccctctctcgaccactctgcacttctcgctctctccactagtcttctcaaaaccctctccatcacttcaggctctccggttttggtcaagaatgttgatacgaatacacagaaaattgcagtggctattgctcttgatccaccaggcaccgccactaatatggactcaccctcttcttcaaattctcgaataatgcttgtttttccttcttgtgatttcccttctagtggttctgtgttagatgatcaagtagcttatatatctcctcttttagcctttaaccttaacttgcacgtgacatgc

SEQ ID NO: 91967 - DNA, 454 bp, Glycine max
  unsure (1)..(454): unsure at all n locations
  Clone ID: PAT_MRT3847_54061C.1
aacggnntaatcaggggtgcgactatgtcaccaaagggcagaacgcaaatttgaattcaagcanctttcaaagattcaacatnaacatgtgagaggcgagcttaatctaaaagcctccgttagtatggaaaaggaagagcttaattctagctcatctctccttccacgacactaatgggatttatagaaaacataaaagaaggttacaaagtttcaattaagatgaaacaatctcaaagttatgattccatcttccaggtcacagcaaaacttttacctacagggatattcaaacccttcaaccctaccatcaatattttctctccatctccctaccaatacaagtatttatgttcagttgtgctaacttgcgcatttgagatactcattggtggttctccatctatctcaattttaggtagtgctccatttcggttcaatcccaacacattta

SEQ ID NO: 91968 - DNA, 423 bp, Glycine max
  Clone ID: PAT_MRT3847_54062C.1
ctttcaggctctgaaccaggacagaactggcgatatgtcaggtttgggaaagggacacttttctagggctggtttggaatcaaaccatctgctgctgcacaccctccaatcttctgcctgctgccagattgtggaatgtaaaccatctttttgatggtgaggcacgtgaacttacttaaaagggttgacaaccgcacggttgcacagctacttgagagtatactattcataattgatgctgtgcttcccatgcttgggaagttgcctccgagtattgttggggaacttgagcaagatttgaaacagatgattgtccggcattctttcttgacagttgtccatgcctgtatcaaatgcctctgctctgtgagtaagatgtctggaaaaggggctgctgtagttgaacaacttattcagtttttc

SEQ ID NO: 91969 - DNA, 485 bp, Glycine max
  unsure (1)..(485): unsure at all n locations
  Clone ID: PAT_MRT3847_54063C.1
ctcgagccgctcgagccgtgcaattccaaatctctcttctttctcagccaagcatttccccctttttcgtttcgaatctccccttagacaacaccgatttcgccttcttctttctctttaaactttaggctcgctagggttagggttagggttagggttaggttttcggtgaggcgagagagtatgaggttgagggaggacttgccgtgtaaaaacgatgacgtttgtgagaaagaggaagtgatgatagagaatgatgtaaccgtggcccaaaatcattggtgtcccgtcgtgaatgcgggcttttcttcgcccaagagagtcgttgtggttggttacgctcttaccactaaaaagattaagagctttttgcagcctaagcttgaaggtttagctaggaacaagggaatactattcgtggctgttgaccacaataggcctctttcagatcaaggtncctttgatattgtcttgcataagttatc

SEQ ID NO: 91970 - DNA, 246 bp, Glycine max
  Clone ID: PAT_MRT3847_54064C.1
cgtttattatggttcggatcagcaacaacgtgatcggactcctgaacttgctgaccttccttctctgcatcccgatactggcggacggagtgtggttgagcaagcagggcgccaacgagtgcaagcgacggctggagaagccactgatcgcactccgtgtctttctcatgctagtctgactcgcactgacttgatggagcgtgctgtcgcgtgtcgcggctcctctggctctacctgatcgccatg

SEQ ID NO: 91971 - DNA, 998 bp, Glycine max
  Clone ID: PAT_MRT3847_54065C.1
cggacgcgtggggttccgttaccttcgattttcctttctctcttgcaaatttcatatctctctttctttctcagccaagcatttctccctttttcgtttccaatttccccttctcttaactcacctatttcgcctccttcgtgtccctttctcttcaaattaaggctcggtagggttaggttaggataggttttcggtgaggcgagagaaagagagagagtatgaggttgagggaggaggtagcgtgtaaaaacgacgacgtttgtgagaaagaggaagtggtgatagagaatgacgtaaccgtggcccaaaatcattggtgtcccgtggtgaatgcggggttttcttcgcccaagagagtggttgtggttggttacgctcttactactaaaaagattaagagctttttgcagcctaagcttgaaggtttagctaggaacaagggaatactattcgtggctattgaccataataggcctctttcagatcaaggtccttttgatattgtcttgcataagttatcaggcaaagagtggcgccaggatcttgaggattataggctgtcacatccggaagttactgttctggatcctccagatgccatacaacatttacgcaaccggcagtacatgcttcaggctgttgcggatatgaacctttctgattcctatggcactgttggtgttcctcggcaattagttattaagagagacgcattagccatcccagagttggtcaacaaagctggcttgactttaccccttggtatgtatatgttggtttttcaactacttttagatgctgcagttatgcgatttctcagagcatggacgcatggacatttattgttacgagggttgtatttttgaggcaaagtcattagaacttatgaaaaatattcatggtaataccatcttacgatggatctgatcaggctacttaatttatccctctcttattgagcaattttcccttcaaaaacctgaacctcctcttgt

SEQ ID NO: 91972 - DNA, 188 bp, Glycine max
  Clone ID: PAT_MRT3847_54066C.1
acgagcaactcaaaaaaaaaaaaaaaaccctagctacacccgtatttttatcttttaggattagtgggaaataatttggacacgtttgatatgaaaggtgttgtacttggatggaaaacattcactccaaagttggcttatacatctttagcccatccaagttttatataccactctttgtacatgtg

SEQ ID NO: 91973 - DNA, 623 bp, Glycine max
  unsure (1)..(623): unsure at all n locations
  Clone ID: PAT_MRT3847_54067C.1
acacagaaaaatatcagaatcaacttgttaaaaatttagcttctacaggctgagtttggacaaaaaagtaaatgaagtaagaaacaaaatcttggtgggttaccaatgggcaatggattattttctcaaattgattgatgtagctagatgtctagggatgcttcaattccagcccctactgctcatacttcttagtccttttctctctcaatagccctcctgtgtgtagtatgtatcaaagcatcaatgagtatgggagtaaaaaatcaggtgagtgctcatgtgctgtatgctgcgaatgaatatgatcatgagagagtctcatgatttgtgccacgtccaaaatatgtgtgatgagaaagttaatgtgtatttgtatgagtgaagatggatgcagaagggtgtgaaaaatggatgaccaggaaaaattaattgtgtgctgcattggtgtactgcagtgcattggtttcttggtgaatgaaggtgaaacagaatacaatgagtgcagcattttcagagggtgaaagaattaaaaatggtggtttaaaatgattactatttaccactccatgntaatttatgacgtgtggatgagggaggaattattaagtgaggaatgagca

SEQ ID NO: 91974 - DNA, 348 bp, Glycine max
  Clone ID: PAT_MRT3847_54068C.1
ttttttttttttttttttttttttttttttttttgtttttttttttttttttttttttttttttgttttttggtttcttttttttttttttttaccggcccccaaagaaaaaggaaaataccctgggaccggctacccggtcacaagggcaggggggggaaaaaccccggggggaaacccccaaaagcaagagggatctccccccaagaacggggccacccaaacagggaagggcccgaggggggcagacgggggcaccggggcggaaggggacaagaccagacatgagcttttccaacggggcaagatttccccagcttaaaggggcccctaccttggggccccccc

SEQ ID NO: 91975 - DNA, 1093 bp, Glycine max
  Clone ID: PAT_MRT3847_54069C.1
ggcaaagccaagtgtgggatgaggttaaaggtgctttccctgatgacagcaatggaagcagaatattgataactactcgtcatgctgaggtggcttctcacgcaggtccaatgcctccctactttctccccttcctcaccgaagaagaaagctgggagcttctttccaagaaggtgtttaggggcgaagattgtccttctgatttggagcccatgggaaaattgatcgctgaaagctgtaatgggttgccacttgccatcatcgtcatggcggggattcttgcaaacaagaagtcactgagggattggtctagaatcaaggatcatgtgaattggcatcttggcagggacaccacactcaaggatatactgaaactcagctatgacaccttgccagcgaggttgaagccttgctttctgtattttgggatgtaccctgaagactacaagatccccgtgaagcaattgatccagttgtggatatctgaagggctattaacacaagaaacttgcggaagcagcaccaacataccggagccggaatacattgcggaagagtacttggatgaactagtggaccgaagcttgatccaagtggtgagtaggaccagcgacgggggtgtcaaaacatgccggattcatgatcttctccgcgatctttgcatatccgagagcaaggaagacaagtttttcgaggtttgtggagaggttgattttcaaatccgagatagttgtccccgtaagttgtctctccacggcactctatttcatttctcttcttcaagtgccgtttctgattactccatcactggcacgcgttccttgttatgcttcggccaagaagtgtacaaggtcaagccaaaccactggagatggcttctcaagagtttcaggctggctcgcgtgttggatttaggacgaatgaatgttaactcaatacccaatgatttggagaagctcatccatttaaggtacttgagaatacactcatacaacattgaaactattccagcttctatatgtaggttgtggaatcttgaaaccttggacttaaggggttctcccataaaatcattttctggtgacttgtggca

SEQ ID NO: 91976 - DNA, 733 bp, Glycine max
  Clone ID: PAT_MRT3847_5406C.1
attcgatcctttgcggatcattgtatactaacgaaccctaactgcgtctgaggctctgtgggagactgcgagccacgaacccaatctccgacgacgactacctccgacgagcgacgacttatctccgctagacccacaacttttcccgcgaccaaccgagaccacgtggaaggatactggtgtgatctatctataaacgcacgatgtcctctgggcctggactagaacctcttgtaaatcaaacaattccctacatcacaaatgtaggcacaaaatatagaggcgagtcctgaaagggattgatcaggcatgaactatgaatatcttgatgaaacccatgaacgagaatattctaccaatgaatgtgaacaacaacttgtgctaggttgatacatcagcaagggtgcacaagatgagggttgatggtgaactatatgagcaactgcattctagtctggatatgtcaacacgctgagctcatcccttgaaacctgtgtatccattgaggtgagatactatgcgagggatttagtggatgcctgcctacttgatggagagagacttatacatgcggcattgcatactatagtaggctgtgcaactctcacaatatgccgactgcatactatctctaacattctgattctgttaccacgtgacgcttgtcatacaaacgaatcctgagacgatctgacgtgcataccctatcttcctactggcccctattatacat

SEQ ID NO: 91977 - DNA, 228 bp, Glycine max
  unsure (1)..(228): unsure at all n locations
  Clone ID: PAT_MRT3847_54070C.1
ccttcccattttattgctctttacatttactttnggggccccgtgcagcataacacgggataactatttctataatggggcaaaacaaaaactacaattttaagccttgaaaaactcctgctcaaggggggcataagagtcacatattaccccactcatgagagggttcacttcctttgtgaagaacatttcattaaagatccctatcttgataagagggtgcaaaaa

SEQ ID NO: 91978 - DNA, 699 bp, Glycine max
  unsure (1)..(699): unsure at all n locations
  Clone ID: PAT_MRT3847_54071C.1
tcgagggtgtattttaggnnnggtcaaatnntaaatgattgttgnnatcttttnnagaatttnncttcagcaggtggtataaagcatcanntaataagagtcccttgtcttaagttatttctcccttnntagaaattggatgtgtttanntgtctttttaaccttccaantttanntcattaccttccaggtntgctgacacctgatggatcatacaaccaatgccaccatcntgtcttacccgagtgctaaatttgaaagcatgcagaggtgcaattatgtttggggactcattgctaccatcagaatgctcctttatagttgaagagctaaaacatacatcgctttgtttccaatgtgctcatgggcgaccagcaactgacgttctagtcaactacgaggcactgcataatcagatcgtttaaattctgctagaggaatttgagtctttggacgaagttagttgttactaccagtggggagattagtttgacagaattcatagttcactgccaaaatcattcttttgtaactgagtgtacagaaaacattgagggagtaaaaaataatgaagcaactgtgcttcagtgcttatatggagaaatactggataacaccatttccagcgaatcttatgtttctgtttgaatttgataaagttttccaataataatagataatagattgaatttgagcgcc

SEQ ID NO: 91979 - DNA, 534 bp, Glycine max
  Clone ID: PAT_MRT3847_54072C.1
atgggtgccaagtacctcgaagtggtcaaacaaagttgcatgccaccaaacaacggtcctcggacgaaattagggtatgacaccaagcctcactacaaacctgagaaacttaaacacttgtgcttgagtgaaacagtagccatgagactatggtttaagctacttcccttgatatctgtcttattcctaacttcatctatctgttcagcatccgctaagcgcaacactcctaggctaagcgcgaggaagaatctagaagaagatgagctgtacagtttggactgggattcaaagctttgcatgtctagggtttctagacagagaaaggtccaagttccagagagttttgagagattctgttgtgtgaagatctgcagagaccagagcttgaagcaggagccggcttcttggtatggaaagctaaatcatatgttggatcttccctgtagtggaaattggtctgactctaaagtccttgatagtgcaggactgagttgtcgtgctttcacgaggaatcggggtgcgataagttag

SEQ ID NO: 91980 - DNA, 889 bp, Glycine max
  Clone ID: PAT_MRT3847_54073C.1
tcagactggaagaattgcgtcaaaaggtattgtcaggagaagaaaaagcaataacctatctagatgctgaacaggaactggtattgccagagattggttatcagctacttcatagttatagtgaacagattaaagattggggctggatctgcaacattcatgctcaaaattctgaatcctttagaaggagtttggatatcctcaacagaccacaaatggccgtcacacttattgcggtaccgtgtattttaggggtcaaattaaatgatgttgatcttttagaatttcttcagcaggttgctgacactgatggatcatcaacaatgccaccatctgtcttacgagtgctaaatttgaaagcatgcagaggtgcaattatgtttggggactcattgctaccatcagaatgctcctttatagttgaagagctaaaacatacatcgctttgtttccaatgtgctcatgggcgaccagcaactgttcctctagtcaacttggaggcactgcataatcagatagccaagcttcgactgatgaatgagtgttcaagtgacgagtgccatggattacgtagacatacagtacgcgttgaacgtgcagcacagcgtttaaattctgctagaggaatttgagtctttggacgaagttagttgttactaccagtggggagattagtttgacagaattcatagttcactgcaaaatcattcttttgtaactgagtgtacagaaaacattgagggagtaaaaaataatgaagcaactgtgcttcagtgcttatatggagaaatactggataaccccatttccagcgaatcttatgtttctgtttgaatttgataaagttttccaataataatagataatagattgaatttgagcgcagagg

SEQ ID NO: 91981 - DNA, 370 bp, Glycine max
  Clone ID: PAT_MRT3847_54074C.1
gggggacctttaaaaaaaatggtttcctccctttaccaaaaagggggggtttttcaccctttccttttaacccctaatccccggttcccccttttcccttaatccttggacctcccccctaatggctttttttaaaaaaagggccaaaaaaaaaaaataaataatcccctattaaggcctccggacaaaacgtttattaaatcaatccccctttttccaattttccaaccctaatttttgtccagaattggaatccttccgggaagtttaccaccaaatttttgatctcaaatcctcctcttgtcaccaccccaaaagctgcccccattttttttttttctttggagttcttccatggcttttttttttt

SEQ ID NO: 91982 - DNA, 1150 bp, Glycine max
  Clone ID: PAT_MRT3847_54075C.1
tgcgttcaaattcaatctattattattgtaaaactttatcaaattcaaacagaaacataagactcactggaaatggtgctatccaatatttttcatataagcacagtagcacaaactaattgtattctgtacaccgagttacaaaagaatgattgtgcagtgaagtatgaattctgtcaaactaatctccacactgttaatagtaacaaccaacttcgtccaaagactcaaattcctctagcaaaatttaaacgctgtgctgcacgttcaatgcacactttatgtctatgtaatccatgccactcatcacttgaacgctcgttcatcagtcgaagcttggctatctgattatgcagtgcctccaagttgactagaggaacagttgttggtcgcccatgagcacattggaaacaaagtgatgtatgttttagctcttcaactataagggaacattctgatggtagcaatgaatccccaaacataattgcaccttcaataaaagagcattatgattaaattaaaggaatactaccaaacataattgcaccttcaataaaagagcattatgattaaattaaaggaatactaccgatgactgcaatatgccctcccaaaataaggaaatctgacaggatcgggctgccaacagatgggggtttcatgcatagtattgaggtaaaacaaaggtaatatcatatgtttctgaaaatagggagacatttcccacgaataattcaagtccgtgggattgctatcaatactgcactgcacacaattatgtacagagcccactttactttatttaagacatgacccttgttggggttaatacaattaggcacatacctctgcatgctttcaaatttagcactcgtaagacagagggtggcattgttgatgatccatcagtgtcagcaagctgctgaagaaattctaaaagatcaacatcatttaatttgacccctaaaatacacggtaccgcaataagtgtgacggccatttgtggtctgttgaggatatccaaactccttctccaggattcagaattttgagcatgaatgttgcagatccagccccaatctttaatctgttcactataactatgaagtagctgataaccaatctctggcaataccagttcctgttcagc

SEQ ID NO: 91983 - DNA, 533 bp, Glycine max
  Clone ID: PAT_MRT3847_54076C.1
ccacgaaaaactctaccgggggagttttataaacagcttttcactccgacaacagaaaaaaaaaaaactggaccccctttttttttttttaataaaccagggcctaatcaaatctaacctgggatacaagccactacggggtcaaaaatattaaaaataaaaaaacgccgttagccaaaggcttacgggggaagcttgcccggactagggggaaaacttgttttcccagaaacaacaaaacgtggcacaaagctctaaattttgtaaccgttggtctcctgcagaaaccgttttcccccaaacggaaacgattaagggactctttggttcagaaccttctaataattttttccttgacccccaaacccgaaagccggaatcctgacataggcggaacaattccaacaaaaggcgttccctagcattgggccaacggtctttgaaacaccgtcgagcgcaaggtcaatcagcattgacgaaaagcactcgccggctttgttaattctcttcgccggagctccgtttccgaggga

SEQ ID NO: 91984 - DNA, 254 bp, Glycine max
  Clone ID: PAT_MRT3847_54077C.1
tcggttttattccgaagtagaagttcaagggagcaaatgctggtgtatcattatgcgaaactgctggctaatcttcctcaatgaaacgttttgcctaaacaccatacaagaagaataaaatcactatgattggcgcgccgctagaacgaggtcttgcagaggacataaagaatggtgatgatagcacttgctgcagtaaaaagaaactaggtgaatttttccagactaagtatgactggcatcttcttgctgca

SEQ ID NO: 91985 - DNA, 942 bp, Glycine max
  Clone ID: PAT_MRT3847_54078C.1
atcattctcatcctctgttcgttcgattctaccgatggccggtgcacactcccacagacaatcacagctgcaccaccaacaaccctcctcacgtctcctcttactcctcaccgtcctccccttgactctcgccaccctcgccttcgtcctccaatggcgcggcggcgtcactgaccccgtcacccgctggtcacccgatcacgaccagttccccggcatggccaccgccgttccctccctccgccaccactccgattgcggcaagaaccctctctcccaatcctacaacccttccttcccttacttccgcgactggaccttcgatttctcctctaacctctcccccaagatatgtattacaacgagcacttccgcggggttggagcagacgctgccgtggatcttctaccacaaggtcatcggagtctcaagttttctccttttcgtcgaagggaaggccgcgtcgcctaatgtcactagggttttagagaccattcccggggtgaagattgtatatagaacaagggagttagaggagcagcaagctaaaagccgaatatggaatgagacatggttggcaaccttcttctacaaaccatgtaattatgagttgtttgtgaagcaatctttgaacatggaaatggctattgtcatggcaagggattctggaatggattggataattcatctggatactgatgagctgatgcatccagcaggaacgcaagagtattctttaagacagttgttagcagatgtgcctggaaatgttgatatggtcatttttccaaattacgaaagcagtgtggagcgagatgatatcaaggagcctttcagtgaggtttcaatgttcaagaagaactatgaccatcttcctaaagatgtatattttggaaattacaaagaagcaactccgggaaatcctaactatttccttactta

SEQ ID NO: 91986 - DNA, 343 bp, Glycine max
  Clone ID: PAT_MRT3847_54079C.1
gatttccccacgaggggaatatctcaataacattatgcaaaaaaatgagattctcactgaagtggaggaggtggatagaagaattcttttgtacttaccatatcaatcctagtaaatggccatggaagtctaacaaaatagttctaagttggtagaggattgatcgagataggattatttctcatataagctagcttaggaatgaaaatagttctatcctagtaaatggccatggaagtctaacaaaatagttctaagttgatagaggattgatcgagataggattatttctcatataagcttaggaatgaaaatagttctaacaaaattaatgtgatatttt

SEQ ID NO: 91987 - DNA, 149 bp, Glycine max
  unsure (1)..(149): unsure at all n locations
  Clone ID: PAT_MRT3847_5407C.1
gtgggggnaaatagactagtggaggagtcngacttgtcagagnngccntatttgaacatggtagnannggagaccttaaggttagatccggctggncccgtgctagtgcctcgcgagtcccnagactatnnaactattaatagttatcc

SEQ ID NO: 91988 - DNA, 349 bp, Glycine max
  unsure (1)..(349): unsure at all n locations
  Clone ID: PAT_MRT3847_54080C.1
caacaatggcgcacatattagcaggggtgatcccatccaaaatccttctctncccatcatcactccacaccttacctttcttccaacccccttctccatccttctcattnctttttttactctcttctcttcttaaaatctatncaacacttatcnccatccccatcccnaataccntcccaacataantncctcctaccttnatntttttcatttccatttatcaataattaattnacttcttcacttccttcttaacantattattttttattcttttccaattnccttcctcattacaacatctatcancttaataacaatccaaaattcattttcttaccacaac

SEQ ID NO: 91989 - DNA, 514 bp, Glycine max
  Clone ID: PAT_MRT3847_54081C.1
tttgggaatcttttttttttttttttttttttctttaagcaaaactgagaaaatgtatttctgaattgaaaaatcagatacaatagaagttgagatgctcatatttttttacatttgagcccctaactcgagagaattactactataacagaattagagaagctgacagattcactaactaacagttcatccataacaaaacaactactaggggaaatgactgaggaaaatattacactctcccgagttaatgctttggattagctcaacatctttgctgataggatgagagtcaaagcaaggtgtaaatgttcaacaaggccaaatgctaaaaaagttttctcaaaactgcatttgctctaagcataatgaaaacaactaaatcagtaaatgaacttttacaagctgtacatttcaggcattgtccttcattgggtgggggtgtgggtgtgcatattggtgtagcacagaatataaggcatgaaccatcctatacaacctttgtgttcttccc

SEQ ID NO: 91990 - DNA, 134 bp, Glycine max
  Clone ID: PAT_MRT3847_54082C.1
tggcgcgtggggtgtggggctgcagtctggaataagataactcaaacaaatgtatctgcgcgagcttggaagacgcggactgaaggttatgactgtaggactcagagctgctgcagctggcaaggtcattatgg

SEQ ID NO: 91991 - DNA, 745 bp, Glycine max
  Clone ID: PAT_MRT3847_54083C.1
tacggctgcgagaagacgacagaaggggattctctcacagggttccatcttttaaaatgactggtcaggaaagagttggtgttcctgtaggatcttatgaacttgatccggtatctttgccaatgaatcttgaagagattgctgttgctgaacatttggaagtaaaggagggtcattgtccatctagtggggtgggcacaaggtattcagatatgtcgaaattcacaatgaactcagagggagaagcttctactgaaaaggttaagtgggaaagaagcaattcagcagaggagaacaaggatcctgttgatcatataggtaatggtagtgacccttcagcttcagccgcagatgcttttgaaattcctgatcctgagttctgcaattttgatgctgagagttgagggaggtaatcgcacattgctaattccatctagcgagttattcagattctctcacagggttccatcttttaaaatgactggtcaggaaagagctggtgttcctgtaggatcttatgaacttgatccggtatccttgccaatgaatcttgaagagattgctgttcctgaacatttggaagtaaaggatggtcattgtccatctagtggggtgggcacaagatcttcagatatgtggaaattcacgatgaactcggagggagatgcttctactgcaaaggttaagttgcaaagaaacaattcagcaaaggagaacaaggatcctgttaatcatattggttggt

SEQ ID NO: 91992 - DNA, 538 bp, Glycine max
  unsure (1)..(538): unsure at all n locations
  Clone ID: PAT_MRT3847_54084C.1
cgtaagctaggatcctctanatttgccgctgtggggaaagctttttttattttttttttcgggcaaaaaagatgcatcatagtataatcattgcggtcattcccaagcatgattatccaattagttgagctactcaactgtctcgttatcctgtcttacagaagaaaaaaaataaaaaattctccttnnggaaggggaagccacggaaatatgtgtagaaagccaaaaactgcccaggaggtgcggggactggtgaggaaaaaatcaactttgctaagagaactatggtttgcaagccaagttgggttaaaatttacatttcaccacattcagcaatgacacaagctaatttaggccggttattgggtccggttgccacgtactcaatcttcctgacaaccaaaagaccatctgccagcactctgccaaagacaacatgcttgttgtcaagccagtcacattttgcacatgttataaagaactgacagccattgggattctcgcccgctatttgccatcgacagaaggccaggaccag

SEQ ID NO: 91993 - DNA, 568 bp, Glycine max
  unsure (1)..(568): unsure at all n locations
  Clone ID: PAT_MRT3847_54085C.1
aaaaaaacaaaaatttaatttttttggcccaaaaaaaatagggaattaaaaaaaaggcaaaggcccgngggggcccggaaaacccaaaccataaagatatccccgggggggcccaaaactatccaaaagggtagtataaaaacccaggggaccccagggccaggattacaggggggggggatctaccaaaaaaaatcctagaagggccccttttttcctattattaaaaaactattattatgggggccaaaaaaccccaacccaaaaacaaaaaggcccatcccacaggggggggcccaaaaaccccccccccggatcaggggggggcttttggttggggcctataaacccaacatttccactacccccaaatacccaaaaaaaaggtaaaaattatttcttcacaaaagggggcaccccaaaagcttttaagggtaaaccaaaaattaaaggcataaactttaaccctttaatttttttcagctacggggtaattatcaagggggctaagctttcccacagctgatatgttttgcctaaaaaatacccccaattaattacagggatt

SEQ ID NO: 91994 - DNA, 328 bp, Glycine max
  Clone ID: PAT_MRT3847_54086C.1
ccgaaacatgcctcttcgaacgcattccttttgagctcgttaacaatcgcagatgctctggcttactatgccaatgatgctgcgcttgatactggtctgaagagtgccactatgatgtgcacgcttatggttatgacccttgcaatgacctttggcatggatatatgtgcaattagactgacacatatactcactcacatcagcactggcttcttaaacatcaaggttgaccacaaggcatgcccggaacctaacattgaaccttgcgagataccttttgagcattaccctgagcatcacacttacaagcaggctgaaagtgctttgc

SEQ ID NO: 91995 - DNA, 276 bp, Glycine max
  Clone ID: PAT_MRT3847_54087C.1
cttagaaactgaaggtactttctgaagaagcatttaccttttttactactcttattttgagtgacttttcagtgactatttttcacgatgtacatctttaacatactgcccttccttccttcatattgcatccttttgtattacagttctgtgcagtcagggccagccgtggggctgagcctctgtgcacctacagctcccaagtgagctggttgagaaggaagcgtccgtatttacatcttggcaacatgcaggcctcctgaggtcctaactatg

SEQ ID NO: 91996 - DNA, 219 bp, Glycine max
  Clone ID: PAT_MRT3847_54088C.1
aatgcaggcaatgaaaatctcatcatatcataccaaaaaaaaccttcccacatttgactcctcctttataacaaaggcctaggaccgccttaaaaacccaaaaaaagggggattaagttccggggccccctcccttaacccccttggtaaaaactagccggccaaaatcctttagcccttagcccgggcttggaccaacccatttaaagggctaacaaa

SEQ ID NO: 91997 - DNA, 439 bp, Glycine max
  Clone ID: PAT_MRT3847_54089C.1
gcaccttacagggggggcgtaataacttggccgccttattccccccgcagaggtggaatggagacatggcttaacacttgatacactatcaccttattgaaagggctatactagtaggtccgcaatcctaggtggatgtgggaaaaaaatgtatgttcatatttgtaaaacgtgatgcgatccaactcataactttaaggcatcctagcggttacttaaaattctaagctatagttataaaaatctcgtccctgttattgctgcttgtcagcctctatttttatttccggccctggcattcttcacaatttgatgccatagcactcactgtgatttggatttttcctctgttttcgcccgggggatatgctcaagtttatatcaaaagttaaatgcattttcttgatcccatattcatattatatgcatgtaggttttg

SEQ ID NO: 91998 - DNA, 315 bp, Glycine max
  Clone ID: PAT_MRT3847_5408C.1
ctgtgctagggtttctgcatcttccacctccgtcgcgatgaaaccaggcttcatatgataccgattaccctgtcgctccttcttctccttaacctatcatattcgatcgattcctctacacaactatgatatatctggaagacatactcgcactcttgacagaatgaacgcatgggatagaaaactttatgggatacctacgcacctgattgcatcgccaatgactcccattgactttgcctttcctctcggtaaattacaataacctacctttgtcctctacaacttgtccttctccgttcatccgaacatgtt

SEQ ID NO: 91999 - DNA, 389 bp, Glycine max
  unsure (1)..(389): unsure at all n locations
  Clone ID: PAT_MRT3847_54090C.1
ccctcgagagcgccctcttttnttttttttttttttttttttttttgccccaaaaataataataccctttccccacgtgcgttatttataaaaagccccctctctttatattcaaccaaccacccccccttaaaaaaaaaaaaaaaaaaagctccccccatctttttacacccaccaaaagttccaaaaaccactttttccttcaaaactggacaacaccacccctttctatcaatgttttttcttcacaaaaaaacacaaagtaccacaaaaaaccctcccaaaataaaaaattttttttcttcccaacaataatttttcattatttccccaaaaaagcgaccattctctaaaaattcttcttctcacaccacacttttttccccatc

SEQ ID NO: 92000 - DNA, 350 bp, Glycine max
  unsure (1)..(350): unsure at all n locations
  Clone ID: PAT_MRT3847_54091C.1
aaaccgaagccgggtttttcaagggaaaaacaaaaatcttaacccgggccctacccccccaggggttttgggggggcattacggggggggggcggcccaacaaaaatttcttttaccnagggcgagggccaaacccccattttcattaaattggggacccgcggggtgatttttcccccgaaaacgaaatatttaaccaatgcctaccccccccaagtttttggggtccccgggggccccaaaggaaacccccaaggccgtttgcgnnngttttttcaagacccccccccccctaaaaattccatttatcgggcccccggggcccccccctctagaaaaaccccccttaa

SEQ ID NO: 92001 - DNA, 493 bp, Glycine max
  Clone ID: PAT_MRT3847_54092C.1
ggctcgagattgccgatatcaagtattgggggaaaagagactaaaccctcatcttaccggttaacgacagtgttggttggtgtctgtgcagtgaccatgaacacccaccaacattgccgatgtcaagtattgggggaaaagagacgaaaccctcatcttaccggattacgacagtatcagtgtcactcttgatcctaggcacctctgcaccaccaccactggtgccgtctgtatggctttacaccaatatcgcatgtggcttagtggaaaggagatttatctttctgggggcaggttccacagctgtttaagggagatccgtgctcgtgcttgtgatgttgacgatgaaacagaaggtctcaagatcacacacgacgattgcggcaaattgcatgtacacattgcttactacaaaactttcctactgcgtgaggactgggttcatcaactgccggcgttgcatgccttgcttatgccctagggaagctaatga

SEQ ID NO: 92002 - DNA, 471 bp, Glycine max
  Clone ID: PAT_MRT3847_54093C.1
ggtccggaattcccggtcgaccccgcgtccggtttacatagtaaaaaaaaaaaaaaaaaaaaaaaaaaaaaaaaaaaaaaaaaaaaaaaaaaaagaaaaaaaaaataaaaaaaaaaaaaaggtcacacaagcgaagccaaagactaaaaaaactcttatatcgggggacactattttttttttactgggcccctatttttaaagacggggggccggggtgaaaaccaccggggtgacccggaataaacacggcttgtaccacatctcctttttcttgagataggtattaatatttaagagggccgcccctttccccattctccccagacggacagcctttctggacagtgggaccccccctgtggagggcgcttccgcccggggggtgcggcgttccccgccggggggattggtatcctcccagcgccccatccccccctccttgggcctttctccctccctttttcgaca

SEQ ID NO: 92003 - DNA, 1528 bp, Glycine max
  Clone ID: PAT_MRT3847_54094C.1
ttccttcgctttcacattgaaattactcttctctcttcactattttggtactctctctctcacacaaactgagagcgagaaatattatagtagctctgcgtttttggggtatcattattcaaccacccattttctctcttcttcttcttccattgagaaaattctctttcatcgtgtgtgatcggtgagatgtacgtagcttccatgcgcaagtctttcaaggactccttgaaagtccttgaagctgatatccagcacgccaataccctggcttcagattttccaagggagtatgatggtgcatgccttcagatgagaatgtcatacagtccagctgcacacctgtttcttttcttggtgcaatggacagattgtcatcttgctggagcccttggactgttaagaatcctaatttacaaggtctatgtggatgggacaaccaccatgtctacacatgaaagaaaagcaagtattagagaattctatgctgtcatatatccctctttattgcaacttgaaaaaggtgtcactgataccgaggataagaagcaaaaggttgtgtgcatggagaggtaccgtagaagagatgatgaggagcatagacagtcttctgacatagacattgaaagagaagatgaatgtggaatatgcatggacatgaatagtaagattgtgcttcccaacagcaatcatgccaagtgcttgaaatgttacagagatgggcaatcttacatggaaagtaaactcaagatggagtcgcacgatatcaacatcatgcccgttgtgccatgtgagtttcacaagggtaaacacaggcgatctctgggacttcactgagcgaaggatttacgtagataaggtaacagtgactgttcaggatctctgatttgaggtatatgactgtcacataatttcagttaatggatcataacagatttttttacatgtacatatctaagatgcattaagttattgcagcatttccttttttaatgtatgctgttgtcttggatggatagagttaaattgatctccacttctaagttagtcacataaaagcccaagcccaaactcaatcagaggctaattgagttcgaattatatatagagtcgcagtacttgcttcccacttttgctgccagaagtatccagccctgtgttaattgtgggttggtggtgaagttgagatggtaaattgtatctatctagttagctcttttgtatatccctgtacagatcgaattaatcacttcttattaacaagagatttgcacatttggttcttgtcatttaagtgtgaatctcttgaggaaaaaaaaatcttttacttttcatcatcaatgaatgtatttaacggaatgtaatagcctcataggtgctttttctatgtagtatctatctgtattcgctatatttcctcaaggtcctcttaatagtaactactattatgttttatattatttaagcactatagtctataatgctgtttcaaaaaaaaaaaaaaaaagcggccgctctagaggatcct

SEQ ID NO: 92004 - DNA, 356 bp, Glycine max
  Clone ID: PAT_MRT3847_54095C.1
ctagtagggccgccaggcccatcagtcaacgcggactatacatattgacattccattttcaaagcagcttaatgattaattattgaggcacatattgatggaatcagtattattttctcacttgcttaaactatatagatactatttctatttatataaatcatattttatttattatctataatattatataatattattatggaaatatatcattaataactttttaaatattatcgattatatttaatcatgtttaatgttttttaaaacagaattaaatctttattaaatattatttatactttttattttatttcgaaaattttaatctcttcttttcttgtaaatttttt

SEQ ID NO: 92005 - DNA, 3044 bp, Glycine max
  Clone ID: PAT_MRT3847_54096C.1
ccacgcgtccgctaaaaaaaaccaaaaaaagaaagaaaaaactccaccaggtcctcctctcccggtacctggtaacccgcaccatgagcgacagcgacacccgccaaaacgacatcacaaagccactcgatttggaaaacctgagagtcgtctcggccgtggggcgcggcgccaagggcgtcgtgttcctcgcgagaaccggtgaccggtcgtcggaagaatgcgtggcgctaaaggtgataccgaaggcgctgattcttcagaaggcgaaactaataaacgacgtggagtacaccagggtgtcgtttgaagagcaggtgctacgtcgtttcgatcatctgcttctgcctaggttaagaggggttttcgaaactgagaaagtcgttggtttcggtattgattactgccacggtggcacgctccattcgcttaggaagaaacagaccgagaaaatgttctccgatgacacgatcaggtattaaaatcaaggttaaattacttatttatttatagattcacggtttatattattttcttagtttttatgatttgaaagggaattaaaaaattatttttaaactataaagattaaaataaaattaaaatataaatataaagactaaaaaaattattttaaaattataaggattaaaaatataaaaatcaaacaattaaacctaaaattaatatttgctgttttaatttattatttaaatttaatttagtttttcatttttaaaattgatttaatttgattttactcagcagcgtcatctcagtgcgtcacaccgagtccgacttggttgaaaaatcaaactcgttcgtaggaacagaagagtatgtatgatcagaaatagtctccggaaaaggtcacggcttcagcgttgattggtggtcgtacggtgttgttcaatttgagatgttgtatggaacaacgccgtttaagggctcgaataggaaagagacattttaccgaatcttaatgaaggagccggagttaacgggggagaagacggcgttacgggatttgattgggaaattgttggaagaaaaatcttatgtttgtttctgaatgggatgtgattttctctcattccttctccccattaggttagccaagaattaagcttaaatgtgtgtttagatgaaaattaatatagtggttgatttgattttatcgttttttgtttttattttttatattttttatttgaaaatagttttaatttataagttttcaagattttaaaaatatatttattttgatttataaaataaatatttatcatatatttactcctttttagttcttcagacaatgctgaaaatggtaaattattgttttcaatttttaacttgttttttaacattgaaattatttttagagaaatatttaaaaaaaattaaccaaacacatttttattcttatcttttgttttttttaaaataaaaacaaaaaaaatactctaaccaagcatgatctaagcttaagggaatgaaaattttggaagttttgtttgttttatcactttattacgtggagagtaaattaaaggacaatttctaattagaatgtgttttaggtgtataaaatgaagattattttttattgattatgtaatttaaagtatttttaattaattattagtgtaatttggggaaacagaaaagatcttccatttttttttcagtttatatgatgagtctatgttaatggttgaatttattttctcggcaaccaaacaagaccgattctgattacttgtcctattcgcactgtccaattaggctttttttgcttctctggttgttttcgaaaaaaaaataataccgaaattttgtgctttttatgttaagatctttacaatcgtcaattgacattactaaaaaaaaatgaaggaaaacaaaaatattaattttctttcatttacataacaaccaaacaaagcacaaaaacaagcgaagaatctgattcttttttgtcttgggattttttgtgtgaaggttttatgcagtggaattggttctcgcattggagtatttgcacaatttgggaatagtgtatagagatctgaagccagagaatgtgatgattcaagataacggtcacataatgttggttgattttgacctctccaaaaagctaaaccctaaatcccctcactcactgagtcaaaactcttccccgagtcccaactcgaagacaaaacaaactaggaagcaacgattaatgcgtttctacagtttctgcaactcgggaatcttgccctgcgactcggactcggagcccccactcagcagcgtcaactcagtgcgtcacaccgagtccgacttggttgaaaaatcaaactcgttcgtaggaacagaagagtatgtggcaccagaaatagtctccggaaaaggtcacggcttcagcgttgattggtggtcgtacggtgttgttttgtatgagatgttgtatggaacaacgccgtttaagggctcgaataggaaagagacattttaccgaatcttaatgaaggagccggagttaacgggggagaagacggcgttacgggatttgattgggaaattgttggagaaaaatcctgaccgtcggattcaggttaatgaaatcaagggccacaattttttcaagggggttaagtgggacacggtgttgcacattgcgaggccaccttatattcccgaaaatgaggttgagaacaaagtggggttcagcaaaagcgacgtggaagtgttcgtggacaacgtgttttttccaacgggtgatgatggaggagagaaaacaaaaacgctgttggataataataataataataataataataataataataataataataataataaagtgtggattgacgaattaagtcatgttcccattgggaagaagaatgacgattttttgattttttgagtgacttattctcttaatagactttagactaaatgtggattctatcctacctaaaaaaactaaatgtagatggcatgcattttttggaatctaatttatattttgaccattgttgagaatg

SEQ ID NO: 92006 - DNA, 431 bp, Glycine max
  Clone ID: PAT_MRT3847_54097C.1
aaacgtgcacacattcctacaccacatcgaacccctttgcaaaagctcaagcttctccatcaccaactccatctcctccaccgcctctaccttcttcaccgccaccttccgccctccaccacccatcaccgccgtccacgtctccacgcccgccctcccgccctctccaatccgccgcaccagcctcaatcctccaccaccgttccgccacagtacttcatcgtctgtcagacagatccaacaacaactttgaagtagctccgatagtcttggtcttgatctggatcttcgtcttcatcatcggtgtaatcgaaatcgaagtcgagaacggacctgacggcgttagaagaagacggcgagcggaggagcgcgaggacggggaagtttttcggaagcgcgtggacggagtttccgacggaggacacgtggcg

SEQ ID NO: 92007 - DNA, 426 bp, Glycine max
  Clone ID: PAT_MRT3847_54098C.1
ttgctgggacattgggatcacagcacctgagtatgcactccatgggcaattatgacaatagggtgatatgtacagctttggaataagagtccttgagatatgagtggtcaaaggatgattgattaacaagggcattgatgctgatgatggtgaggatgaataccttcttcgacaagcttgtaacgtttaatgtgagaggcatgcactgggagcttgttggtcaaaagctcataccccaatagttatgatgcaaaataagtgaagagaaatcacattgcatctgctttgatgtgcactcaatcatcacactgcaatgaggacatccatggctgataaagtacatctactcaggggcaatcacttacttgagcctctgataccttgtatgcctctctctattgatttgacgaatttaaggccgcacac

SEQ ID NO: 92008 - DNA, 475 bp, Glycine max
  unsure (1)..(475): unsure at all n locations
  Clone ID: PAT_MRT3847_54099C.1
gtgaaataataatgtaatacaaagataattttttaaatctttctctaatacttttattatttctgtttattatatgaaatagtaaatatcatctctgtttgagttatttctgttatatatttgaagaagtaaaaagacgagtatgatggtgtaaaacctaatctctgataatgggaagcgggaagtattagtggtgaggtttgagtccagtatgttctggaatgcgttggtaaatccgattcatattcatttcaatgtctggcaacgtgcttttcccggatgaaatcctggtggaaatcctccacagacttccatcaaagagcattctgagatgcagcgccgtgtgcaagtcatggcgctctctaatcagcaacgaatccttcatctncctccaccgncgncactccccttnctttctcctccttggcttcagcaacaagctcttncttccccaccgncgncaccaccacgatcc

SEQ ID NO: 92009 - DNA, 137 bp, Glycine max
  unsure (1)..(137): unsure at all n locations
  Clone ID: PAT_MRT3847_5409C.1
aaccncncctcgcacgcgtncgnaagctcggcanttcggctcgagatngaatctgcnaattcannntttncatcgatcntctaatttnanccanacaacncaancgttacanactcccaacgtccagnagggngtct

SEQ ID NO: 92010 - DNA, 453 bp, Glycine max
  unsure (1)..(453): unsure at all n locations
  Clone ID: PAT_MRT3847_540C.1
cacaaagaatgtttaccaagtatgggagttacccatattattgaagcattgtaaaacagttcnttgccagtacatgtccggggactacctgctggtgactaattgttttacaatgcttcaataatatgggtatatttcattccagggataccgtctactaacgttcgcatttatcgtcccgtgtatttctttcttgttcttgctgtccttcctgtcttttcattatcgattcgtattattatttttttttattacttttttttattttttcattttctttttcttattattactttctatttattattttttttccttattcttaatttttttattttccttttctttttgtttaattatattatttttttttcttttttttatctttatttatttttttttttatgtattatatattctaatttttattttatttttgtttttatatttttt

SEQ ID NO: 92011 - DNA, 839 bp, Glycine max
  Clone ID: PAT_MRT3847_54100C.1
cttgtatagatgttgaaaatgatcccactagtcctgattactccaaggatgacaactctggttccatcataattgaggcctcagctcaatttgcagatcacttatcaagtctttcaataatgtctttaactaaaggaagtaaaaactcttcaagggcccagtcttcaataacaattactcctaaaaagaatgtaattacaagtgatattccagaaatggaaagtgttaactctcataatcagaaaaggagaaatcccatggtcactccatttataaacctcgttgaagaagataattttgttgcaccttgtgccagtcctcttacatggtacacaaaaagctccgtagatgttagagagatcgcgcatggaagtgaatatggtttcaagagaattttgaagtcaaattctcctccattactgacaagcactatacctggttcttgttcaccaactgcccctccactagacaaaaggttacagatattttgttcactctgcaaaagtccattgggccgacctgagaatcatctatatcttacatgctcattgatttcatcatcaaaaaatcatttgagatcccttttgaaacagaggttgaaaacttacaatactgatactttaaagagtgttccagttataattaccgattctttatttgttgatcaacgaatttgcaatggaatacccaaaagtgcaatggaacagggtatttggtgtccagaagatgggtgtgtcttcagcactattttctgtcccttctgcagtaatatcaacaatttgctaggagttcagatcatggctactgactcatcaaatgttcagttacttgacaagata

SEQ ID NO: 92012 - DNA, 757 bp, Glycine max
  Clone ID: PAT_MRT3847_54101C.1
aatcataagtttagttgaagtaatttttccccagttgctccttattcttgactcctgacttatctaagcttttgaattaatccttttttcttgattaatttaaaacctgcaagtacaagcaactggatgcattagacacggggaatggatgaatataaaaggccccaaatacagacttttaaaatcccatgacttaattgggtgctatggtcaattcagtggcaccatggaacccaaagtttgcccagttgtcgaactaatgtttctagtgtcactttacagctggtaagttgaatgcttagttatgatggaattgcctgtagaattaggaggaaaaggagatcctcatgctaagaattagtgtagcttatggagttgaatatctgtgcattacttgatttgaagaggaagactacttcaacatctcctatggtcaagttgttgtccaaggctcaacaaaaaagcttctaaaacttaacgatgattgatgtaggttaaataaaaaagataaaggtggctcaaagatgccatcagtttatatcttgaaggtagattgagtgccatgtatagtgaacagattgtacaagttagtgatgatttcttggattagagtatgccattaaagaatatgtagatggtttcaacactgatatttcaggtgtcattattctatcgaggatggatattttcaaggagataatatgtagatggaattggtgcttttctgattcaacttgagtcatcaaattacatttga

SEQ ID NO: 92013 - DNA, 250 bp, Glycine max
  Clone ID: PAT_MRT3847_54102C.1
gggggatcctgttagtcgtcctccggcattgattaatgcgccaggcccggaaggtcattggttgttacaaaaaagcttgctaaaaaatatccttccttccggggaaggccaaaaccacctgtcttatttggggaaattcttttgcagccttggaatgctttaaggcctgttggattattatttttttggagaatctttaaacaacttcttgggtttgaggttgattttgccataaaaaaagtaaggggac

SEQ ID NO: 92014 - DNA, 798 bp, Glycine max
  Clone ID: PAT_MRT3847_54103C.1
tacgtataacaagttttggacaacaagacccaaatgcaaagttgtatgattatatataaccttcctggacatctgaaaaaatctctctaagccaaaccaggctttacccacatgctaaggttatgatatgctctttggaaagaagcagggcccgaaggagaatcgaacataaaaaaacatgaccaaaatggacatggaattctcatcatcttccccttaagtttatcttcattattatattggttaatttgaagctgcacgtacagtggtaagtaacggaaaatggggttgcacatggtggctgtggcgaagttccacttgcatgttgccagacacagtgtaggccctgtggtggcttggaccgtttgtcctatagccttcaagctcttattgagtctgaggatgttccgagaagaagcactttactcaacgaggttcttcttctttcgattggggcagattgtcttcaacaggaatggtacaaggttggagcgagctttccgactgatgctgcaaacatttacttccaccaccactgctccaacaacacagcaagaagaacagctcaaccaggacaccttcaatactcttttaactctcacactatagtcgcttactttcttcttctttttccccttgttttgttggattaataaatgttattagttagcagaggttgcagtactcatatcatatgtgctctacatatcactaaaatgaattcatgcattttgttatttcttcgttatcctataacctgcagtctggatctccacttgcccgtctccacattctggt

SEQ ID NO: 92015 - DNA, 284 bp, Glycine max
  Clone ID: PAT_MRT3847_54104C.1
cacagatcgcaattcatttcctcatcagacataagtatgttgtctagttagtagttagtgcgcgactgcgcttcacattcgttatctattagattatatgttaatccttctcaatgaaagacattgcggagggatggaagagcgagattgacttgggaatcttctgaaaagcttccgagtttgggaatgagaaaactcgggcttggctgaagagacgggtcgttatattttcgtggccgatgggttatgctagattgaaatgaattgtgggttgactatgggtg

SEQ ID NO: 92016 - DNA, 353 bp, Glycine max
  Clone ID: PAT_MRT3847_54105C.1
gcttgaacagttggatcgtttcgcaatacaaggccttttacttgaaacatgggacgtcatcagcgaagcgtctaccatctcaaagcgtccaccgcgaaggaaaagtttcgcggaattcccctgcgaatggtttctcgatcaaaggccatcatcgcaggaaagcagtgcatgggttcgggcctattcaatagaggcgcgcccaaacatccaggcatcttgcttcgccagtacgctcaggagtatagtccgaagcgggtaccgagactaccttcgctcgaagcttggaagcgaatagtaaaatccgaccctcactgggcgaagttacgagaaaccatcgatataaagctcgatgt

SEQ ID NO: 92017 - DNA, 453 bp, Glycine max
  Clone ID: PAT_MRT3847_54106C.1
gggaacttccaactgccggtgggttttaacccggggagaaaaaatttttggggaatttcttctcaacggccttaaatggtgcccctttcaggaaacttttttacaggggaacaatttgtccccctttattggccccagaaaaattcgagggggaataggggccaaaaataacttggggcctaaaattcggggggaaaaatttcttttccgggaaagctgaaagggttcaccccatccctggcttttggacaaaaaaaactaccctggccaagaaaggggccgcatgggttaccatatttaggatttccccggccgggaaactggcccttttggttaaaaaaggaaacctttttgaaaaaaccattccttggaagggtttgctgaacaatttcacctttatgcccaacaatacaaaactttttggcgggaaaggggggtatttaaataaatttt

SEQ ID NO: 92018 - DNA, 650 bp, Glycine max
  Clone ID: PAT_MRT3847_54107C.1
aattcggctcgagatagcaaccccttaccttgtgcgtgtttgctccggggactcacaggtcacaacctccacattccgtgttcgttcttccatttcggtacaactgaaaagtaacaccatgattcagtttcagtgatggaagtcgaagctaggcgaatcaggaggtttgtgcctcagaggccctcacaccgcactattctcccgcttcacgcttcttcctcctcccacaatgtttccaacaccatttcctgctggtattgcgactacaaaatctgctcgtttaatagacctcttttccactttggtcgccgatacgccaggtttttgaaagtgtggttttcgattggggttgggtttgccctctctgctgtactcggagtcactttggttctcctttgggaactagccagaacattgcatctctgtgccggcagcaataagcttggaagctttgctagatccttgctatttggcatccctccttcagtccctggtttaagtttatcgcttgctgatactgggtatgcatgtgtttctaccatcatatctgtcttcatgcatgaattgggtcatgcagttgcctgccacaagtgcgctcgcccccgttgtcgcgattccggccttcgctgctttcttacttttctgcctta

SEQ ID NO: 92019 - DNA, 321 bp, Glycine max
  Clone ID: PAT_MRT3847_54108C.1
aaaacaaatttctcaactaatacaaatggccttgggccactacctcctcactttggaaactgcttttacttaatgaaattgactacttatgctgaccttttttttatcctttattcgagcagatcttccaatttgcactactggcctcctgggaatgctctataataccaatccctacagtaaaaaggttttccatcagaagcctcaacaggcttcggtgctaaatcattagccggtctcaccatcactggtaatttaagcacctccttttttttcacgagcttcgtttgaacctcgggagcttcgaaagacgattaaatt

SEQ ID NO: 92020 - DNA, 499 bp, Glycine max
  Clone ID: PAT_MRT3847_54109C.1
ttcgcgctcgagttcgtaccataaaagcctatctaatatcttaaacttatgactctaattcttctgctgaatgatatgccaaagacaccccaaaactaagaccatttatcctctttctctttttccccttccaaacatttcaaagaacagcatcatccaagactaaatccagcacaatctgtccatgagttatgttctttaaagttttaacaataaggccacggaggttctccataggtgactaagtgaagatatgtttggatatatatgcagtgttgcagacatgatcaatatataggcttggaagagaaagaaacgaggcacatcatcatcatcgtgaatggttggtgtactttaggggaaaagacatgaaatgccatttataatttgtacacattaataaagaattaaagttggaggtgatcctgatcgagcaacaacaaataaatatgtcagaagaatatgagaggagtgaggaacatgctgatgatgactcttc

SEQ ID NO: 92021 - DNA, 314 bp, Glycine max
  Clone ID: PAT_MRT3847_5410C.1
ctgcgagaagacgacagaagggggatatgtataggtctagttttctagggaatcctgggctgtgtggggatttgaaggggttgtgtgatgggaggggtgaggagaatagtgtgggttatgtttcgctgcttcacacgatatttgttgatgccactctggttttcctctgtggtatctttagtttttactttaggcactagaatttccccgactccatacgtgctattcataagacgaaatggacgttgatgtcatttcataagctggcttttagtgaacatgctattttgaactgtcttgataaggataatgtc

SEQ ID NO: 92022 - DNA, 533 bp, Glycine max
  Clone ID: PAT_MRT3847_54110C.1
ccacgcgtccgggaagctgaagatgatgatgatatggatggttttcaaaccgatgatgaagatgaggatggcagtggttttgacaaggaaatgggagttgatgctgatgatggagaggacaccgatactatcacacttagaaagttggccgaacaggcgaagtctttccggccccatgatgatgatgatgatgattcagatgatgactttagtgatgatgaagagttgcagtccccaattgacgatgttgatccttttgttttgtttgtggatacaatcaaagtgatgcaatcatgcggatgcatggaggtgttgtgaaccttacccaaacgcttgagttgaattatgaagctgtgagtaatggtgtgggccaggatgctgagcagagtaggtgggaagtttaggaggagaaaatgtggaagggtcgggtgggacaggtggttaagctggtgaatgggcatggtggctgggggtgggggagtggtgagggggtggggggcggtggtgggggagggggggggggggggctgtgg

SEQ ID NO: 92023 - DNA, 1715 bp, Glycine max
  Clone ID: PAT_MRT3847_54111C.1
ggctcgagtggtggtgaaattgcctggccaacccaaggttgggtttaagcaatttgctggatatgttgatgtagatgccaagcatggaaggagcctcttctactattttgtggaggctgagcaagaccctcacaagaagcccctcacactttggctcaatggaggtcctggatgttcctccattggaggaggtgcttttactgaattgggacccttttatcctaaaggtgatggacgtggtctccgaagaaattcgatgtcttggaataaagcatccaaccttctttttgtggagtctccagctggagttggttggtcatactcaaatacaacttcagattataattctggagatgcctccactgccaatgatatgtatttgttcatgctgaaatggtacgagaagtttccatcttacataacaagggagctgttccttactggagaaagctatgcaggacactatatacctcaattaactaatgttttattggaccataatgctcgttcaactggttccaaattcaatattaaaggagttgctattggaaacccacttttgagacttgaccgggatgcacctgcaatttatgaatacttctggtcacatggaatgatttctgatgaaattggccttgccattatgaatgattgtgattttgatgattatgtctatgcaagtcctcacaatgtttctcaattgtgcaacaatgccatatatgaagcaaatctcattgttggtgattatataaacaactatgatgtaattctagatgtttgttatacatccattatggaacaagaactcagattgaaaaggatggcaactaaaataagtgttagtgtagatgtgtgtatgactctagaaagacgtttttacttcaatctccctgaggtccaaaaggctcttcatgcaaaccgtacaaatcttccttatagctggtccatgtgtagtcatgttctaaactacagagacaccgatggtaacatcaacatccttccaattctcaaaagaatagtccaaaaccatatcccagtatgggttttcagcggagaccaagattctgttgtgccactattgggatctcgaacactcattcgtgaactagctcatgaattgcaattcaagattacagtcccatatggggcttggttccacaaaggacaggttggaggttgggtaactgagtatggaaatttgttgacctttgccactgtaagaggagctgctcacatggtaccttatgcacaaccttcaagagcacttcatctattcagttcttttgtgcgtggcaggaggttgcccaacacaacacgtccttcaattgatgaataaggatgatagttatgccagttgtgtaacaaaaaagtggcatgctctgatgacttttctaaagcctaaaaggccatagaaaaggaaatgtgaaaggaaaaaaaagactgtttcgttataagtaaccagcgattgtatggaaaggaaaattaacgtggaaaaaaatttgcattccatcgtacttctacttcatttggtagcacagatttctttggcttcattgctaggcgcctttgggattctagtgaaaaatttaagcaactttatttttgtcagttatccttatcgcaacaaatgcttgttttgaaagttatgtatcagcataaggtttggattattggttaaaatgaacattaattgaagagaatttagtagcaaaacc

SEQ ID NO: 92024 - DNA, 388 bp, Glycine max
  Clone ID: PAT_MRT3847_54112C.1
ctctaaggggaaaaatgtttttcaagatatttcccatccctgactataggtgaaataacttttttctttttccaacattgggataaaaaacccatgtgatatcttaaaatcccggtgcccgaagaccatgccagttgtaccacgtccggtttcctaacttctaacaacccgcctgttgtgcctaaagcaagattaacccttatcttccagttgtccccttcatgaatattaaccctcaatttccgtgccactcttggaaaaattatgtctggaatcactccaaaaatacttgcattttggcaccccccctggctggagagatttacaggaggttccccccaagtttctcaggtgcctcgtttaaaccctcttttttgtttatgccccc

SEQ ID NO: 92025 - DNA, 290 bp, Glycine max
  unsure (1)..(290): unsure at all n locations
  Clone ID: PAT_MRT3847_54113C.1
ccgggccgacccacacatcacacccactctntccgctttcccctaattccgactatgtttattccacggccctccacaatnagccgtctgctttttattaaacaaaggcgccaaacccacatcccatacttcttactccttcccactcaataccattcaccanttccctcccacaagcccattccaccttccccctcactttccttcctaccatcctctcctcaaatcccctcacaaactaaatattctacttactttacttatacacaaccatttatataacttttacc

SEQ ID NO: 92026 - DNA, 923 bp, Glycine max
  unsure (1)..(923): unsure at all n locations
  Clone ID: PAT_MRT3847_54114C.1
cttgttgttgagtgaaggaaacggtaggaagctaattcgtttgtgatggaattggagtttggagaaggaaagtaagagaaagaaactatgatgatgttttgggtagtggcaacattgggattggatagattagcttctaagacaaggaaaaatcaataaaatggagtaagaaagagcatagttaagctttttctttctttttccttccgcaagcctagtggtattttttttactgcttcctcttcatcttccttaagctgcaacatttctctttggtgattgctcatattggcacatgttacatgcaatgcatatccttgttttacttgaagagtcatattaaggtttgtacaataatcagcaattgttgaggagctgagagaactcttcttaacatgacaatcttctatgtgttgctctttctgggactcttgtgggctgaaattcatgtgatttcttcattcactgatactcgagacgttgttgcacttagatcattgaaagatgtatggcaacatacaccacccagctgggacaaggcagatgacccctgtggagcaccctgggaaggagtgacctgcaacaaatcaagggttacttcattgggactgtcaaccatgggcctgaagggtaaattaactggagatattggtcaacttacagaattgagatccttggacttgtcctttaatagaggtttaacaggtcctctctccccacagttaggagacctcagcaatctaaatattttgattttggctggttgcagtttcggtggcaatattccagatgaattaggaaatctttcagagctatctttcctggctttaaattcaaacaacttcactggaaaaatacctncttcattgggtaaactctccagactttattnggttgacttggcagacaatcagctgacagga

SEQ ID NO: 92027 - DNA, 369 bp, Glycine max
  Clone ID: PAT_MRT3847_54115C.1
aaaaaaaaaaaatttttttggttaggtttccattccattgggaaccacccaaggtttaggggtttttctaacatcttaatattcctattagaaatgcccagggggaattttgacaattctttttttttttaaagtttaggctttgtgaaaaagttcccggatccctgtttttggctaataagggaccctagtgggaacctggttgttaaattttttcctaaagtccccttttttggagggatttttggaagggggctttctttttttggaaccaccctttttttattggggataaataactttgttgttgggtttggttaggtttttcccttctagggtgggggggggccctgtgtacccagttattgc

SEQ ID NO: 92028 - DNA, 396 bp, Glycine max
  Clone ID: PAT_MRT3847_54116C.1
ctcttctctagttttctccatcattactcacaatgcgctacctcacttgcaacgccgagtccgcaatagccacatgcgaccctcactccctcaagaagaagaaaaagcccaaaagcccagctcaggcccagcccgtgcgacacttcgcctactccgacatcctcgacgccaccaacaacttctctgccgacaccttcctaggtaaaggcagccacggcaccgtctacaaggccgccttccacggcggcgccctcgtcgccgccgtcaaaataaccaaacccaaaacctcaaacgaaatcgaaattctctcccacctcaaaaaaaaccctcgtcttgttaacctaattggcttctgcaacgaccaaacccaaactaacaacatttacacacacaaac

SEQ ID NO: 92029 - DNA, 632 bp, Glycine max
  Clone ID: PAT_MRT3847_54117C.1
gaagatgagagagtacacactacacggcttcacagagtattgatgaaggaaccctcgagctaacccgctgtcactctcggcgcaccccaccatcactcttcgacggaaaatgcagcgtcgcaacggcgcgcgcttcagtgatcagcgcctcagctgcagcagtgcgccttgccaccgtgacctgggttgcaacgccgcgctcgtcagttcgcctctccgcaccaacctgagtccgtgataactgttgccgtcaagggttcgttaggggaaaactataacagcaaggttcttttcatctttgctttgtttgatgttagtatgacaatcctattgatgttggtttgaatttcattttgttatgtgcttcgtttggataagatgagggttcagaggtttgagtgtcctgtgttcggtggataaattttgggggttctgaggttcataggtttgaagggtcaaagcaaagggacatgatcctttcttgtgttcggtgtgggtgagttcaaatagaggggagcattggtatctaggttcgtagggtgagtgattatggctgtaatagcttagtctactaaaatcaaagagggaccagcctcatcgtggtaattatcggacatctctgatctcgagcc

SEQ ID NO: 92030 - DNA, 636 bp, Glycine max
  Clone ID: PAT_MRT3847_54118C.1
ggctcgagaaaaaaaagcctgctaccaccaccaatctattgcgccttaaaaaacaactccctcacgattaacaaactcgtgcattccaccaatcccaaggcacaacagcaacaatgtcagcaaccttaacatgtaaactaggagacaacaacctaagcttaaacgataaaaacgaccaacccccttcacctcctcagcccctacaaaaatgccctgccaatatggtttcgatggtggtctcagagctaagaattcaacgaggaatagcccttccaatggtggccatgaatttggcttggtttgccaagacagccatcacaacagcatttttaggccgtcttggggagcttagtttagcaggtggagctctcggcttcacttttgctaatgtcactggcttctctgtcctcaatggtctatgtggtgccatggaacccatatgtggacaggctcatggtgccaaaaacttcaggctccttcacaagacccttctcatggcaatctcgttgttgctattggtatcacttcccatcactttcttgtggcttaatgttgacaagattttgatcctttttggccagcaacaagacatctccactgttgccaggacctatgtttcatgtctcattcctgact

SEQ ID NO: 92031 - DNA, 263 bp, Glycine max
  Clone ID: PAT_MRT3847_54119C.1
gtctctacaagattctattgagtctgctttgcaatggagagatagaagctgggcgaacgttcaatccagcaacatatcggtcaggtttctgctctcttgaaagcatttgctgattatgtggctagcctttgtggaactccataccctgttgactatgatatatggttgaaaaggttgaacaaggctgtggaagtttcagcggataaaggtaaaatgattgaggaagtacctataacattaggattggaggatgctgctgagtc

SEQ ID NO: 92032 - DNA, 553 bp, Glycine max
  Clone ID: PAT_MRT3847_5411C.1
cccacgcgtccgcaaagggctagcttaattagctagaatgaaacctcacgtttctggtgaaagctctaatttggccaaggagtctagcagatccgtcggagagaagctccaccaggtttgtaaggctgccatggtggcaatcaccaccgatggatccaaccaacgtagtagtaggcttctccccaatcaaaggttgagcctccaatcagaagacccaattagaaccttgatgttcttgggctcttggagtcacacgtagctaaatagattgaaccaaactcttttaactgttttaagtttggagaaaattgaacaacaaaactatgggtgggccaaaattcattcatatatgttgtcacacatataatattatactatgtcaatacatgcagggagtggcgtaaaaatcttataagcttccatagcctgatatatatataccatacggcagcaacctaaagacaaaaaacactctgcatatggctgcatctgcatatatatgtctgtacccaaaaaagtaaataaataaatctgtacatatatatatatatat

SEQ ID NO: 92033 - DNA, 1749 bp, Glycine max
  Clone ID: PAT_MRT3847_54120C.1
gcattacatcacgtggctctcacagtaatcttcaagcagagcgatccgacacgatgggctcagcagcgaaatatgagcttccattcaagctgaacaatccggacctcctacacaatgaatcgttcgtccacggtaaatgggtgaagtcgaagtccggcaaaactttcgaagttgcagatcccggaactggcaagacatggatagattgtccaacaaacgacgcttcagacgttgacgaagcagtcaaaagctcgcatgaatgctttctggaatacaagaagatcagtccgagacagcgtgcgcagatgctgtacaagtgggacgctttgatcaaagagaacagggaagacatcgccaccattcttgtgtacgagactggtaagccgagggctgaagcttatggcgagatcgactattccacaggcttcacttggtggttcgcaggagaagcagagcgcattcaggggtctgttttcacccctgcactgccgaaccgtcggatcttcaccatcaagcagccgctgggcgttgctgctgcgctcgtaccgtggaactttcctattgctatgatcctgcggaaagctggcgcggctcttgctgctggttgtaccatgatcgtaaagcctagtccagagacgccaatcaccgtcctagcactggcgtatcttgcggacaaagctggatttcccaagggtgcgctgaatgtcctgacgacagatctcgacaagacacccgagctaagcgaagcgctatgtcggcacccgctcgtaaacaaggtaacgttcacaggatctaccagagtcggaaagctggtggcgaagatctgttcggacaatctgaagaaagtcacgcttgagctaggtggaaactgtccagtcttgatctttgacgacgcaaacattgagcaggcaatgtctcaggtattcgcgctcaagttccgccacgcgggccaagcttgcatcacagcaaaccgcatctacgtgcaatctggtattttcgacaagttcctggagcgctggaacgccgaagctcaaaagatcgtcgttggtcatggttctgacgagaagactacaatgggcccagtcacaacaccgcgagccgtcgacaaagctctatcgctcgtagaagacgccaggaagaagggcgcaaagatccataccggcggcaacaaggttgagaagaacggtgggtatttcttcgagcctacggtcattacgggagtgacaccagatatggacatcgccaaagaggaagtgttctcgccaatcagtaccttcatcaagttcgagacggaagatgaagtcgtcaaggcagcaaacgacaccagcatgggtcttgcatcctatctcttcaccaagaacgtcgatcggatgtggaggctgtttgagaatttggaagctggcatgattggactgaacactggtaagtctgtaccgaaagcaagatactccttggtggtgactaatgggtgaaccaggaaactcttcggcggctgaatcgccgtttggtggtatcaagcaaagtggttatgggaaggagtctggcaaggacgtggcggtgaacgagtacatgatcacaaagaccggaacgtttaccttggaagatcagtcgtgagatcaaacgcggtgaatctgcggcgtttgtatctgtcgattatgcgtgagaatacggtaccagacattccaccattggagagacaaacgatcagtcaaatagatctgtgcatggcggagtgtaccgtttcttctc

SEQ ID NO: 92034 - DNA, 350 bp, Glycine max
  Clone ID: PAT_MRT3847_54121C.1
aacaaaattggggcttcaacattaaaaaaaaatgggatcaagtcccactagaaggggacttttccccaattttttaatttacaaagcctcctggttttttttcccaaataccttggcactctaatttttttttaaaaaaagaaaaaaaaaagaaaagaattggggaagagtccaaaataacaaggggccaaagggcaaaaggcgggtttccctttagctttatcaaggggttggtcctaccaatcatgatcaaaagggggaacttacccaatggccacatcaaggggcattggtttctcctttgaaacaaagttactttttggggcgggtgcgggctccgcaaactgggc

SEQ ID NO: 92035 - DNA, 1150 bp, Glycine max
  Clone ID: PAT_MRT3847_54122C.1
caatctcttcccctatattcacgccgtgctgatcacttccaacttcacactttcttctctatttccaaaagcaacatctccgcacaatccacacacaacacaacaccattcttagtttttttttttttttttctattaaaccaaaccatttgttctctttctctcttcttcttcggtcacaagaaaaaaaaaaaacatgactgagttatctttctcaaacacttccaacaagaagaatgagttatctagtaacctcttctctatcttcttccacttctgtttctccattttttctcaccctttatacttctcctacttcatcttcttctccccttacctcctcaggatcctgtctttcctctcccctttgttcatcaccacaactcttctccttgtggcccttctcactttcactcccaacaatcttgatcaggaaaagggtggttctgagctttctgagtccaaatggggcattctgctttctgttttgcaatcttttctagcatggcttcattccaaagctgatgagatagatgaggaaatggggctcctaggtgaggttgaggcatatcttgtcatgttccaggcatcaatctttgaagtggttgatcctaagtcactgcaagattgctcagaaggctttgaagcagttgatgctgagtgctcagttgaaggaagagaagattcttgtgcagtggaagagccaaagcctagtgtcaacttggacaaaaaccttccctcacaacgtggtgaaccaacgttcgaatatccgtcaaaagtgtccacatttaatgcccaacagtgtctcgaacaagattgtctagaaaaaaggataattgtggacgaaagccttcactcacaaccaaagttcgaatccccgttagaagaggtgcctatatttagtgcccgacagagcttcgaaaaagattgcccccaaaggaagataccagtggagagccaaataaacatggatgaaaacccagttgagaaggttgatgaagtggaagccactatgcctattgtagaagtcaagagcctaaaaagtttgttccaagaaaatcaagagttggaagatttgtcttctcaaaaggaacacaaagaagtgaagccactgattgctgagttcaataaagttgaagaaagtaatgag

SEQ ID NO: 92036 - DNA, 528 bp, Glycine max
  unsure (1)..(528): unsure at all n locations
  Clone ID: PAT_MRT3847_54123C.1
cccgaatctatcatttggaaataaagggtgtttcgaggaaatccagctcctttctctgacaaattgtagctacaggtatgaaatgacacaaccttgcaaacactgaattttggtttgttatagttgcatttgagttatatttagcagtattgttatagttgcatttgagttataatatttattaaaataattactnntttttatcaagattatgtttattattatatttattttaatttatatttattttttaaaatatttgttgtgatgttataattacaacaataaaaaatcataatcacacataaaaagtttacgaaaaatcaatattgcaatttagacttaaatctttggatctgatgacttctaattgaaaccaatacaaactgattggtgattttaattaacctatctatctttttctctatttcatttttatttattttaaagcaacacttttattttcatattatttttcacatatttcttttcttcttattagttaaaaaagtaaagttcaagcctttg

SEQ ID NO: 92037 - DNA, 472 bp, Glycine max
  Clone ID: PAT_MRT3847_54124C.1
gctgcgagaagacgacagaagggagcggaagaattatgtttgattcttctattagaccaatactaaccacgcacggtgagcggattagtctccaatttagtgggtctataggagacattcgtggcctctcacccaggaaaaaattgaatattaatgtagcaccgtattagttgctggatgaattattattgaattttttttggtatttaatttgttataattactgtttggtttatatgtttttttcccttcccttggcctgtgattgtgttatgacagtgggcaaacagcctttgccagggagccaatctgccccttcctgtgcctctcaaggtggacaaaatacctggtggagctagattgggttttatcaccattggggatgggaaaactgaagttcttgtgtatattgattgcttggtttttccaccaactgaaaactctgctccaattttccgtgccattagaaatg

SEQ ID NO: 92038 - DNA, 553 bp, Glycine max
  Clone ID: PAT_MRT3847_54125C.1
ccacgcgtccggtctttgtcgcaggcgaggcaagcccacgcactcatcctgaaactgaacatgttctcggacacccacctcaccaccagccttctctctttctacgccaacgctctctcactctccctcaccctctcctcccaccttcccaaccccaccctcttctccttcgctctctcccaacacttcccccacgtcctcaccgccttctcccacctccacccccgacgccttcctcctcccctcccccatcgtgtcctgcgcctccctccgcgccctcaactctggccaacagctccacgccttcgccgccgcttccggcttcatcactgactccattgtccctcctccttgatccacatgtgccttaaatgcgaccgaatccgggatgcccggaaactgtttgatataatgcctgagagggatgtggttgtctggagtgccatggttgccagctactcgcgcctcggcctcgtggacgaggccaaggagttttttggggagatgccgagtggtgggatggcgcccaatttggtatcgtggaatgacatgc

SEQ ID NO: 92039 - DNA, 515 bp, Glycine max
  Clone ID: PAT_MRT3847_54126C.1
gccagagtgccgtacaccggcaggaagcaggtgagggttgggggtgacagcttactgattggagcgggccccacgaacaaaggtactgacaaaaatgcataccttagcgaagagctgagcagggcagggcgcatgaaggggcagggggggttggtgggcggcgggttggggaaaaaccgactgcatacctgacgaaaaccaacgacaaagaaatgcgtgtgcagtaaaaggagcggcgggcccaacgaacaaaggtacagccaagaatgcatccctgggcgcagagctgagcagggcagtgggcatggagggcaggggggttggtgggcggcgggttgggaaaaatagcgtatgaccgcaggtgccgcgcaaccccactgggctaatgtcgcgactgcccgtggtgcagtgggatacgcgcaataagtcgaccttagagtagccgaggaatgggcggaggctatagcatccaggtattggctcgcagtggcgggtagataagggtaactataagc

SEQ ID NO: 92040 - DNA, 388 bp, Glycine max
  Clone ID: PAT_MRT3847_54127C.1
gagacttggaagtcatttttacttaacacgaaaaatatgtttcagctaattaaaaggggaaataatggactttgccttcatcatgaactggtaatagaaacccttttattaagacttcaaatcacagccttttttattatacaatacgcttcacttttaaaaagccttatatttatatctatacacttcaaagctttgccaagataaaagtaccctgcaagccaatttttcatacccctttaacataagtcattctcccccaattattctttggcacagctttatattatccctggattgccacccccagaggagccacctccattgggataaacttctcaatttctacccccttggtggtggtctgggttccataagctgaaatggg

SEQ ID NO: 92041 - DNA, 189 bp, Glycine max
  Clone ID: PAT_MRT3847_54128C.1
ctcgatgcgtgattattcgtttgatccgcgaaatcatactggtctcagagaataaaatctatcgcaaattcttggtgcgtgtcaagatggtgcagcggatttcagcatggcgagagaatgcagtgcagtgatgcttcggattcaggtctacttgtttggagagcttcttcagttgggtggttggttgtg

SEQ ID NO: 92042 - DNA, 421 bp, Glycine max
  Clone ID: PAT_MRT3847_54129C.1
atcatatctcaacatttcattgaatgtttcacgcatttggggacccgagttggaagtttcggtctaagatggaacctgacctaaacagtaagcataattattatgaatacagattggtaataaaagaacctccatggatgtatggagtgcaaagagaaaattagtttaaatataacctgtattccttaaaaatattcattcagccctttagatgtgacagcttggctccaaagcacatttggctcttcttggaaagcaacatgtttatttattccttattttaattacacacataccgaccttcacattgtcccccttttttgtttagttagtttccattgcatcaataacaattttactccctcttgcaaggtagctctctttccctcttcataattccataattcagaggttatatacc

SEQ ID NO: 92043 - DNA, 605 bp, Glycine max
  Clone ID: PAT_MRT3847_5412C.1
agcaacttgaaagtagagaaaatgaacatcattaacagcgttgcgaagacgcttcgcattctcgaactctgcatcgctctcttctttctttcgtggttcctcacgcgcctccctttcgccctccaaatctccgccgactacctccgcagtcctctctttgtcttcgccgtctccaatgccatcatcgccgccgtcctcgcccagtcccgccggttcgaccaatccaattctgcttctccggtgatagaggcagagcaccaccagatcagtgacacgtgtacggacaatgattcgggcgccgcaatagattctaactttggaaaattctatcgccggagtcagtcggagaagttgacggagaagagcgaggaaaggaatgatacggcgaggcgggaactccggcggtcggagacggagaaagcgcgggaaaaatcgtatccgcaggataagctgagcaacgaggagttcaggcgcacgatagaggcgttcattgaaaatcaaatgaggttgctgcgagaagactccttggccatttcgctttgtaattaataattaacaagtcaagttagttaacagaaacaaaaaaataactaattaaggaaact

SEQ ID NO: 92044 - DNA, 822 bp, Glycine max
  Clone ID: PAT_MRT3847_54130C.1
tgattctatccattattggatgtgaataatagacactgttactctgttagttttagtaaaggtaaacttggcatttgtaactgaacagattcaaggtgcacttatcagtccatttgtgcttttgttttcttgtgtttttttatttaaaatagtattcatccttgagggccaagggtttatacaattttaaattttgttcaagtctgcttggattataaaaaatagtttatgatgtgaagagaaaattgaagagtaaccaccaatcagttttcaaaatttacagccactaacattttttagaataaacatgtttattttttttaatatctattttaggttactgcacaaggtgtatctaagaagatattatttagtgatattgacacattgtaatggctactttcatcaaatttctctacctacttaatgtatttttcgaattaaatgtctttatatcgacaaaattattattttatcttttctctctttttatgtgaatatttgtgttcaaaacaaagttagacttgaccaaattatcagttaataattttggtttcatacaagatatctgttatatattatgtatttatgtgtgcatgaactattttaagtatacttagatgaagctctacatgagtttttttatccgtttggtctaaaagtttgaacttcaaaacaaccaaggaattgataatcatgtcaggtttaagatatttcagctaatcaatattcttttattgacaaaaagttaataaataattttggtaactttgtttgtgattttctctattgtattattggctatgtctaaacctttaaatt

SEQ ID NO: 92045 - DNA, 443 bp, Glycine max
  Clone ID: PAT_MRT3847_54131C.1
accacgccaagggagtggatcagattagattagggtgtggctggagaaaattgcatcttagcagatgcaagacacttcgaggtaagaaatataaccgggcatgcggcgaccaacaagaataaccctccttttccagaagggaccatagagcaataaccagatagaactggctcaggacaggccaaaaaccggtactagctgaagctgcatagctgctaaaggccaataaatgaaaaagaacaccttgagagaagataacaccattctttggattaaccgatcaggggaacacacaatctatggacctggctatggaggcacaatgagggcgcgggtgtggcatgtccccacaggaaggccctcgttcgatgggggaccatgacaccatattgaaggcttgcagcgtgatgagaaagtgaagatgccgaaggaaagcctgactg

SEQ ID NO: 92046 - DNA, 143 bp, Glycine max
  unsure (1)..(143): unsure at all n locations
  Clone ID: PAT_MRT3847_54132C.1
ngaggaaattaatgaaaccgtacgtgcgtgcgcgagagaggttgtcgatttttgtttcctttactgcatgggaagccaacaaggagtagaaatttctatttttgtcttgaattagattatgcttacaagatttgtatagtcaa

SEQ ID NO: 92047 - DNA, 1272 bp, Glycine max
  Clone ID: PAT_MRT3847_54133C.1
ccttatctaaagaagcttatcggagacatcatcccttgaacatctcattttttctttcctgcactttctatggggattatatgggtggaggtctgcttgatatctgcacatggactccagctttcaacctcactttggaagcgccaatggtttgctgttgggtggattgatcataacagcaaatattgcaccaaagttgttgattccggaagagcaaatcctgtatggagaaccaagtttgtcattcctgttgatgactcagcgtcaaacatccaagatttggcactgaacgtggaagtttacagtatagaccctgtattcttcacagaaaaacttcatgggtcagcaacagtttttctcagagagtttcttgtcatgaaggtaaagaattctgaggggtcaaagccaaggcaagaggaaattggaagctaccaattacgaaagaagaaatccagcaaaccaagaggttgcattgatattttaattcgcatttctgacaaaaagaaagagccaaattcccaatcaggtaacaaggaagggattttgctcttagatgatggggatggtactcgattgaccatagaggaaggaataaggcaagcctatccacagaagcctcaagtttcaattcatcagccagaaaaagatcatgtacaaacaaacgtcccagactaccattcactaccatccaccactacaaactattatgatccatatgagggtgaaacaagctaccatgaggtggatgaaccaagctaccgtgaggtggctggaccaagctatctactgcctagaacaataacgcctcctccaccacccccaccatcaaatgttggctatattcccacttttctcccaagaaatgatggcctgtctccaagctacagagagatgtcaacatccagggcagcccttggtcagagggtacctgcaggagttgcaatggggttaggtgctggagcactcgctgcgggtgctgtaatatttggcgatgacttcatgtcaggatttgatgttcctccggacctcggagattctggtttcaacctagaaatggatccccctttctgaacaagcattgatcagttttaagtaattatatttggctgcacacagcgtaccagcaaaacctacatgtcattgtatatcggttccactttcatattcttacgtgtaattctgatataaaaaaatgctgagtttctttgatagggctgaaagataaagttgtttactacttttctttgtgactggcaatattttctttcagtg

SEQ ID NO: 92048 - DNA, 490 bp, Glycine max
  Clone ID: PAT_MRT3847_54134C.1
tacggctgcgagaacttgaagaccagagacttattgaagatatctgtaaggacaatgatgctgttattcattttttggtcagaaaatcagatgccaaggtaaggactaaaccagttgacaaggattttgaattatcaattgaagcatcatatgtgcacaatctggtaccaaatttacatgcagaccagttagggtcagtctctgtaacaaatgaggtcctggagaggagccaattaacaagagattttgttctggaaccaattattatgaattccaacatcaaaattccactggtgatccaagagctaattaagagcacttcggagggattagaaaaaggctgtaaaccaattcaatcttcagagggatcaggaggagcttatctcatgcaagattcttctggcttgaagtatgtgtctgttttcaagcccatagatgaggagccaatggcaataaataatcctcgaggcctacctgtttctgaggatgg

SEQ ID NO: 92049 - DNA, 301 bp, Glycine max
  Clone ID: PAT_MRT3847_54135C.1
tgccctcttgttttttttttaagagaaagacagagtcgttaaacatttaatattggtggactataactcacagcatcttcaatatgatccgaatttgtccacacactatatagcaagttgggtgacagacagagcgagagacaacagagcttgttggacctaccatgtgcgacctatgtcagcctaacggatctatgggaatatgccacatattaggtgccaaaagttctcatgcagactttaaggcgacaccttatcaattcctctagctagcagggcctactggagcataccgaagcca

SEQ ID NO: 92050 - DNA, 323 bp, Glycine max
  Clone ID: PAT_MRT3847_54136C.1
ccccggaaacaaaaaaaaatttttttggccaaacagagggaacaaaatcttttgcttggggcatttttttaaaattaacctaataaggggccgggaaaaaaaagggcaaaaaaaacttttttgaccaagttgggacccccgggggacccaaacaattggttttggttcggtaccatttttcactacacataatggcccggaaaatcattttttttaaaggaatttccctaagcagaatttttcctgttttttcgccaacgttttcctaaaccctttggggatttgggaaaaccaaattaggttcataacgggtgggcccgggg

SEQ ID NO: 92051 - DNA, 368 bp, Glycine max
  Clone ID: PAT_MRT3847_54137C.1
agcacaaccacatttttttacagagaggggggatgcccaattgccccataagggcaagagggtgtctaaatgccctacatacaaaaagaggcaatggggccgggcttgggcccccccaaagttttaatttattattattattaaaaggggccaaaggatcctcgggaagtatgttttaacaggaaaatacataagcttaagggttctcccaatcctgagatatataccttttgatatgaaacaaaattaagcgggaacagcttcctggactttggcggtggttgggaggcctaagctttcataggaataaaccaggacctttctttccccaggggacataaatccattaggaggactttttttgttcc

SEQ ID NO: 92052 - DNA, 315 bp, Glycine max
  Clone ID: PAT_MRT3847_54138C.1
gggaaggggccctctcctgaccgtgaatgccggcacagctacttcgggcgctttttttttaaagaattgacttatgtaaccaggctacgaacttccaaactataataggacattactgttccacatgacaagatataactctattactgctatccagcaatattacaataaaccactatatggcttaagactggcagatactttgatatattacattcacttatctgggttaaacacgtgctaggacaccaggaacccatcatttattgtatataagagtcattgctggccagcacttacattcacaatgaacca

SEQ ID NO: 92053 - DNA, 363 bp, Glycine max
  Clone ID: PAT_MRT3847_54139C.1
ggcaccccgtgagtctgtatgatcgtagataactagtaaacatgcgtgatgagaaatgaaagataccttgttttcttcaaatcctacacattttcgtagcattggcaatgccatgcttaccgatatgttccactctccgaatgaacactgactatggtgcccgtactacggacgagaaatgcgcaagttggacgcttgctgtcgaagcacacaacatcttttgctataagaccatacctgaagagtgccttgcagcaacaaaggactacatccatggcgaacaatatagatcagactccaaaacacctaaccaacaagcttactcttatgccagacacctcgaagttcatcccaaggacacat

SEQ ID NO: 92054 - DNA, 678 bp, Glycine max
  Clone ID: PAT_MRT3847_5413C.1
tggtggacagtttgatattagcttgctcatctggaatgatccaaagcatggaaattggtggcttgaatttggatccggaatcttagttgggtattggccatcattcttgttcacacacctaagggatcatgcaagcatggtgcaatttggtggagaaattgtgaattcaaggcaatcagggtctcacacttcgacccaaatgggtagtggacattttgctagtgaaggttttggaaaagcttcatattttaggaacatgcaagttgtggattgggataacaacttggtaccattgtcaaatcttcgggttctagcggatcacccgaattgctatgacatacaaggagggattaataatgtttgggggaattacttttactatggtggacctgggagaaatgtgagatgtccctaattaaggggatgaattatatagaagttttttttttctttttttgggcatttttgggtttgggtgacattggttttccgtctcaagggcattcaagaagcttgggtcatgggtcatttattcttatatttaatttaaatttgtttgttgatcaagattatttttttttttactaactagtcacccgttggttataccattaccacctggactcttatgtacatctgaaaagaaaaatagtatatatattacggttcttggtattc

SEQ ID NO: 92055 - DNA, 408 bp, Glycine max
  unsure (1)..(408): unsure at all n locations
  Clone ID: PAT_MRT3847_54140C.1
gccttggctgattgaaaatggcgctgttcgtttgtttttcttggttgtgggggctgaaatctttctttgacatggatgtttgactctgttgtgttggaaagtttggaactttgaggtgacttgttgactatattcgagaaattgtattgattttgtacaaaagaaatgtataaaagagagagaggaagaaaagacagtgttttggctaaaatggttgatgtcacttgtcagtgatggatggagagaaaatgtgatgtggtactcttgaatgaaacagtgatctgttagatgttgattatatatggagaaattatattggtataaaagttttgcacaaaaagagttagttggtgtgttagagagagantagaagagaagataatcggacgcgtgggcggacgcgtgggt

SEQ ID NO: 92056 - DNA, 275 bp, Glycine max
  Clone ID: PAT_MRT3847_54141C.1
gaagcataggcatagggttggatatagctaaagcgcggagaggactacattagacacctggggtttgctactggccatcttaacttcacactttacattctaaactgctaaaaccaaatcatctttccacactgcatcaccagttgcatcttcaacgctcattcaacattccatgtgcacatcgcctgcttcatctattacttcataaatcttcagcgacgacgacctctcacccaatgcctttgcattaccgcaagttgatacaaacgactact

SEQ ID NO: 92057 - DNA, 798 bp, Glycine max
  unsure (1)..(798): unsure at all n locations
  Clone ID: PAT_MRT3847_54142C.1
cagcggcgggcggatgttccatcgcgggtctcaatgtctccttgtgctgggctagtgatcaagcatgaaactcttgcgcgatccttgctagggactggattctgacattcaccgcccctctaatagatgctgatatcctgaatagccatactttggtgctgcttcacctgatcctggcgcacgtgatgccttcgaatcctccaactgagtagagaatgccaccacttcctcctgtgatgttataggatgctatggctgaggtagacctggcgtgttattcttgtaatcggcgcccgcattttccactgtgaggatgattttctcttgcaagctccagtgatacaaccgtatgatgaatcgctttaagagctacagaacctttggatgtccctcgactgacttccgttgcacctgctatcatcctctcggacacccattgccactacccttacgttgagagagaggaatctgaggatgaaactgtggacgtagattagatgccaccttcgcatttgagggatgaggttactgtatcacagcctgacgatgaggagacaaaggatgagctctatgtcgaagatggtgaagttaatgatgcatcactatgttgatgaagactgtgtaccgtagctagaagaacgaccttatgtgacgtcttgccactaggaaggcaggtgaatctgatgatgactctcctccaaggattgtacctcccatcgatgcctgtcgattgtgtacgatgatgattgagtgctaaacttccttaagctagattttcctggggactcnagctatctg

SEQ ID NO: 92058 - DNA, 340 bp, Glycine max
  Clone ID: PAT_MRT3847_54143C.1
tttgagaaaaaaaaatcaaatagatgtttgtctcttccatgtatcattatcattattctttgagatttcatctatcaacaaaatataaatttcataatttgcataaaacatgactgagtatgctataaatttgaacatgcattctaaagtttacaactaaaaaaagtacagatatgcccaaaaagcataatagaaggaatatttaccaaatgggttaaataagtttttagtaaatggataattttaaattttggattttaattgctatatttttatttatttttaaaccattatttatttctattggccataattaatcagccctggggttaatttttat

SEQ ID NO: 92059 - DNA, 426 bp, Glycine max
  Clone ID: PAT_MRT3847_54144C.1
cattaaatccagattcatctagtctacttgcttgctatgcaaaggatgtttttgatattttagaacgggactttcccattcactttacacatccaagtagtggagatactcatgtgcaaagagatgacctgtcaacctctctgatgtctgcattctcttctacacctctctttgagccgtttgtcattcctctgcttcttgagaaactttcttcttcactgcattctgcaaagatcgattccttaaaatatcttagagcgtgctcttccaagtatggggcagagagaattgcaaaatatgccggggctatttggtcttcattaaaagacaccctatctacttatttgggggagccagatatttcttttactataacacctgtagatggtattggcttcccagagaatgatttgtgatagaagctct

SEQ ID NO: 92060 - DNA, 502 bp, Glycine max
  Clone ID: PAT_MRT3847_54145C.1
ggtttggaaatatatttttttggggagggtaagattaaagatccataaagtatgtcgtgaaacaaaaattctgtatatactgtaaccacaataagtggatcttaaactagagctaccatctggtaacataggaaacttgtcaggttaaggcatttcgcaggtctccccgttgaaatatattcttctaggataaggtgaaattgggttgccaaagttcagatatgcactttccattgataaaattaataacttgttcgacagccagaccaagttcaacagttagagctgccaaattctgcaggaattcttctacaattgctttgtcatcatcaacgttattagtcacggcttttataaaaattgcaggaactttcagtaggtcggaaacataagcaatagcagctccctccatatctataactgtggcatcatttgcaattattaatgatccatcctgctgtgtcatgtctaaagagtcaccagtagacaatttaggcccctg

SEQ ID NO: 92061 - DNA, 246 bp, Glycine max
  unsure (1)..(246): unsure at all n locations
  Clone ID: PAT_MRT3847_54146C.1
accggnccggaattcccggatcgacccacgcgtacgaccgcttctaaaaaaccaccaaaagggatatcttcatcatacaaagcattgcattcaaaggctgaagttcattccttgggggttcctttcttcctcaaaaccaaacatgtcaaacacatgctgcaacttcaactgcacttactagactagctgcaccaaaggaaactgctattgtattattctaaacactgacaacagttacatccatac

SEQ ID NO: 92062 - DNA, 714 bp, Glycine max
  Clone ID: PAT_MRT3847_54147C.1
ctagctcatagcggctcgaggctcctagcacaagtagaagaactacctcactagtcactaccagtatcaaccaccacttcctcttatattcctcaccctctctctcactctattcaaacatcaccatagtttagcacttgagttattagtatcaaccacgaatgtccacaagttgagaagaaaaaaaaagtagcaaaagatggaagctgttaagttggtgtctagtgatccaagtgagagaccagacacataccgagtcgcttacataattcatttcttgcttggtgctggcaacttgcttccttggaatgccttgatcactgcagtggattactttgcctacctctatccaacaaaacacatagaaaaggttttctctgtggcctatatgatttcatcagtgatggtgcttcttgggatgatcagttggggagggttggagcaaaacaacattgaggctgagaatgaacttgggggtctccatgtttgttatgtctcttatggtagcaccagtcatagactggacctcaagcagcaccaagctcaatgagagaccgagtggcgcctacagcttgacggttgcagcagtggtgatatgtgggttagcagatggcttggtgggtggaagcttgataggatcagctggaaagctcccaaaacagtatatgcaagcagtttttgctggaactgcttcttccaggtattataattttc

SEQ ID NO: 92063 - DNA, 217 bp, Glycine max
  unsure (1)..(217): unsure at all n locations
  Clone ID: PAT_MRT3847_54148C.1
aaagnacaaaatagatttggaaatccaggtacacaccccattctacccatttgccgaggcgagagaatcatatgcccccggaacaaaggagtatgtacatattccaattcaacagaggaatgggaagaagagtcagaccacagaacaagggctaaagaaggagttcagctacaacaaaaacctcaaagaccacaaaaaggagatcagcttcaacgga

SEQ ID NO: 92064 - DNA, 1413 bp, Glycine max
  unsure (1)..(1413): unsure at all n locations
  Clone ID: PAT_MRT3847_54149C.1
acgacagaaggggggagcatcacaagcaaagcaaacccaaatccttatggttccttccgacaaagctcgatccgagtgagatctcatgtttcggctctaaggatgtttgatttcnatacccaacaagagtgtcgcgttattaataggactacggctaagagtagtggatccgacagggaagagaagaggatgaataagagtgggggaggagagatgagtaagtggccgttcacaatgtctcagtggcaggaactggaacatcaagctttgatttacaaatacatggtggctggtcttcctgtccctcctgatctagtccttcccattcagaacagcttccactccatttcccaaaccttcttgcaccatccctctaccaccatgagttattgttccttctatgggaagaaggtggacccggagccaggacgatgcaggaggactgatgggaaaaagtggaggtgctccaaggaagcctacccagactccaagtactgtgagcgacacatgcaccgtggccgcaaccgttcaagaaagcctgtggaatcacaaactatgactcagtcatcatctaatgtgtcatcattgactgtaactgctggcagcagcagcagtgcaactggaaaatttccataaccttaccaccacaaatgcctatggtaatccccaagggactggttccggatcagaccaaaaccactagcacacagatactatcacggatctgattccaagtaacatatacaggtattttcaaggatctaaatctgagggatgtgaacatagtttcttgtccaaaactttaggaagcaacaaggttctgcacatggagccacagatggataacactttgatgccaaccagtggagttgcctcattctctacattgagatcaaataataattccatgttgcagggtgattatctgcagccttctttcttatctagtgagtatgcctcagcagaaactgtgaagcaagagggtcagttccttcgacctttctttgatgaatggcctaaaaggagggactcatggtctggtctggaagatgagggatccaaccacactcaactctcaatatccattcctatgtcagcatcaaatttctctacaactagctctcattccccacatggtgagatttaaattaggccatgttgaatgaaaccacctgaatcctgtaattatattgctgcagacaactaagaaccgcccctttgggttctgaaaggaccaaagagcccctttagtttcgactctagctcccgtgttttgtgcactttctgttgagcaagttgtctaccactgtggaacttcatctggtgggtggattttaatagaatccatcaactttcttgttttccgtctaatgaacaaactacagtattttgtcctgatttaatggatgcctc

SEQ ID NO: 92065 - DNA, 237 bp, Glycine max
  Clone ID: PAT_MRT3847_5414C.1
catacacaaacacacggtacttcacaaacccacatacacacacataagcaaaaactctgacggcccggacgcaagggcttaaacacatcactacgtaactcaggagagtgcatatgaacggtggaaggatggaaccacctagtggacaacaccagcaaaagtctagccaggcatgggagaacatgttggcatggacaaaagcccaccaagagagaaaaccaacgccgcagccagaac

SEQ ID NO: 92066 - DNA, 284 bp, Glycine max
  unsure (1)..(284): unsure at all n locations
  Clone ID: PAT_MRT3847_54150C.1
caagaataaaaagttgaggataaggaatataattatgtctaaaaattatttttcctcaaaaatatattatttgaattattgattcttgtttgtngtgtacgcgaatctccgtttatgataagaaaaataaaagngattnttttcttcagcatgattcgaatgtaggtggatgatgttttccgttatgggtgatttttggtcggaaagtcaatatgaatgaatgagaagaaaaacccaatacgaattcttcctctgttccacacctcgtcactcnccacgttgct

SEQ ID NO: 92067 - DNA, 481 bp, Glycine max
  Clone ID: PAT_MRT3847_54151C.1
tgcttatatgaaccacatcgtgttgctgagggcctgctgagttgtgtgaggagacaatggagggatcaaaaaccgttaagcatactagacgcaagtattaatgaaaattattgctgaaattgaagttattaaatgcattcaaattggtttattatgtgttcaacaaaatcctgatgacagacccacaatggttgcaattgtttcatatcttagtagtcatttaattgaattgccaagtcctcaagaacctgcccttttcttacatagtagaaaggatcctaaagcatttgcacaagaatcaagttcaagtcacaatatcaatgctttcactttattggtttataaatgaaatgtctataagtcaatttcttcctcgatagtaaattattttccctttaagtgttgttgtttagatctagtaatgagtattagtcttaattgttgtatcaaacttgaagagctttaatataatggatatcta

SEQ ID NO: 92068 - DNA, 186 bp, Glycine max
  unsure (1)..(186): unsure at all n locations
  Clone ID: PAT_MRT3847_54152C.1
ggagaaagnanaatagangaagctgcatttgcagagacgccctgagagagagaattggnagnttgcgcgagtgatgattacacatattntgagtatgatcgtgananngtgcnttgggtganatacgnnnntctatantctcgntgtnatgnnaganatgtgcagttctggagaggtgtgnaggat

SEQ ID NO: 92069 - DNA, 403 bp, Glycine max
  unsure (1)..(403): unsure at all n locations
  Clone ID: PAT_MRT3847_54153C.1
gccccaacaaaaatattatgcgttggtaatctcttcttccttattcaatggaagtatatgggggcctgcatctcaagaacctggagccaacctaccaatgcggattatattacataaagatcctagttcttcaaatcaaattccactagccatcaatggcgttactcacaaagtgataattnttacagacaataaaacagtaacagctcctgaagtggctcaacaaggaattgaaactgtagctctggatcaaataaatctggatgtgatcttggattattgtaatcgtcaaggattatgcagtgttctgttagatattagggggagttttggtgagtttgaagatcttgtcaaggagggtatcaagaagaattatattaacaaatttgtcacagaaattttg

SEQ ID NO: 92070 - DNA, 267 bp, Glycine max
  unsure (1)..(267): unsure at all n locations
  Clone ID: PAT_MRT3847_54154C.1
agacacctagctgcaacagagctccccctactcctaagcactatgggnagctcctgttctattgtaagcatgaggatggctaatgctgtaatgtagctggattatggctaccatttggtgctgatctgcacaccattgttacaaattatgatgcagctgccaccctggctaatgacacactgggctcaccaccccgagctcctagatgaggcccaagggcctagcttcaacagggtagggatgatagtggactaaacccaccacaag

SEQ ID NO: 92071 - DNA, 300 bp, Glycine max
  Clone ID: PAT_MRT3847_54155C.1
catcttgagtgcggtcatgccggaaatatttctgcaatgtctctagaaatggaacaaacagaagtcttccatttcacagagtcccttcacgctcttaggaaaaaagtggcagaggccatggattcccttttgaaacaacagtagcattttggtgtacaatttctctgggatgttgccaatgatatgtcaagagaggttttgtgctcattcttatagcaagcggctggcgagttgattatctttgtttattattgtcatcatgccacagcactggaacaccaaaatgctactgttgtttca

SEQ ID NO: 92072 - DNA, 334 bp, Glycine max
  Clone ID: PAT_MRT3847_54156C.1
attattggtgctgggacttgttttccaggcttcattgtctgtctcatttggcattgctttactgggaaaatgatatcccctataatacaacatgtgtctccagagttgcaatagcgagagagactcattcaggaaccgaacatgccactctcgttgcactctttttgatgtggagaaagaagaatgtgaatatggtggaaattcctctatcacgaccactgatcactgcacccggagatggtaacctcagctacccggtgagaaggatgaatactattatgagcatctcacatctcaatccctattcccactcccacatcctcgtttagaagaa

SEQ ID NO: 92073 - DNA, 403 bp, Glycine max
  Clone ID: PAT_MRT3847_54157C.1
aaaaaaaaaggtttttttttttttttttctttaaaaaatagagatatttccaaataagggagtcagggaaatcaatacccccacaaggaaatcatcataaggatttattacaaacggtaccgctaacgcatttttttaaaagcctaaacacgtgctaccaagggaaaagctcctaaaacctcccgcgaaacccaaataaatccaaatcatttagggtttcaccaaaaacactccttttccatcttttaagtatccgggggaaaattcgcagttaccatacttgggaggctgagggacaacataagcagggccaccaaaaaagcacgtgccggatgcacgtcccattttttgataaaaactgtgaaaagcgtagaaagcatgtccctccaaagtgttaggatcg

SEQ ID NO: 92074 - DNA, 506 bp, Glycine max
  Clone ID: PAT_MRT3847_54158C.1
ggctcgagcacaaaccaaaccaaggacaaattaaacaattttaacatcaatctcagaggggtaagaaaacagatagagaggaatgaacaacgaggaagtcccatcattaccttccacatctgcaacaccagggactcccggtgctcctctctttggtggcctcaggtttgagaaacctaatggtagtgttgttaggaaatcgtccttcctcaaaagttgcaaatgtttcagtgttgcagaatggactttagaagacggagccatgcctagagtctcttgctctttaccatcccctcatatccctctcgcaaaaaagattggagctgagtttattggcacgttcattttgatgtttgccgcaataggcactgctattgtgaaccaaaagacacatggatcagaaactttgatcggatgtgctgcagccaatggacttgctgtcatgattatcattttctccacgggccatatcttcggggctcatctcaatcccgctgttaccattt

SEQ ID NO: 92075 - DNA, 602 bp, Glycine max
  Clone ID: PAT_MRT3847_54159C.1
ccatttttactaccaagagaatgcagtgaaagatgtgaaattaacgggtatgaaataccagccaagagcaagggtattatcaatggttgggctattggaagggatccaaaccattggactgatgctaagaagttttgtccagaaaggttccttgatagctcagttgattacaaaggtgcagattttcagtttattccatttggtgctggaaggaggatgtgtccaggaagtgcatttggcattgctaatgttgaactcttgctagcgaatttgctcttccattttgattggaacatgcctaatgggaaaaagcctgaagaacttgacatgagtgaatcatttggcttgtcagttagaaaacatgatttgtatttgattcctagcatctgtctctcatttggtaattaaaaccattgtgtagaaactcttgtttatgctctgattcattggatgctactacttttgggggtaaactccaagggaagaatgaaaagacacaaactaaagtttaggagccaacattgtagtacatgtgattgatgaaagattgggaataaatgtagataaagttttatttttcaaaaaacctcgtgcgcacgagg

SEQ ID NO: 92076 - DNA, 332 bp, Glycine max
  unsure (1)..(332): unsure at all n locations
  Clone ID: PAT_MRT3847_5415C.1
gaaagaacgagttcaaatctttgaaggcaatttttggggtgtctacatttttatagacgattagatacatctacaatcttatcctgcaccctacgtgctagatcccctttcccagctcccttcagaactcgtctccgcagtgcaccgtcgctggcgatttccggcgacgacacctttttttttttcgattcttcttctctttcctcttctccgntgtttactcttccaccctatctacagcttccagtgacaccgaggaaggagaaagtcaaggagaagaacgacacagacgaagaagccattgatgctgagaatcaccgcgattctcgacg

SEQ ID NO: 92077 - DNA, 295 bp, Glycine max
  Clone ID: PAT_MRT3847_54160C.1
ttctcaattctttttaagaacttattttttttcggagggggggagggacaacagaatacttggcttttgatttataccacctattcaaactaatactttggggcagacacacgcaccattaacaccatggggggacatttccaaatgggagtcaaatagtttcacttccattagtgagtatcactaaacgccgaacacttcctataaaggattgccatggaacatgtcctacttgaaaacattccccttgttttttggaaaaggtgaacaaggaactttctacaacttcctcaaa

SEQ ID NO: 92078 - DNA, 122 bp, Glycine max
  Clone ID: PAT_MRT3847_54161C.1
ggaatggctcgtatcctatcctaattcaccacatgtcctaaagctaacaattgaagataatcccttcgccattgtttgtttccttatatatgtaatgcctataaaaaatgtatatctttgtt

SEQ ID NO: 92079 - DNA, 1773 bp, Glycine max
  Clone ID: PAT_MRT3847_54162C.1
ccacgcgtccgagaaagaaaaactcgcgagtgttgtgggctgcgtgtttgaaaacagaaaaacgaagaacagagagtgattagtcgcatagcacagtgatgagtgttcagctatcacgcttatgggtccccaattctcctgcaatacctcaacactgcttttaaaaccagagctgtgtgaagcttgaagcggaaattacgctatcccccacttggaacttactgcgcaagggaactcccaatggtgtgagaagaaggtggggaaaccccaacaacaacaacttgtttgatgggtgccaaggagagagtgatcattggagtgagcttgacactgatctttatcactggacaaaggcattgcgccctgtgcagtggtttcctggtcatatagcaaaagcagaaaaagaactgaaggagcagctcaagttgatggatgttgtgatagaggtgcgggatggacgaattccgatgtccacaagtcatccacagatggatctatggcttggaaatagaaagagaattttagttttaaatagagaagacatgatatcaactgcagaccgcaatgcttgggcagattattttactaggaatggcacaaaggttgtcttctccggttcgcggcttggaatgggaacaatgaagctaggccggttagcaaaggaattagcagctgatgtaaatgttaggcgtagatccaaagggctacttccccgtgcggttcaagctggaatagttggataccctaatgttggaaagtcatctttggtcaaccgtttgttaaagcgaagaatgtgcccagcagctcccaggccaggagtcacaagagaattgaggtgggttcgttttgggaaagatcttgaactgctggactctcctgggatactcccaatgcgaatcagtgatcagtccgctgctataaaacttgccatatgtgatgacattggagagaggtcctacgatgtggccgatgttgctgcaattcttgtgcagatgctttcgaagcttcccacagtaggcagagatgctctttgtaaaagatacaagattgatgtagattgtcgagatggtagaatattcatagagaagcttgcagtttgagtatttaatggagatgttcatcaagcagcattccgcgtcctagcagattttagaaaaggtaagtttggttggactgcactggagaggcctcctaagtgaaggcagatgtttgcttttaaaagcagaactctgaagcttgaattgaaaattacgctagagacgtcctggaactgactgtagaagacaactccacatggtgttggatgaatatggatattgtgattatgaatgacattatggaagggaaaggtgaatgctccctcaagacaatctttggatcctcggggcacacgaaacaaaggatttgaagccatggatgcttcttgttattaccttgtaatttggtctcttttgcatctgtctgactgtctgtatagaaccattatgccatgggatgggagttcgtagtcatcatgcacatatgttgtagtatatacttaattgttgtagtgagatgtttcttaaaattagggcagatgcttgttgcacttttgggatggtcttcagcccatatcgtttaaccagataaacatgactatgccaaagcaataagacagtaagacgattcaatagttacatatactacctgatcttacccccaaggctggtgtttcctttgaacataggttctgattatgggtctaggattaataaacttatgttaattagagat

SEQ ID NO: 92080 - DNA, 593 bp, Glycine max
  Clone ID: PAT_MRT3847_54163C.1
agaacattcatagagaagcttgcagtttgagtatttaatggagatgttcatcaagcagcattccgtgtcctagcagattttagaaaaggtaagtttggttggactgcactggagaggcctcctaggtgaaggccagatgtttgcttttaaaagcagaactctgtgaagcttgaattggaaattacgctagagacctcttggaacttactgcagaagacaactccacatggtgttagatgaatgtggatattgtcattatagaagggaaaggtgaatgctcccacaagacaacctttggatcctcgaggcacacgaaacaggatttgaagccatggatgcttcttgttattaccatgtaatttggtctcgtgcatctgtctatagaactagtgtgccatgggatgggagttcgtagtcatcatgctcatattttgtatagtatatacttaattgttatagtcagatgtttcttaaaattagggctgatgcttgttgcactttggggatggtattcagcccatattgtttaaacagataaacatgattatgccaaagcaataaaattgtaagacgattcaacagaagttacatat

SEQ ID NO: 92081 - DNA, 438 bp, Glycine max
  Clone ID: PAT_MRT3847_54164C.1
accgctgcgagaaaccacacaaaggggatcctcaatacatactctacgtgctgagtttcgggctttcccgtagacgatcactgccaacgtcttacgcctcagttccgacagagatggcaaaagaggagcctaagcctctgaactacagtcggcgatggcatactcgcgaggaggagaaaccctgaccatgccctctaaggaaaatagaacagcacgcagcagtacgaaatacctggccatcaagaagccagaggattacatccacccactatcgcaacatggaactggaccttatgagaatgaaacgcaccctgaagaggaaagtgcctgaggctgactgcaacactctaataacaattcggatgcaagggaaaaaagacatgcatccgaggacgatgaaggtgttgtacagcttggggctgaagagaagattcattg

SEQ ID NO: 92082 - DNA, 460 bp, Glycine max
  Clone ID: PAT_MRT3847_54165C.1
atacactgggagatggctcggacccgtctttgttctatatctgtaccttttcttattctgctaataatcgcctttactttctttgcacagattactccaattaatagtgcagatatgaagatgagaaaattgggtctcctcccaagtcctcctcctcaacccattgttagtcccggcccagaagttcattaagctcgtgctccttcttctcatcctgatccaccccataatcgccaaagtatttttcatgcctgatcctacaatattacaaagaatcatatgggcctagcctcaagcttcgattctaggtttactgtattaggttttatgtataaatggcactactattttaattttaattttaatttttgtgcctgtcaagacaggtgatacaaacaaagatggattttatacccataccttcacatagcgaagagcctcctgacaatgggatacgaaa

SEQ ID NO: 92083 - DNA, 363 bp, Glycine max
  Clone ID: PAT_MRT3847_54166C.1
ggaccggctgaatcaccgccgacccacccccctacttgcgcccgaagaccacagaaggggaggcgcgaaataaaaagaactgtttcctctaaaccccaaacccaccatcgctcccagaaagctgaatcggctcctcaactcaagaaaacttcaccatcacaagaataagcaacctgggctcattacaggaaaaagctgaaattctcgccgagagtgaaaaacgagctcaacgcgtcggacccgcgaacggcgacgcgtatggagtccccggcgcaacgcaactcgcggaaggcgaaggagccgaacccggcgcgcgaagtggaggtgaagccccagagggaagaccgcgcgccgcacataacg

SEQ ID NO: 92084 - DNA, 524 bp, Glycine max
  Clone ID: PAT_MRT3847_54167C.1
tttttttttttttttttttttttttttttttttttttttttttttttttttttttttttttttttttttttttttttacccccaaggaacaaaactcattttccctaaaaaaaaacaaaaaaattaatagggtctccccaaaatcgggtggcccaaaaagaccctggaaaaaacaaacgggaccccaaaattttttactttccaccccattggcactaaaatggcctttaaacccccgggacaccccctttggttttccaaaaacgggtaaaaaccccccctccccgtataaaacaaatgggaaacaggggcgggatccccaatttatacataagccaacctccctcaatcaaattttaaagcgggcttttaaagggccccccagctaccagggcatttttgggccctggaatattcaaggaagggaaacaagggttgcaaaaaaccggggccggccatactcaaaaaggctaccataagggggaccccaaaccccaatgaacagggacccaggggccggactg

SEQ ID NO: 92085 - DNA, 442 bp, Glycine max
  Clone ID: PAT_MRT3847_54168C.1
ggtagacgactgcgaagtgcgaagttgttgaaaacgcgacaggggaaagcgcaaagcatggacaacaaaaccgatttttcaactcctcttctccccacaagctacggtcccgttgactctcaggggaaaggccataccggaccttcttcttcttcttcttctttttcttccataccaactactcttatactcactaccctcgtcgctgtttttggttcttacgtttttggctccgctattgggtattcatcacctactcaagctagaatcatgcgtgacctcaatctcggagtggcccagtactcaatttttggttcaatattgacgattggagcgatgattggtgccgttgtgagtggtagaatagcagattatgctggtcgtcgagttgccatgggattctcccaggttttctgcatcttgggatggcttgccataacat

SEQ ID NO: 92086 - DNA, 357 bp, Glycine max
  Clone ID: PAT_MRT3847_54169C.1
gtaaataaaaacaccataagctcaatcttaacacgctaaaattatccgatgtcggaaatcacttgaaacatacatgccccataacaaactaattctacccaaaagatacttatccaacaaaactgtagatcgattgaaaattctgccaaacctatctacagacaatatattgggtgccatcagaaatttacctgtattttaagacacctccttacaagacacagtactatttgcccatggtatcttcttcaagatcaagcacttaactgtttgtcaattttcttttaacaatgagacaatgatgttaacactcaactgaacattttggaaaattcgcttttgtcctatgctaacatt

SEQ ID NO: 92087 - DNA, 232 bp, Glycine max
  unsure (1)..(232): unsure at all n locations
  Clone ID: PAT_MRT3847_5416C.1
aaaaagaatggttcaatccatttactaacatacagaaaacattgtaaaatacttttacgcgaggttttgttgaaaactcgaaaacattagaaaacgacaaatattnttagttttaactctacggtatagaagaaatagaaaaggatcatataaaagttttaaatttaaaacggatcgtacacccggttacgaattattctaattataacgaatccctcgaattttaggggca

SEQ ID NO: 92088 - DNA, 262 bp, Glycine max
  Clone ID: PAT_MRT3847_54170C.1
ctctcgtggcacctttgagtgcacaagcccgaaaagcaccaaggacaggaaagtgaggaagaacaagaagacccccacgaggatgatgagccagacaaagagagccaagaaagtgaaggttcttaatctcaaagagaaccacgaagacataccaataagaaccctttttactgtgggtgttacaggatccaaactcctcttctaaaaccaaaataggcgcgtttcccggcctccacgaaggtcaacaaacgctcccaacagc

SEQ ID NO: 92089 - DNA, 224 bp, Glycine max
  Clone ID: PAT_MRT3847_54171C.1
gaagaccaagactgtatagcccgccattcaggagtatgataagaacctgttatgaatagacatgagctggaacacccctgatgactgattcccaccataggtctatgacactggtgagagcggaagctctgctgtacaaaatgaccgactgactgatctaactcaaaccctcgttttcatgcatgtcgtcaacaattcttgaagcgtgctggatcacattgcga

SEQ ID NO: 92090 - DNA, 621 bp, Glycine max
  unsure (1)..(621): unsure at all n locations
  Clone ID: PAT_MRT3847_54172C.1
agccaaaatgccagtataatttacatattaatacagtttttctcatctttctcgatctacaattgctaatctttggctgaatcggttaaaatagctgtctttgacgaagcatacagcaacattgagatagaggaaaatgaaagatacttctctgactaattttggggctactacctgatcaataattttgttatataggggctctttttatctcctggaaaagaaaaaagaacacagttttctatcttattttgatttgttatgggaattagatacataaaaaaaaggaccaagtacatggcaagagccaagagccaagagcaagagaaattagtaggtaggaattgcctctaggcactgaaatcaacaaggatttagtatgatggccaaaaactagggtaaggggattattcaacattgttttccactgccttcaccagaggtttgctagagctttcacacattaacatgtcattttccccttgtggtaattcctccccaatcttgatagcttctcaacaatttcccttgcacttggtctcaaagaggaatcttcctcccacaagctcttgcaatgttggcnaagtgtcacagctgcatcaaatgaatagttctccccca

SEQ ID NO: 92091 - DNA, 277 bp, Glycine max
  Clone ID: PAT_MRT3847_54173C.1
tctttcacttttagataattaccatccaccttaagggtgttagggagtagtcacctcttaagaaaaaacaaaaccagcctcttttcttaaagaaaacaagagaacaacacccactaagtattttcgccactattttgcgttccaaccaattgtgttaaggaattacccacaattccaaaaaatgattaccaatctgtggtttgacccttattgccgccgtggcacttcttgttcctcttcttctttttaacatctttttgttggaaaaaccaaacaa

SEQ ID NO: 92092 - DNA, 476 bp, Glycine max
  Clone ID: PAT_MRT3847_54174C.1
attttaatgggactttattatacaggtactttttgatagtaacctaactctcccactctccttttctcaagaggtgtgaccagaccccacccccctactcacacaaaggagaaaagattgaacactaacatcaaacaacaaacaaaaaagaccatggtaatggtaaaccctctaaattattggggaagacaaaagaatgagaaagaaagctgccctttctctcgctactcctcctaccccaaacaaaactttcccattacaaattgtggaatgaagaaagaatggcaagacaagtgagtagtagtatagtagtaattgacccatcaaacaaacaagcataacccatgtaattgttattgtagatagatagagtgagtgagtgagcactgtgttgtgtatatagtagtgtgtaaactctccccaacagacagacacgccactcaattatttctgtccatttcttcttcccatattgt

SEQ ID NO: 92093 - DNA, 458 bp, Glycine max
  Clone ID: PAT_MRT3847_54175C.1
atagccaatcattttcttttaaaaatgaaaataatgcacactgaaatactatcttactactagcgtgtaaaccaccgacggaaaggagacccacacgattgctgtgacttactcatacgaggcggggcaaaacatcattgacaaggacaaccttaataggggatgaacattgtgagtgactccgcgtcaacaatgcgggtaactacgcgtgtaaatgggcccgatctacattcccctgtaaagggtacttctacctgacgtcgggacatactagatcacatctggtgaccacaaaatgctggagacgatgaccaaagcattgcatatgtcgcattgtaaaatatgagctgtcaagattcctaaaaccacgaatccgactagctattacgggatagggttgcgaacagcttcagggttaccagtgggaccgcgcagctcaggcccgttcagagccagtg

SEQ ID NO: 92094 - DNA, 198 bp, Glycine max
  unsure (1)..(198): unsure at all n locations
  Clone ID: PAT_MRT3847_54176C.1
ggggcnaaagaaaacaaaagaacgttccatcttgcataatacaaacaaatcgcgcgtgtcctctcatgtatcctcctcgtcaaggcatctccttgtacatatgctggttgcttccctcttcctttgaagtttcgtcctttcacataatatggtcaagcttttttcggggatcgctttggcttaagcgattgggcgagg

SEQ ID NO: 92095 - DNA, 625 bp, Glycine max
  Clone ID: PAT_MRT3847_54177C.1
gtcatatccagggttgtgcaatctttatcgtccttggatgtggcccacttgcaagacttttatcttttttgatctcatttgctactgccctcatcggatgctataatttatacaaaaatgttactgctctgcaggcaactgcatcttgtatatgtgggccttttcttgattggcattgaaacttgggagatggttccaaggactaaatcctcaggcacaatgctgtttctacatatcttgcagaacgctgcaaggtggctatcttgcctttacacataccatgccatcattctcttcctttcttggtcaacctcttgtacagtcattggagacagatttttggatttcttctgccaaacttcaaattttcgtttaaattacctgaaaacatcatttctgtcattcgtctcgtacaggatccttcttttgatataaagctaaatgctctggagctgctcttttcaccattgtgaattgtcctaactgctgttaggagcattgctactagtatgctatatgctgtacactgggttctctgggaatgcctatatgctcctgtgacgcttggaccggcgatattcgggtatgtggcttgcatatctcacacatttgtaatatgcttggc

SEQ ID NO: 92096 - DNA, 214 bp, Glycine max
  Clone ID: PAT_MRT3847_54178C.1
ctcgagccgaatcggctcgagctcgagccgattcggatctagcgttcccaaaataccgtttctgactgggggtgccagatccgaacaatcgaatgtactacgtggaaatgaagaagaaaggcgtggacaacttctccttctgcgctcacctggtctcgcgcatggagtgcaccttcttcatttaggatttggacgcagaacacattttatgcta

SEQ ID NO: 92097 - DNA, 597 bp, Glycine max
  Clone ID: PAT_MRT3847_54179C.1
ccacgcgtccgcactacgctcaaaactacaaaaccgctatgttggaatttgatggaaatctcaatccacaatcatatgggttgctaacaaaaaccaaccactgaatgattcttatggaattgctccaatccatgaaaatggcactcttcgtggtgcttaatggacacaaacaagtcatttggtcgacaaatctgtccaacacatcattcaatacaagctcccagttttcagattcgggtaagcttgtcctcgccgaaacaacaactggaaacatcttatgggacagttttcagcaaccttcaaatacattattgcccggcatgaaactttcgatcaacaaaagtacaggtaagaaagtagaacttacatcatgggaaagcccttataatccctctgttgggagcttctcttccagccttgttcaacgcaaaaatatagttgaattgttcattttcaatggaactcaactctactggcgcagtggtccatggaacggtgggatctttacaggtatagcgtacatgtcgacgtatcttaatggcttcaaaggtggggacgatggggaaggaaacataaacatctattacacagtgtcaa

SEQ ID NO: 92098 - DNA, 279 bp, Glycine max
  Clone ID: PAT_MRT3847_5417C.1
cccacgcgtccgcccacgcgtttgcggacgcgtgggtcaatactggcgatgaagaacgggaaacctcactccaaaaacgcacagcgaaggaaaaaaatctcggaggccctgaacctacaactaacacaaccaacgttgcagctgtcaagacacctgccaaacacagctcaaaaactgtaacatctgcaaccctgagcatagtacaagcggtctgggccaaggacaaaaagctggctcagacgaagcacttgaacagagaaaacgggctaaaagcccact

SEQ ID NO: 92099 - DNA, 964 bp, Glycine max
  Clone ID: PAT_MRT3847_54180C.1
cttactttgggatacatgataccccttgttctgaactttgaggcacttattgctcaaaatcctaacaacaaaaactttgtgtttggaaatgttgtgtggcttgaagtgaatgaaatagctgtgaggctaatcaccatggtggctttcttgttgcaattccgactccttcagctaacttggtcatcaagaaagagtgatgaaagcaataaaggcctttggattgctgagagaaaggctacttgtgtcactttagccttgtacgctgctggtttattgattgcattgctgttgaagttgaagaaagatggagatgcggttcctgtcattactccattgaaccaacaccattcatcttgggagaacataaaatcttatggcggtttggtattggatggttttctcttgccacaaatcattctaaacctgttctcgaacatgaggggcaacgttctttcatgttctttttactttggaaccacttttgtgagactgttgccacatgcttatgatctttacaggactcataattatgctcgcgtagatagtggatcatacttctatgcagatccaagtgcagatttttactccactgcttgggatattgtgattccattgggaggtgtcctgcttgctatcattatctacttgcagcaacgttttggcgctcattgtattcttcctcaaagattcaaagggtctaaggtatatgaaaaggttcctgtggttgctgaatcagaagctgaagtagagaccgccaacttgtaaaattcactttttgatacctaagttcaaatggtataatcatggtgaatcaaaattaggccatttctaatctcatgcattctagctataaagttgtgttgttgcaatatatgtagtgtaagcaaaataaattttgttgcagtaaagaactgttcatgtggctgattaagcgaagcattgtctgctaagaaaattttaattc

SEQ ID NO: 92100 - DNA, 1008 bp, Glycine max
  Clone ID: PAT_MRT3847_54181C.1
ggggaagcccaacagggaaagcgtgttcattgcgcgatggaaatcccgcccttttcccgtttctctctctcatctcactgcttttcccttttcattactttttgatcgagtaaggtgaaaaggaaggaagaatggaacgttgaaatttaaaatctgattaatgatatataggaattgtatttgtattaaactttacttgttcggaggggaagaagaagagaagggttgcaactatatattctattctgttaagctccaaaatcaaaattccctctctaacctaacctccatcctccattcaggttttatgtttgtcggaagagttcaatcaaatgagtttaaccatgatagatctggggatttcctttctgaggttggtcacgagccctgatgcatccagtgcatctattttcggatggctgataactggatcatttggactaatggctgtgatatatgctgttctcaagtggcagcgaaggtcctcattaaattggattaaagctgcagcaagagaaaagaagaaagtttggaaaaagtttaaagttccgctatcggagcatttgtgggtggaagattttacttatagggaacagccatccacttgttgtttctgcttgacttccctttggccttctcaaaatttaggtacaacagcctcaccgcgtactcctctccatcgttgctctgtttgtggtgtcgcagctcatttcctttgttctcagtttgcagcaaaggattgcaaatgtgtggctcaggctggttttggccatattcgacatcactggtctgaaagatgggttgatgtggatgaaaatcatgagatgtctgccttctgtttttactgtgacgagccatgtggtgttccgtttgttaaagcttctcctacctgggattgccgctggtgtcagcgcctcatccatgtgaaatgtcataacaaattgactagagattctggtgactttttgtgatttggtcctttgaggcgaattatgctttctcctcttt

SEQ ID NO: 92101 - DNA, 276 bp, Glycine max
  unsure (1)..(276): unsure at all n locations
  Clone ID: PAT_MRT3847_54182C.1
cactgaagtaactgcagcattcgttgctaaaaatatcgtttttttaaaacttattgcaagtctcagatattaagggtacttaggtgaatgattggatatatacaagacaaggtaaganttgggggacaaatgcttggggacagaaaaagttggagcagcagttactatgaggtgtcttggtattgtgagaagagtaataaacaaaggcttcattgagaaaatattgaaatgtatagnggaagaccttgttctgaatgattttactacaaatttggc

SEQ ID NO: 92102 - DNA, 165 bp, Glycine max
  Clone ID: PAT_MRT3847_54183C.1
aaaatagatacgttgaggcactatgtacaggatgcaaagcgtgcgggctcttgtcgtgcgacaggagggggtgtcttttattaggacccaggctcaaagcggcgtccgtgggattacgtgctccggactgggagaaccttgtctgttcggaccgcccgtcggttc

SEQ ID NO: 92103 - DNA, 441 bp, Glycine max
  Clone ID: PAT_MRT3847_54184C.1
gctcacatgcagtcggagatatcctgattgagcaacattataaatgtttaggggttgaacctaacctaacaccgaggcgcgaactaccacctgctgtgcgtataatgcattcattctaaaacgcaggggacaaaaacatcttgcgtgtcttgactctagagccatattccgagtagagaacaaggcacctaatcagctaacccgattccattttgagccaaagctgaggctcctcagaccaaacagttgggatccgcctatttctctaataagagaggtaggtgcatacccgatgcattactggcctgactctgagcgaccctgtcaccctccctaccacctcagcgtcatgccttgtggacagagattagctatgacgtagggtataccctgtcgctcaaactgcgcactctaatgcaggattgctgcctacgaaccctt

SEQ ID NO: 92104 - DNA, 722 bp, Glycine max
  Clone ID: PAT_MRT3847_54185C.1
tcggcatgaaaaagtcggtggtggagaccacgccacgctcttcatcgatggcatacaccgcggcatcgtcacgcgaggcattgccgacccagagtttcgggtcgaggttctgcgcgccactgccggccaggatcacttccagcacctggggcgagatcttgcaaccacagccggcgccgtggctgtactgggtcagacgaatcggttcgctcatcggtacacctcaatccgtttcaaattccatcgagtttaacagagccatcgacaccgggcccggatcagacatggcccaatcgtgagcttgcccggcccgattggcgctcatgcacggggatttgcggctcaacatcgagctgccccaccggcgagccattgcccgcctccccggcccctgtatcgacctccaacaaaaacgggaaccctcctaccatgaacaaggcaaaactgagcctcgcctggcagatcgtcatcggtctgctgctgggcatcgccgtcggcgcgctcctcaaccactccagcgcggacaaggcctggtggatcggcacagtcctgcaaccggcgggcgacctgtttatccgcctgatcaagatgatcgtcatcccgatcgtgatttcctcgttgatcgtcggtatcgccggggtcggcgacggcaagaaactcggacgcatcggtttcaagacctttgctgtactttcgagatcatcacccaccgtggcaattat

SEQ ID NO: 92105 - DNA, 367 bp, Glycine max
  Clone ID: PAT_MRT3847_54186C.1
ctatactcagccatgaattcattatgcagacattaccactctgcttctcgttacgcacgctatgaagcacaccattgactagcttgttgagaagtacaaagatcaacacatcatgcttgtcacatgaacactatctatacgcttcatatattgtcctcacattgcattatctgttgtagcaaaattggtcctcttgatgaaaccaagtatattgactgctgatgttatcttataagagtgtacaatggactattgaacacacatgatgtatatgcatgtaggggctgtgcagctctgagatcgatccctaatgatatatgatcttattgctactgtgcgaacgtgatgttctgctattaatcttcta

SEQ ID NO: 92106 - DNA, 443 bp, Glycine max
  Clone ID: PAT_MRT3847_54187C.1
cccaactactcttcttgatggctttttgataaggctgtatgtggcaccaaggaatggtttagacatttttatttgtgtgatgttgaaggtggaggccagagccacatctcagctgcttgattttcccctaatttctagccgccagaagaggacttgatattgctggtgttcctttgagaaaatactctaccggtgctggaagtgttcttgacatggtatctcctttgacacgacaacctttttctcccatctctttaacattatcatcgaaagccaatgtcgcaaatgctgcaaatgatacacagaatgagaagttgcagaaaacattagtagttaggcaattttccatctatcactacctcaaagacaaccacagtggccaatgaagagaacaaaactccaaaggcagtacctattcctgaccccactacacctttgaaatt

SEQ ID NO: 92107 - DNA, 448 bp, Glycine max
  Clone ID: PAT_MRT3847_54188C.1
cgcaggaaataaccttctatttgaatgaatgcttcatagaaagaaaaaatggtgtgtggggggcattcttgaaaagagagaagattcccccccccgtgcctaaacctaatgattcaaagaaaaacttaaagatgatgggacaaggaaacaccatattcaaatggtcatatcaatcctattatcaaaaattatgaaatataagattatcaagaaacgagacacgggcgggaaaggggagtagagaccactcaataaatgaaatagctactaaaggcttcgctctctttttagatatgagataactatgcaatatgagttatggagtgataaatatgacgagttttttttcaaaaagaaaatgcgaaggaaaaatactgaagtcatagtttaatcgatctgatgaatctattgatcaatttgacattcataattatatacatacattata

SEQ ID NO: 92108 - DNA, 763 bp, Glycine max
  Clone ID: PAT_MRT3847_54189C.1
tcgattcggctcgagcaggttggttgctccatatacacctcctcatgtaagtcaccatgcgagaaagtagtcttcacatccaattgaaacagaggccaatgatgtgtagcagcaagagagataagaatacgaaaggaggaaagcttagcaacaagggaaaaagtatcagtataatcaactccataagtttgagcataccccttggcaatgaggcgagcctttcaatgagccataaacccatcaggattcattataaatccacttgcaaccaataggcttcttccctgtagggagagaaatcaattgatgtggctttggacctaactcaaccctacaaaactgacttataaggtaaggattgctccccacttatatagttagatcatagatgtgttttcttctaatgttagtgaatttctggttgaggtatctcaaaatatcttcctgatttcttaatggtctgtttcagacagtcattcttagtttctttcactggccactaaatgtgtgaactgtggaaggagaataaaacatgataaactatggattatttgggaagataataaaggttgtgaattatttgagggttgtatttttaacaaattgagtatgctatgagataaatgtaggtaaattgttatgctttttaaattaaaaaataaattttgtttaatatatataatagtttggtttggtttattttttcatttaatataaattcaccaaattatacactaatagagttctaacagaaggataaaaa

SEQ ID NO: 92109 - DNA, 229 bp, Glycine max
  Clone ID: PAT_MRT3847_5418C.1
gtcattcgtaggaatagggttgagggtttgatagaggggatgtttggttgttaggatagggattctagtaactatggtatttgagattaagaatatgattttttgggagttgaacggatagagaaatgcactttgcaagagagaagttgcgaatatgatatgagaatgcctcattttataggtggtggcgatgatgcaaagtatgctgttgtctcgagtattgagttag

SEQ ID NO: 92110 - DNA, 254 bp, Glycine max
  Clone ID: PAT_MRT3847_54190C.1
tcagagacatcatttctcactctaagtttctctctcctctccgctccggcaagtaggaaaaactgtgcatatcgacgatttgcccgagaattcggcgttgggtgagtcgaattcatggactaccgagatagagcagtccggtgcggacacgaacaccactttggatagcgtcctctacaacgacctcgtcgagattgaccctcacggtcagtcactcattgatcgtaaagcaagccgtccattcacgaggcgtg

SEQ ID NO: 92111 - DNA, 116 bp, Glycine max
  Clone ID: PAT_MRT3847_54191C.1
atcggatgaactgtggaccgacgacaactcgtccgtcatggcggcgttcatgaggtcgtccgaggtctcctccctctggacttgccacgtagcagtgcgtgacctggacacaacat

SEQ ID NO: 92112 - DNA, 274 bp, Glycine max
  Clone ID: PAT_MRT3847_54192C.1
gaagaagccctttctttatgcatgtataattggctccaggggccttatcctttaggcggtatttaaatgggaatcccaagtcggggattttcttgaaagaaaatctaacggcctccaatggaccgggaatgttctgaaactgggtgggaaccttgaactctgggtatttttcgttaattaattttacaatgtcagggatggaaacgtcacatgcactgaatatatacctcctttctgttttgggctgttcaaacagaattttgggagcaggaca

SEQ ID NO: 92113 - DNA, 703 bp, Glycine max
  unsure (1)..(703): unsure at all n locations
  Clone ID: PAT_MRT3847_54193C.1
cccacgcgttcgcccacgcgtccgattataaggtaaagaaacattgatgtggtgtagtaataattaaatcagaggcaaggtcctgttgtcgcagacattataaacttcaaattccttattaacaaatgatgttcttctattgattcctcaatttctccaactcaaaactaagtttcgtctttgtgatctcttgattatattatatcgatttgtgaattgtttttccacaaaaaaaaaattcattcaaaccatggcttcattatgccggcggttatccgccgccgcaccggccggtcacttccgattccatcggcccgccgggatttgcgcggttcgatacggttattccgtccggcggccaatgcggttggttgcggcggggaccaccgtgggcggcggcgcgtgggtgacatccgatgacgtcggagggagggaggagaaggtggggccctgctcctacgccgtggaggatcggagggtggcggaagatggcggaagcgatgcggtggtaggaagtangaaccgggtggtggaagtggncgcggcggcggttgcaacggtggtgctgggtgttgggaaccgggttctgtataagttggctctggtttccgtgaagcactaccctttcttcttgctcaacttgccactttcggatatgtaatagtgtactttgcgattttgtatattcgacaccatgcgggca

SEQ ID NO: 92114 - DNA, 288 bp, Glycine max
  Clone ID: PAT_MRT3847_54194C.1
atcattctggttgtgggttttctccggggcaaaaaccaattttgggggaatcttttaaacttggagagtacctccctcgaaaaatttttgaactaacaccccccgggttttacgggtttaataattgaaaattcggccccccttaaaaaaaaatttttggaaacaaaaaccaccttttaaaggtggctacacccacgtagccccctggttttatgggtttaacaaatttttttgggggaaactcaagccttgactttaatttgtttgaaacattattttaccattttt

SEQ ID NO: 92115 - DNA, 134 bp, Glycine max
  Clone ID: PAT_MRT3847_54195C.1
tcgtaattctgctctatctaatcttcgtctgatgggatggtctagtcggttcataacttccgtggctgacttatacatcggagtgatattcgcatcggtgacactctaggtcaaaatcaaccacactttccacc

SEQ ID NO: 92116 - DNA, 739 bp, Glycine max
  Clone ID: PAT_MRT3847_54196C.1
gcacagcaaaaattgatatataattttatatataatgcagtactaggtgtgctgcatacagaatagagagtacaaggcacatatgcctaacccatctgaaaattacaaaataacaatagctggagccaaaaagaaaccacccctaagacaactcctccctcaaactagtggaccattggttaaaatgaatatggaaatctttgtccatacattttaaccaggcccaggattgaaataaagcttcatccatgactttttcggagttgaaattctggttattaaaaaccagaatttaacaagtagtacaatgcatgtactagttgtacaacacttgtacttgacctagaatctagattattcgtataatgagaggggggtaagatcagtgttatacattacattacatgtcagtaatttagagtctcattaatgaaatattatttcctgtctctcttacattacattaaatccctgaagttttatcatggtgtcaaagcacaattcaatccaagcaccagtaggttatgggcacattgaaaactattggaagataacaaaaaccaacttatatttttccatacttacagctataaaatgggtcagcgaaggacggtataacacagcttttcgtgggtttgctggtaaggtaggatcagcaatatcttggatataactgatacgactagttccagtagccccattttgactaagttttgaaccactagactggtaaaacaaa

SEQ ID NO: 92117 - DNA, 261 bp, Glycine max
  Clone ID: PAT_MRT3847_54197C.1
ggcagacaacaccaagtctcaccttctcacactcatcatcatacaccccaacccttttccacataggcgtatgcacatggggtgtcatattgaccaagatggtgggtgacccctgtggcacatgctactctttagcgagcactagttacagatgcagaacatgtcatcgaaaaggcaccagacctccatacgcatgtcgacaacattgaggcaaattgtggcttatgcattacagatatcattatgatcctgtatgatgga

SEQ ID NO: 92118 - DNA, 662 bp, Glycine max
  Clone ID: PAT_MRT3847_54198C.1
aataaaaaaaaaattcatttccatcctctttcacgggaaaattttagcgaaaaacccaattaaaaaacgattctaaaaaatgttaaattactgagattatttttttaaattattcaaccaaatataaaaattcttattaaacaatcctaaggagcatatatacctttctccttgactattaagatacaagtagtaactaagttttctaatcaccggtctcctatcaccattccattaacaattattacacccttgataattttggatgagcaacattaagccatgtctttcacatgccgagcacttcttaatttgtatctacttcaatccaaatcttgtgacaaataactacatacgcagtatttgaaacgaattcattacattattgttttgtgagggttttgtattctgtcatgtttccttcactgatgacaagcaaattcaattctagctaggagctagctagcctttgacatgcccattttggatcctcaaaacatcatttatatatgattttggtttcccaagatgctgaggtgaaaggtatcccttatagaaatcttccacgccattgttttgaacaaagctggtctttctggagtaacaagaattggtgctggaccttatgttccactccatcctgggccataaaaagtagctat

SEQ ID NO: 92119 - DNA, 517 bp, Glycine max
  Clone ID: PAT_MRT3847_54199C.1
gtctatctctcctgaataatccttaaatttatgaaattaatgaaattatatatgtaggttgtaaagtattatattcattaatttagtctctcgattgatatattttactagcattgagagactaatttgaaaaaaaaaatccaatacttcagttacaatgtagcatgatttctaataatttaaggaccaatatagtttcattagttttagaaatattttaggaggaaggataaaaatacttcacgatcattgttagtcttgttcagagaacacgtttttacgtttgatttgtattttttgccaccaaagatataatttaatttatctgctatattccatatggcaagaaaagaaaatacttggcttattgcaataatatgcaaaattaattaaattaaaaatgtttttttaggttatatatttgaatgattgaccgaactgacaaatatattctgcaaaaatatttgagttcccaacaaattattaacaaatattttttcattaaaagcttaaattt

SEQ ID NO: 92120 - DNA, 128 bp, Glycine max
  Clone ID: PAT_MRT3847_5419C.1
acgagaagatgcgtagaccaacagagatgccgtcctcataggcgaagatgaaaaccctggcaagtcgtgccaaggcacaagtcgacatctatagagccatagtagacgcgaaggcagcgaaagcaacg

SEQ ID NO: 92121 - DNA, 260 bp, Glycine max
  unsure (1)..(260): unsure at all n locations
  Clone ID: PAT_MRT3847_541C.1
aaagggattcgagccttgataatggtagggtcttaaaacttaagggccttaatgttaagaagccttcccttttggttttaaaagaaagtaagtgtttaaaaaatttttttcgtggggggcttctttggtaaatttaaacggtaatgttatttaactntgaaaaattgtatttttgttaagttaaatttgtttaaaaatgtgtatcaacatgtcaccaaatcttcgtgttggaggcccaagaatttggtcaatttcgtggt

SEQ ID NO: 92122 - DNA, 509 bp, Glycine max
  Clone ID: PAT_MRT3847_54200C.1
tgctcgctggtgatcatgactaacgccaggtgaagagaagactggagattgagaagagcactgaagggcagtgcgggaatataggaggagagaagaatgagaagcacgcaagaagcacgcgatctgactgagtgaggctgtcatgaacatgtagcctcttcacttctctgcagaattgactgtcgtagtagagcagattctgcaagatgctcggatttcatggactctcgataagctacttgacccaggagctgaacatgccatcgctagctggctccaacacactgaccaactgtggaggatcatctagcttcacccctctcattgtggctattatagcatactcctgcgctggacgttcttggaccattaccgatgcttctctcattcatgaactgagatggattagcatcactgtatcagctatactgccacaatgtcgtcccccacgctgcccagcacaggctgattgccgtgatggctcatcctgacatctgtggatactctac

SEQ ID NO: 92123 - DNA, 575 bp, Glycine max
  Clone ID: PAT_MRT3847_54201C.1
gggaaaaccccccgggggaaaaaaaaacaatctttttttttggttcaagaacaagtttttttaattttaaaacccccccaaaaaaaaaaaaaaatgtttgattaatttaggaagcaatgggggccccttttggcccctgaaccggaaacccatgaatccccccccccccagggtttttccccttaacagggggggggggcccaaaagccccccacacagcactggggcccttaaaccccgccccaaatgcaatctgccaaggccgggccccttttttgaccccccctttgggttcggggggggcccattcatcccccaaggaactggtaaaagggttccccaacccttttaggggcctccttgggggccccctgggccaaacaaaaagcccaaaatttttttccaacttaaccaaaactggcctcccttcaggatgaatgcaaaaatgcccaaaggcccacttgaaatcgggggggggggggtttatttttattttgaacactttcctaaccaccaaggggggaaaaaaaaaaaactttttttacatagggaggacccaggggcccaaggggggg

SEQ ID NO: 92124 - DNA, 511 bp, Glycine max
  unsure (1)..(511): unsure at all n locations
  Clone ID: PAT_MRT3847_54202C.1
gccaattcccaccatgttgtcaactcatcctctccccgtccgctcctccctcaagttcatcactcacctttgacaccaccaccatcatccaaatctgaactccccgttctcaccctcggcaacaatgcttagcccaacctccttcccagtgcctgggccaacttccttcccttccaagacaaacccaaatgaatcctatcccccttgctcaccctaatcccaacctaattcaaaccctcatatgaaacctaacctaactcacaccaaaaaataataaatggacaataaaatgatcaagtctgaaatccaaacacaatgatgccttcacgccaccaccaccatcgtctagatttgacgacatcatccccgcatctaggctactttgaccttgcttttaatattggtgtttgttatcttcaatgattttattgtagatttcattgttgcgctaatatgtttcttcttgtatttcttcgttgtgctagtttgtttgtttctagatttanaaaga

SEQ ID NO: 92125 - DNA, 279 bp, Glycine max
  Clone ID: PAT_MRT3847_54203C.1
aattgtcactactcaatgcgaacaagcttgtgccgcggctcctgcaaagctatacaaagccatggccttcgattttaacaacgatatcccaaaagctatcccaaattttgttaagagtgctgaaatcattggagaccaagggcccggatctattaacaagctcgatcttgctaacggatatgtgaatcaaaaggtggatgtggtggactaagaaaataatatgtaccactacactgcacatgaacgcagagttttatcacatctattgcagaaagtgtg

SEQ ID NO: 92126 - DNA, 678 bp, Glycine max
  unsure (1)..(678): unsure at all n locations
  Clone ID: PAT_MRT3847_54204C.1
ctgcattgctattcctgttgccctttggttttcttttctacgctgagttatactgatcagttgaatgggaatttttctcctggaattttacctatttcctctaatatactaccagtttctatcagagaataaaaaaaagaataaaaaagttctctctaacatcaaaaagccaaaaagtcacttaagaacaaaataaaacaataaataattattaaatcatacatgaaagtgtgagctacagacaaatatcaagtgcactgcaggttggatgattaatgagcattaaatggccaaggattgaaaaacaaaggaatgtgatatatgttgtggtgatgttgtgccatgtgtcaagcatatgtgcattttgatatgtgtctataagttaggggtcaatgcatcgtccctttgattgatttgagcttaatgaactatagaaccctaaaacatagctagtctaaaactgatgcaggtactaaatgccatagactgatgcacggggggagtcctcttccaacggtaatacttttaaagattgccagaatagattctaaacatctaagccctttattccctaattaagcattcangtgttgtcagctaacacagaaaacattgaactacaatattcattctcaaaagttctccaaaagcaaaaatcaaaatccagtaacataaaaa

SEQ ID NO: 92127 - DNA, 457 bp, Glycine max
  Clone ID: PAT_MRT3847_54205C.1
tgtgctgattataataccacttaacattgccttttttcttttcttggcctacaacctgctgggaaagcaccattctttgggtctaacctgtgctgcgtaattagctcccacaacctttttcacagtctcgcgggcgcaatccccgccggggctggtgcatttaatcgcgtgtgttttttgaagcggctcgttcctgctgggagtctttcccaccttttatattactggcaaactcctggttgccccatggatgtctcgcctggttaaagatccctataaggatgcagctacaaattctttcttccctcgcgaatttttctgggaggtaagataactggttttggttccttgaacctgcttccccctgtccttcttttcactggttgtgctctttttttctcccccctctgctgcgcaactggcggggacccggggtctgaggctccttgaagtcctg

SEQ ID NO: 92128 - DNA, 267 bp, Glycine max
  Clone ID: PAT_MRT3847_54206C.1
ccgggccggaaaccccgggacgacccacgcgcccgttgacgcttgggaccccaagacacgagaacgcgcaacggacaaaacaagaaggccagcacccgccaaaccggagccagacacagaagccggccccaacccaacaaacccaacgaagcgggagcaaccaacacgcaacaaagggcccccgaggccaccagaagacagggacccaaaccaagaggaaaaggaagagcgacccaccaagccgacggcacccagcggcaaaaggca

SEQ ID NO: 92129 - DNA, 484 bp, Glycine max
  Clone ID: PAT_MRT3847_54207C.1
aattcggctcgagcgagaagacgacagaagggggagaaagagaagatgcagattcgagttcgatgcaactgtggagaaggaagctgcgaggaatggggggttatagaacttcaaggagtggtggagccacagcctggattccacgattccctccaaaatcttcacatcggcactttgtgtcgtccttcttctcaggaagtctacaccttcactgttggataccatgaactgacggggtcaaaggttcccttaaagaagccaatggtggtgctcaagaaagtaaagcatcctgatggagaaagtggttgtaaggtggagctgcaagttgttggagtcattagacataagattctgttcaagaacagaccaaaggctctcatttctaagccacagataacatccagggaaagacaaaagcctatcatgttagggtcttctccttcaaatcaaactgcttaagcaggctcattgtcactgtcatttg

SEQ ID NO: 92130 - DNA, 440 bp, Glycine max
  Clone ID: PAT_MRT3847_54208C.1
tctattcgaccgcaacaccactctctgttacgggggactctaaaggccatggcgggggctgcaaagcacaacaccatgacttcatcccagtggatcgcccacaaaaccatctctccacgcagaggaacctatactcgccgagactctcttccgatccgcgcaatcaccttaccaacacgaactcgtccaaaccgccaaatacaaggcaatcacccggccgaggaatacttgcaatagatgaaccaaaagccacaagcgggaaacgaatagcatccattggaaaggacaaaaccgaggggaatcgcccggccaataggcagctgcagcatcaccaaacccgaccatggtgaacacatatacggggcaactcttcatgaagaaaccctctaccagaaaacaacagaaggcaaagcaatctgtagaatgccccccgcgaacaa

SEQ ID NO: 92131 - DNA, 403 bp, Glycine max
  Clone ID: PAT_MRT3847_54209C.1
ggatgcaactgtggagaaggaagctgcgaggaatggggggttatagaacttcaaggagtggtggagccacagcctggattccacgattccctccaaaatcttcacatcggcactttgtgtcgtccttcttctcaggcgctgcgtcattatagagtattccacaatcgcaatttaaaacatttctctacttttagggttctgctaactagagtattttacaagaatattattggaagtctacaccttcactgttggataccatgaactgacggggtcaaaggttcccttaaagaagccaatggtggtgctcaagaaagtaaagcatcctgatggagaaagtggttgtaaggtggagctgcaagttgttggagtcattagacataagattctgttcaagaacaga

SEQ ID NO: 92132 - DNA, 327 bp, Glycine max
  Clone ID: PAT_MRT3847_5420C.1
acacacttataactaacaaggaaattctaatggcaccctcaacgatttctaacccgggggcgggctttgttgaccgtgccgtgccctccatgattgctacaatcactggcctgaggatcatggctggcttccccaccagaaagaccaacaaggacacttaccttcattgattgcaacggcggaagagtgcactgcatgcacgtgtggccaccagttggcaagaagaagtgcgagaatctttcctacctgacagaccttgaagatgcacaatgggcaaaggaagctgaataccttgttagagaagggatggatattaacgctaggaat

SEQ ID NO: 92133 - DNA, 1022 bp, Glycine max
  Clone ID: PAT_MRT3847_54210C.1
ggaattcggctccgagcttttaatacctttgctcctaataaggcagcaggagatcacagaactccaattaaactaaaagaaatttctccagatcaatcaaatcaaactgcagcagatacgtggaatccatggcagcaaccagaccagacaggaggaggaggagcctctcaaactatccatgaaacacaactcaaggcatctcgcgacgtggcaatggcaacagctgccaaagcaaaattacttcttcgggagctaaaaaccgttaaagcggatttggctttttctaaagcacgctctgctcaactagaagaggaaaacaaaatgctccgggaccgcgagggtaccgacaagggacaaaacgttacccgtgcagatgatgatttgatccggcttcaactagagacacttcttgctgagaagggtcgattagctagtgagaacgaggtatatgcacgggagaatcgttttctacgggaaattgttgagtaccatcagttgaccatgcaggatttggtgtatcttgatgagggcatggaagaagtcacagaaatttatcccttagataccactggcactgtggttcctcgggtgttgccaaagtccccacgctcgcctttaagtcgaggaggctcgcatactaaatcatttttttctgtgccacaaatactagaacaagaacaagaaaacaatgttacatcagagttagatgaggctcctcctagtatcgatatctcagtctcagtttctaaagatcagcatgcaaagtgatctttaattttatacatgtgtagtttggtttagccttagatgggtttcttactagtggaaaatacatatatatgcccaatgcatgcattacttgtaagatttattcacatgtttcccaaggaaagaaaaaattaaaataggaccgacgatggttagtgttgtacgtgttcccccgaaacaaaaacacatttgttgttaattgattctggatccatatatatgtaacttgcccgcccagaaagggttcgtttggc

SEQ ID NO: 92134 - DNA, 474 bp, Glycine max
  Clone ID: PAT_MRT3847_54211C.1
gataatgtaaggaaccagcgtgaaaatgttgttttgatgatttcttataagcagtctcgacttggcatacctgctgaaactgatccaaaaatagatgagaaaacaatcaatgaagtgttcttgaaggtgctagataactatatcaggtggtgcagatacttacgaattcgtcttgcatggaatagtttagaggcaattaaccgggataggaagctttttttggtttctctgtattttcttatttggggtgaagctgcaaatgttcgttttcttccggagtgtatttgctatatattccacaatatggctaaagagttggatgctattttggatcatggagaagctgcacctgcagtcagctgcgtaaccgacgatggttctgcaaaattccttgagaaaataatttatcctatttatcaaacgctatttgaagaagctgatagaaacaacaatgggaaagctgcacactcaaca

SEQ ID NO: 92135 - DNA, 470 bp, Glycine max
  Clone ID: PAT_MRT3847_54212C.1
accttaattatattttttttgttttctttttttttatatggtttattatttttttttggagaatgttttaattatttgttttgactatgcatgtcactgtagacaacaacacctgcaataatcctacaaaacattttctttgagcatcacataagaccctgcctctagtggaaaaaacacggggccaaaaaactcaaccacaacagtatcatagggggagacctgtccaataaccagaagccgcgcagacccaaagcccctatcaggctgctacggagggcgtcatccaaccaggcacaggacccgtactgatcagggattccaccaaagacgcgtttttcaattacaaaggccgccaccctaacaggccacaactcctcctccttggaaagaacacgcacaaaacgacaggctgttgaacatgcgcgccacgatgcgaggagatctatctatatattacaaaccggggg

SEQ ID NO: 92136 - DNA, 265 bp, Glycine max
  Clone ID: PAT_MRT3847_54213C.1
tgatattattgaatcctttcattcattcccaattccatggcacctattctcattaatcacctctttgttatcctctacggtctccgagccataaacacactttccaccactgtttccatctctgatacttctaattccaccaggcacttatctgtgttctggaacatcctgagcaactaaggagaatcaaatctcaactgtaccaggttgcctcaggctcaggctaatacacttgcatgtcaattccaatgtatcttactctcag

SEQ ID NO: 92137 - DNA, 367 bp, Glycine max
  Clone ID: PAT_MRT3847_54214C.1
aaaaaaaaaaaaaaaaacaacgcgggggggaaacgcggggttttgcctaaaaataatgggagctaaccaggggggaaaacattgtttttattatagggattaataaagaaaggcgggtataaaagtgaaatttatttttcgggaaaaaaaagttttatatcaaaatataaaaaaaaaaaaacaggggggagatataaatgaaaagggcgggggggacatataggaaacccttacacaattatttgtggtggaaattccaaaccccttgttaaaggaaaaaaaccgcagcagggcatatttaaaaaaaacccgccccaccgggggaagaaactatatatttattccgaacccagattttttttttttt

SEQ ID NO: 92138 - DNA, 539 bp, Glycine max
  unsure (1)..(539): unsure at all n locations
  Clone ID: PAT_MRT3847_54215C.1
gcatgataaataataatgtggttccagagcttagcacatttgtccacctcatcaaaggccttgccagggttggtaagtggcaagaagcactacaattatcagacagcatatgccaaatggatatacgctggcttcatgaagaggtaaccaatgcaaattagtttctgatgcacagaactgcagattgaatttgagttctgtaaccgaaggaaaacgaatactggtagcttagaagaataggttaaaagctggcgagtgaaatggttcttgtaatctataatatattatgatgcccttcatttattattgatcttcatttgcagatgtgattttttgcagtccaggtaagacaccagcgataatggaagcagaaacatgggattttgaagaaatctcaaaaaaagttctctgtaatccactaatctccaagtttcaaaatcatgtgtatntgtccacctttttttacatcatggcagcggtaatgattttgtggtctatgatcaagcctactaattgacgccgagtaccttggcagctaa

SEQ ID NO: 92139 - DNA, 874 bp, Glycine max
  Clone ID: PAT_MRT3847_54216C.1
tacggctgcgagaagacgacagaagggggtgaagaaagagactaccagttatcgagtgacaggtttatcttcttctgcttggtagcttcaattccatctacctgcttagtgttatttatattccacactgtcatcaatcagtaaacaaagttaaatctgatccttcattcccttcttccatggcagctctcactgttggccactgttgctgtagcaaaagggtaccttcatctcatcatgaattcactaacagaagcagatcacccaggatttttattctatcatcttgccatggtagaacaccagatcccaaagaaaagaaagatgatcataagatgggagaaggaaagctgagcttgttgaaatggaaaatgttaaacgacattgagaaggtagggaagagggtgaagcagaatttgagtccacagcaaaagcaaaagggtgattggaaagacttgttgctgatgagtatatcgtttgcagtttatgtgtacatatcccagatgctagtttgtgcctattttgcttggacctctatgcccaaacccatctggtagctaagctagttaattacttgtcatcttcacttgcctttcatttgtagaaaaagatcatcattatgattataagagaagaataagatgtgtgtattggtcatgtatactatacacgagtgacagtaatatgtattcgtcaatggtaatagatgatggctgttttattatttttactttgggtatgatgtgattatctctgtgataaattaatagccctcttcgtgattctctatatgtgttagttgggaaagaatcgtgatgaccgtgagagactgcctgtgagtttgtccgttcaacatgggaagggctgtgatgtg

SEQ ID NO: 92140 - DNA, 286 bp, Glycine max
  Clone ID: PAT_MRT3847_54217C.1
tcatgctatatctacgagcatcagctagggacagggttatttacatattcagttcattatctcttgaacctttgcaatctacagatgatagcattcatttagctaatagatttaattgcttacctcgaagacttaatacaatatgtgcatgtatttattattgtatttatttttaatgttgatctatctgttcttaatatgtaatatggcttatcacatttgtaacttccaagcactataagcctactatctattaaaatagacctattctagatagatatatatc

SEQ ID NO: 92141 - DNA, 525 bp, Glycine max
  Clone ID: PAT_MRT3847_54218C.1
ccccccccaaaagcaatttttttttattaattttttggtccccttcatacaaggggccgggggatttaaaaaaccccaaatttttttggaaggaaatatggggcttttggcacagttttattcgggctatttggaaaaattgggcccaaacaaggggggccaacccgataggttaagtggggcagttgactaaaagtcataaaaactgtaacttttaaaaaatccacaaaattccctcaactaattttaaataaaaaataacccacattttgtaatattgctaacaaaattttcagcgctaaagttcattaaaaggctttcttttcccgaaaaaaaaacagtttttgtttttttggagttcccacctgtttttagggggtttaattttataaatacaaactatccatttttggggagggaacgccttttccaagaactaaagctttatgtccttatttccaatttcaacacctttagcacgatcatacccagggggttggccatattttgttgccagctccccaa

SEQ ID NO: 92142 - DNA, 311 bp, Glycine max
  Clone ID: PAT_MRT3847_54219C.1
agagctctgacggcgcctggccgccttccgtaggctcggatttcggttcaggggattcaattgcattttcattggtgcaacgggagggccggcggccccaatgcaggatgttcaggttacaaaagattggttattttcttttaaggaatgtttacccagaacctattgtgtttaaaatcaaaaaaatccttttgtgtaaaataggtggttgggaaaattgactttccctcagggcactttccgaagtgtcaagagaatgcctatttctatagggtgaggagctggtgcaaaaaatgctattgtcatgaata

SEQ ID NO: 92143 - DNA, 670 bp, Glycine max
  Clone ID: PAT_MRT3847_5421C.1
gaatatacaatcctttgaggacgacgagtttttgtacgacaaatattgtgatgagatctactgtaggaaactcgaggcacgataggttaaaattattttgagaataattgaggagtcatgcgttttgtatagttcatagatagagtctaggtgttaaaatgtttcttgggttgtacatgaataggagagagagaccctgacaaactcttcggattctaggccttgggagtaaatacatggtttgagtgctctttaagcttgtgctgatctcacatgattggagcattttcgcaaaataatgtgattctgactagtttccctatgattttgcctagtgagattgacctgacttaccagtacatgatctgtcttgtcatgtactcctaagcgctcgatgaggtttttcactaacatgatattacatcgcatctaggattgaatcttagtatatctattatattaatgcttgtatattgatcattattgactggttgactgatattgtgttttgatttttgaatacgtgaatgatgtgaaaatatgtgagatgtgttgtgttgagacgtgatgttatacgataagtgatgtggaataacgtaaattgtgtttaagtaaattatatttgattatataatatgtgtattcatatggtggctgggttgtgtttatt

SEQ ID NO: 92144 - DNA, 255 bp, Glycine max
  unsure (1)..(255): unsure at all n locations
  Clone ID: PAT_MRT3847_54220C.1
gtgcattgttgtgtgggggtggtggttganagattgcaaaagtaacaacttaattctgaagatccaagtggtgttgtgtggattgtgnaagatttgattttttgttggttattctcaaaagggttgtgaacggatccttcnaagggaagatagtgggtgctcgagtgnnctagattcnttccttngcatncaaggggcccnaaagntgggnaccaccncaacnggagaaannnagcnncccncnnangnatnncc

SEQ ID NO: 92145 - DNA, 874 bp, Glycine max
  unsure (1)..(874): unsure at all n locations
  Clone ID: PAT_MRT3847_54221C.1
ctcacttctggtggtccgctcgcggcacttccaaatgctccctccccacataattctttctttttgagagactagacaagaaattaaaagaaaagacagtcagaattaatggagaattcaaattctaattccagaaaaccaccaaagaatgggaataggatgattttggagagaggggtagttgggttgggcatagttgctgccgtgaactccactgatgtgggtgtctcctctgctgtggctgctgctggctttcgtggaacctcaacctatgactatggcattttctatgcttcccctctcaacaatactggaacccgcttccctcattttctcaattcctgcaatctttgcgacaaacatcttcatggggttgacatcttcatttacagaggcgagaaagcgttttgtagtgcagaatgccgtgagacacacattagcattagcaacgatgatcaccaagacgtagtcaagtgcagatctcgtgttgtagagcacaatcctgtcacactcacatcttctattcttgctgcagcatgaacctacacaatcctgtcattttattattaaaggatgaaagaattagctagcgccatcaatctcaataaagatgtttatccccatgacttaatttggtactacctagctcgccacaggggagagttgcgacgaaaatcgaagcaagtgtagtgaagtagattgtttgatctctaatgaatggaactataaaacatacatagatttcctttcttcacgcaatatatataaattgcaaccaagttcatattctcgtgcagatttttagatttcttgtgttgtacgttatcttctatgctgtccacaagataacaaagaaattcnnnnnnnnntaggt

SEQ ID NO: 92146 - DNA, 1246 bp, Glycine max
  Clone ID: PAT_MRT3847_54222C.1
ggtccggaatcccgcgtcgacccacgcgtccggttagagcttcttcccacttcctccgccgccaccgccaccaccaccgatggcggatccgaaagcctactggtgccacgagtgcgacatgagcgtgtccctgacgctcccaccctcccctctcctctgcccgcactgccacacccacttcctcgagctcatggactccccaaccctctcccaaaacgacaccgaatcctccctcttcgacgtcgttttccaagacgctctcttactcctcaaccccccttcctcaaaaccccgccccctcccctccctccacgtcaccccctccctcctctcctccctcgaccccaacggcgtcgttcgctgcgccgtctgcaaagaccaaattaccccccacgccgaagccaaacaattaccctgcaaacacttataccactccgattgcatcacgccgtggctcgaactccacgcctcgtgtccgctatgcaggtttcggttggaagaagaggaggaagaaggcggtgacggcgttatgacgaagatcaggagggagattattgccaggctgacggtgctgacggaagaggatttctacgggctgaggaccacgctcaaccacattgcctcgcgccacgcgctcatccaagagaacgagaatcgcggcgcccagattggggaaactcaaggtggcgattcggcttgctgatcatattggttcataaggtatatagtgtattaaaataatgctgaagttgtatcaccatagatcgtcttttcaagtgtaaatctgcaccgacgattatgctgctgttcttttccctccttttttgggaatctccaactagctaggtctagtgctatagctaaaaaatacaataaattgatggagtgcacgggtaatgtgcacttctctacccatcttccactctctctatgttggtccttgtaactggatttccttagccaaatttcttgtgtaaaacttagctttcttttatgttgtgtctgaattgcccaagtggatgatggatccttcccaatgaatcatttcgttcccaatttttttgctttggctttacagtagatgctattttttcctgccaatgttgctgtagttacggtatgagatattgagattgttgagggattgaatcatttgagtgttgttgtgtccatggaagagccttaaaatgcataatatattgtggtgtgtaaaaaaaaaaaaaaagggcggcaaatgactagtagc

SEQ ID NO: 92147 - DNA, 431 bp, Glycine max
  Clone ID: PAT_MRT3847_54223C.1
gttattcaaagcatcagttatttgatttttcaatccagtccaaagacacacaaacaccttagaaaacacacaaaacatcaacaactatgggtaactgttgcggacctagtcagcctgaacgggagctatccaccaatcctccccaatatgcagggtacctctgatgatcctgaattaaccaaagtcgccacaaaaattcaagctaactaccgtggacatcaagttcgtaagaacatttccgctggccctgacgctctagacatcgctgggcagcaagttgaccatgagggcaatagtcagcatggtccaacctcagaaataagcagtagtggttaatgaaattcctaactacgcaaatcctaacactgcagccactctggagaagctaggtaccttcagctatgaccaggacctacccgaagactcgcaat

SEQ ID NO: 92148 - DNA, 190 bp, Glycine max
  Clone ID: PAT_MRT3847_54224C.1
cttcggtttttaattcttaccagaagggccaaatcaaactggcccataaaagtggtttgggaccggttacccaaccaaaggttttacaacaccgtccaaaaacccattgccatcctttactactccaaaagaacttccaacggaggccttttaattactgaagccactggcgtttttgaaacggttaaag

SEQ ID NO: 92149 - DNA, 261 bp, Glycine max
  Clone ID: PAT_MRT3847_54225C.1
cgggacgacccacgcgaccaggagaggagagcacaaagaaaagcaaacacagacacagcaagagagagcagggaggagaggggaaagggagaaagagagacaccggaggcacaggaaaccaaggacacggaagagcaagagaccaacgagaacaaggacacgcagagaagaccacaacaagagcagacccaggacgcaagagagacgagagcaaacacacaaaccaacccggcgcaacagaaaagcagaaaagccacaacg

SEQ ID NO: 92150 - DNA, 161 bp, Glycine max
  Clone ID: PAT_MRT3847_54226C.1
ggtaatccatcctcaataccgacagtaaaatccttatttccgactctgatatcagctgcttaccacacacaatgaagtacatgagacatgactgaggcatgcctgcacttcggcttgagaaagtcctggacatgccccaaataacagcgggggtaaccctt

SEQ ID NO: 92151 - DNA, 150 bp, Glycine max
  Clone ID: PAT_MRT3847_54227C.1
tcaccctctacgcttctccctgccagggggggtatctccagagattctatgcacaagaggcgcgccactgccggcatcaagaacgcacgcaggaagaagagcaagtatgagctcggtcgccaacctgtttacactaagctgccaagcaac

SEQ ID NO: 92152 - DNA, 267 bp, Glycine max
  Clone ID: PAT_MRT3847_54228C.1
cggaaggaaatatgatagatgcacgatgtcagcattgaatatgattgtattgtaccaatttcaaattgtattgtggtatcaatagtgttgtatgtccatggtttgtgataataacaaacaaattgttggttttcatgttgctggaagcaaggaagactgggatatgcttcattgataccatatgtagaggccagttgtgcaagctacaaagtgctgaagtttacttttgacttttccttgaggaggttgataagtcatgaggtagtt

SEQ ID NO: 92153 - DNA, 112 bp, Glycine max
  Clone ID: PAT_MRT3847_54229C.1
cacacgcgtggcgtgcatatgatcccgtacgttcttatgataaaatatacctcggcgacgatatataacccgtgaacgctcgggtctctatctcaaactcggattgtctcaa

SEQ ID NO: 92154 - DNA, 363 bp, Glycine max
  Clone ID: PAT_MRT3847_5422C.1
acgagaatatgttgtgcttccctcactcttctttcactattctctggacccaaaatatatatctcaacgtttgatcttgttggattcttttttagctttgtcgaaatattaaatgtacacatattaactctttaatttcacctttaatactatcttattaatctaattcagttgattaaacatgataaattaataagtgagtttttgtaaaattttaaaagtgttttttttattcctaccaataaaaaattattttattaatttaacgtatttcttattttgaatgagaaattttctttaaaaaataaataggataaagtttcttaagtctatataaaagtaaattacatatatgttcatcaa

SEQ ID NO: 92155 - DNA, 170 bp, Glycine max
  Clone ID: PAT_MRT3847_54230C.1
gttatttttgcgttttattcattggaaagagtgaaaggtggtgacaaggtggaaacaaacataacctaacaacaaaatcatgggtgggaattatttatggcttggcttacacatgtattcacttgtccccattatgaccaaaaatgtgttaggtttggtggaaaaataaa

SEQ ID NO: 92156 - DNA, 986 bp, Glycine max
  Clone ID: PAT_MRT3847_54231C.1
gagcaagcaaaactttcttggtatcatgcacttggttgtaatgtagatttgctgacatggccttccactgaggttcttcatctttacaacaatgctgaagaaaatatggagaaaggaatgcagatatgggaagaatcagaaaagcagaacttgagtaaaacatctagttcaaatgatgttagattgcatttgcagaacatggggttggatgggctttttaaaaatatatccctagatgaatttgcagcacaggaggcacatatgaggtctcaaataaatctcctatggggtaccatgctatatgaacgctcatttcgtggagttcaaattagggctaccaatatggcatgaatctctagaagttgcagttgagaagtttgaacttgctggagcttctccaacagatatagctgtagttttgaagaaccactgttcaaataatactgcagtagatggtcttgcctttaaaattgatgaaatagtacaggcatggaatgagatgtacaaagctaaaatgtggcagagtggagttccatcatttcgtttggaacccttatttagaaggcgagtttcaaaaacttatcatgcctttgagcttgcatgagttgcatatttttcttcaagtacttgaagagtgacagagccaacaatcacttaggctgcttatgtgcctgaaatgctattgtcatcagaaggttattctttctacttttatgaatttgggttcaacaatatacttaaagaaagtattcttttaatggcatttacatttccaagaacacagagggttcctttacacattgtgaagatggcgtagcaggaattaccttttacttagtttctgccattgctcattttgccttccctttaattattagatttctagtggctagtaggatgttgaatttgtaccaagagcagcgggaagatacatgttcttttttcatctgttatttatccatgtgtaaactactctttgttctttg

SEQ ID NO: 92157 - DNA, 947 bp, Glycine max
  Clone ID: PAT_MRT3847_54232C.1
ttttcattgggtaattttaaaaataatatatatatatttcttaaatataaacaaaaacatgcgtataaggcacaagttgattttaagattatgtacacattatatttgagtacgaagataaaacaaattttctagagcatcctcaaaaaagcgaaacacatcataaccaacaaagaacaggttagctgagtcattagtgcatttcagtaacttcattattcatccttcaactgagtcatccacctcaaaaaccttcctcagtttctcttcgtctgattcaaaaacctttcttgcttgtttcagctcttcattcatagaaagtagttctgtacagcggttaagttttggcgaatccttgcgaatcaaatagaggaaatcctcaactgatagcttccccctctgagatccaatatcttgggctttatgtaccagttctgtgacatactccacaacaatgtcctccataagagccacactttcaggaagtggattaggatcatctccaaagccatacatcatgtgatgtaattctttttggaaaactcctcttttgcgcttagacgaagtttctgatggttgtgaggaagctgctcttggttttgatgaggttccagcagaggaattgctcatttttattgcccaatgcttccaatgttatcttcagtgagtaactggagttaatgaataggagaaactgatgatattcttgtatcttccaatgcagtgcgtaggttctccgcaatttgaattgctcacaagtcacaagagagagataaacttcgttcttcagtggtatggcataatgaaacccaccgtgagagaggaagcgtactccgaagtctgaacagagagagaaaacgtactctcgacgagaatgaggacacgtgatttgctagtcactttagagccaaaggcgaagcaaattctccctctcttgtgcggttcac

SEQ ID NO: 92158 - DNA, 328 bp, Glycine max
  Clone ID: PAT_MRT3847_54233C.1
cgccgctgacaaaactattaagacccatgagaccatcaacaacaggatcgcacttgtcatgaagagaggcaaattcaccctccctaacaagaccgatctcaaatctcttaatgaactccaaaggcaacgatgattatcattgctaacaacagcccccctttagagaaaggcatacactcaatactatgctcatgatggcacaaggctggagttcgtccatacaatcgagaacaatgtggatttgcgcactgcatgcggaaaatatcacacacagcgctgccttaccattatcgaccctggtgatactgatatcatcaagacactgccc

SEQ ID NO: 92159 - DNA, 591 bp, Glycine max
  unsure (1)..(591): unsure at all n locations
  Clone ID: PAT_MRT3847_54234C.1
gacccagcgnccggtcggctaaaattcgagaatcatctattcatcgtctaactctaatccgcatgctttccctcctccattcgtgtgttgctcagagaagaacaaagaataaaaaggcccgagtgtgaacggttctttactaatacgtattagtcaaagaaacataagataagatatgggtcgtttagcagagtcgaagttggtgcaagagttggttctgtatgcagcaagcgcagcactgagctgcttggtcttgttcgtgggcctccgacagctcgacccgaatcgcgaggcttcgaaaaaggcctttcagcacaaaaaagagattgccaagcgcctcggtcgtcctctagttcagacaaacccttatgaggatgtcatagcatgcgatgttatcaatcctgacaacattgatgtggagtttaactctattgggggactggaaactattaagctagctctgtttgagcttggtattctgcctttaaaaagacctgacttgttttctcatgggagacttcttgggcgacaaaaaggggggccccttgtatggaccacctggcacgcgcagggcaatgcttgccaaagcta

SEQ ID NO: 92160 - DNA, 266 bp, Glycine max
  Clone ID: PAT_MRT3847_54235C.1
ggtttcacctaattttattcttgataattatacatattatactgcatgccaaccaaggattcactgttttttaaatagagtactgtgtgatgcattaatggagtaatgtgtttatgtgcttgtgacgataaggcttgcttttggattaagattctctaacattgattctatgcaaagtgtgtttgtataagatgattggtaagcttccagctagtaataatttaaggaaaaatagtacttggacactcatgttatagtaaggcaag

SEQ ID NO: 92161 - DNA, 371 bp, Glycine max
  Clone ID: PAT_MRT3847_54236C.1
ggtcacaaagacgaataatatgagtttgatttcacattataaacattgacacactattaagtgcagtgatgccaagcttatacaacaaacatctaacaacctatagaaagataggctttaacataatcatacatgggggaataagccacggatgcggtgcacaacaatcacttataaccgtgttaaccaaagtgatatgtgtatgtgagtattacacgggagaggaatgaacaccacccccatactggatggtcatctgctactgaggctcgcgtggacagaacgaggtcctatgaaaaacttgccggtcctattatgacaggggggtcacatagggaacgatacacaattctctttataagccgttgatt

SEQ ID NO: 92162 - DNA, 718 bp, Glycine max
  Clone ID: PAT_MRT3847_54237C.1
gaataaccacattataagtactttttacttgaatagttggcccaaaaattcattacaggtgaataaccacatttaagtactttttacttgaacagttggcccaacaacagatatcagacaaaaattagaaagaagtaagaaaacatttactttggagtttaatggtcatatcctaacagtgtaaaacaaacttatacatgatgagttatgatggatgatgacataaaactattttacaatgtcggtgcattacctattttctctttactttgatttgatgatgtaaacaagagaaaactgtcatcatgatatccaaaaactgcacacggtatgcagttggatgaattttccatcatgatatccacaagttgtacatgttatacaattggatcatattagtacccttcagggacatcttgtagagttccctgatctttccaccatctccaaatctgctagatgttgaagatggttgacagggagatttgtttgcactcgatgaaagtatcgtggccaacattttcttcaaaagcatctgcaactgactccaatattttgcatgtaattcgggataactagtaccgaaagtgtcggcatttgtatctgatacatggcgtccttcaagcatatgagccaaagctgattccagcaccacattggagtgtagatggcttgaaaggcttaatgaaagagctgatctctccataagaatagtcaa

SEQ ID NO: 92163 - DNA, 356 bp, Glycine max
  Clone ID: PAT_MRT3847_54238C.1
ggcccaaaaggataataatttaactttaaagagaactttttgatcttcaaccctccaacgttttaagacgaagggaactattccccccctggaaggggaattgggaaaaaaacccagggggggaaacccttccccagaaaaagattccagaaaaattcaataatccccaatttttttttttattttcatttccccccctttagaaaccaggggggggaagctgctcgggggtggggctaaaaaaaacaaccttgtaaacagggccagggtttcccccaccgatgaggggcccggcccaaaaaatccaggggttggtccaggtccagttaacgaaagggggcccaaatgtcacaggg

SEQ ID NO: 92164 - DNA, 586 bp, Glycine max
  Clone ID: PAT_MRT3847_54239C.1
aatgatgataataaagccaaattagactttctttacattttaaacatattttttgcttaattcaacttttttttatttacattttcatcgatttatataatggaatggaacaataagtcacactttaattgcattcaattaaatttaggtgaaaattttaatttcgattctttctatttttgttgaataaaattccattacttaaaaactatgaatactaaaaattaagaaaacaagaatgacacttaaataaaggtttgatagcaaaaatacagttaaaccttaccattatcataacttataagaatatatcctcgaaattcttgaaaataaaacatgtcaaacagtagtttattttattaaacaaaacaaaatgcatgcagttgttttatgaatatatgatgcaatggaaaaggaaggctaaggaaggaaggaaaaaaatccgttcaaaaggattggcaaaagacgaaaaaaaaaaaagaaagaaagcagaaacggcatcaaatacgtccactacaaaaatgaaaattctgtataaaaaaaataaaaattgaacgactgatattcaattacgtatacatagagc

SEQ ID NO: 92165 - DNA, 423 bp, Glycine max
  unsure (1)..(423): unsure at all n locations
  Clone ID: PAT_MRT3847_5423C.1
aggcctgagtcncctgaaacggaagaacaggacaaacccaaaaagattgatgccatattgagacaaagaatagatcctcaatacaatgaggctcaggctcagacggaaacaaatgtgttgaaattgtctcttgcagatgcagaaactgctaatggttccatgttggatcttaaaattcctcaatctaaaattgcacattaccaaaaacacagttggaggaaccacacctgcgcccggatctattggcaaattttatgacagagggccattctagagcaagtgttgacttgcaacgcactcatcgtattaacagcatgattaagatggtggccacagttgggattcctgagactacacgtatgacatgtgcctgtgctatgaacagtgcctttagggggcgtgccatgtctgatattaacacca

SEQ ID NO: 92166 - DNA, 214 bp, Glycine max
  Clone ID: PAT_MRT3847_54240C.1
gaatccggtcgaagctctgagatgtttgatctgcacaatgttgtcatatctatacctctgcctggaattcgggaagctccaagtgtcagacagatagatggagagtggaagttggactccagaaactctgtgttggaatggtccattctccttattgatcagtcggatcgcagtggttccatggacatttcctgttcccccagctgatccgtca

SEQ ID NO: 92167 - DNA, 544 bp, Glycine max
  Clone ID: PAT_MRT3847_54241C.1
aggaaccttttctatgcctcttgttcctctcttttctccttttctgctcttctgggactactgcatcttcatcatctgctgctactacattcttccagaaaagcaagatctctaaatctgagattcggttttctgtatctgattacaagtttttgagcactctcaccaacaccaacctgtcagatgatttcttcttaaatgaaagcctggttgaaaattttgtttcttcaaaatcaaaatcatctctggtttcatggctagaaactcgtcttttgaacatttttccacaagtagacatcagaagcatcgttgttagatgtggcagggagtgcttacgcccagatgagatgcctttgctcatacctgttctcaaatcaattcattcatttctcagcaatcttcaactaagcagggaaactaaagtctgcgtggcttttccactttcattcttagagaatttgaatgcatcatatgagagtgatctccttaggaatgttatgttttcgatacaatagaatcatttgtcatgatagaagacatcatt

SEQ ID NO: 92168 - DNA, 271 bp, Glycine max
  Clone ID: PAT_MRT3847_54242C.1
tcctctagagcggccgcccttgggttttttttttatttgataattactggacaagaactaattgtggatgtggcatgtatattttaaaaaaatagtgttcaagaaggagttcaagaactctagcggtttttgaaaacagaaaagaggtgctcactctttatcggggggctcttattgaaaagagagaaacttatatcatctaagatatatttatccacccaccccagattgttccgaaacaaaaaagaaatccaattgcgccttatggttt

SEQ ID NO: 92169 - DNA, 372 bp, Glycine max
  Clone ID: PAT_MRT3847_54243C.1
gtttcataatggtgtcattttggcttggttactcctcttaaatattgcttttatacttgaatgctttgttagctattacatggtaggcttgcactctacactggaagcacgtgttatatgttactattatagaaggtagaagaagctgactttgaaaaataccaatatgatgcattgatgctgaggtaggtaagaggtataagctgaggcgtgcaacatggtaatttggaattaatgggtttaggttatatatttataactcaaattggaaggatcttctgtccctttacagaggttcatgtgcatgcttatgtccaaacacttatttaagttatgtctgatgcaaaataatttgtactgtactactgatgc

SEQ ID NO: 92170 - DNA, 412 bp, Glycine max
  unsure (1)..(412): unsure at all n locations
  Clone ID: PAT_MRT3847_54244C.1
acggctgcgagaagacgacagaagggaaggttaactaaattgttttaattttacaattctttaattttattattaattttatataatattaagattgatatattatgagcgtgtttgaaacacatcaatgtacaaaataaaaaatgaacatggtgggacataattcacggaaaacattatcccttgtaagcatggtatatattttgggagagataaatttcttggatctccgtatcttaagagattaatcattgactctcgataaaaaatactcggattcaaaaaaaagagtacaaaacaaagaaaccaagacatgaaaaatgtttaaagtttaaaacaactttctgttatgtgcattnttttgatgaacagtgcacaacacanatacaataatatcaaaattactatagta

SEQ ID NO: 92171 - DNA, 1418 bp, Glycine max
  Clone ID: PAT_MRT3847_54245C.1
gggccggaattcccggctcccccccattctcctatcctatccacaacacttctctagctatcattgctcttcagctctcttctttccaatacctcgttcaatagctccaaggttctgagttgcaagctaacatgggtgagatagctttaccaaatggcattagcaatggcaatattaatggagtcaatggacaaagccattctcttaatggttacaggaagagttgttggtatgaagaagagattgaagaggacttaagatggtgctttgctctcaatagtatattgcatacaggagctagccagtaccaagacattgcattgttggacacaaagccctttggaaaggctttggtaattgatggaaagcttcagagtgcagagacagatgaatttatctaccacgagtgtctagttcatccggctctgcttcacaatcctagcccaaagaatgtttttattatgggaggaggagaaggctccactgcaagggaattgcttaggcataagactatagacaaagttgtaatgtgtgacatagatgaggaggtggtgaatttctgcaaatcgtactttgtggtgaacaaggaagcattccgtgacacaagacttgaggtcgtgatcaacgatgccagggttgaactagaagccagagatgagagctatgatgtgataattggcgacttggcagacccaattgatggaggtccttgctataaactttacaccaagtccttctatgagttgattgtcaagcctagactgaagcaaggtggcatatttgtaacacaggcaggaccagctggaatatttagtcacacagaagtcttctcatgtatctacaacaccttaagacaagttttcaagtatgttgtgccttattcagctcacatcccatcctatgctgatatttggggatgggttatggcttcagattctccattagacctgagtgcagaagagctagacctcagaatgagacataggattaagggggagaatggatatcttgatgggaaaacattcacatcagcctcaactttgagcaaaactgttcgcaactcgctggacaatgaaactcatgtatacacagaggaaagtgctaggttcatatatggccatggcaagcatgcataaccaagcttgagaagtaaaaccaaatagtaacgccaaaagagacacacaatgcaagtgaaaaaggctttccaagactttattttatttcatcttttatgcatttccctttgtttgttttttttttctttcttttggtgtgtagttcacctgaaaaggcttacatgatatatgaatgggctacaagcgggtcctatcttgtgcttctctatgaatctatcaatattctgaatctgaatcacttagtcaactacttaaaaaaaaaattacggttgagttaaaaaa

SEQ ID NO: 92172 - DNA, 435 bp, Glycine max
  unsure (1)..(435): unsure at all n locations
  Clone ID: PAT_MRT3847_54246C.1
ctctgtctcagtgtgtctattcctttgttattccatgattaaaaagcttcgttttttgcattaatcttattccaactatatctcgactgacaaaataaaacattaatattgctttgaggtcgtggtgcacagctgtggtaattggtgaatcttgcataattggtaattattggtatccgagataatttcttaacattttagtggaaatgctacttcaacctccaatgttactgtaaattagaattatgagcacttatttttatagccaactggttctttagtcaattntagtggagttatccttggaaattttaatgattgtgatgtgatagatntcttggtactgactactgagttgtacatgacgaaaggtatgaagaaacccaatggattatcccacanattacagaatgagatgggaaatattaaagctaa

SEQ ID NO: 92173 - DNA, 906 bp, Glycine max
  Clone ID: PAT_MRT3847_54247C.1
cggtccggattcccgggtcgacccacgcgtccggtttaggcattaccttaattgaatcctatacttccttgctaggatttccttgttttcaacaggaatcatcctaaataagcaaacaatcggaaggaaaatatggagggttagaagcatagacacaatgaattgggaagctacaaatcaaccaatatcctgaatcaatgatctgtttgtgcaatgcatcggcttctgtaaagttccttcatgcaggctagtgtcaccatctgcatgcaaaggcagtggcagattgttatgcaatgcatcggcttctatgaagttttttcgtgcacgggcgtctgatctttgaaggcggtgcatgcatgtcagggacaaatgattttcttagatctgttgtgctaacatgttattgtgtcactgccactgtcgttgcatgcaaaggctgtagtagatggtgacactaccgtgtatgttagcacgaccgacccaagaaaatcaacctttatcccgaacaagaacaatgtgcgattctgaatatcaaaaaagcgcgtgcacgaaggaactttatagaagccgatgcattgcaggaacaatccgtcattgcctttgcatgtagatggtgacactaacagtttatgttagcacaacagacccaagagaattagcatttgtcccgggcaatgtgcttgccatctgaagatcaacaacacgtgcacgaaggaacttaaagaagcaaatgaattgcacaaatagatcttcattcaatatatatacaattgagttccaaaaggtccttcattcaatatgtacaattgtttcaacaaattgtatgcatataaaacaaactatcaactaactagatctatatctatttttcaaaaaaaaaaaaaaaaaaaaaaaaaaaaaaaaaaa

SEQ ID NO: 92174 - DNA, 321 bp, Glycine max
  Clone ID: PAT_MRT3847_54248C.1
atgctgggcgttgcgccattcaaattgaagctttcccaaagaaaaggaaaggtcctttctaggcacaaaaaatcctttggaggatagatgatttagccccctctttactccaaaaaggatggtgaaagggcccctgagacctactagaaaagagtggttcctcaacggctattaattttcttagaaaacaagcccagccggtggttaccttggaaaattttcgaccgggcaaaaaaaaattaattgggaagggtctagagggctctcaaaagccccttgtaagaactcccaacctccttcctatggcagggaactaccaca

SEQ ID NO: 92175 - DNA, 793 bp, Glycine max
  unsure (1)..(793): unsure at all n locations
  Clone ID: PAT_MRT3847_54249C.1
caaatacccggaaaactatataatgaataaacttgtagtcctttacatgacactacattaaaattactacgcattggcagaaatatctatagataacacggaacacctaataactgtttcatccaaaatttatacagtggatggaaagattcaaatcaactgcctaatctctcaccagaagtagaaagaacggttgtagttgcaagaaaaatacaaaaaaaaagattcaacagtaccacgaaattttcatcatttcattgtgtcaactaatgtgaccccaagacagttctatttgaccaattaagaatacgtggcactaccaaccaagggaattctttgactgctgcaattttaagttataggaattttcaatctcctccttgcaggcttttagtaaaggctgtaagaatgatgatctgaaaagcgtaattgcatttccaagcgaagttctattcgattcaccatcagcatcagctcttgagccttcataattaagctcttctatcagctgtgaaaggggtgggtactgtagtaggatcaaactcctcgcaccgttttggatcaatagggacacaaacacgacctgttttaagatgtacannaaatggtgcnnnnngcaaatganncatatgtttagaaacctnnatatctagcctgggataggtaaagcagaacacaatctcttcatgcaccgaccnnncccttnngccttatgttttccagatngcagcaacctgtttgnnctgttcccaacgnacaacanngatgttttttttgcactaanngannncna

SEQ ID NO: 92176 - DNA, 193 bp, Glycine max
  unsure (1)..(193): unsure at all n locations
  Clone ID: PAT_MRT3847_5424C.1
gtcgtttgcccgcgctgccacggcggcttcgtcgacnggtcaccgcaccccatcgtcaggaggttccgcgccgcgcgcagcganacatcgcgttcacccgtgtcngtcgggacggaagcgagaacgttggttctcgcgctgcgcaggtgcgtgctcnctgtcggtnngggnatatccntcttnnannaanaaa

SEQ ID NO: 92177 - DNA, 544 bp, Glycine max
  unsure (1)..(544): unsure at all n locations
  Clone ID: PAT_MRT3847_54250C.1
gtttcacaagttttaggctttatgggaggttagaatttggctatgtagtataaaaaactaagatacaggtggttaaatacttttgatattattctctgatttaaattagagtttcatcttggtagtctcattaaaagtttgtatttaaaatcagcataattatgttatagaggaaaatgtctaattttcatcggacaacattgctaaaaaacatcaaagcaagataaatctaaattttgccttatattatagaattgtaatagaattgtaatgtaaaaatcttgccttattcagctgaaaattctaatgttagtttatactatggaattgtaatataagagaaccttataattgacagggaagctaagatttggaacaatgtgtttgagaaagctgagaaggtagcaggcatcgaaagaggaagcataagggcaactgttctgatagaaacacttcctgcagtgtttcaaatgaatgaaattttgtatgaactgaaggaccattcagtgggtttgaactgtgggcgttgngattacattttcag

SEQ ID NO: 92178 - DNA, 559 bp, Glycine max
  Clone ID: PAT_MRT3847_54251C.1
gcccgagacaaagtggacgaatcacaaccaaaaaacaaagaaacagaggcagagatatatgattatgaatttctcaacagaaccctctgcctcacgcttaccattctgatctccacttcttcgctgtgcgacgaagtgaaatttcgttgctgcaaatagtgagaatttgctgtctttggtcagagttgctccgagtgatcgcttcccctggtgcgacgaagtgaaatttcgttgctgcaaatagtgagaatttgctgtctttggtcagagtggctccgagtgatcgcttcccctggtgcgacgaagtgaaatttcgttgctgcaaatagtgagaatttgctgtctttggtcagagtggctcagagtgatcgcttcccctggaaaaatgaggccagaagggactgagctgcagaaggagtatgacaagtgtgtgtttctgagttgatgtgtgtgttattcttttaattgaaaggttgtgttgaggctcaaagaaatcttcttttggcactttattttctacaccttggtctactgaggttattgagtgcaacaaatgctg

SEQ ID NO: 92179 - DNA, 388 bp, Glycine max
  Clone ID: PAT_MRT3847_54252C.1
gggcttcatgatggatgaggcacttattataaaaccccttcatttttgattcacaaaattgctaactacaaaaaacttgaccaccacgttacgcaaatacatgttcttatctgaagaggccgaaaaaaatagtgataggtggcacctcggtctggaagagattgagccggcctgatactgaatgaatggagtttgcccttcgaaaaaggcttggaaaggatgctacgctgaatgcctgctccaaagttcccgcatctatgcgtgaactgggaggcctcgtaaaagcacttatgcggggtggagtttaccattatttaccacgaacatagtgtacgccaaagagtttttcggatgacgggactaagttgttttccttttgggtaccggg

SEQ ID NO: 92180 - DNA, 526 bp, Glycine max
  Clone ID: PAT_MRT3847_54253C.1
cccacgcgtccgcttttgggttggaaaaaaaagttgatccaagttaccatgatattttgaatcgagcggtaacttatgcttcaggccttccattggctttaaaagtaataggttccaacttatttggaaaaagtatagaagaatgggaatctgctctaaatggatatgaaagaagtcctgataaaagtatctatatgacacttaaagtaagttatgatgctttgaatgaagatgagaaaagtatttttcttgatattgcttgttgcttcaaagattatgaattggcaaaggttcaagatatactttatgctcattatggtcgttccatgaaatatgatattggggtgttggttgaaaaatctctgataaacattcataggtcatgggatgataaggaggtcatgagattgcatgacttgatagaagacgtgggtaaagaaattgtccgaagagaatcaccaaaagagcctgggaaacgtagcaggttatggtcccatgaggatataaaggaagttttacaagaaaa

SEQ ID NO: 92181 - DNA, 722 bp, Glycine max
  Clone ID: PAT_MRT3847_54254C.1
cggacgcgtgggttttttttttgatagaatagattgtatatattataacaacaactggtctccactagtccaggtacatgaaaaagtgcaaaggaagattgaaaagaaaacaagcatgtgtaacagaagaaattgaacaagacagatgtgaaaaaagatcacttattgaaagcaacaataacaacagggaactgaatgaaaatggagagtggagatgagtgattatttatgaatccaaatccaagtgcttaggggatgggaagggtaattggtggtgatggtactggtagcagtggcggcaagtcagagatgtctatctctctaggctgtatgacaggtggcactactggctgcagctcaggtatcaattctgtctgcaggagattccttgctgcgaatgccatgtccatatgcatgcttgagaacgaaatagcaatcaacaaacccaaaatcatccaactttcacacttagaggccatggctatatagcttcttctctagatattattcccctttaagccattcagtaatgagaagtaatacctcaagaagtgctttgacaacagaaagtgaagcaagtagcagagtcccatcaacggcaaaagaaacgagctggggcgatattacagtgggcaaaacagagcgagacgctttctttgccctcttagacacttttttaaacatgctctgcaagaatctgatcaacaaatccacgctactct

SEQ ID NO: 92182 - DNA, 870 bp, Glycine max
  unsure (1)..(870): unsure at all n locations
  Clone ID: PAT_MRT3847_54255C.1
ccacgcgtccgcgaaagttaattccaataacaatttctactcgtttttccctctttcttcgcctgcaagatccttttctcttcttcttcttcttcggttaattaattaattaatttgattttctattcagcacgaaaccaagcctcatcatagctattctttctttgataaacaaataaaacgaatcgttagttcttcagttcgtgtgtttgcgcaaaacatgttgcatagaagcttcaagcccgcaaagtgcaaaacgacattgaagctcgccgtttcacgcataaagcttttgaagaacaagagagaagcccaaataaagcaactcaagagagagttggctcaattgcttgagtctggtcaggaccgaactgctagaatccgggttgaacatgttgtcagagaagagaaaacgatggcagcttatgatcttgttgagatatactgtgaacttatcgccgcacgcttgcccatgatcgaatcacaaaaaaactgccccattgacttgaaggaagcagtttcaagtgtaatatttgcatctccgagatgttcagacctaccagagctcatggatgtgaagaagcaaatcacatctaagtatggaaaagaatttgtctcagcagctattgaattacgccctgactgtggtgtaaatcgcatgatgagcgtaatatcgtctgggaacccgcctgattttggagaaaatgatgtaaaacctttttcaatacttttttagcatgatatcaagtaggaacccgagtaaggntgggttatgcttgaaacctttttnaaaattcatgggttccaacctgggttcatggattaaaaaaggggnccctttcccaaatttacaatggctttcccttgcca

SEQ ID NO: 92183 - DNA, 178 bp, Glycine max
  Clone ID: PAT_MRT3847_54256C.1
ggtcaccttggagggccgctccgatcccgatttctcgccccccccgccggccatcgacaaccgccgccgccgaaacaaccgcgcctccgcaggatccggcacggcgatacacggcatcacctctttttttccgcgcttccctgccaacttcccccggccactaagcaccaagggcaaa

SEQ ID NO: 92184 - DNA, 544 bp, Glycine max
  Clone ID: PAT_MRT3847_54257C.1
gggaccaaaattatgaattttttaaagttaaaggactaaatgggtatattttaaaataaaaaaccaaaattacacattaaactaaataggaagaccaaagttgttttatagaagaaggaaaaaaaaactgaaattcaagaacaaggcatttctgaaagaaagcatgtgttcaagcacttcaactgtccgttgaacttgtaaaaaaggccagacactaagtctgcagggaccatgggtcctctataggggattctttttcttaaagatggtctcgtttgggcttcggaccatataccaacctcctgaaaatccccttttttccaagatatgttaactggtggtcctccacgagcctttaagccttttaaggagccatttggccatttttcccaagggagggcaggaagtaaaaaaaaacgctcaatggactttgaaaaagcatttttggaaccggccgctggaaacccgaagttgggatcggatttgaaaaggggggggggcagaaaaaagggtggtggaaaagcacaccttgaaaagggctttt

SEQ ID NO: 92185 - DNA, 1154 bp, Glycine max
  Clone ID: PAT_MRT3847_54258C.1
gagaaatgctcgtgaaaagagaaagctgggatcagatataactgaagaacagtctccatcaaagcgatttagagatgttggaaatccaaagaaagcacctgaggagaataaatatcatgtgcagaacatttctcaggtgacaaaagtggaaggggtcaattggaagaatactaaaattgatgataatcccagtgagcaacagtttagccacgaaaagaacaggggatactctgaccagtgcaccgcatttttatcaaatcttcatcctacggcaaactatgaacatattcgtaatttcttcagtgatgttggtggaattgttgccatccgcatcctacatgataaattcactggaaaatcaaggggactagcatatgtggactttttggatgaagaacaccttgctgctgcaattgctaagaacaggctaaagttcattggaaagaaactaagtattgctcgatctgacccaaagcgaggcggaagggaatcttctaatccaaaaacattgacagaacatgcagatgccactaatcattctagtcaaaaggcttccggatccaaagaaaccgatgatacttacaagggagatgtaaaggatgtgaagttctcttctagaaagccaggaaatgataacatccagcttaaagggaagaatacttttgccgtgcctagaaatgtcagaccacttggttttactacaaataaaccaaaagcagaagagggggatgaaaagccaaaatctaatgaggaattcagaaagatattcattcgttaaggattttgtgcccttaatttgtgactccgaagatggcagttatctttcagattttaggcaaaggtggaaatgatataaattattgtctccaggatggctgtctgttctgtctgttgcattactaattaaatcagtctacctagattaacttttcggtagcctgtactctttaaaaattacaattgatttacaaaatattttttggttgcggctctgtatagtgtccgtacttgaaattttcacagtacaattctctatgatagatgttacattttacattgtaatacaattgggctatattttcccccaagtttataccagtcacttgtgtgcacataacaggcaaataaagtgtattatgctgtgatgggatatt

SEQ ID NO: 92186 - DNA, 1231 bp, Glycine max
  Clone ID: PAT_MRT3847_54259C.1
agggcctttaggtgagaacctcaaaggagagttttctaacgctgcgaatgagagttttctattccccgtttcgcgacagcatggccaaacagaaggagcttttaaaattgatgacaaatattgaaactgacgaaagggagtatattcaatgtcccagaattatttctcacatattcaaagtgaagaataaagatgctttcacgagcaagtgagaaagaagatatttgctgtccttctcttccccttgaagcttttcacctaccttattatcccttcaaccttcatcgtctacttttttcaatcaccacacaattctcctccaatctccaaagtgaagactggcgaactaggaggatcacgaatgcgtcaagctagaaccccttcaacgatcacaggtaatgcaacacaatctaaagcacgtcccacagtttcctacaccccatcacaagcgactcccgcgacacgtatgccaacttgaacagtagccacacgtgcaaaaggtgcaccatgttcacacacgtgcgtgccacgatcaccatctcccccaaccctccatccatgtactagcagagcgacccctcccttccttcttgcagaatgcgggttgacagaatcaacgggatccgattcatcttcagcggaggggctttaggtgagaacctcaaaggagagttttctaacgctgcgaatgagagtttttttgccaccgtttcgcaacagcatggccaaacagaaggaaattctaaaattgatgacaaatattgaaagtgaggaaagggaggagagtcattgttgcataattaaattgcacacagttttggtgtgctttgacagtgcggtggttagagagagtagctgatgctttggcagagaaaacaaggaagaatgcaagaaaaccggattctactgataatggaagcctgtgagtatgaacttgtttttttcatgcttgacctaaatcagtgaaaaaatgaggttgatcaaatttcccaatatatcgtacaactggatgggagactcctgcaaattaacctcagcctctcacaccaatgttttatactactccaatactatagattatgatcatcattattataaagggacatcattgtgatatatagagcaacgtgttgcttacttaagtgtctaaattcaacacaataaatgcaatcacaagaatagcaatcatttcataacaacgatatatagaaaagggcaatacatatatgca

SEQ ID NO: 92187 - DNA, 428 bp, Glycine max
  Clone ID: PAT_MRT3847_5425C.1
gacaatattgtctagctgagacaatggcagctggtgttgaacttgctgaagcatatgtgtcgtggaagcagcacaaggagaaaatgaaggaaacagaaaagggaagagccaaaatgaacaagattggtgccaaggcaaatacatcaagtggatgcttctcttggtttcccaaaaggctcagaagacatacatgggtaagagacggcgatgagaaagacttgattaaggtttcaacaaatccatgaaaaccatgttttgctgagacattgtaacataatcttgttgtaatatacagaatgttgtgtgtttgatgtttctggtcttaaacttcaccagatggtcgaatgttatgtacctttgtatatagaggctaaagtttcatataaattttagatgaaatgtatcgtactttctattgtaataaacta

SEQ ID NO: 92188 - DNA, 1755 bp, Glycine max
  Clone ID: PAT_MRT3847_54260C.1
ggacactctagcatttacagttttgtctcgacgaccctgtgatacatagtctactaccgctggcacatatttagtgtccagccatatttctcaatgtttccctttcctctactcttgtccctgctcaaaatccaaccacacactgcacgcactagacacttcagattttcttttcttttactcaaagtcttgttcctttgtgtagctatcaacagaaaatttcttgagggtctctgattttttttcacccacataggagagggaattttttggcttgaggtccaaaaatggtgcatggactactatgaaagatgatgctgtcaacaattcaagagacctagtgaggagttcagcaatgcagtggtcattccccaacaaggtctctgccctccctcaattgccgagcttgcacaaccaattcggcaagacaacccttagaatgactattcttgagccactagcgtcatccggatatatggccatgtcaactcaatatgcttttgactctaaccaaaaatcattcttgggtttgaccaacagaaatttgtccataagcaagcatgctgcagggaacaaacaaggaatgacagtttatcctctacaatgttgtgatgcacagtcagaggaagcaagaatattttcagtgtccaaccaatcaaatcaagtgagtcctgttcttcaatctaatcttgcctctaccggactgaacatggtcaattcagtcataaaaccacaaccttttggttccaaatcctctggcacacctctatctattcttccatcaataggttccattgttggatctactgacttaaggaattattccaaatcctccaccatgcctactcagcttacgattttctatgctggttctgtgtgtgtttatgatgacatttctcctgagaaggccaaggctatcatgttaatggccggaaatggttatactccaactgagaaaatggaacttcccacagtgaaattacagccagcaatttctattccctccaaagatgatggtttcatgataagccaatcctatccaccctcaacctttcccacccctctcccattgacctctcatgtcaattctcagccaggaggaggatcttctagcaacaaagaaatttcaataataagacaagtaggaccttcaactgctcctactaaccatttgggatcacccattattggttctataggatctgcatctaaagaaaaggctcagccagtttgcttgcctcaggcacgtaaagcatccttggctcggtttttggagaagagaaagggaaggatgatgagaacatcgccatacttatatatgagcaagaaatcacctgaatgcagctcttctggatcagacagtgtcagtttctccttgaacttctctggatcctgttcactaccagccaccaactagccctacatgaatggaagtttagatttatatacttctgtaattgtaagatcatttttttttgtcattggtagagaaatttcgtaggcatttttgtcctaaatattgttttggttcccgaggttttttttttttacaattattactttttgcagtattttacttcactgtgaagatttttccaaatcgtcatatatgattttttttttttttttttactttcatcatgatgtataattatttcttttatacatatattacagtgaataatcttcagatttattatggctattggattgatcattgatcgatgattaatatcttttcagctgttacatgtc

SEQ ID NO: 92189 - DNA, 363 bp, Glycine max
  unsure (1)..(363): unsure at all n locations
  Clone ID: PAT_MRT3847_54261C.1
ggcacaaagtgaagttttgtttaattcaagaataacttagaaaacaagtgttaattaacaaattaaaggtcccttgtnttccttccgtttcctaacaatttggtagcaatgcaattccatgcgtacgaaatgttcctctccgaatgaacactggctattgtcccctacccggaagtaaatgccaagttggacgctttctgtggaagcacacaacatccttggctttgagaccattcctgaagagttccttgaaacaacataggaatacatccatggcgaacaatataaattagactccaaaacagttaaccaacaagcttacttttatgccagagacctcgaagtccatcccaaggacacatt

SEQ ID NO: 92190 - DNA, 365 bp, Glycine max
  Clone ID: PAT_MRT3847_54262C.1
ggttctagtgtatgtgattgttgtgactcgttcttgggcgacgttatcttcttcttttgttgattgtgtgtttgttttttctctcacctgaaaatgtcttgctgcggtggtaactgtggatgcggaagcgcctgcacagtgccgcaacacctgcgcacgctgcaagatgtacccatacttgatctacaccgtgtcaaccaccaccaaaaccttgttcatgcgcgtggcaccattttaggcttattacatccgtgctaaaatcggtggaccccattagaaccaccattgctaatgctgagctaactacacttgcagaccctgctcttgcaagtcttgtgtttgataactaaaacgtgaatcaaaat

SEQ ID NO: 92191 - DNA, 400 bp, Glycine max
  Clone ID: PAT_MRT3847_54263C.1
ccgccccacgcctcccgacggcctggccagagaccacagaaggccgcatacgcaccctctccctagcctagctccctacccatgagccgcacttgactatccaatgttctcttccctctcctcttgcaacacggcccctctgctcactcttccttgcctgtccctcctacccttacctacctaccctgtcctctcccacatacccccccattttcataccctccgatctcaaaccacctctcccatctcccaccgtctagtcccctcccaatccacaccacgctccacccctcccttcgtcccctccctcctttctaccctaagctacccatttcacccccaaggcgcccatttgctaggccccctcacttagcccccactgtacccacatccaccttat

SEQ ID NO: 92192 - DNA, 289 bp, Glycine max
  Clone ID: PAT_MRT3847_54264C.1
tcccacgcgtcctcccactcgtccgtccactcgttctaaaaaaaaaaaaaaataaaaaaagaaagaataaataaaaaaaaaagaaaaaaataaaaaaaaaaaataaaaaaaattaaaatataaaaaaaaaaaaataataatctaaataataatatttatacatttacacatcttacagtttatttatatacttatatattcaacatatctctctttatctaatataaactgcattttaccaattcttcattataaatcctctgatgtactaatctattctctacttata

SEQ ID NO: 92193 - DNA, 170 bp, Glycine max
  Clone ID: PAT_MRT3847_54265C.1
ctgtcttatttctaaagaaaaagagaggaggacctttatacaatttcaacactttattgaattaccccaactaatcttatactctatttccaaaaagaacaaaacttataaatgagacccaagatcactcccatttcaaaatatccaatcttaaatataatgatctacac

SEQ ID NO: 92194 - DNA, 296 bp, Glycine max
  unsure (1)..(296): unsure at all n locations
  Clone ID: PAT_MRT3847_54266C.1
ggctcgagtggtgatcttcaaatcaactgcaacaacttcaaaaggaacaagtcattgttccttttgatattgttgcagttgatttggtaatcttcaagattcnctgatgcgttggataattggatgcttttttgtcctnatanaaatataantgttttgttggctacgaattatgatcattatgtaattagttgtgtgagtgtttattctttagattcgtcttatttgttgttggattattactactttacatatcatcttctttgtgntaatcaaaaaagttcaattactatatt

SEQ ID NO: 92195 - DNA, 261 bp, Glycine max
  Clone ID: PAT_MRT3847_54267C.1
tctatatttgaacacaccctcctgtccatagataatgcgctttatttcaaggcttttgatcctacatggctatttcacaaatgctctggggcgctccttgctccccacatttggactgttgcggtcttccttaataccggcgggaccaaagatgattggcgtctgaactggaaaaatcattcctaaaaccaaagagagcggtgctttcctttgcgggaaaaagagcaactttatttaaaaaaataatcttttttcctttct

SEQ ID NO: 92196 - DNA, 489 bp, Glycine max
  Clone ID: PAT_MRT3847_54268C.1
cccacgcgaacgtttgccattggactccgagtaagttatcttgaaaaacattatccccttggctatatattagggctagcaagaaggtcacgtggggggttgaaaccatgcccatggccggggggggtgcaccgatgatggcgcaccccatgacttgcattgatgtgacggtgaacatggcacagggcctatcctacctgatgcagggaggaacaccttcaactctttgctgcagcgtagaaaaaaacatttgggcctctgctgcccccaccttggacaaacaaacggtgtgcaggtgtctcagggtggacgctgctaggtacaacttcaatgaccagtgggctcaggctctccgtggttactgcaagggcaaagtcccttacaagatcatccgctccactaactgtgcaggcatgaggttctgaacaagccagggacagatgagctcatttctgcggcgggatactgaggccgcagtgagccccttac

SEQ ID NO: 92197 - DNA, 280 bp, Glycine max
  Clone ID: PAT_MRT3847_54269C.1
atcccatttaatttaaagagagagaaaaatacaaacacaaagaaagagcattagaaaaagaggattaaggaagaagaaggagacgccggaccaagcgtccgtgtttcatctttggtctcctctccttcctcttccccgtaatcctcccttaaatcatcatcccatattcacaaatcacaatcattaattcttagattaattgcattcgaggtattttctgctttcatgtgtcgtaattgttcatgattttgtccttaaaataatcctcattctggtttca

SEQ ID NO: 92198 - DNA, 179 bp, Glycine max
  unsure (1)..(179): unsure at all n locations
  Clone ID: PAT_MRT3847_5426C.1
ctgctgtcagatgacagcagacgacagactgggacgatgagtcgatttgataactaanaggagggcgattcgagatattcatccacttagacatcatctaaatacaattcataccataagcaaattcattataaatgaaagatatatcatttatatgggcttaataaccgcatctttta

SEQ ID NO: 92199 - DNA, 707 bp, Glycine max
  unsure (1)..(707): unsure at all n locations
  Clone ID: PAT_MRT3847_54270C.1
tcataaggtagcttgagttgaaacatgttgtgaccattttatcgtaagcataacaagcagttgtaccaaatagataaacttgctacttgttttgattttgattcactaacaaaactcaaagccatggaacatggaatgaccttttttttatcagacatagctaaccaaagattctaaaccctcctttttttccacagttccttgtggatagcctaccagagaaaatgatttagatcggatcgtcccaaaaatgatgaaacaagtctctctcgtctcttatcaatgcaaatttttccttctcatcaagttactgctactatcaaagactgtaatagcagaaccaagggccaagacagtcctaacaacatgtggtcatgaactagagcacaatactactatctttgttccaaattttgttgcaactatggagaagatcagtgatgagatgcgcaaaactggctttggcacagcaattgtagggacagggcctgatactaactatggccttgcccagtgttatggagatctttcattacttgactgtgtattatgctatgctgaggcacgcacggttcttcctcagtgcttcccttataattctggtcgaattttcctcgatggttgtttcatgagggctgagaattatagtttctttaatgagtattntggaccgggagacagagctgtatgtgggaacacaacaagga

SEQ ID NO: 92200 - DNA, 349 bp, Glycine max
  Clone ID: PAT_MRT3847_54271C.1
tctttagaaaacctttgactcgcttctcttccatatttttctctccaactgcctatccttgagtatggtgctacctaccagggggcactctaccccaaccgattttatcaccttcaacaagttcaacccactccaacctaacattatcacctaatataatgctagctttatatactcggaggcttatacaacatcacacaaaaggcgcacctacttcatacccaccattgaatctatcgaacaaaccctttacgattccccaatccatatttgttacatcgatatacccgatggagcttccctcactacattctttgaaagccacaccgagaaagacctcaaaataatc

SEQ ID NO: 92201 - DNA, 269 bp, Glycine max
  Clone ID: PAT_MRT3847_54272C.1
tatcttttattttcgatggtatctgcattgtgtacggttgccctgtaaaatcagatccacaaatacatactactcattatcacccaacccacgatcgttatctataatacccagtttcctgtatcacagcaaattgatacatacaataaaagacaaaatgtctgcaataatctaaatgttgcatcaatattaaaatttgttgcgacaccatactatatcatactaaaaataccaaaaattgattcttaaagactaaaacgtaaataaat

SEQ ID NO: 92202 - DNA, 459 bp, Glycine max
  Clone ID: PAT_MRT3847_54273C.1
tacggctgcgagaagacgacagaaggggaaacttttatatttattaataattaatagttcgggttttgggtggatggagtagctgttagcagtaagtcagtggaggcatattacaaggaggtattctaggcttagtaaatcagctttgttttggctttcttggcatgaagctcaatttatacttcggccacaaattgtccaacattgatgatcttctctgcgttttttatcacatcatattgttatcaacattttatgcggttcatttggttagtaatattcccttgtgtatgatcagaaccatattcattactcttcaaatgtatgcacacagtaaccgattccattttcccaacttttattcaacctacgatctttctctcttcatattttaacttttcacttgtagcataatcccctttccttaactccttcccgtatataacaccaaattgatac

SEQ ID NO: 92203 - DNA, 508 bp, Glycine max
  Clone ID: PAT_MRT3847_54274C.1
ttagctcttatttacccatcaagcctaaagcacttcacttgttctgcattgaccatagcttctctctttctttcctaattaatccttccatgcaaacaaacgctctctctcatactcatagtgacacacacagcttagtttcgttgtattgtatgtgtcctttctcaattctcatcatatatctgttcaagtaccattatctttctatgttgagtgtcggcattttttgagtttctcactaccacttgttctttttttctgatacatgcatatatatacgtccagatatacagtctattcactcaaattcagtgtcacaagttctcaagattgttgtccggcactatctgcagcaccattcaattcttcactctatattggatacacacacttctagtatataccaagtgattgatgatgttgtcagcaaaatctgaatcggatatcacaagcttagctccatcttcaccttcaaggtcaccaaagcgccctgtgtactatgtgcaaa

SEQ ID NO: 92204 - DNA, 344 bp, Glycine max
  Clone ID: PAT_MRT3847_54275C.1
atagtatattttttgagatattgtcttttttaattctactcataaattagggcgtgtctgttgcaccgcgggggcattcttcggtcttctaaatattctctcccacattatctgatcttagaatttaactgggcccctgtcatatgagtgaaattcacttatccaaagtaaatttggttcttttgcattcacggcttaatactgaagattcaagtgttctggctaccccctacttcacatacatacgatgtttctttcttgcttttctgatacgtcttgcaatcacccttatttatgtgatactttagcccatctcaactatttttaaatttggtttcaccatc

SEQ ID NO: 92205 - DNA, 342 bp, Glycine max
  Clone ID: PAT_MRT3847_54276C.1
aaaaagatgtggtggatgagagtgtttggagtgatgtggatatgcttaggagtgtaaagccttttggttggtcctatgcagtttcaaaggtgttgactgagaaggctgtgcttgaatttggagaacataatgggttggaagttgcaactgttattgctccttttattgttggtccttttgtttgtcccaagcttcctgactctattgaaaaagctctgcttatggtgttgggtatgaaggctgcaccttactctactatgtttcttcttccagtttatttttcatgttaaattgagtttgatttataccatttcaaggtaaactatgacacctagatgcaaa

SEQ ID NO: 92206 - DNA, 189 bp, Glycine max
  Clone ID: PAT_MRT3847_54277C.1
ctcgagccgattcggctcgagtgaacatgatgttggaggtttggctggggacgcggattctccagcggacgagcatgtttaggacgttgatggtgctggagatgtgccgcaggattttgagtgtgggccgaaccagggatccgagattcattccacgggaaatgggctgggagggtggtcgggatggcc

SEQ ID NO: 92207 - DNA, 358 bp, Glycine max
  Clone ID: PAT_MRT3847_54278C.1
ccggaccggaattcccgggtcgacccacgcgtccgcagccagccccatccctccacctgccccactcacacatattcacactcgcctagtgttgctgggcccttgggaggcctggctggagctggtccagctgttctgttctgtggtccctgtccctgggttcagattgctgccctccgcctgtctgaaggaggccaaggcctacccagtacaaaaggctgcctttaaaggcccctactggcttggtagctgccgggatggattgtcttgtcctgctgccctttgctgcgtgggcagcactctgaagcatgcaaatgggtcttgggatccctcccagaaacctgctctgaccagaccc

SEQ ID NO: 92208 - DNA, 621 bp, Glycine max
  unsure (1)..(621): unsure at all n locations
  Clone ID: PAT_MRT3847_54279C.1
ctttgtttttttttttttttttttttnttttttttttttttttttttttttttttttttttttttttttttttttttttttttttttttttttttttttttttttttttttcgggggggggaagattttaaaattcaaaaaaaaagctggttttgggagggggggggggaattttttgggaccaaaaacccaacccgggtcaaaaaaaggaatgggaaacaaaggggggcttctaaaaaaacatcctggggggaaaaaaccacccccaatctttaaaaaggatctggcccccttaacaaaaaatccctgccaaaaacacgggggcaacagctttgcaaaaaaaaataaaaaaattcttttggaacccccctcctaactaaaattttaaaaaataacaacaagtttttgaaaaaaaaaagggttgggggttccccaacaaaagggaaaacccccaaaattttaacaagcttatttccaaaaaaaatgaccgttggccccacttcaaaagggggtttttcccccccccggggagcctcaattaggaacaaggccaaggggcccccctttaaagcgggcaaaggcaaaaggtttaaacccccagggttaatgttggttttccca

SEQ ID NO: 92209 - DNA, 1810 bp, Glycine max
  Clone ID: PAT_MRT3847_5427C.1
tggtacgggagaatacgacagtaggggagagagaggaatgataatcggagaaacaaaagagtgctgtgaaacacacaaggcgtttgtggctgagaagcacctgactttgttgatgagatttggttcaaaataatgctcacctccaaaagctcatccacttcaaaaaaaattccaattctcctttcctttcatttgcacgtatacacattacaacaagttttttttttttttacgaggcccatctaactttgtctctattccagtttctattcctcactaggagctcctctccactggttcttcatctgcatgcacctcgctaggagctcttctccattggttcttcatctgcatgcacacacttgcatagttttggaaaccaagaatttttgaagggtagcatcaacaagaagttctggaaatggagatcaccaatgtcagcgagtatgaagctattgcaaagcagaagttgccaaagatggtgtttgactactacgcatctggtgcagaggaccagtggactctgcaggagaacagaaatgccttttccagaattttgtttcggccacgtattcttattgatgtgagcaagatagacatcacaactactgtcctgggcttcaaaatatccatgccaatcatgcttgccccaacagccatgcagaaaatggctcatcctgagggagaatatgcaacagcaagagctgcatctgctgctggaacaatcatgactttgtcttcatgggctacttcaagtgttgaagaggtagcttcaacaggacctggcattcgctttttccagctatatgtgtacaaggacaggaatgtggttgctcagcttgtgagaagagctgaaagggctggattcaaagccattgcccttactgttgataccccaagactaggacgcagagaagctgatatcaagaacagattcacactgccaccatttttgacattgaagaactttgaaggattggaccttggaaagatggacaaagctgatgactctggacttgcttcatatgttgccggtcaaattgatcgtacttttagctggaaggatgtgaagtggcttcaaacaatcaccaaactgccaattctggtgaagggtgtgctgactgctgaggacacaaggatagctgtacaaagtggtgcagctggaattatagtgtccaatcacggagctagacaacttgattatgttccagcctactatatcagccttagaagattgttgtcaaagctgctgaaggtcgtgttcctgtatttttggactggtgcttttcgatgggacactgatgtcttcaaggcattggcactaggtgcctctggcatatttattggacgcccactggtgttcctcttggctgcttttgaagtggctggtgtcttaaatgtgctccggatgctacgtgaggagtttgagctaaccatggctttgagtggttgcacctcactcaaggatatcactcgtgatcacattgtcactgattgggaccaaccacgcactatcccccgcgccttgccaagattatgaaaaactttttccaatgggggaaacacttctatatatgtttcatgaacctgttcttctcatcctttcttttcctttttggacaactcatttaaacttgtatttggataactctatgcttaatttctaagcattaatatgatgatacttctgtggctactctgctgctgcattcaaacaattaatattattaattttgagtcctttatcaccatgacattgatatgaaatattccctctaaaaaaaaaaaaattggggggctcgaatttttc

SEQ ID NO: 92210 - DNA, 247 bp, Glycine max
  Clone ID: PAT_MRT3847_54280C.1
gggaatcaagatgttcaattgcttgagtgactatataggaatcaaaacgacttcttttaacatagaactgcgcgtacctcaaagaccggaatgttactaatatgccctaaattagagtgtttagttaattatatacctttatcattttactaaatttctctctcttgttaaattttaataacattaaaaactactaatcgtttatgttgggataatcacttacctttaaattataatttttttattt

SEQ ID NO: 92211 - DNA, 458 bp, Glycine max
  Clone ID: PAT_MRT3847_54281C.1
ttgttcacaggcagccggacgcaaggaccggaaacaaatgctagcgggacttggtttgaagaacctctcaaaaaccacctacttctgtgagtgcgattacgtaaggaaccgaaaaccacacgcgggcctggggacacaatcccggaatcacaggctctcccactctgagcacaattgctgaacacactcctatgcgatataggactaagcgacagatcaaaactacgactgcctctttctcagatctgagacaaacagaaagagcaagctggtgaaatgttggattaggactcccactctcctatctggaataggattaagtgggcagacttatacatatctttcctttctttcactctgttcttagcactgagccgcattgcccgtcaaagtgggcttaatagaaaaacacttgggcgttggcgcaaatagttgcgtggatgatcctctctggagac

SEQ ID NO: 92212 - DNA, 878 bp, Glycine max
  Clone ID: PAT_MRT3847_54282C.1
ccccaataaaatagctttaataaattgaaaggatatgattgttaagtaaataaaatactattgttcaatgttattgttgtaaattgcatttctaaaatattacccttttttggttttctgtccatttctcaaatcccttcacttcaactggagtacctaaccaactttattgccgaattatcttttttggagtacagtttgttgagttatcctccatcactgatagctgcttctgtaattttccttgccagatttatacttttcccttcaaaaaaaccatgggtttgctgctagcgaggagagaggagccgcatgtccctaagttgaggaaaagttttttgaacaattccatggcttactttctgttttcggctccagaattctactttgcagcagtacaggctctaccggccttttgaccaatgtgcatgattaaaaaggctccaccgtctttgttgtttcacagatgatggtaataaggttcttcaagacgaatccaataagggggatgcacatgctaagtttggacaaagcttcagtctctcaatgatgcaaggaccatttcccggtagaagcatagttggaaccaggaagaggagaggacacatgtgctggtggagctagtgtgctcttctatggttcaatgtctatgctcagttgcacaccatgaagagcttgaaagaaatgacatgatttccactcggttccttcttattattcagtagaagaaagaacaaactaagcatgtgttagtaaaatttgtaagaagaagaccagcagcaaccagggcgccgaggagaggagcaaaacgaagacacgaggaacacgagaaaaaggatggttttcgtaaaagccacattctctgttccacgttttct

SEQ ID NO: 92213 - DNA, 990 bp, Glycine max
  Clone ID: PAT_MRT3847_54283C.1
cccgcgtccgcccatgtgacacaacacagacacgcccctccctttcgctctctcaacaatcgtagatttttcatttttctcccacttttcttgtatctcactctcactctcacactctactctcagatcttctttgtatttccatgctttaattgttttctcggaggaatagagaggcagagcaactaaaagttgtgttgccccttttcagaaattgttttattaataccaaaaagtatgtgcactggataatgggtctatgaaaataactcaaaaattgttactttcaacgcaattgtgctttctgattctcgtgcaacaaggagctctttcattttgaaaatggggctctgaagtctgaaaaacgagaaatggagacggagaaaaaacgttccaagggaagcttccttagcttctttgattggaacaccaaatctcgaaagaagctggtttggaacgatcctgaggtttcaaagcaagggaaggaaaatgtggagaacttaccgaagtcacggctcactaggaaaaaagtggatgaaattggagcaagtccaagtaacattcaaagttgtgatttcgacagtaccctctcaatttgtagtgatgaaggatgtgggagtaaagcccctgggttagtagcgagactcatgggtctggattcattgccagctgcagcagccactgagctctcctgtacttcattgtatggctctaaatctcatggagcttctcattgtaatgagggtgctcttcactcagcggatgacttttgccctgcagactacataaacacactgcttaagccagagaagtcttctttggatgccatggaaatcaagggcacgaaaagtggaaagccttccaataaagagatttcaaactgaaatgttgcctccaaagtcagctaaaaccattccagttactcacaataaactgttgtctcctatcaagaagtcctagtattctgccaccaaaaaatgcagatcacgt

SEQ ID NO: 92214 - DNA, 261 bp, Glycine max
  Clone ID: PAT_MRT3847_54284C.1
cacacacgcggttagctctgctccttcagtccagcaaggggaatagcagcactgctctcgcaattcaccgtcctcgcagaccaggcgctacaagacaagcacttcgatccttcgcacaatcgaagatctaatgaagctgttccagatcgcgtcctaccaggcatgggcaggagctgagcttgagcaggcgcacgacgttggcgtagcagccgctgacattgacgcagctgcggcctacctgggctcagtgacgcagagtgc

SEQ ID NO: 92215 - DNA, 333 bp, Glycine max
  Clone ID: PAT_MRT3847_54285C.1
gctaaacttaagctaaacattgagataaaacaaattgcccacgatgggcacttcgggtattccaattcgttgcagacaggactttcatactgacacatacaaggaacaaaaggttttgtcctcaaaatgtactttgggcctgaatcgagctttgcacatccggcaacggtagcagggacaaaaaactggacgtccggaacatgaggaaacaatgtataggttctttggaccattctccttgacggagagctaggaaaagcggacaacctaagcgcaccactgggctagagtccagagacttacttgttggcacagtgaggacaaaaacaactt

SEQ ID NO: 92216 - DNA, 874 bp, Glycine max
  Clone ID: PAT_MRT3847_54286C.1
tatcctgagttcggcgtcggagagaagacaagccatcggactgttgtcacttcagatgtacggcagcaaatcctaacaatgaataagatggcaagggaagaatgggagaaaaaacagtcagaaacagagaagctccggaaactaaatgatgtagatggtaatgctgggattgatggtgacaaggagaaagatgagggtcggactaaagcaacaaaggtgaacaaagaagtggatgacaagatgaggacaaatgctgctaatgttgctgcccgagctgctgttgggggagatgacatgctgtcaaagtggcaacttatggctgagcaagccagacagaagaaacgtggtgggggaatggatgcttcatctggttctcaaccagctaaagatgtgagccagaaatcttcatcaacatcaggaaggagtacaaaagataatcaggcaagagagaaaaaaggggctggtagaaaatttgggagaagtcatgccacgacacctcaaaatagcatagctcgaagcatatctgtcaaggacgtgattgcagtcctggagagggaaccccagatgtccaaatcatcactcttatatcgattgtatgagagaattcattctgacacctcaactgaataagaggtacccaactggacagaaaatgcttatttcacaacagtcatccctcatatctctggaagaatcgcaagtctacttgcagagaatgagatgggacttgatatattcggatggtcaaaattgtgtagatgtcagtaaaattacgtgtttaaatgtatgtatgtatcttgtaatgcgatgggacttgatataaactggactttatttaatttttaaacgacttgtgatctacatttctataaaa

SEQ ID NO: 92217 - DNA, 187 bp, Glycine max
  Clone ID: PAT_MRT3847_54287C.1
gatgagagcacggtacccattactgttgctgggactcgtactcctggcttcattttgtttgtcattggggattgcttactgggaaaaagacaacccgcttccccgcacgtgtcttcggagctgctgtatcgaaagagactcgtacttgaaccaatcatgccactctcgttgccacctccttaaggtg

SEQ ID NO: 92218 - DNA, 428 bp, Glycine max
  unsure (1)..(428): unsure at all n locations
  Clone ID: PAT_MRT3847_54288C.1
aattcccgccgtcgcccaggcgtccgcttctctttttctctctatctctcccgaggggtgtgttggggggggacgccttaaaaactataatattccctggcggcgggggttctctcccttttttgtgggtgctggttttacttagatctctgtcccgcaccanatctngtgcanggggagaggggtnggttcattaattttgtatcaattcttccttcgtggggggggggggngtntcnnnncctttaagactttncnnnnaancaannaaaaagtatatatccannnncaatanatctntcactcccctgttttnatnnnnaannccnnnnncctcnncctcnncnnnctttcaaancccccacataaacaaccctatcaacaaaaaaccctaaccctatttttttcttcattttctaattcttttt

SEQ ID NO: 92219 - DNA, 242 bp, Glycine max
  unsure (1)..(242): unsure at all n locations
  Clone ID: PAT_MRT3847_54289C.1
gtgttttgngcaagaataaaaatgaatatcgtcattaataataaaaaaaagccttatcttggtgtatgatacatagatagggtaggtnagcccaaaaagagtancaggccaagcttgtnntgtatgaaggaattcaatccaaancattgggcccatctcaagccttcgaaacggggctccaaatccactgccctagaaacttccctccattcctacccttaataataaagggtcttccttcc

SEQ ID NO: 92220 - DNA, 896 bp, Glycine max
  Clone ID: PAT_MRT3847_5428C.1
gaagattttgaaggattggaccttggaaagatggacaaagctgatgactctggacttgcttcatatgtttctggtcaaattgatcgtactttaagctggaaggatgtgaagtggcttcaaacaatcaccaaactgccaattctggtgaagggtgtgctgactgctgaggacacaaggatagctatacaaagtggtgcagctggaattatagtgtccaatcatggagctagacaacttgactatgttccagccaccatatcagccttagaagaggttgtcaaagctgctgaaggtcgccttcctgtatttttggatggtggtgttcgccgtggaactgatgtcttcaaggcattagcactaggtgcctctggcatatttattggacgccctgtggtgttctccttggctgctgaaggagaggctggtgtaagaaacgtgctgcggatgctacgtgaggagtttgagctaaccatggccttgagtggttgcacctcactcaaggatatcactcgtgatcacattgtcactgattgggaccaacctcgcattcttccccgcgcattgccaagattatgaaaaatttgctcctcatttgagccaagtttgtataatgtggtgcagaacaatggaggaaacagttctatatgtgtttcatgaacctcctttcttttcctttttggagaactcatttaaggttgtatttggaaaactctatgcttaatttcttttaagcattatatgatgatacttgtgtgactactgctgctgctgcattaattcactcattgtatattcttaattttgagaaatttattaactttctctatgttgtttttttagttaccatgacattgatatgaaatattccctctaaaaaaacatggctgattaccttt

SEQ ID NO: 92221 - DNA, 326 bp, Glycine max
  Clone ID: PAT_MRT3847_54290C.1
gtagaggctttttatcttgatcttccctctatgaatgaaagaatcttttttcttcttatacctttcgcacaatggtgtgaactaataaacgatgggggagctggtatgactttattcacatcctcatgatcattgacagacacagtctgttactctctctcacatataatgtactgcgcgctttcctccacatagaaattttgtataataagcgccacaaaacgcttcttctcttatccatttcttcagccatagtattgatccataacaagcaaaaagtgttcctttatcatcctccaccctgcaaaacatttttttttcatcat

SEQ ID NO: 92222 - DNA, 424 bp, Glycine max
  unsure (1)..(424): unsure at all n locations
  Clone ID: PAT_MRT3847_54291C.1
aaaaaaaatgttgttgaggtgcggtaccggaccagaatcaactcctgcgcgcgacgcagctaactaggcggcggtcgacctgtctttcttttttttttgattaatcaattcaagctataagggggggccaaaagggtactggggaatatcattggatgtactgccaaatccancctgagggctttgtcatgattcaaaatattggcacctggcggattaatagatatttactttctcttacacgcaactagacgagacatttgggggagatgagttttgaccagccaatacatacttgtcacagaccagcggctgatacaaattttttaaggaagtctttaggccttgaaatgtgtcttccgttaccttatattcaagcttctgagactttctgagaagtcgtataacctgatcaaccttacac

SEQ ID NO: 92223 - DNA, 474 bp, Glycine max
  Clone ID: PAT_MRT3847_54292C.1
catatctgctcacgacacctagcagataagtggagcgtctcccttccgccgtctctcccgatctattttcctgctcgttacgcttttcctgaggctagctctccacctcagacccggatgtctcccaggaccgcccctgttcttacccgaccaccactgctagctcccctctccgagtgctccaagtccatcaccacaagtaggcatcagacctaactttactgaggacgattctcctgcatctgccagtatgttatgccatcgtgacgctctgatgaaatctgccatcaacacagcctgagtgtgctactctgggatacttcccatgcctatggtgttataatgagcaccgcaagacagactcgggacccaaccctgtttcatatggtcgagagggcaacgatgtatacaggctctcctattcccgatgatgacctatatggcctcaatggcggtcattagtttcattctcgt

SEQ ID NO: 92224 - DNA, 248 bp, Glycine max
  Clone ID: PAT_MRT3847_54293C.1
gtttcccaaggaaagaaagaattagaataggaccgacgatggttagtgttgtacgtgttcccccgaaacaaaaacacatttgttgtcacatcaaaatacttaaacaagggggtcctcgaccaagagaccccgccaacccggaaattatttccggacgggtacttgggggcataacagcttcccccaaattgagtcgaattaccccttgggctactcatggccatggcggtttccggggtcaagttttc

SEQ ID NO: 92225 - DNA, 367 bp, Glycine max
  Clone ID: PAT_MRT3847_54294C.1
ggctcgagctggaacatggacatctgacctatagatgtcttcacgcacagagatgaaccttattcaatgactgggatggcatatttaccggacaacctggcggtgcgatctccaagacatctgctatctcatgtcaatcagcaggagccagtgatgctgatgagaacgactgtattacctctcatgatgatggtgcacatcccaaagatcataaaggtgatcacgctcttgccgttcatggcttggctgacgcttgtagattcggttgtaatgatgcagagttgatctcacatggcataatgacgtagcatgctcgagcgcgttaccatggtgatattctagggactgaattgctcaaccttgatgc

SEQ ID NO: 92226 - DNA, 283 bp, Glycine max
  Clone ID: PAT_MRT3847_54295C.1
gtggaacaaagaacctcgagatacgggacatcacgtatttggacagggacatttttcgcccaaggaaggtctacgggccgaaaataaaaaggcgaccacctttgttcgcaggccccttacatggggcatgatggatccccacacaggagaagagagggacaagtaaaatatccgccccatgagaaagagcggagtgggaatcaccaatgttggggaacatccccccatgaggaggaaaacttgcaaaaataggggagttgctccggctttaaaccctttcgaa

SEQ ID NO: 92227 - DNA, 959 bp, Glycine max
  Clone ID: PAT_MRT3847_54296C.1
gcgaacgcacgcgtcagacttgggaaacattccttttcatgcgagagaagataacaagttacaattggttgcgtagtttgtggtttgaagtttgaagtttgaaccttgaacgaaccccaaaatcgatcgaggcagatcagaattgagggcttagaaatcaggattcagaatgggtcagactgaaagcgcagaagctgtgacggaaactcaaaccacaaccaacgacacttccaatcccatttccctggaatccgtcctcgcagaagctgcagaatatggaagccaacacactgagtctgtggaggaaatggctcagaaagcccttgaatgcccttgcattgctgacttgcgaaccggttcctgtggctctcagttctcggaggcattcctgtgttttctcaagagtacctccgaagaaaagggctcggactgtgtacatccatttgttgctctgcagagctgcatcaaggctaatccagatgcattctctaaggacattctgggcggagctgaagatgaaagcaaggagttggagccagttcaagaatacaaaatacttcctcccaaatggtctaggaaacctcaaagtccaaaatccagactttaagagaagagtcggactctcatttgggcaactacttggataaggtcgtgttaagttcattttgaatttgtattagttttgcctgattagagaagtgacaggatatatcaattcctcaagttgcttcatgttgtgcacttgcttttatatcataaaaagtgcaatttcttttctacagagttttgggattgcactcaaatgcttgcatctttctttctaactactggacagctttgttcatattttgctctcttctagatatatattgaaattgatgaatatctacgtggatgtaaaaaaacagtacttcctctctaggttgtatcatattattgcttactttttgaatcaaaat

SEQ ID NO: 92228 - DNA, 508 bp, Glycine max
  Clone ID: PAT_MRT3847_54297C.1
gatgaatttgggacattttaatgatttttggaggggaaaagttaattggtgtaactttccatgtcctatagagaccacgaattatcactctacttaatataatcaagtaggttctcatttatttcctggtttttttctgtcaacttgaatgaccttgataaaaattatgtgtttgcgtatattagcataaagaaaaaaactataatttaaacacagttagttcctcatatttattttctgaaaatctaaaggaccaaggagctttacattttagttgttaggtgaaaggatttctctatcagttcatttatcttcaattgttgcgaatgtgtatttaatagcctaagatgattacttcccaataattattatattattcattcttacacagtagtgtctatgcagtataattgtagataattatttatttattgttattgagtgacagtacacattcatcctaattgcaagcaaagaattacctaaacaatgcataaaggttggaact

SEQ ID NO: 92229 - DNA, 475 bp, Glycine max
  Clone ID: PAT_MRT3847_54298C.1
gaaaagtttgaaattgggtctgaattccctttgatatagaagggtgtgattggaagctgtgtatgcctcctgtctactaagtacatatgcaacgttttaaattatggtcatggttgtggtttcgttgaaatctttgatgttttgggaaattctgaacaaatgagacttatgtggcaacgattgcggttggaataactccaaaaaccttggtatcacggctgaaacaacagttgttcacttctggttaaacaaaggctatttgcattccgccattttttgggaacggattttatttaatttatatgttgaatgaatagaactgtatgactgcagataacaacagccaatgtatgggatcttcagattccttctgaagactggttagagaaagtttctttctgaagactggttgtggtttaagtagtgtatcaaattcaaatattcaatgcaaagaaatttttgtgatgaaaaaaaa

SEQ ID NO: 92230 - DNA, 536 bp, Glycine max
  Clone ID: PAT_MRT3847_54299C.1
ccacgcgtccgcccacgcgtacgcccacgcgtccgcccacgcgtgcgaactggtgcaaaagcaagaagaaggctttcactaagtatgcccttaagtatgacagtgatgctggcaagaaagaaatccagatgcaacttgagaagatgaataagtacgcatctattgttcgtgttattgcccacactcatatcagagagatgaagggcttgaagcagaagaaggctcacctcatggagatccagatcaacggtggcactatcgccgacaaggtggactatggctacaagttctttgagaaggaaatccctgttgatgcagtcttccagaaggacgagatgattgacatcattggtgtcactaagggtaagggttatgaaggtgtcgtcactcgttggggtgtcacccgccttcctcgcaagacccacaggggtctccgcaaggttgcttgtattggtgcctggcatccagccagggtgtcctacactgttgcccgtgctggtcagaacggataccaccaccgcactgagatgaacaag

SEQ ID NO: 92231 - DNA, 1793 bp, Glycine max
  Clone ID: PAT_MRT3847_5429C.1
ggaagtgaaagagagattgatttgactatgagcatgcagtgagtgtgatcaataactctacccattgcttcaaattcaatatgctttttggtttcgtttcgtctcggcttgtctttcactttctcaaccacccaacacaacacaaattccctttcttcttcttcttcttcttctaaatagatagaaggaatttagattaattaaaacaacctttcattcattctgttgtgttgggaaatatgatgttcgactttgccaggatttggacccgaaacacgttaataggtctcggcttgggtcagtttctttctcttctcatcacttccaccggcttcacttcctctgaattggctaaaaaaggaattaatgctccaacttcacagtcgtttctgaattatgtgttcttgacgcttgtctatggaactgttctcctatatcgaaggaaagcactcaaggcaaaatggtactattatataattctcggattggttgatgtagaagcaaattttcttgttgtgaaggcataccaatacacctcactcaccagtgtgatgctgcttgactgctggtcaattccgtccgtcatgcttcttacatggcttttcttgaaaacaaaatatagattcaaaaagattactggtgtagttgtttgcgttgctggccttgtcttggttgtgttttctgatgttcattcaggtgaccgtgcaggtggaagcaatcctcgtaaaggggaccttcttgttattgctggtgctaccttgtatgcaatcagtaatgtcagtgaggagtttcttgtgaaaaatgctgatagagttgagcttatggcaatgttaggtctctctggtggcattatcagtgccattcaaataagcatacttgagcgcaatgaacttaaatctattcattggtcggctgaggcagcgcgcttccttttgttggattgagattgatttgactatgagcatgcagtggccatgtttatgttttactctttagtccctgttctgcttaagatcaatggttctacaatgctaaatttgtctctgttgacctcagacatgtgggctgtcttaattcgtatttttgcgtaccatgagaaggttgattggatgtactttgtgtcatttggtgccgttaccattgggctcataatctattcaggaggggacagagatgatgatcaacaccctccaaacgctgctatcgatgatcatcgccctgcagtcaaacaagatgaagaagccaattcaggaaatcatagcaaaggagctgcggctggaagctcaaaaacatgggtagcttagtatagacctacagattcatacacagaaaaaccatgaggaaaagtatcctcaagagaatggagattagtctaaatttattatgtattggcagctcctgcaagattgcattccaagaagataatgttccttcagatgctgctcttgttcacatgtcttgtaatttaaaggatcctctaaagtttcgtttgatggaattttgagaaaactcttcatcatctggagatcaatagccaactttttagtcagtatgttgttaattatctgatattttaaagtaagaaattaatttaaagaaatagaaacttttggggtccaaaaaggaagaggagggggggggggggggggggggggggggggggggggggggggggggggggggttgtgacatgaataaggaatgaaaagaaagaaatggaaggggtaaaaatataaatatagaaatataatcgagcattacatggatcccttctgtcgtcttctcgcagccgt

SEQ ID NO: 92232 - DNA, 862 bp, Glycine max
  Clone ID: PAT_MRT3847_542C.1
tgcgagtggagctttcaatggaggcaattcgttttgatgctgagattgatgtggctgataagttcttgggagacacagaaggcatctcaattcatcctggccgataggacaagtgggtgtggaagggagattcaagtggtaattattcaatggggagtgtgtacaagctatttttgggagattccatatactttattcaagatggagttttcaatgagtgtggaatgtaaagattccaagcaaagcatccttttttgcttggagattaatcatggacaggctgccaacaagatcaaatttgcgcaggagaaatatcgaaatcaatgactctttctgcccattctgcagaaacaatgaagaggatgcagctcatttatttttcaactgcagcaaaattcttccggtttggtgggaatcggtgtcttggtcaaacatttcgggtgtttttccgcagactccgaggcatcatttcctccaacatggttttgggaggccttctggagtcaggtctcagagatggcagatctggtggatagctttatcctggagtatatggcagcataggaatgggatcattttctcaaatgatagcttcaatggcagtaaattgatggaggatgccattttcctttgttggtcgtggtttaaaaacttggaaaagggttttgaaataccttttaatcactggtccagtaatttgagagagggattttgtaatcaggggagggatacatacataggatttgggtagattatagacaacaatgcagtcagatttatggttttctaattctagtattaaagcctgtattaggaaaccataattctgctaatcttggatatcaattgtactccttcagta

SEQ ID NO: 92233 - DNA, 466 bp, Glycine max
  Clone ID: PAT_MRT3847_54300C.1
tcaaagaattagcttgtattgaaatcgagatggaataagtttacagtctatgataatcacatgacttttattggttccatttcacttacctttctatgcatgacataacattcttcaccatatcacttatctttctatatatggtataacattcttcacaaattacaacaaagatatcactttaaggaaacaaatatcaatttactggatagctcgaggataaatcaaggaagaaatggattgtgtgaagggtattcatccttttgctttttgtaagccctgcgagacagtagtagaaaggatgtcgttaactcattatgtgaacgaacaaatacttatttattcgtaatatacgaaaaatgaaaagaatcagccacaagattgactgttagccacctagaagcattaaatcctccaagcgcaagtgttcccagaatgattagaaggaatgggactttaatcataa

SEQ ID NO: 92234 - DNA, 452 bp, Glycine max
  unsure (1)..(452): unsure at all n locations
  Clone ID: PAT_MRT3847_54301C.1
ctcggctggagggaaaatctctggtgatggtggcagccacaagccgatggttccgctgtgctattatggatgacggcatatggaagttagcgtctgcgtgatcttcaggtcccacccccggaacgcgtggcattcaggtggtgcaagctctacacgtcaagctttgatggaagtcactcctacatgttccctcaacaacagaaacacattgattggatgcgtattggtgccttttcatttgattcttctgtagccgtcctggcagagagactgactcttacggggaagatgcagaatggagacaccatgaaaaagatgtttcggtctcaaggttgttgcgtgctagacaatgttaaaactggaatctggatagctggaacaatgcagactttagatacaaggcacatagagctattcccctgtgaaggcttnncaaatgggaactgggatta

SEQ ID NO: 92235 - DNA, 115 bp, Glycine max
  Clone ID: PAT_MRT3847_54302C.1
gtcactaaacataaagtccaatacgaggcgcgaagtcctttagcataaagcgcaatccatagcagtggtcacccccacgattgcccttcggattcccaagaattaatgtcaaatg

SEQ ID NO: 92236 - DNA, 3872 bp, Glycine max
  Clone ID: PAT_MRT3847_54303C.1
ctattgtctacttaactctcaagcttagtactgaatgaagtttattctttctctaatgagtatcatactttataccctctttatctcttctcttgtagtttccatagcagccgacaaatcatccaattcacagtttcagtccctcagtcatgaagaaaccatagtttccccaaatggagtctttgaacttggttttttccctcttggaaattccaacaaaagctacctcgcaattcggtacaagaactattcggatgaaacctttgtttgggttgcaaacggttcctacccaatcaatgactcctcagccaagttgacactacacagttctggcagttttgtccttacacacaacagcaatcaggtttggtccacaagttctctaaaagtggcaaagaatccagtggcagagctattagactctggcaatcttgtgataagagagaaaagtgaagcaaattcagaagacaaagaagaatatctgtggcaaagttttgattacccttctaacacgatgttggcaaggatgaagattggttgggaccttaaaaggaagataaatagaagactcatagcatggaagagtgatgatgatccaaccccaggagacttatcatgggttattgtgctgcatccctatcctgaaatttacatgatgaggggaaaagagaagcaccacagacttggaccatggaatggattgcgtttcagtggcatgccagaaatgaagcctaatcctgttttccattacaaatttgtctccaacgaggaagaggtcacctacatgtggaccttgcagactagcttgatcacaaaagtggtgctcaaccagacctcactagagcgtcctcgcttcgtgtggtccgaggccactgcatcgtggaacttctactcaaccatgccaggggagtactgtgactattatggtgtttgtggggggaattcgttttgcagctccactgcatcgccaatgtgtgagtgcttaaaagggttcacgccaaagtctccagagaaatggaactcaatggttaggacacaaggatgtggccttaaaagtccattgacttgtaagtctgatggatttgctcaggttgatggtttgaaagtgccagatactacaaatacgtctgtgtatgagagtattgatcttgagaaatgcagaaccaagtgcttgaaagattgttcctgcatggcatataccaattctaatataagtggagcaggcagtggctgtgtcatgtggtttggtgatttattagacatcaaattgtatccagctccagaaagtgggcagcgtctatatataaggttacctccttcggaattagattctatcaggccccaggtgtctaaaataatgtatgcaatctccgttgctgcaactataggagttatacttgctatttattttctctacagaaggaaaatttatgagaaatcaatgaccgaaaataacaatgaaagttatgtgaatgatctggatctgccattgcttgatttgtcaataatcattgtagccacaaacaaattctcagagggaaacaagattggagaaggtggctttggatctgtatattggggaaaattagccagtgggctagaaattgctgtgaagagactctcaaagaactcggatcaaggaatgagcgagttcgtaaacgaagtaaaactgattgcaagagttcaacacagaaatcttgtaaagcttcttggctgttgcattcagaaaaaagagaaaatgctagtttatgaatacatggttaacggcagccttgactacttcatatttgattctaccaaagggaaattgctagattggccaaagcgtttccacataatttgtggaattgctcggggacttatgtaccttcatcaagattctcgattgaggattgtccatagagatctcaaagcaagtaatgttttactagatgatactttgaatccaaaaatttcagattttggagtggctaaaacttttggagaagagaatattgaaggaaatacaaatagaattgttggaacatatgggtacatggcaccagaatatgctatcgatgggcaattttctataaaatctgacgtcttcagctttggtgttttactgttggagattatatgtgggaagaaaagtagatgttctagtgggaagcaaattgttcaccttgttgatcatgtgtggacattgtggaaaaaagatatggctttacaaatagttgacccaaacatggaggattcatgcattgcgtctgaagtgttacgttgcatccatattgggctcttgtgcgtgcaacaatacccagaggataggcctacaatgacctcagtggttctcttgttggggagtgatgaggtgcaattggatgaacctaaagagccagggcattttgtgaagaaggaatctattgaagcaaattcaagctcatgtagttcaaccaatgcgatgtccataaccttattaactgctcgctgataatcaacgagataggtggatattgttgtaaaggaaattgctgaatggtatgaaggatattttgcacgagaagtaccaaaatgtaaatcatcagttgttgcatggtttccttcaattctgtttttccgtatactcttttaatttaatctgtaaccagtagaaagaagccacatatatttcgtactcattcggtatatatatatatatatatatatatatgtatcatttcatactgaataggagagcagttctcttgtaaattagatataatttatttatatatatatagaatgtgagcaagaaattgaagaaaagaggctttcaagtaggtctggacaaggaataaccgaattcataacagaagtaaaactgattgcaaagcttcaacacagaaatcttgtaagcttcttgggctgttgcattaaaggacaagaagaattactagtatatgaatacgtggctgttgccagccttccctccttcacctctgatcgtaccaaagggaaattgctggattggccacggcgcttccacataattcgtggaattgctcgcgggcttttgtaccttcatcaagattctcgattgaggattatccatagagatctcaaagcaagtaatgttctactagacgacacgttgaatcccaaaatttcagattttggagtggctaaaacttttggaggagagaatattgaaggaaacacaaccagaattgttggaacatatgggtacatggcaccagaatatgctattgatggacaattttctataaaatctgatgtcttcagctttggtgttttgctgttggagattatatgtgggaagagaagtagatgttctagtggaaatcaaatcgttcaccttgttgatcatgtgtggacactctggaaaaaggatatggctttacaaatagttgacccaaacatggaggattcttgtattgcatctgaagtattacgttgcatccatattggactcttgtgcgtgcaacaatatccagaggataggcctacaatgacctcagtggttctattgttggggagtgaggtggaattggatgaagctaaagagccaggggattttccgaagaaggaatctattgaagcaaattcaagctcatttagttcaaccaatgcaatgtccacaaccttattaactgctcgctgataatcaatgagatagatggatatatatattgttgtaaattagatataatctatttataacctataaaattgaagtgcatattgtgatggtttgatgtaaattttttctttatgtatctattaattttttattattatcatgggataaaggatgattagttatgtcaatgaccaataaagaatttctattaaaaaattcttctaattgattattttattacaatttctct

SEQ ID NO: 92237 - DNA, 481 bp, Glycine max
  Clone ID: PAT_MRT3847_54304C.1
tcagttgcaatgcttctaaaattgcagtacatgagtacattattttttgaatttagtacaactattgtgtcaaaatctgctgatatgttatgaatgaatgccctctcttattttgtctggattatggtaagaaaatgaaaataccgtgccatgatagatagcaaaaaatatttaatgcttgaagaactacatgaaaaaaatggaagaaaacacagctgctatgatggagctgagaagctaaacctaaatccagtcttcccacgatcatgttcatcctttctgagtatgtaaaagtagttaccctctaggcggaagagtctagtaggaataacaactccacatcccactgacattcgaaaggattctaagaacttccgaggagagaagtgcttatattcattctgagttaatttagcagcattccccgaaccagcaaaaacatgcccatggattccatgttctctcaaccacctaattggga

SEQ ID NO: 92238 - DNA, 327 bp, Glycine max
  Clone ID: PAT_MRT3847_54305C.1
gcgcgcgtacgtcagggcgaattcgagtctagctccaactgcattgcgtccagcgtggtgtgactccgatgagtagtacacaatttacaccggcagcttttacgttggttgcagcagttataccgagggcaccagctccagcaccgcccggagctggtccaggagcgtcacctaactgccagacgaagagggcggtgattacgaacacaatcatgctgacggaggttcggctgattgagacgctatgggttatgctataacgatctatgacgcgcgcgaaaacactcctgcagacgcgagtggagtgcatacttcttcagagtgatc

SEQ ID NO: 92239 - DNA, 289 bp, Glycine max
  Clone ID: PAT_MRT3847_54306C.1
gtttatctttacttgtgaacggaaggacatatcagtaattctataccacccacttctcaatgatcatcttcttcagattcaattccgatgccctttttggaatcttcaagattccggcaagtaatgggactaatgattacctcattcaacgcaatttcacttctctttttttcacctcgtacgccacgcttccttcttacctttcgacaccaatacttaactgttatttatacttcatgctcgacgcatcacgaatctaacgaattcgaaaaattcgccaaagtgacaa

SEQ ID NO: 92240 - DNA, 297 bp, Glycine max
  Clone ID: PAT_MRT3847_54307C.1
tcggctcgagtacggctgcgagaagacgacagaagggtcccattattagagaagaaagagaaggctttgaagaccaaaactccaagtctatttccacttattttatatcctcttttattaacttcataataatgatttgtttggtgatggttttcatctttgtactttctctctctcacacccacacctacacctacgtgcgcaacaatatgatattttcttgatctaaaatgttatgttgacaatgtaccgtgcatttaatgcaaatttacaatattgcttttcatgcagaaaagt

SEQ ID NO: 92241 - DNA, 1345 bp, Glycine max
  Clone ID: PAT_MRT3847_54308C.1
atttccttttgttttgttctcttccgtctgtttgagagtgcgagtgaaaaaaatgggtgggagaggagctatgaggtccgcggcgaagatagccggaattggcgtgtccaaggcggcgctccggccttcggcgctccctacggagcagacggtccgcaacgcgtcgcgaccaacggcggtcaccggagtgtcgtcgcagtcggcgaaatccgcggaggtgctccctacagagcagacggtccgcaacgcgtcgcgaccaacggcggtctccggagtgtcgtcgcagtcggcgaaatccgcggaggtggcgccgctgcacacggcagctgcctgggacgattgggacttcgccgaggatggcgaattggtcgtgccgaggatggtgttcggttctgtccccactctcgatgaagctacggaagccaccgcagagttgaaggacgctattgatcaagtatatctttgtcatgagtcttctcaatattcatctcccggtggtcaagtctctgctttgtctcccactctctatgggccagtgaacagatcttgtgtcattgatgctatttcagatcctacggccccaaagcatgccattcaggcttttcatttgcttagcactagtcgtgaggcccaggctgttgtggcttcacttgcttgtgacccaaatgtatggaatgcagtcatggaaaattctgctgtcagtagtttcttccaatcacaacagtcagtggctggttttggagcagcagaaaatactgaggaagtggataagttatcaagctgtgcttctgaaacagtcgaatcccctgagaaattggaagggtcggctgagtctcacccggggaacatgtttgacgatttcatgggtcttctgcagaatgtgaagcttacagttattgaattggtaagtaggttgtctggtttccttcagaacatattcccaacacctgatgctatgagagagaaaatgtctttcgatgctgatgggaacactaaagcaagtttcatggatagtaaaattagcatgggaggaaccttcataggtttggcagtgctggtgataatggtgatcgtgacaaagagagcttagactctaacaagcaaaactacaatttgtcgacttttctgatagttttgaaaccatgttattaaatatgaactgtttttaaattgagatgtgtcgcacttggtgatttatttccattaaaataaaatttgaaagtcgtcctggaaaaatatttaaaaatttatttttaaccttttgtttattcatatcatctatggttgtcttttgggtcctgtgattggatagataaagttagtagtgttgggagtggttcacact

SEQ ID NO: 92242 - DNA, 464 bp, Glycine max
  unsure (1)..(464): unsure at all n locations
  Clone ID: PAT_MRT3847_54309C.1
ggcttggaacctttgggctgatttatgtgcttgcatggtcgtgagaagatgatagaaggggggcgagcgcaataacgacaacaaacccgaggccgagagagcgaaagaggagacgggcgtgacaatgagtgtggcgacagtagccgcaggagcctcctcaggccggattataacagagactgtacgcaaattccgctccgaaaagggctgtgaagttactgactgaagctctgacttagaccatgactttgatgatattgttacctgtgttttatctaattttattgctgttcctgttattgctaaagttgtccgagaaaccgacgctttactcctctatgcccttgttcggcacctaacctggcgctcaaactaaaaggtcacncccccctcccccccgacgcccgcgcacccgtgtgtccccgacggtgtcaccaaacggtgaacccacgacacaaagcgcg

SEQ ID NO: 92243 - DNA, 904 bp, Glycine max
  Clone ID: PAT_MRT3847_5430C.1
ggctcgagctcgagccgattcggctcgagctgccattgattcaagaatttcaagaaccgggtctgaagtgtgtgagttgaagaacaagaaggagggtgtgcgtgtagggtgcaagaacacagataagaagcgaaaggtcgtttactctccacgttctgaaaatcctgaagcaccctctgatgagaaaaggagaaaaacgagttcttcaaacccattatcagaagattcaagaactgtgcgtgtagagtgcaaaaagaagcgaatattgatggaccgttgcaagaagatgcagtgttgggctatgttgaagcgtttaatggtgggaagagatgcgtgggctttaaaaaaggatattcttgatcccaaggtattgtgcgttcttcataagtctgaagccataagaaagccaaagggtttggaggatattgagtcaaagttgaagaattgggattactccgaaactgatgagtttgtggatgatgtgaagcttgtgttgtcttatgctttgcaatatcctcaaaggagtgaggttcatagaactgcaaggaggatcagtgagggttttgagatcagttggaaaactatgaaggccaagtggatgcgtgacgaacaagatttgcaagagaagagatgatgatgatgaagtcgccgggaaagaaagaaggcaagtgaggagttatctcaaaaaaggagcaatcttttgatttgctgattcaaaatatcataggaacccggaaagatggcatgtttcatcaaccgttccaatttaattaccccgttttattcatatttttatgtaaaaagtctctattgaatttcttttaagaagtttctatttctattttgagtaattaagcttaattactaccttcaaactaaagaacaaaaatacgtatattttacc

SEQ ID NO: 92244 - DNA, 403 bp, Glycine max
  Clone ID: PAT_MRT3847_54310C.1
agatgctctagacccaatcaatgatccctagatgccttcaaacaagcccctcatgcttccattgtgggatgtctacataatacatggtataggtaccgagccatagggacgtgttgatactggggttggtaagcccgtgatggtggtgactctcggtcccactgctctgacatctgaggtgaattatgttgtgatgctccatgcagctctcacatatgctcttccacgtgaccatgttgccttgactgtgaggaatgactcactcgatgatctcaatcgaaggtttgttgctttaaactccactgatgaccctgccgatgaacctgccgacttcacatatcacgtccttatcataaaccaccctggccacattgcatttgtctacgcaccggtgcttgattgt

SEQ ID NO: 92245 - DNA, 463 bp, Glycine max
  Clone ID: PAT_MRT3847_54311C.1
gttaaatcttaaccctaataataatagagtattcattaattgtctaccaggtacaatgtctgtcagtaacgaattaatattatacattttcttgcattttttctccaatgtatattcatttataataatgacggaaaaatatatatgatgtaacttttgtagaatgaagaacaagtggagacaattgatgcacatgttgtgaaacaagctgtggtacaagcaataaagaattggagcaaaagtggcgatcaagaagagtaaatcagtaatcaaatgtttgctatatatattgcaattttccaatttttttttcccattttctttcatgttggctaactggtaaattgttccttgaggaatcaggcgtcatataagatagcttccaatttttaatgaaaatatatatgtgccagctgtaagagaatgataaaaagtagttgatgggtgataaaatttatgtatg

SEQ ID NO: 92246 - DNA, 112 bp, Glycine max
  Clone ID: PAT_MRT3847_54312C.1
gggattctttcgaaggaatacaattgcggtctaaacaggctgatgtaactgaggtgcacacgttatgtactagctagctgcataagacgatgccagagtacatggaccaaac

SEQ ID NO: 92247 - DNA, 408 bp, Glycine max
  Clone ID: PAT_MRT3847_54313C.1
cgacccgcgcgtcctctcctactggcctttggagccatcaagttaccattttacagcccttttcttgatgatctgctcatggcagcttaagacaaacaccaggccccttaatcttgatgatctgctcatttgagctgtccatttatttatatttaataacataacattctcaagttcttgtttttattacgtccatacatgcacatggtccaaaagccaaaatttaacatgtccgacttcaatgagttagcatcccctctagtgattgtaaaacactattagaaaagagaaaaatacaaacaatttgtgggtcccaccatgtttgtgggtcccacattgttcgtgtctctttcctggtattttatactatcaaaatataattttttttcttatttcaattaccttaac

SEQ ID NO: 92248 - DNA, 1944 bp, Glycine max
  unsure (1)..(1944): unsure at all n locations
  Clone ID: PAT_MRT3847_54314C.1
acagacttaagtttttcgtactctgtttctctcgaggacatatttggagcagttctcttgcaatctccattcctgcgtgattttgacgaaagagagatattttgcttgtatctttacccgggaaacagcccggatagaaaggtttttaaaaaggatgtggtgtttgtagtagatataagcgcaagtatgaagggaactcctcttgataacacaaagaatgcgctactgacatcactctctcaactaagtgcacaagatacatttaacattatagctttcaatgggacggtttacttattttcatcatcaatggaaagagctacagaggaagcaattttaaatgctaccacgtgggttgacaccaattttattgctaatggtgacactaatatcatgcttcccttaacacaggcaatgaagctacttgagaaatcaactgattcggttcctcttatttttctcgttaccgatggggctgttgaggatgagagagatatatgcaattttgtgaaaagctatgtctcaagtgggcaatcgtttcgaacacctcgcatatatacttttggcataggtttatattgtaatcactacttcctgcaaatgctagcacaaattgggaggggccactatgattctgctcatgatttagattcaattgactttagaatgcaaagactattcagttcagcttcatcagttatggtagctgatataacaatcaaaagtttagaaggtcttgattcacttgagttattcccaactcatatacaagacatatcatttgaaagtcccttgatcttatcaggaagatacagtggaacttttcctgaattagttaaagtcactggtactttggcagatatgactaacttcgtagtagaccttaaagtgaaaagagaaaaggatatgcagctcagtaatgtcctttcaaagagacatatagatcaggtcactgctcaagcctggttgttaaaaagtaaagagctggaggagaaggtcactaaaatgagcattcaaaataaagtcccgtcagagtatacctgcatgaacattgttcttgtacagagtgatgaagggaagaaggcacctgaacaatttctgttgcaaaaggcgtacaacaaacttagcttccagaagttggaactcaacaaccagaacttattccttggagggttgaatcttggatttggtgacttgaaagcaactgctgagaacttgccaccagctataaaagaagcaaaaccacctgaaggactactggggaaggctgcttccaattgttgtggtcgattggctgatacctgttgtggcatgtgtctgttgcagacttgcacttttgtgaatgaccagtgcaccatcgtttgcactcagatatgtgcagccctggcctgttttgagttaatcaaatgctgtgttgagctctgtgactgtgattgcttgcagtgaaataaagttgtatgtttgagttaaacatagaaaaactgtatgatgatacaaattgttaacaatgtatatattattgtataagctcttagtgctatgatgcttacagcttatacttgcttatattgcctctgttcctcgtctaaaataggagaaatggagaaaataatttgatcaaaattgattttactaaaaaaaaaaaaaaaaaaaaaaaaaaaaaaaaaaaaaaaaaaaaaaaaaaaaaaaaaaaaaaaaaaaaaacttgggggggggcgccgggcccaatttccccttatagaggtttttttacccccccctcctggccgngnttttaacacnngtgaagagggaaaaaccttggtttcccccaatttatctccctgtgaacattcccccttttcgccctggggatataagaaaagagccccgcccagtcgcctctttcacatatttgcgccctaatatgggaatgggaactcccctttagcgggtctttaaact

SEQ ID NO: 92249 - DNA, 787 bp, Glycine max
  Clone ID: PAT_MRT3847_54315C.1
aaaggataataggacaattgctttatcttagtttctataaaaatctatggctccgtaccaaaatcatgatacaaaagaaactttatttgcaaaaatcaatacatcttgatataccaattaacattttgaacataaatacgcattgctaattacaaaattacagctctaaactggttgatggacagaacaaactgatttttggttcctacacaaggctattattattgttaactggtgatgtgctaaaaacaggtgtctctttgttgttagctgcatctttgctattgctactgctctttcgccgaggctttgcctctccaagcatcattatgacatccctcatggttggtctttcctttgggagcttggcagtgcaaagaattgctattctcagaactaaaagcatttcttctacaacatgcctgctgtttcctacacttgggtccaatacttcttctagtgatttgttgtctctaatcttcattctaagccactctactatgtctattgactctccaaagtctgaatctaatggcctctttcctgtcagaagctccaacaaaactactccataactgtaaacatcaatcttttcatccaccttcaaggcatatccatattcaggagcaatgtagccatatgatccagcaaccatggagactgtttcattcttccggatcatcatcttggctaaaccgaaatctgctatccttgcctcaagatttgcatcaagcaatatgttattcgacttgatgtctcgatggataacaggtggatgacaatcatg

SEQ ID NO: 92250 - DNA, 446 bp, Glycine max
  Clone ID: PAT_MRT3847_54316C.1
gcgaattgctaaatcttactgagtacaatgttcatatggccaaacttattgatggaggaaggaacagtatgtccaaagaagatatcttttatggttttacctttttctatattattataattatagttataattataatgaagcaacttctctggatgaatgtgcagaggctgcaatggaattttccatttcccttcttcaaactctggttgttgaggaacctaaagttatttcagaacttcacaatcttgttgatgctttggcaaagcttgctacaaagcctggatgccctgagtcattaccacagcttcttgaaatgatcaagaatcctggtgctatatcctctagtaatgctggaaaggaagataaggcaagacaatcaagagacattaaggtgcctggtctgttacctgcaaatagggaagagttcaacagcattgattcta

SEQ ID NO: 92251 - DNA, 334 bp, Glycine max
  Clone ID: PAT_MRT3847_54317C.1
accgagataactagaaacagtgtgatgattttgaaggaccttgtatttcttcaatggtacgagtttcttagcatggcaatgccatgcgtacgatatggccaatttcataatgaacacttgctattgaaccctaactccggatgagaaatgctcaagttgcaagcttgctgtggaatcacacaacatcacaggctttgagaccattcctgaatagtgcattgaagcaacaaaggaatacattcatggcgaacaatatatatcagactccaaaacagtttaccaacaagcttacttttatgccagagaccttaaagtccattccaaggacacattt

SEQ ID NO: 92252 - DNA, 180 bp, Glycine max
  Clone ID: PAT_MRT3847_54318C.1
aagaaaacaaatgggactcaatcctgtacaagcttgactggatatcgtgcacagagtgtatataaattacaaaaccaatctgtttcgttgtttgtgtggtatattggtgtgttttcaattggttttttaaagaatgcatctgtaccatatataaaatatctttatgcttaagtggtgttt

SEQ ID NO: 92253 - DNA, 565 bp, Glycine max
  unsure (1)..(565): unsure at all n locations
  Clone ID: PAT_MRT3847_54319C.1
actgcgtccgattcttaacccaaatatgaattatccttcaattttcaaagctttctctttttgaaatccaaacggttgtgtgtgtttatgatacaagaatatagaagaaaccgaattcccccttttctgtaatttttcattttaaagccgaggaatgtatgctgtagtagcatgtctagttgtctttaaatgggtatgtggaagtttgagtgatctttgtgagtattttttttcagtttctgaattttcataaactgtcgcagacagcgtccgatgctcgatcaaatagtgtatttttcaaattcagtgactttgttcggatttgttcaatttagccctagttctgatgcaaaacgcggtttcagaattcaatatacacctttctttttttggaaaaataaaataaaattgtttaatttgtaaagattttatactcctaattaatacgaaataatcttagatatggtttttaaaatgatttttacgaaaattaacaactntactatacatgtttgtatgattagatgtctgagtaaaaaaactttatactggcgatgcattataa

SEQ ID NO: 92254 - DNA, 818 bp, Glycine max
  Clone ID: PAT_MRT3847_5431C.1
tatggtcagtcagctgttgtaggtataatcttgtgctctcaaaagccgttgtttcacatttgttttcctctctagcttgattcaggaaacggagacttgagtatcctttaatgtttctaatagattgagtcttttttttttttttttcactatggtgtttcttcttacttattgcagaggggacagagatgatgatcaacaccctccaaacgctgctatcgatgatcatcgccctgcagtcaaacaagatgaagaagccaattcaggaaatcatagcaaaggagctgcggctggaagctcaaaaacatgggtagcttagtatagacctacagattcatacacagaaaaaccatgaggaaaagtatcctcaagagaatggagattagtctaaatttattatgtattggcagctcctgcaagattgcattccaagaagataatgttccttcagatgctgctcttgttcacatgtcttgtaatttaaaggatcctctaaagtttcgtttgatggaattttgagaaaactcttcatcatctggagatcaatagccaactttttagtcagtatgttgttaattatctgatattttaaagtaagaaattaatttaaagaaatagaaacttttggagtcaaattagtagtagtagtagtaattctatgtcctcaatttaaggttgtctttgattattggaaattgttgtgacatgaataaggaatgaaaagaaagaaatggaaggggtaaaaatataaataagaaatataatcgagcaacatggatcccttctgtcgtcttctcgcagccgtctcgagccgaatt

SEQ ID NO: 92255 - DNA, 195 bp, Glycine max
  Clone ID: PAT_MRT3847_54320C.1
ggttgaaacattacaaaacccttcttgaaaattttcccaaccctttttcccctggggttaccggggaatttccgaccggggccccccagggtaccaactttgcctataatgagaggtatcttaaaagctgggccaaacatgggcataagtggtttctttgtgaaaatggtattccctcacaaattctcacaacat

SEQ ID NO: 92256 - DNA, 877 bp, Glycine max
  unsure (1)..(877): unsure at all n locations
  Clone ID: PAT_MRT3847_54321C.1
ttacggctgcgagaagacgacagaaggggacagatactctttacaattgcttgaacctctcagaagcaaatgaggattattcacagcctcgcatgtttggttctcaccttcatctccttcaatccttgtaaagcagaacaagcacaaactattttgaattccctcagcattgaccaaatcctacagaaaatatatgaatggggaaatggtgcacaagggttccaagaaggccagattcaaatttcaggccctatagtggtggcaggagtgctgtgtttcatagcttcttcaatatctagtgctggtggaattggtggtggtggacttttcttaccaatattaactattgtggctggcctagacctcaaaacagcttcaagtttgtcagctttcatggtcacaggagggtcaattgcaaatgtcttatgcaatctttgtgccacaaatcctaaacttggtggcaagtcattgattgactatgacatagcacttttatcagaaccttgtatgctgctaggagtgagtgttggagtcatatgcaaccttgtgttcccagaatggttgattactatgctatttgctgtttttctaacttggtctacctcaaagacctgcaacagtggagtggtgttttcgtggaaacaaatatggacagagtatcattccaatggagccatgtggtgtgggatactggattatttcatcagctcatgtccctcttgctttatttttcactgcttggattgtatatagaaaagaggaagattgagtcagaggagagaaggaaaaatgatggatttgaagggctagaaaaaggactattggaagatgagagttctgaagaaagggaagagggaagtcangtagagaaagaaaa

SEQ ID NO: 92257 - DNA, 256 bp, Glycine max
  unsure (1)..(256): unsure at all n locations
  Clone ID: PAT_MRT3847_54322C.1
catggacttgggcaagatcgttttcgccataataggcttctccacgtccttcttattttgcgtgccgaacataaagaaatggcagaagaaacaagtggccggagagaaactaaaaatcgttagcgaggcattggaagctgcagaagaaagagcagtgagatttccaacaangacatgacagattacngngcccaatatgcgcgtcttacttganccattacggggnggttgnagccattagngggtctcgancaac

SEQ ID NO: 92258 - DNA, 360 bp, Glycine max
  Clone ID: PAT_MRT3847_54323C.1
tcttcttctcgaggctttagcgaagcgtcgagcgccctagttggcttcattatcagcagaacgagatagcgcaatgggtgcagttcattttactcaatcataggacaaacctaggcctattctcacttaggagaaagaaagcactctgttgggacgatgtcctgtagttcaaattacatgccggtgtttgtgaatgcgtgtcttaacgtgaatgattctgcacctaagtacaaggaatacaacatccaactattaggaaaactaaggatgtgacctacatggatcgtatgtctttggttgtgacatatgctagagcaccagccgttcttgagatctgggatggctgaaccacccctgatg

SEQ ID NO: 92259 - DNA, 626 bp, Glycine max
  unsure (1)..(626): unsure at all n locations
  Clone ID: PAT_MRT3847_54324C.1
ccacgcgtccggttttattttcttttgttatgagagtgtttctttacattgattcatcatgcctctgcatgagttataccgtgtggctaaagggaagcttgatcctatagagatgaacaacaacacatgtgcagttgatcaatcttctgtgtaagttcgatagcatgtttttgttaatcccatttgatttgatctttgttctatttctctgactgtttcctcttttattttttttaccctacttttgtggcagacccaataatgatttgcttgagttggtttgggaaaagggccagatttcagtgcagggtcagttcagtagagctagagtgagcccaaattgtaaaactttgccatctcactgcttaccatctcacactccaataggatatgctaataatgctatttctaccaatacaaggatggggaaagtgtgggaatttaggtgttgaattgaatgaaattagaaggctttgtcccttcaggtgaagtgggatttgagtgaaaaaaaggaagacatggtgatcccttggttcaattatggaatggaagactctttgcaacacggatatagtcttgatttttttccttgaaccatcatnatttggggtcaccattgaatgaag

SEQ ID NO: 92260 - DNA, 273 bp, Glycine max
  Clone ID: PAT_MRT3847_54325C.1
gcaatctcacgcaggtagcagcacagacgctattacccgtgacttcgcagccctactggcctcacacactcagtgcccagtgatggatcaggctgcaagaatcctaggttcgcgcgacgctatctcctgatcacaaatagcatgatgaacgtattgaatgggcaggcacaggaatcaatggcgaattgctgtcgtgagagagtgtacgaaggagagctgccacagggaagcgtgctgcatgtgacactataacacactgtggctgcaacatgc

SEQ ID NO: 92261 - DNA, 145 bp, Glycine max
  Clone ID: PAT_MRT3847_54326C.1
gaaacgcatgttggattatgagttatcatcctctgataatcaatcgcctctttttggggtctcacatatcatactcaagactctcatcacaatacatgaatcaagctcatatcgagtttcatcagagtcactataatgacgcatt

SEQ ID NO: 92262 - DNA, 609 bp, Glycine max
  Clone ID: PAT_MRT3847_54327C.1
atcagccaaaaaaatatataattatattaagtgagtaccagaggttgctgaaaaggtacatgtagtaaaatcacaagtgtgacatttgaaatcagccctcttacagagcaggccctataacatatgattgccctgcactcctaatgattactacatctaattctgattccctccagctcttgaataaatgcaactgccatctccatctcattatcaaagaatgatcttcgccacttaaattcccactcccagcctgaatctttgtgatttcccatgttctgtattaattggttttgctgttccgatatggtatatagccgaggatacttctctgatagttgattcccacctcctgtccatgaatcctcccagaattttgcttggtttccacacccaacctgccatattattgaattgttcaaaagctgcccctgctgtgtgtgttgacacaatttcttcaaatccctccaccatatagattctttaacaggtctcggatgttcacttaatcctctccatccaccatactttgaattaagtaaccttacccacaatttccccttggctttgaaataactcccacttccatttgcccataagtgccacgtt

SEQ ID NO: 92263 - DNA, 388 bp, Glycine max
  Clone ID: PAT_MRT3847_54328C.1
aaaataaggggaactacgggggggctttccactagacgtggccgcgaacaagtttttaatgtttaaatatcaccttgatttcaatatggagatgatttagggacaaattttggaggcagggaaagttaggctgttacaataagccaggtgagagtgaagtctgaactcaaagagtggcagctagaatggaaaggatgagatgttatttcgagcgctggtaatttctgctggtgcaatatcagtagcaaagtggaggcaggaggcagactgcagcaggtggagggatgcctgggaagtcaggcagtgatgatgatcaagactgtggcaacagagggaggaaagaagagtggtagctcagaagaggagtgcaatccaaagacagactttt

SEQ ID NO: 92264 - DNA, 336 bp, Glycine max
  Clone ID: PAT_MRT3847_54329C.1
ggttgtactctttttttttttttttagggggggactggtaccttctgggtaaccatttttttttatatggagttttttaaacggccccagaggcacgcccataaatgcttccccaatacaagcaaaaccccccacatttccaaaaaagatacaagctgaaaacatcaagaataaaaccaaaagtgcctatctgagggaaaaaactaaattaataaaaatggaaaacaaaaaaaaaaatccagggaaaaaaactgaacgccgtccccctaaaaaatcggccaccaaccttaaaaaggtggcttgcaaaacccccgccagagggggaaaacttttcac

SEQ ID NO: 92265 - DNA, 165 bp, Glycine max
  unsure (1)..(165): unsure at all n locations
  Clone ID: PAT_MRT3847_5432C.1
tagacggctgcgagaagacgacagaaggggattgatcagttgaatgtgcaaaagcaggaaatattagaaaaatgtgaactagaacagattagcctcccgatcatacctggatcctatggatacctgtagctcagtaccagcgncatgttttgactttttttttct

SEQ ID NO: 92266 - DNA, 268 bp, Glycine max
  unsure (1)..(268): unsure at all n locations
  Clone ID: PAT_MRT3847_54330C.1
gaccatattattgaagttcgcactcactattctttaaacaacatacttaacatttcttcaaccatcgacttatacaataaaagtcaaaatcatgtttacaaactcgacatgctacaattcattactcactaataggactagcttaagttctctaacactagttgcagaaatctatgatatgattctgacgaataccacanttatccacaacaatatggtgatcccacattaaaaccgtattccacttcttaatctgaaaactctgtgg

SEQ ID NO: 92267 - DNA, 348 bp, Glycine max
  Clone ID: PAT_MRT3847_54331C.1
attagcagcatggcttttgtgcatcagtggtattggtgtatacaacatattctactggaaccgacaaatataccgcgcaccttctccactctacatgttgaagttcctcagagccactggcattgaaggatggatgtcattaggtggagttgtgctttcaatcacaggagtggaggcaatgtatgctgccttgggtcatttttctgcactctcaataaaggtggctttcacatgcctagtgtatccctgcctgattttggcatatatgggtgaggccgcgtttctctctaagcattatcatgacattcaagaaaagtctctacatagccataccagaaactgtatttt

SEQ ID NO: 92268 - DNA, 666 bp, Glycine max
  Clone ID: PAT_MRT3847_54332C.1
tgtgcggcgctcgaggcggccgtccgggagtatcaactcttgaacaattccttttgagttattagaccattctctatatagtgatcctcaaacttaaaagtttttttgttgatcattttgtcttgaagaaatggcatctagctcaatgtcatccactggctcatggagtgccaaggacaacaaagcctttgaaagggctctagctgtgtatgacaaggacacgccggaccgttggtacaatgttgctaaggctgttggtggtgggaagactcctgaggaagtcaagaggcactatgaactcctccttagggatgttaggcacattgaatcagggcaagtgccattcccatacaagcaaaatggagggtctcaagaggagaaaaggctgagaaacatgaagctccagtaaccaattggcatcaggaacaaagaattttctgattttcaccatctagcaatttttctataatcccagtgctacgtaataagtagtgctagtgacgtagtaggattagaatatatattattcataagaatcgtatccgatgattccatgttgtattgtcgttgaagcaaccttaaagaatcaacgactctgtctaagttccaatcatattaataaagtttcaattttatgcgtttattttaataaaaaaaaaaggcccc

SEQ ID NO: 92269 - DNA, 713 bp, Glycine max
  unsure (1)..(713): unsure at all n locations
  Clone ID: PAT_MRT3847_54333C.1
ctaagaaagaaagaaagaggttttagttttttagcttatgcacaccaactaactcctcctaacttctttctctggggttcttctccatttcattggctttcaaagtcaccaacacaattctcccttcaaagtttcaatggctgtttcaaccagcttctcgggtgtaaagttggaggctttgttgctgaaatgtggttcctccaatgctgccaccaccaccactcatatatcatgttttggcaaaaacagaaagacacttgttcagagtcagagaggggctattcgttgtgaggcttcttctgcttctgatgttgtggctgatgccaccaagaaagctgcagtgtctctgctcttgagcagcttaagacctctgcagctgataggtatacaaaggaaaggagcagcatcatggttattggactgagtgtgcatagtacacctgtggaaatgcgtgaaaaacttgccataccagaagcagaatggccaagagccattgcggagttttctagtctgaatcatattgaggaagcagctgttctgagcacctgcaacagaatggagatatatgttgttgctctgtccaacaccgcggtgtcaaagaagtcactgaatggatgtccaaaacaagtgggatcccggntgcagacctttgccagcatcagtttctgctatacaacanagatgcgacacagcaccttttntgaagtatctgc

SEQ ID NO: 92270 - DNA, 2249 bp, Glycine max
  Clone ID: PAT_MRT3847_54334C.1
ccaaaaccaaaaccaaaacacacaaacactaagaaagaaagaggttttagttttttagtttaagcacaccaactaactccacctaacttcttttctctctggggttctttctccatttccattggctttcaaaagtcaccaacacaattctcccttcagagtttcaatggctgtttcaacaagtttccctggtgcaaagttggaggctttgttgctgaaatgtggctcctccaatgctgccactgccactgccaccaccaccacccatttgtcatgtttttgcaaaaccagaaagacacttgttcagagtcagagagggcctattcgctgtgaggcttcttctgcttctgatgttgtggctgatgccactaagaaagctgctagtgtctctgctcttgaacagcttaagacctctgcagctgataggtatacaaaggaaaggagcagcgtcatggttattggactgagtgtgcatagtacgcctgtggaaatgcgtgaaaagcttgccataccagaagcagaatggcctcgagccattgcggagctttgtagtctgaatcacattgaggaagcagctgttctgagcacctgcaacagaatggaaatatatgttgttgctctgtcccagcaccgtggtgttaaagaagtcattgaatggatgtcaaaaacaagtggggtcccagttgcagatctttgccagcatcagtttctgctatacaacaaagatgccacacagcacctttttgaagtatctgcaggtcttgattctctagtgttgggggaaggtcaaatcctttctcaggttaagcaagttgttaaagttggacaaggagttaacggctttgggagaaatatcagtgggctattcaagcatgcaattactgtcgggaaaagggttagaactgagacaaatattgcttctggggcagtttctgtgagctcagctgctgttgagttggcctatatgaagctacctgaagcctcacatgccaatgcaaggatgttggtcattggagctgggaagatgggaaagcttgtgatcaagcatttggtggcaaaagggtgcacaaagatggtggttgtcaatagaagtgaggagagagttgccgcgatccgtgaagaaatcaaggatgttgagataatctacaagccactctcggagatgctcacatgtactggtgaggcagatgtggttttcaccagtacagcatcagagaatccactgttcttgaaggatgatgtcaaggagcttcctgctgccagcgatgtcattgatatctctgttccccggagtgtgggttcatgtgactcataccttgtgtctgtgcgagtatacaatgttgacgaccttaaagaggttgtggctgccaataaagaggatcgcctaagacaagcagtggaggcacaagcaatcattgctgaggaaactaagcaattggaggcttggagggactctctggaaactgttcctactattaagaaattgatggcttatgctgaaagaatcacgcttgctgagcttgagaaggtgcttaagtaagatgggtgatgatgtacgatggtgatgctatcacaagaagacacaaagagctgtggatgatcttagcaggggtatagtgaataagttgccatcatgggccaatgcaacactgaggtgtgatggcagcgacggcagacactggagaacgtgcatggagaacatgcgatctttagaatagaatgttcaaccttgagactgaaatatctgttttggagcagaagattcgagccaaggtggagcaaaagccatagtgtgtgtgtgagatcttgtaccaatttttcattcataacactcatttattttattctattcaggcttaagaatcatgcaatctttgattgaatgattgaaacagtaaaagtccccaagaacttcaattgattagtggtgtctctgtctacttggcctaactcctgtttgtaattttaggtcgggtgtttccaaggttttcttcaatagtcgtttgcctctatgtctaaaatttgtttattattatacaaaaatagaggtgtttatgtacaatgtactactatactattacggggagctttgtatctatcacgaataatctatggccaaaatttgtctcctgttaaataaaaaaaaagaaactccgtgtgaaaaagctagagaaaaaattactccagcaattcagcgtggcagctaattcacttcagaactccagtgatgaaaaagagcttcaaaaagt

SEQ ID NO: 92271 - DNA, 757 bp, Glycine max
  Clone ID: PAT_MRT3847_54335C.1
ctcgagtgcaattttggccgtatcattaaggtttttggactctacacgatcacatgtgctgcatttgtctgtaatcggcccgtaatatcaaggatcacaacagaactgtaatcgcaactgcaatttaaaaccttgaacagaaccatacaagatagagtcaccatgccatttggtttggtctcagcatggaacaagcgtcgaagaagcatgtctcacgatcattcagacccttggatttataaacctgcagagttttggcaacttgaagatcaaacaccacaacctacaaaaaggaggcatagatcatctgtttacacactcaaggagatggaagaggcaacatgttcattcagtgatgataatctgcttggaaaaggaggatttggcagggtctaccggggaactttgcggtcaggagaggttgtagcaatcaagaaaatggagttgccagcaattaaagcagcagagggggaacgtgagtttcgtgttgaagttgacatcttgagcagacttgaccacccaaatcttgtttctttgataggctactgtgcggatggaaagcataggttcctagtatatgaatatatgcgtagagggaacctgcaagatcatttgaatggaattggggaaagaaacatggattggcctcgaagactccaagtggcactgggagctgcaaaaggacttgcttatctccattcaagttctgatgttggaattcctattgttcatagggatttcaaatcgaccaatattc

SEQ ID NO: 92272 - DNA, 360 bp, Glycine max
  Clone ID: PAT_MRT3847_54336C.1
acagataaatactactgttttgttgctgtatgacctgcgaccgaactatggacacttgtatgatggtgcctgttatacggagatcacaagaaactgaatggaccaacttgaattctcgacacactccaacataaattttctagtctacaccaaccatcaagagaagagaactggaatgataacgcacacggtctatttattgggcgtttcctccgagcaatcaagtcggtggattggctccgttccgttgtgatacatggaccatgatctgccgtaagccctctcgctgtcatgaagacctccgtgacctgtaggtgcaggtggtgcaccccccgatattgggggtattccaagattcaa

SEQ ID NO: 92273 - DNA, 382 bp, Glycine max
  Clone ID: PAT_MRT3847_54337C.1
ttctaccttcaagctcttatccatggcttcctatggtggtgagcttcttctagattcatcttctacttgaagtggcatctccattcatctttctccttctccattccactgcaatcagacctcaagaagcaaaggaatccattgatgaagaagatccaaggtgatgcaatcctaccccgcaagggcattggatagaaaactccaagtagattgggccagagatgcaagagaaggccctagggttcttatgagccttaggtagatttcgagcccatgggctaagtatgagcccacttatctttgtaaatattagattaaggtttcattatttttgggccttgtatttagggctccataatgtatgtagggtaccctagaaata

SEQ ID NO: 92274 - DNA, 346 bp, Glycine max
  Clone ID: PAT_MRT3847_54338C.1
ttcggggggtttttgtttttttgttttttttttttttttttttttttttttttaaaaaaagagagggtttaagaatttttacgaaaattaaaaaagggggggaaattttaaaatggggggagatttctcaggaggaggggcatgcataatttccttttttgaatggaaaaaggcgccctgggaaagaaaacaaaattttcatataagagcggggtttgcggtttttaaaaaaaattggccctacccttgggaacagaaaaaggcggcattggagttttcccagtattttcaaaagtttgagagattcccggaggaatatcaaaaactggggagtggtggggattgt

SEQ ID NO: 92275 - DNA, 346 bp, Glycine max
  Clone ID: PAT_MRT3847_54339C.1
ctgtctttcttgcgcctgaacaagctctttagtaagttctgattctttgttaagcataacaatggtatcctatggggacactttcgtaagcactgggggaactatatgaagactttgttcaatcagccagcacggaagacaaggagacgattggtttgtcagaagaaagctgtgaagacattccccagacctactgttggactctatcaagcccattgtacatggtcaaactttgtaatacaacatgaaagtgagagggggtaggggactttatcttcgagaactcatggcaagactttattgccaaaaagcttgctcctaccatatagattggtgttgatcatct

SEQ ID NO: 92276 - DNA, 283 bp, Glycine max
  Clone ID: PAT_MRT3847_5433C.1
gcttaatctaactatacaaattctaaactatgagttggtgttgtgctggaccaatgggatctggcaagaaaaaattcatggttcaggaaccctcgttaagcttacagagcgtgctcctgctgatcggaaagacagccatcataagcaacatcttcgcctagatcctacttatcgtcgacaccacgcatgtgtcatgtaaggtctattgggtagcacgactaccgcgaccaccgtggaacgcacaccatcctgtcgagttcattcagtgcgaccactgccatcc

SEQ ID NO: 92277 - DNA, 424 bp, Glycine max
  unsure (1)..(424): unsure at all n locations
  Clone ID: PAT_MRT3847_54340C.1
tggtangnttgtaacccgaataganatntnngggtngannnagngtnngngttggaatgattgattnagtccatgtganttaatatgtnaatanaanaanaattaataaatnatnnttnnattaaagttttgnnttttantgtannatatanatttnntatagnntnttgnaaagntaaattnaattattgaagnnaaagaaaaagagaaaagaanaaagggagtggttgnngtggaagaaagaagaaaggtttnatngatntntgttgaatttttaatattgaggaagaagagnnanaaaattnttnnttntgnagggtggaaggtaatggttnaatgggaaattgntggggtnntnnanntnanaannnnannnnnaaaantaanggtaannttagtagtagtaaaggtaaaanggggaaat

SEQ ID NO: 92278 - DNA, 405 bp, Glycine max
  unsure (1)..(405): unsure at all n locations
  Clone ID: PAT_MRT3847_54341C.1
gaagnnaaggttgtgttgantttgtttttaaagaaacaaggtttgagnaatgttattgggattataannagnaagagagtattttattttttttttttnnnngnnntaggntttttgtgagggaaattttnntntnttggagggagagagttaannattataaagataatttatatatttattggttatgttgaatttnttttngaagaggatggagaaattttagtgaatgtagtggaaaattatttaaatttanttggtaaggataaattaggtgtggggatttttttttttaattttttgttagantttaagaaggttaaaggtttgtgttgagtgagtgaganagaaaaagatggtggnaatgttgggnttgatattgtgtatgtgatggannttggtgtg

SEQ ID NO: 92279 - DNA, 452 bp, Glycine max
  unsure (1)..(452): unsure at all n locations
  Clone ID: PAT_MRT3847_54342C.1
tacggctgcgagaagacgacagaagggggagcccatgactaaatatgatcctgaagtagtcatggagttttatgcaaatgtctagcctattgaaaagggcgtcatggataagtgctccagagtgtggggccaatggattccctatgacatagatgctatcaaccaattcttagggcatccattgatcttagaagagggatagcgatgcgaatacacagagagaagaagccaatttttaggttttgatgaagagaccataggttaactacttttctcccccgaacatgattttacatgaagcgtagcanggaagcgggtgcaaatcatgcgcattagcatgaccactttgactcaaatctggatgacctttctactcagcaacatccttccgagtgaccataactctgatctcacactacccaaatgtcagctggtctataacattattacct

SEQ ID NO: 92280 - DNA, 127 bp, Glycine max
  Clone ID: PAT_MRT3847_54343C.1
ctttgggacgtttggtccaaagtgatgccaagaattggcagtgcaagaatgcttccagggcaccttcttgcattgccaatgcttggcctcactcttggtccaagcgtgcaacagctgtgagccgtgc

SEQ ID NO: 92281 - DNA, 370 bp, Glycine max
  unsure (1)..(370): unsure at all n locations
  Clone ID: PAT_MRT3847_54344C.1
tgatggtgctccaaggatgaggacacacatttggagcattgatgatttcatggcaaatagcagaccatctgtctttgagatcattgcaacttcccaaagcttcggatttaaagggaaacgtttatcctgagcttgtgctaactgctgctgaatccgctgaaattgctgatgcttaattaatgttgcctcaaattaggttaaaataatgtcaatgcttgcaactagaaataataactgtagacttgtacttatggaattaagctctgaatgtgctagtagtgatctattgatgatgctgatgctactctatgaatattgttaatactatatgaagcttataaggngcagctagtgatctatagtgtcttac

SEQ ID NO: 92282 - DNA, 451 bp, Glycine max
  Clone ID: PAT_MRT3847_54345C.1
ccttcgttctcgcccacgcgtacgatctgtctcagcagggcctttctagaacgaacatcgcgaagaatagcaattatccctcaccaaggaagaggaggcacacaatggccgataccgtaccgatgaacagagctgcgagtatcaaggaagccttcagcttgttcaacaaggacggcaatggttgcatcacaaccaaggagcttggtactgatatgcgtttattggggcaaaacccaactgaggcagagctccaggacatgaccaatgaagtggatgctgatgggaatggtaccattgacttccctgagcccctaaatgtcatggccaggaagatgaaggacactgattctgaggaggagctgaaagaggcattcccgcgtttcgacaaggaccagaatggggtcatttgtgttgctgagctcccccatgtgatgaccaaccctcgggagaa

SEQ ID NO: 92283 - DNA, 386 bp, Glycine max
  Clone ID: PAT_MRT3847_54346C.1
aagacccgcagcaagaactatgaaagtactcataacaggaggtagtggattacttggaagagctttgatgaaagcatttgagggttgtgaaacccttgggcttgcattctctcgtgctgatccttcgaagaatcttgttaaatgtgacctgcgtgaccctgctgatcttagagctaaaattctagagtttaagcctgatgtaataatacatagtgccgcagagcgtagacctgattggtgtgtccaacacagggaagccacacattaccttaatgtcagtgtcacagaacagattgcattactttcaaaagaagtggactgctggttgttgtatataagtacggattacgtgtttgacggggaaaagccgccatatactcccaatg

SEQ ID NO: 92284 - DNA, 367 bp, Glycine max
  Clone ID: PAT_MRT3847_54347C.1
ccaggttattgatcttgtatctagcattaaagcaggggtagattgtaatgatcatgaattaagtacaacaagaaagtttcaagagaaaacacaaacacggacttggagcaacgtaatgttcctaaattacgagatactagcacgtagatggaatgggtattcgaactctcaagatacataaaaattgaccatcagaactcacgaacgttgcgccagatctcattaactagctataataggctgctaccaatgcttcattgccgagatcagtagtcatgcgtcactacataatcagcgaacttccttctttctcttaagacgggtacttccacctcctttgctgatgggcaacttcattggttcaaac

SEQ ID NO: 92285 - DNA, 295 bp, Glycine max
  Clone ID: PAT_MRT3847_54348C.1
ctgttacaactaaacgggctccatgtaccatcttacaacctatatacattggccatttcgcatctttcttgggaccagagagaaggaccggactggatcaggcttggatatgttatgccttgcatacggcgctcatactctaaccctcacagacgcacactctctattccacaatctctacttgtctgcgttttggccaaaaaatacttctaaccatgtctctctgggcttcaatccggttaaaaaagactaacttaactatcgccccctcaatacgaccaatatcttctagcac

SEQ ID NO: 92286 - DNA, 467 bp, Glycine max
  Clone ID: PAT_MRT3847_54349C.1
ccggggtcgacccacgcgtccgaacaggcgtcagtagagcagcgaaaggggtacagaagggatcgcatttcatggtactcaacctcaatatgatcacaaatgcatatccactaccttttttcgaagtctctgattgtcctaaaggcaccggtaatggaagagaagaagccggcggagaataaaccagcgtcggagaatgtaactgtggagaagaatccgaacgctgataataagatctcgactgaaggaaggagctagaagtatacgatgcgcacgatgaagagcgtggagacatacaagatgtacatcttgaaggtcctcaaacaggttcagccagacattggtatttccatcagcgccatgggcagcatgaacagcttcatcaatgatcttctctataacctcgccctagaagcgttgcgtttggcccgcttcgacatgaatcccaagatcacctcgagggagat

SEQ ID NO: 92287 - DNA, 573 bp, Glycine max
  Clone ID: PAT_MRT3847_5434C.1
aatgattaacattttagtggaaaaaaaaattaatgtagagaatattttagattgaacattataaaaaaaaaataagccacacttttaatttggaccttcatcataaatcctaatatatttttcatcggtaatttttaaatattaaatatttaataagtgaatatagaaaaaaaaatctataatcagtgaaaacactgattaatgaaaccgctttttgaagtattcctttctaaaatatactgatagaaatgacttggattagtactagtaatatttaagcaagacaaattttaaaattggattcgacatttgggaacgttcatcgggtttagataaataagaatcaaaccaaatttaaatagggtctttcattggacggggtatacttaccaacattttaccatatatttaacacaaaacaataaataatattttttgttaatttaaaaatagttccaagtctcaacatgtttgggccgagaggaaatgattgcatttaatgcttgaataaagcggctaacccgcggcattggcgggggtcacataagtctattttccttactcgaatttgga

SEQ ID NO: 92288 - DNA, 212 bp, Glycine max
  Clone ID: PAT_MRT3847_54350C.1
tctcttccgttttcgcgaaacaacacgaaaacggttgagctgttaatttgatccaagaatgcttgaaagagaaagaattgtgaactattactcccgcggccgaaaaagaatctgtagagagttgcacgaagaataagaagtaaaagatgaccaacatgaagtgagaagatggagttcgctgaaacttgacatgggctgtgactgggacgtat

SEQ ID NO: 92289 - DNA, 297 bp, Glycine max
  Clone ID: PAT_MRT3847_54351C.1
ctcgactcactcctgcttacagatgcacagaacgacagaatgcggctcctagtagacgacaaaaggagtaacagcagagtcataacaacggaagggtgcagatgcgagtaagacaaccaattgtgtacgcctgccacaagaccacagccagttaccgctccgaacataccacttaactgtactgcttccagaaaacaccgtaacctttctgatacattatgacgccccaaggatcctgctccgaacccactacctatcggggtcatccaatgttctcttatcaaatcgatatgatca

SEQ ID NO: 92290 - DNA, 921 bp, Glycine max
  Clone ID: PAT_MRT3847_54352C.1
agaatacataaaacagacttgcctgtaaaccagcaaaagtggtaggaagagtcttgaacatcttgaagacagacagaaaatgggtgcttctcaatcaatctcagaaaaatcctttcatgaattcactgtcaaggatgccaggggcaaagatgtgaacctcaacgcctacagggggaaagttcttcttgtaattaatgtcgcttcaaaatgtggatttgcggatgccaattacacccagttaactcagctttactccacgtacaagagcaggggacttgagatattggcatttccatgtaaccaatttttgaagaaagagccagggacaagccaggaggcacaagactttgcttgtacaagatataaggctgagtatcccatttttgggaagatacgtgtgaatggatcagatactgcaccagtcttcaaattcctgaaaacgcagaaatctggagttatggggtcaagaatcaaatggaatttcacaaagtttttagtcgatgaggaaggccgtgtcatccaacgttatagcccaaccaccaagccattagccattgaaaatgatatcaagaaggcattgcgggtggcttgaaagacgactgcacaattatttcaagccattgttcgtgttgaagatatctgaaaccaaaaagaagtaaaagaaaagattatgtgattgatgtttattctattgattatttaacgcatatttatgtccatggttttatttgtgatgttgtatgaaatttattttcagcctctcgatatcaattatctgttaaagtggattccaaggaaattgattattcaattttttgtcaagtaaacgtatgtcactatgggcatgttttgttggggaggtgctatctctaagtagttgcatgtcaacaaaaactcgtgaaataaaacagtgcttcattt

SEQ ID NO: 92291 - DNA, 408 bp, Glycine max
  Clone ID: PAT_MRT3847_54353C.1
ggtggtctgtcttttttttttttttttttttttctctttttgttttgttttttttttggttttttttttttttcatcctctctcctttttcttgaccaaaaaaggaccccccacgaacccataaagcttgaggtaaaggaggggcaccgggggcctgaacaaaaggggggggcgtcccatgggcaggaaggacccccccccaactaagggggggaccgtggaacccggatttttaacatcaacacttgcgaaggaaaccccacggggggaaccccgcacgccatggtgttaaccccccccagggcccccttgaagaaacgaagagaggagacccctctgaccccctttggccccaaaaagggggcccggggccaccaatggcaagggggtgttggccccccaaattgg

SEQ ID NO: 92292 - DNA, 147 bp, Glycine max
  Clone ID: PAT_MRT3847_54354C.1
ggaatactagcattcctacaatgatggaagaggtactcacatcacattttgatgacctaaccaatatatccgttcatgattacgagggtgagaggaatagacttagatacaacaccttgccgggtaagtttgcagctataaattcct

SEQ ID NO: 92293 - DNA, 493 bp, Glycine max
  unsure (1)..(493): unsure at all n locations
  Clone ID: PAT_MRT3847_54355C.1
ctggangctccaccccgcggtggctgggccgcttcttannnaactagtggnnnatccccnncgggctttgcagnngttcgcttcacncnnggtgtgcangnntcgagccccnnncgaagannaaaagcngnnaaaatggccngnntcgcacccaagacannnttcagannatcaagaaagnaaagttggcnngaagaaagaatgagggcagannacaggcctttatcccctttactggatcnncgcatgaggggaccgnnacaacaccattcaggtaccaacnnngcgaagcgcccgtcacttgggccgtcgcacccaaagcttggatttctgagggtggcttggctttggccctcgggttctggtttattccaatttaaattagtgttttaattttctttgagcccaaaaacaaatggctttggagattttaatatttttgcattttgttccaagactatattgtgtaaggaacttattgtagttcagacta

SEQ ID NO: 92294 - DNA, 373 bp, Glycine max
  Clone ID: PAT_MRT3847_54356C.1
tggttttttgaaaggaacagcgattataatatatacttaaacccgaacaaacccttggccaagggagtggtcacatggtccaaatacctacattgttgcggattacagacttaaatatgattggaagtaactaccttcgcctgatcgcagtaatacgatctatgaatatattcaatcagcgctcctgagcaatggtcggcatctctagctttaatactgatcctaattggatgacgcccgacaagaaagagcccgtgcaatcctaaatgttcctcgcagtaataaatgcccggctttgctggggtgaaaccttcccccaaaaattacagctttagccttaaacatctgtagggcattggtctgaaaccctttt

SEQ ID NO: 92295 - DNA, 313 bp, Glycine max
  unsure (1)..(313): unsure at all n locations
  Clone ID: PAT_MRT3847_54357C.1
ccctgaatacgtaattcattgacaaatgtgtccctgaaaaatgaaaatataaaatttagtccccgaatgtgtaaaaagtgcgacaaatatatccgactgttagctttcgtccttcaccattaataaaatagctaagattcaaagaagtgaaatatggaatatacttatttttttatttatagtagattatgactaattattataatttgaaaaaatttgtaatgattggtacactagtacaatgtttattttggataatttttgttgtgacagacaaattatggttgataattaatattatcgntattattat

SEQ ID NO: 92296 - DNA, 148 bp, Glycine max
  Clone ID: PAT_MRT3847_54358C.1
catcgtcggaataatcatggggaaggatcatggatcacttgcacgtgctgataaggacagagggcaaaccccgaaagtggccaagcaggataagaagaataagccaccaggccgcgcccacaagaggatgcagtacaatcgtttgttt

SEQ ID NO: 92297 - DNA, 286 bp, Glycine max
  Clone ID: PAT_MRT3847_54359C.1
tcgtacggttgctagaagactacagaaggggatgttggaggagaagatgagggagttgatgatgcgtgctgttaaggttgttgacattgttgacacattcatactttaggagcaaccctgattcgattagaatctttttgttaccttaatgaagaggtttattaagaatttgtcttccaaactatcatgcatatcatcagtgagattgtttaagaagcacattttgggagcaactaattacctgctctttaagattaaagatttccatttttttgttgtttagagc

SEQ ID NO: 92298 - DNA, 343 bp, Glycine max
  Clone ID: PAT_MRT3847_5435C.1
catccatgcaccgtgcatctcttaccgtcaaatctgaataaaacacttttgatgcattttagaatcacttttgatgacatttcctagccaaattgcattgtaacataaacactggaaaacaaagggtctataacacatcattagcctgttcccttttccagcctttgttgttttggttcgttgtgtgtctctctcagtagactccaatgagaattccccatgtttcattgctttccttcatattctgctactgcttctggatacaccacagtgtttactacaccggggtttcagcccaaattgttgaagatcaacaacaatcattgctcaaactaaagaatag

SEQ ID NO: 92299 - DNA, 427 bp, Glycine max
  Clone ID: PAT_MRT3847_54360C.1
ggctggcccttttggaataaccattaccggttttttaaaccctttctttttaaaaaacccttttaccgacccattacacgtttccacccttaaccccacctttaccttcttttccaacattttggaattcaaaaactgctccgccattattggccaccccattattggaacccctggtgggacactttccattaccgagttccacccacaggggttcaggaacccttccacacttttatgcataaatatttttttctgatccacccactcttttatcactatcccttgggatttcacttttttttcaaacccaaatgggagcccccacttcttttttcttattacccacaagaaactcaccttggattcctccaaccccttcgttttctcctccagtggctcccttgaaaactctggttgtgaccca

SEQ ID NO: 92300 - DNA, 168 bp, Glycine max
  unsure (1)..(168): unsure at all n locations
  Clone ID: PAT_MRT3847_54361C.1
gttggggtccgtacacaccgaaccancangcaccatagcagacaaataaggacacccaccagccaacacaggnggngnaggacgcacccgaggcgaccaagccggaagaaacccccaaggccaacacgcagcaaaccgcccggaaacaaacggcaacagcgaggacac

SEQ ID NO: 92301 - DNA, 203 bp, Glycine max
  unsure (1)..(203): unsure at all n locations
  Clone ID: PAT_MRT3847_54362C.1
gaagcctgncgaccactcagagaacactctagaactgcgtgcgtcctgacaacactaagatgcaccctctaggtggatcgccaaaccactcgctctctatgacaggctggcacactcacattcgaccggaaaaatctaaanaccttctctgaaagagaggggaccnngacccaggaatggcggcgaaaaacatcccnaaagag

SEQ ID NO: 92302 - DNA, 397 bp, Glycine max
  Clone ID: PAT_MRT3847_54363C.1
ctattctttctttttaaagaattgagacatttataaatattaaaaggggatacttataaagatgagatatacatatagaattaaaagaggatatacatacatcgctcagcagaacattatcatatgaataaaatggagactaaaaaaattttatttgtggctgtccactagcccatgaacccaaacataattgctgacacaaagaaagaccccaccaagaggccattgccactggaaacagttacagctactctaggctttgggggtgaagcggctgatgaggatcctgactcagagggaagagaatgagacaggttcgatgaggcgacagctggaggacctaccgaggtggaaactgcaagattgaattgacttcaccaggcaaaaggtacttatt

SEQ ID NO: 92303 - DNA, 642 bp, Glycine max
  Clone ID: PAT_MRT3847_54364C.1
cttctacctttccacgcgtccgatttcttggtgtccgttgagcgcctgtccctttcccctttttgtgttcgtctagggtttctcaaatttaccaattttcgacacccattgtgtgatttgcgctcggtgtccttgtttatctgttcagatgtggtgggtcgtctattttttcattttcattgtgcaatctgtggaagaaagagatcgtggtctgcaatcgcattgtgtgaatagttgtggtggaagtttcttatgtatttctttatgtaggtcccatgcgcttgttgtttaaaatgacatattcgttgccataatacgaagcagatttcatataatattttatattggaatgattacgtgattggtagtcagtgtgcttttttttctttctttttttctatcgattggactggtattgcttgtaatggttgtgaagcaggttgcagtgtacattagccatactcattattttgttattttcatccatgggtaataggtttgggttattgattttaaacatgatgcaaatgaatttttggtactgtatgttacttatattacttgttggaagtttgtggcgtgtatttggtgatgaccaggacatgaatatggaatgagacaattggggcctaactaggtggg

SEQ ID NO: 92304 - DNA, 132 bp, Glycine max
  Clone ID: PAT_MRT3847_54365C.1
agggatcaagacaagcctttccacccccaatcttggtgaatgcttgagacacaacctctcacacacgacaaatctttgacagaaatcttccattggcaacttggtgtacacactttgtgaaatgtatcccct

SEQ ID NO: 92305 - DNA, 426 bp, Glycine max
  Clone ID: PAT_MRT3847_54366C.1
cgcgtccggagagtcggtccatgatgacattgcgggagtgcggaggagtcttgttgtcgaacatctgccccttctacagtcaagaggctgtgacgttgctggaactctcagttgtcactttaatattagtagtcttggaatgagaagtcgcaggggacaaaatgcactggcttagcattttggcagtctatagtgacctgtcttcggacgtgcaatgcacaagtttcaagcctactctgaaatcaagatgttcataacctgtatcaccattcgttaacactgcctataaccaactcaggactacatatagtggctagcaatttagatcagactcaagatcagttaaccaacaagctttcttattacggtactgaacgcgatgtccatcaaagcaacatatttacaatcggccatacataacatcgt

SEQ ID NO: 92306 - DNA, 428 bp, Glycine max
  Clone ID: PAT_MRT3847_54367C.1
gcaccaggaaattcatcctggttggtccaattatttgctttttaatggtggatgccttgtcaatttgcaatttctcttcaaagcccattacatgatgtcttcagttaagagctatagctggtttacaatggttgtttagtcatctttgataatagggaggatcatctgttaggcttctgctttagaaacccatctgttggctataattaataatgtggttatttggtccttgtgggtaaaacaagttgttttgtatcttttgagtataactccattacttggtaacaccatttcatcagctgacttatttcagtcttcagatatcagtagattaattttctagcaatccctgtagtatattactgtttttgttttctgtctatgatacctgtcttgtgtttctttctgttttttgttatttcagtact

SEQ ID NO: 92307 - DNA, 255 bp, Glycine max
  unsure (1)..(255): unsure at all n locations
  Clone ID: PAT_MRT3847_54368C.1
catatccaacttactaccanagtgtcaccnctgttanagtctaacttncgctaattcgagagctgaanttagctaatatcancctgntcaaganatcatggncactttttcantctgatgctaaatnnttatggctatttnnttcataattagagtttattnatttgccacttgaatggtgtatatgctgnagaacagtataagagattnattttaacntattccatcactttcanaataaatntatttctnccc

SEQ ID NO: 92308 - DNA, 280 bp, Glycine max
  Clone ID: PAT_MRT3847_54369C.1
cggctcatggcggagcaaaacagatctagagactccggcaactgctgggtctagtaagagcacttctgaaataggaactctgtgcttgcaaggatacaattatacttcatcgcctgcactttgcgcggaagtccataatcttcttgtgatgactaaagtattcgcatgatgccaggctgaaaccgagtcttgacttagtgagcactgaaatttatttcacacatgggccaaggacttgtcctatggtgggctagcgagtacatgatgaccactttacaac

SEQ ID NO: 92309 - DNA, 407 bp, Glycine max
  Clone ID: PAT_MRT3847_5436C.1
gggaaagaaagcagagggataggaagaaggtagtatggggaagtatttcggaaacgcttattgtggcgacccgggcgtgccccattctgacccggatcgctttgtcaacatattgggcggatccccttccttcgctgttctcacatattttaaaccccacatgtggcagctctcttatcaagtcaattgggctgtcaaaacaatggtttatttgccatatctccgggaaccggccaaggagaaaaatccacccttttagatcttgtgggaccaaaaccggggccataaccacccgggaccatttctcctcaaccgggcctttttattttccttaggccccttcaatttaatttttgggttactttgggccaattaattttgcgtggaaacctggttcgccccccccc

SEQ ID NO: 92310 - DNA, 535 bp, Glycine max
  Clone ID: PAT_MRT3847_54370C.1
cttgtttagataaatttctccataaacatttataagtgaagaaattaagaaagtaaaatgaattgaacctcttgtaagttaaaattaattcaagcattttacttttataaaagtcttcatttaacttcttcacaagttaaggttaagttgattttaacttgtaagagaaacccaattcattttatcttttctttttcttacaagtgtttacggagaaaagttgatctgggtatgcctatgtcttgattggacagcattcctatagtaagttgtgttttctctttgcatataatgtgttttgccccggaaactttagcagaatatcatttgaaggcttccacataaaaatacaaaaatgtttagtattctgctgaaagtagatagaatctattctatttaactagggttgatatatgatattcataccctggagtatcatcagggatcatattgaaagaaatgaaatgtcttttataattggatggatcatacaaacatgtaacatatcacctgatgacttaacttgggaatcttg

SEQ ID NO: 92311 - DNA, 277 bp, Glycine max
  Clone ID: PAT_MRT3847_54371C.1
gttcctcccagttgctgaggggaagggaatgggcagcctggagaaacagcagaatgacaaaatcctgagctctctacttgccagaaactctgatgaaccgcttgatgtcagcaaggcaattacaatgtacaaggtgaaaaaggaaaagcagagaaggaaagagaaaaatatgccatcaaaatctgatcagcttaagccccagaagaaaccccacaagaaatcatcgaagaaaagggcttaggtccacgtcatttcgttgaccacagttttgaaagct

SEQ ID NO: 92312 - DNA, 510 bp, Glycine max
  unsure (1)..(510): unsure at all n locations
  Clone ID: PAT_MRT3847_54372C.1
ctccagcccggtgnaggccgctctanaactagtggatcccccgggctgcaggaattcngcacgagcgcacattgatgctanaccttactcgggaaaatatgatggagttgttggtgttttaggtgccatngaagccatcatagtcctganaaggtctggttttanacctanaatancattggaagtcntatcattcncntcanaagaaccnncacnctttggaatatgttgcttnggaagccncctattggctggaantnaggatctngcatattcnctaaanacnncnnctgatntccaaancntatctttccnacatgctgcgggatcttgcngggtnttcantcanatnaacatgacttancccntgttttttcanananncgaacntcttcctnctttntgtttaactggcccactgaaccncgacctnttctggnaagatnaangttcntctttncgctttnctttttccgccctttncccntccctccttcgttcttaccggtc

SEQ ID NO: 92313 - DNA, 119 bp, Glycine max
  Clone ID: PAT_MRT3847_54373C.1
ggctcgagcgagagcagactcccaagcaagttcagggtgaaacttatgttgatttagcttgtaatggaagtcatttccaattgtttggattaatgtatgatcaggcaggcttttctttt

SEQ ID NO: 92314 - DNA, 354 bp, Glycine max
  Clone ID: PAT_MRT3847_54374C.1
ccatcacctcctccaccatatgtttacaagtctccaccaccaccatccccatcaccaccacctccatatatttataagtcacctcccccaccatcaccttcaccaccaccaccatatgtctacaaatctccacctccaccatcaccatcacctcctccaccttatgtatacaagtcaccacccccaccatcaccttcacctcctccaccttatgtatacaagtcaccacccccaccatcaccttcaccaccttctccatattactacaagtctccaccacctccatcaccttcaccacctcctccatactattacaagtctccaccaccaccatcaccttcacctcctccaccc

SEQ ID NO: 92315 - DNA, 458 bp, Glycine max
  Clone ID: PAT_MRT3847_54375C.1
aaaacccctcaacattttcatcccataactccggcagttttggcaggaaaaaatttcttttactgaaattccataacaaaaaacaaatttgggaacaaaatgattcagggggaaggatccatcctccatttggacaattcaaacccggcccaaaaaaaagccaagttttacccaaaatttttttgcctaattgggaggggaaattggggtaaggaaatccagttccaaaacctggggtccaacttaaagagagtggaaaatggcggaaaaatgcacattactcgggccctccataaaatttattggtttttgggttatagccctacaactagttggttggaaattcccaaaaagggggggaaaaaaacaaaagccgcttaattgtcggggcaaatttactcttgataagacgatctttggtgacccaccttcaacattttttaataaactttttccct

SEQ ID NO: 92316 - DNA, 335 bp, Glycine max
  Clone ID: PAT_MRT3847_54376C.1
ctgcaccaacttataaaccataacgcgattctccaacgccgttgttggtgcctgaatcttctgaaacggatgcatcttaagccagctgagaacatgctttaagccaattcattcaaaattacggttcttgctgcgctatccccaacccacaattacctcttaattggcctgatcctatttaaagcaactgacattaaggctcaatttgccaaaccgatcgagttctgtctcacgagagcacggtcgccgaaagaagtagatgaccaatgccagacaccgaaagcgcggcggcagcggcggtggaagatgagaacaacaacgagctgttcggaaaa

SEQ ID NO: 92317 - DNA, 294 bp, Glycine max
  Clone ID: PAT_MRT3847_54377C.1
cctatacaatgagattttttagatgtttattatttcctcgggccccgggggttatccgcgtggcggaggattaaattgccccaatcagcattccttggaagcgaaagggccttgttcttgtacacctgataatggaaaatcagcccgaccatattgaggcaaagcctagatgatacaagaaatgggatggcccacgagcctaattttggccatgcaacgtctcagaccaaaaaaacaagccgggttgggtttaagcaagcacctgggggcaggggttccaccaaaaaagttatt

SEQ ID NO: 92318 - DNA, 203 bp, Glycine max
  Clone ID: PAT_MRT3847_54378C.1
aatatttatgcacgctaaggtcatgtgtcgttgatgcatttgccatgcagctagggaggactatgatatggagagctgagaccacttcctgaataccctttgagaaatatggaccataatggctggaaaattctacctttaactgaggaaaaagtagcatattgcgactacacctatgcgaagtaagttgaatcattagctga

SEQ ID NO: 92319 - DNA, 794 bp, Glycine max
  Clone ID: PAT_MRT3847_54379C.1
cggtccggattcccgggtcgacccacgcgtccgacagatcccggaaaggcgtgccagcgtcagagagactcatcagttctcactcatgagtaacagcaccatctcggatctgtgtccctcctttgagtgaaaaaggttcaatctttggtctctggggctgttggggttccgtcattgaagaagaagaagaagaagggtattattgttattataatcatggacccgaggctcatacacccccacgatgggattgtgacgcaggatgagttgcagggtggtgctgcttccaacctctctcacgctcacaagggtgacccttgtctcgttttaacggctgatcccaagcctcgtcttcgttggactcaggacttgcatgaacgcttcgttgatgcggtcacgcagcttggtggagctagtaaagctacaccaaaagcaatcatgcggactatgaatgtcaagggtttgactctgtttcatttgaagagtcatcttcagaaatacaggcttggtaagcaatctgggaaagatgtgggcgaaggatgcaaagatggttcatatcttttagaaagccctggtgctgataacacttctccaaagttgccaactcctgatacaaatgagggttatgaaatcaaggaggcattgagagcacagatggaagtgcaaagtaaattacatttgcaagtggaggcggaaaagcacttgcagattcgccaggatgcagagaggagatacatggcgatgctcgaaagagcttggcagatgctggctgatcaatttatcagtgctacagt

SEQ ID NO: 92320 - DNA, 1290 bp, Glycine max
  Clone ID: PAT_MRT3847_5437C.1
gagcacaacctttacccaacgattccatttactgctgctactaccgcccaaaagttatcttccgcaaattccaccctttcgattcacattctctctctcaaacctgctttctcaaacacccatgtggagagggtgaggagcagaagaaacccttcaaatggaaaaactctgaaattagggttttggtttcccccaaagggagagaaggaaaaaagaaagaaggaaggagggaggggatgatgaaacggctgttgggtgggcccgggacgattagcgggttcctgttgaggttcggccaatgcgccttcggtgccgcttcgattgctattatggtcacttcctttggcttctctagctacaccgctttctgctatttaattgcatcaatgggacttcaagtgctctggagctttggactcgcatgccttgatatttatgctttgaggagaaagagagacctacaaaatccaattcttgtcagcctgtttgttgttggtgattgggtaacagcgactttgtcacttgctgccgcatgctcatcagctggaatcgtagtattatatgcaagagacctgactgtatgtgcgactagtaagcgtctcacgtgcaacaggtaccaggtttctgtagccatggcttttctcacctgggttctcacagcgatgtcatcgcatgtgatgttctggatcttggcctcagtctagcttgacgtattttctttgctagacacaagagaccaacatagatatcactgtatcaaagttagctctagtaaattttgatatatcattacgggtaattatatgatgccggtaacttccactttatcacttgccgctgcattctcatcatttgccatttttttcttattctcgagaaagcttattgcatgctcgactagtaagcatttcacatgcaaccgttaccagttttctgtggccatggcttttgtcacctgggttctcacaacaatgtcatcgcatgtgatgttctggatcttggcctcagtctagcttgacttatttcctttgctagacatatgaccaccatagatatcacagtatctttgatagctcttgtaaattttgttgtatcaatacttgtcatggcatgtgggcaaaattttttttcttgtcccttctcaaaactttgattgatttttcatttttcaatcttgccacgcctttctcagtctagatatagattctggtttaatgtaagccttggacatgattctgtaaacttccttattggagccaagaatcaaaatgttctttttggggtgggtgg

SEQ ID NO: 92321 - DNA, 966 bp, Glycine max
  Clone ID: PAT_MRT3847_54380C.1
cccacgcgttcggttcactcaaaagagcttaaagagacaagatcccggaaaggcgtgccggcgtcagagactcatcagttctcactcgtacggcgttgtgctttgctttctcaccttcttcttcatttctttcatcatcatcatcatcacaatataaaggtcgctcctttctcagttttcacccatacccagatgggtaacagcaccatctcggatctgtgtccctcctctaagtgaaaagaaaggagcgaactttatattgtgatgatgatgatgatgaaagaagggtattattatcatgtactcgaggctcatacacccccacgatgggattgtgacgcaggatgacttgcagggtgctgcttccaatctctctcacgctcacaagggagatccttgtctcgttctgacggctgatcccaagcctcgtcttcgttggactcaggacttgcatgaacggttcgttgatgcggtaacgcagcttgggggagcaagtaaagctacaccaaaagcaatcatgcggaccatgaatgtcaagggtttgactctgtttcatttgaagagtcatcttcagaaatacaggcttggtaagcaatctgggaaggatgtgggtgaaggatgcaaagatggttcatatcttttagaaagccctggcgctgataactcatctccaaagttgccaacttcagatacaaatgagggttatgaaatcaaggaggcattgagagcacagatggaagtgcaaagtaaattacatttgcaagtggaggcagagaagcacttgcagattcgccaggatgcagaaaggagatacatggccatgctcgaaagagcttgcaagatgctggctgatcaatttattggtgccacagtcatagacacagacagccaaaagtttcaaggaattggaagcaaagcacctagaggtaccttggttgatccctcttgggttttactccatgccat

SEQ ID NO: 92322 - DNA, 2110 bp, Glycine max
  Clone ID: PAT_MRT3847_54381C.1
tgggtctcccataacacaatcttgaccttttttttttttcctgtttctttcttcttcgcttatcggaggggcttcaagtttcaccataggatggtgtataggttgatacatactcatgaagggcaagaagacatgcagggtggctccaatcacgctgtgcccacagacaataaccctttataaaaaaaaaaaaaatctcggtctgttttttttctcttctttttctctctctctctcgccaatatcctttccagtcgtgccggcttaaaagagcagaaagggacaagatcccggaaaggcgtgccagcgtcagagagactcatcagttctcactcgtacggcgcttttgctttgctttgcttcatttctttcatcgtcatcataaagttcgttcctttctcagttttcacccatacccagatgagtaacagcaccatctcggatctgtgtccctcctttgagtgaaaaaggttcaatctttggtctctggggctgttggggttccgtcattgaagaagaagaagaagaagggtattattgttattataatcatgtacccgaggctcatacacccccacgatgggattgtgacgcaggatgagttgcagggtggtgctgcttccaacctctctcacgctcacaagggtgacccttgtctcgttttaacggctgatcccaagcctcgtcttcgttggactcaggacttgcatgaacgcttcgttgatgcggtcacgcagcttggtggagctagtaaagctacaccaaaagcaatcatgcggactatgaatgtcaagggtttgactctgtttcatttgaagaggcatcttcagaaatacaggcttggtaagcaatctgggaaagatgtgggcgaaggatgcaaagatggttcatatcttttagaaagccctggtgctgataacacttctccaaagttgccaactcctgatacaaatgagggttatgaaatcaaggaggcattgagagcacagatggaagtgcaaagtaaattacatttgcaagtggaggcggaaaagcacttgcagattcgccaggatgcagagaggagatacatggcgatgctcgaaagagcttgcaagatgctggctgatcaatttatcagtgctacagttatagacacagacagccaaaagttccaaggaattggaagcaaagcacctagaggtaccttggttgatcctcttggtttttactccttgccatccactgaggtatccggagtgaattgtcccggaagaagaaatactgccaagtctcccaccccaaagggccgattgttcaaccgaaagttgtttaacctcacatgagagctctggaggattggctttagaaggatctccaggcgagggaaaaaggaggatgctaggcatggactctatggcagcacctttgatctggagtgaagctaagatgagaactcaagccatcaatgtagctcaaggtaatcatcctcaaggaataactaggtatggcatgtagggatggaaggtcttcttgatggttcatcccctcataatatataaacctttgggcttcatgcattccctttttttatgggtacttgaactcttcatgtcttgtaagttagtgagacataggtggaatcaattttacccctttgtaaattcaatctactctgtggctttaaaaattgcaaaaaactagctttgactatacaaaatttgtgtgttttggtgacttctatggattccttattgttcattgattcatgctgaataaagggtgtgacgtcctttccttcaagatatagagtcattattaaactcttgaactctaaaaaaaaaaaaaaaaaaaaaaggttagttcctcatgaagagagttcatgacattgtgctttgtcccaagcttttaggattaagtactgagtagggaaggttagctcctcatgaagagagttcatgacattgtgctttgccccaagcttttaggattaagtactgagttagattattatcggttgttgtccattaagttggtgagaatcaacttatctcacatcattgtgtaaattgaaatactatatggcttaacttggcccgtcactaaatgttggcgctgaccatttatgatc

SEQ ID NO: 92323 - DNA, 392 bp, Glycine max
  unsure (1)..(392): unsure at all n locations
  Clone ID: PAT_MRT3847_54382C.1
gaagaatatgactctcattctgaacaaaataagagataatgttgccatgactgcaaaggattcaaaggggcagcctgtgatggaggaaaatccacttatgagagaaacattcttggatggccctgaaaattttgaagttgaactggacattacagagattgatggtgctgatattgacaccataatctcatcatttggaaagattgtgaaaggatttcagtcaagaaacaaacacattgcagataagtttcatgaattttcagattgtatggatgagtttatttctcctctccatgaaaaactactggaaacagagaccatgtcaacgactattgttgagaacatggaaattatgaaaattaaagcaaatagcatgggaaaattganagaac

SEQ ID NO: 92324 - DNA, 1682 bp, Glycine max
  Clone ID: PAT_MRT3847_54383C.1
ggctcgagatttttttccttttcttttctttctctctcaaatttctttcccttctgttcactcaaaagagcagaaagagacaagatcccggaaaggcgtgccggcgtcagagactcatcagttctcactcgtacggcgttgtgctttgctttctcaccttcttcttcatttctttcatcatcatcatcatcacaatataaagttcgctcctttctcagttttcacccatacccagatgggtaacagcaccatctcggatctgtgtccctcctttaagtgaaaaaggttcaatctttggtctctgaggctgttgggttttcgtcattgaagaagaagaagggtattattatcatgtactcgaggctcatacacccccacgatgggattgtgacgcaggatgacttgcagggtgctgcttccaatctctctcacgctcacaagggagatccttgtctcgttctgacggctgatcccaagcctcgtcttcgttggactcaggacttgcatgaacggttcgttgatgcggtaacgcagcttgggggagcaagtaaagctacaccaaaagcaatcatgcggaccatgaatgtcaagggtttgactctgtttcatttgaagagtcatcttcagaaatacaggcttggtaagcaatctgggaaggatgtgggtgaaggatgcaaagatggttcatatcttttagaaagccctggcgctgataactcatctccaaagttgccaacttcagatacaaatgagtaagaatttgcattaattcataaaaaaatatttttttcttctggctgatgtctcaatggatttgaattaccaaattgagtgagtgattaattttatgcctaggggttatgaaatcaaggaggcattgagagcacagatggaagtgcaaagtaaattacatttgcaagtggaggcagagaagcacttgcagattcgccaggatgcagaaaggagatacatggccatgctcgaaagagcttgcaagatgctggctgatcaatttattggtgccacagtcatagacacagacagccaaaagtttcaaggaattggaagcaaagcacctagaggtaccttggttgatcctcttggtttttactccatgccatccactgaggtggctggagtgaatgtcccagaagaagaaataccgctgagtctcccaccccaaagggctgattgttcaaccgaaagttgtttaacctcacatgagagttctggaggattggctttagaaggatctcctggcgagggaaaaaggaggatgcttggcatggactcgatggcagcacctttgatatggagtgaagctaagatgagaactcaagccatcaatgtagcccaaggtaatcttcctcaaggaataactaggtatggcatgtagggatggaaggtctacttgatggtttatcccggcatgatatataaacctttgggctttcattcattccctttttttataggtacttgaactcttcatgtcttgtaagttagtgagacataggtggaatcaattttacccctttgtaaattcaatctactctgtgactttaaaaattgcaaaaaactagctttgactatacaaaaattgtgtgctttggtgacttctatggattccttattgctcattgcatcatgctgaataaagaagatggagagtcattagtaaa

SEQ ID NO: 92325 - DNA, 351 bp, Glycine max
  unsure (1)..(351): unsure at all n locations
  Clone ID: PAT_MRT3847_54384C.1
aatccatttatacacacanggtnttntnngagagttacagtnaaagcgncagggnnatattcgannttcacgagagtatcacagtncnacgnngtcatctgccntatgcatcgtgaagcnggtntacntaagtngggnctcaagggnnataangtgnttnntggnacntnttnggtntgncnaatcnnaantcctgntcnctnaaattgnttgcnanngnnnngcattatagctacnanggtntgatnnngttcttnnaannngcatgtgggtnaacaagntcnngnncnngtaaanntttncccnangntntgcnttcagnnngnatccaanngtanatgcccanngttn

SEQ ID NO: 92326 - DNA, 496 bp, Glycine max
  Clone ID: PAT_MRT3847_54385C.1
aatcaatatttaaaataacagaaaagaaaacgcacgtgacaattttgtttcctatctatgcaaagaataaatcatctgtgttttaactttattgttataatattatagcattcttattagccataaggaatcctagaaaaggggaatggaaatattctatgttttgtcacatccatttcttgaaaattttttagaattagcttctttgtgtcttgatcttttctgggtgttaaattattctgaatagatagatatatttacaaccatccgtgaatcttttttcttcatttttgttaacaaagaatattcaaatttttaatccttctgtaattttctagacatattttatttacccttttctaattttgattaatccgccaagttctttatgccattttgcaagaaacctgtgcaaacttacaaatcaatttctatattgaggtcagaagttaattagaaagatatctgcgttgaatggctattgatgacacctatt

SEQ ID NO: 92327 - DNA, 489 bp, Glycine max
  unsure (1)..(489): unsure at all n locations
  Clone ID: PAT_MRT3847_54386C.1
ggaattcgggtccggggacaatctcgacccacgcgtccgttcctccaagtcgttgctgttctcacttgtctccaattgcaatcggtacgttattttcttttccctcttcgctcttaccctacattccattccactcggtttttctgcgttcaattggattctcagattaaccgctgcttgctcgaacattcatttacttgtaactactaactaaagacttcaagctggcccacttaatttaagttgcaagggaggttgggatttattatggaatcctgccattaaaatagtaatgttttgtttttggggaatttcttggttggattttaagttgcattgattttgtgacaagttagcgataatttgttgtgagtgtggtttgtagtggtgtgggaggggggagantagtaggagttattttgntnngatngntggttgcctcagtctcgtggcggaactgtttggattggtcttcagactgtgttggtg

SEQ ID NO: 92328 - DNA, 798 bp, Glycine max
  unsure (1)..(798): unsure at all n locations
  Clone ID: PAT_MRT3847_54387C.1
ccacgcgtccgcacaacgacccacgcgtccgctcgtcgtttccttgttatacactttgcctcgcccctgtctctctcttaactccggtttctttcttctcctgaaaccattcttaaacattgtcaccaaagcaaccaaacccaaccttaatttcccactaaacaaacctattcatcttcgaaatctgggatcttattcatatcacaatgggtctctgcacttcaaagcctcgtgcaaaaaacgcaaaccccactaactcttcttctctaaattcccacacccacttcacagaccccaatgccgatgaaaatttacgaaaaaaccacactcccactcccaaaaaatcaccccttttcccgttctacactccgagcccggcccaccaccttttctccggcaagtctccggcgccggcgaatccccgacggttcttcaggccgccgtcgccggcgaagcacatccgggccgtgctggcccggcgccacggctcggtgaagcccaacgaggccaccatcccggaagatgaagtggttactctggacaagaacttcggattctcgaaacagttcgagcacaagtttgaggttggggacgaggttggaagaggacactttggttatacttgtgctgcaaaggtgcttaagggtaatctcaaaggccaacacgtcgctggcaaagtcatccccaaagccaagatgaccactgcaattgcgattgaggatgtgaggaggggaggtgaanatattngagggctntgactggacataagaatctgattcagttccatgatgcatatga

SEQ ID NO: 92329 - DNA, 461 bp, Glycine max
  Clone ID: PAT_MRT3847_54388C.1
acattcaaatggttcttagaaaaccatagcgttaatagtttcttagtgggagtaagcaccgaatacctttatacccaagtcggtgcgcataattatagatttcagataaaaagtcaggcactcaatactatatcctataagctaaagttgaaagggagggtggtcaccaacaaatcccattttactgtcttacaagctatgattctgtccagcgagagcataccactaatttgaaaagactggagcagtttacccataatgttcaccccagaactagcagcacggtccccattagactgccatgtttccctctagagcctgtttttatgaacgaccgcaaccctaggaaaaacgcacattctgtgcaaaaaacagattcccattcaacacccaaaaggtcccttcaggaagctactgtgtaaagcctggacagccccacatagttagctctactacattat

SEQ ID NO: 92330 - DNA, 215 bp, Glycine max
  Clone ID: PAT_MRT3847_54389C.1
caaaattaaaccacccaagaaaggttccccaggggaaaaataggccaaaagttatgggacctaaaataccagtaaaaacacaccaaataaaaaagcggaaatgcaaaaagcacatgaaatactatatgaaaaagacctatttccacaaagaaaaatagaaccacaaatgcctaaagcaacagtttcaaaaacagtatcggaaggcttgttttcag

SEQ ID NO: 92331 - DNA, 952 bp, Glycine max
  Clone ID: PAT_MRT3847_5438C.1
ccacgcgtccgcaaaagtgatcttccgcaaaaactccatccttttcaattcccattctctctctctctctaaacctgctctcacacatcaaatccaaccacccacccatgtgaagagggtgaggagcagaagaaaaacccttctaatggaaaaactctgaaattagggtttggtttccccaaagggagagaagaagaaaaaagaaggaaggagggaggggatgatgaagcggctgttgggtgggcccgggacgattagcgggttcctgttgaggtttgggcaatgcgcatttggtgccgcttcgattgctattatggtcacttcctttggcttctctagctacaccgctttctgctatttaattgcatcaatgggacttcaagtgctctggagctttggacttgcatgtcttgatatttatgctttgaggagaaagagagacctacaaaatcctattcttgtcagcctgtttgttgtgggtgattgggtaacagcgactttatcacttgccgctgcatgctcatcagcaggaattgtagtattatacacaagagacctgactgcatgcgcgactagtaagcatctcacatgcaacagataccagatttctgtggccatggcttttgtcacctgggttctcacagcaatgtcatcgcatgtgatgttctggatcttggcctcagtctagcttgacttatttcctttgctagacatatgaccaccatagatatcacagtatctttgatagctcttgtaaattttgttgtatcaatacttgtcatggcatgtgggcaaaattttctctcttgtcccttctcaaaactttgattgatttttcatttttcaatcttgccacgcctttctcagtctagatatagattctggtttaatgtaagccttggacatgattctgtaaacttccttatgtagccaagaatcaagatgttctctt

SEQ ID NO: 92332 - DNA, 466 bp, Glycine max
  Clone ID: PAT_MRT3847_54390C.1
attcacattcacgatcatgtctaaaatgttgaagaaggtcaatgcctgcaaccctaaactctggctcctcatcggaataggactcgctggcgcggtcgttgttgtggccgagacccggcggcggcgacaccggaacctccccaaagaggacttcggtgcattcgttgagcgtatcgaacttctccccattcctcagcccaaccaaacgcaaacgctctctgctcttaccttcgccatcaaagacatattcgatgtgaaagggtatgtgacggggttcggaaaccctcagtggaagaagacgcacggcgaggccgggaagactgcgattgtcatcaccgctctcctcagcgacggtgccacttgtgttggcaagactgttatggatgaattctcttttgggatttctggtgagaacaagttttatggaacaccaaccaatcctcaaatgccatcttctatccctgga

SEQ ID NO: 92333 - DNA, 486 bp, Glycine max
  Clone ID: PAT_MRT3847_54391C.1
aaatgctaaagtagttttatctttagtaagtaatttggtaactttacttataaattccataaaccatgacatgtaaaaactcttgctgcagcttgaaaatttctagattttaaaacttgatcttcatctatatattgatatcatcttcttctagagtagacgtatgaatgtcatatcccttcttctgggattggaacatttaccgtataacatcggattcatcaccttttctaaaaatctgtgagtggcgatccattttcatcagggtaaacctggcaatttctttcttcaccaaagctgacagttctgaccttcaactcccctctattagtagttaactcatctaatatttccgcattgcctatttcctttgatccaactaggggtgattccacttccctgaaagatttattgaaacttagtgctggagcaccaactatttcttcatattcagccgcgtcaagttccctaagatggtgaggcttg

SEQ ID NO: 92334 - DNA, 441 bp, Glycine max
  unsure (1)..(441): unsure at all n locations
  Clone ID: PAT_MRT3847_54392C.1
cccattatattctcttacactttntatttcccctcgtgggttttttccaaaaaagcttttaccaccttttttttaacaaaaaaccttcattatatttccctcttcaacatatccatcaccaaataccccatcatcagcatatacatacattattcttcaaaccaattaatcctcaatataccttctcctcccccctttttaaacaaccaccgaataaatattccgccccccaagattaaaccaatttcttatttctatcatatatccatctgggccataaaagaacaatttatctacttcaattcccccttcttccacaactgcttacacatcctcaatcttcattccatccagtttnnnnattataactttcatttcccaccattcaaaccacttatattttcttttcccttgatcccttttttttttaccggaaccttt

SEQ ID NO: 92335 - DNA, 373 bp, Glycine max
  unsure (1)..(373): unsure at all n locations
  Clone ID: PAT_MRT3847_54393C.1
cgagcctattttttttttcgccaggnccgggcaatcttcgaaatatcatcgtgaagggcaaagagggctttctgctgacggaactcgccccacaactgctttacagaatgattgaatgatgctatttcccctatcatcatctctggagaggctatactgtggtatttttgccctccgattaactgtatttaaactcttactaggcataaattatccgtgggggtatttaaaccaaaattattatttgccgctgtatgtggtcgggatcttgtcaatttggacctttaaatgactttgtcttaattatttaaaaaaaaaaacagaataacaataaacgcctcctttctaacaggaaccacataactaaaccccc

SEQ ID NO: 92336 - DNA, 392 bp, Glycine max
  unsure (1)..(392): unsure at all n locations
  Clone ID: PAT_MRT3847_54394C.1
ccggggcggcgccacgcgtncgacttcttaaatttcattaccaaaccctattgttttctacctgtttgctcaaaataaaaacggcgggcactctctaaagctcactatggctcttanacatttacctattgcttcatcacaactcatatcctcttcttttcccatggcaacattctaaacttttacataaagaccactattcctatggcaagcttttaaatgaaaagccagcaaaaacaacaccttcaaagatatcattaaaaataaaaatttaaaaggctctttccaaaatctatacctataaataaacctatcacaaaattaattaaacctattcctataccccactataaccctataccaaaaccaaattccttggtaaagcctatttc

SEQ ID NO: 92337 - DNA, 229 bp, Glycine max
  unsure (1)..(229): unsure at all n locations
  Clone ID: PAT_MRT3847_54395C.1
ggttgttttcccgtgtgcttctcgccatttttccatcttatcctatcactttcttttaacgacacgtcatcgattccttcacgtgttgcgtgctcaatggattcgctactactaggtttcttacctgccaagcaccatatatcttcttctcctttttaatatgcctgtgtttttagtgtattatcaacaaccaacacttgcctgttttaanaaaaaaaaaaaaaaaaaa

SEQ ID NO: 92338 - DNA, 692 bp, Glycine max
  unsure (1)..(692): unsure at all n locations
  Clone ID: PAT_MRT3847_54396C.1
gttggggagtttccccagccaggtgtcttttggtggtggttctacagatggaaatatctcacagtggactattgatgaatttattggcttaaacgagttcagtcagcattatgattacatggaaggatcatcaagggtatgttcatatttgttgaaatattccctcttaggcaagtatcccctgatcattggttttgtagagtttctatcatttaatgctttattttttttactgggttagtattccagagttcagattcatcttttgtcagagattgcaggctgtatggtagtgccccctcactcatgcacacacacacacacacccacataccagagaaaggacaggtatggggacgatcctgtcttctaagggtatatgccctgttaacatgttggtcacatgactaaacaactgatgaatctagtacgggttttataaatatgttgaatatttgtggtcagaaaaggtgttacatgagtagattccaaagttcaaaaagtggaatttgacagattggttgattgaagtgcttgtgcttggnttctttctctcccttatttgnaagcccattttaccaaactaaatattgcaagctgtgaagattaataaatcanaactttaatggtgtcaatgaattatgtttctaggacgttaggggaatatcatcctcaatggtgatccatgatct

SEQ ID NO: 92339 - DNA, 471 bp, Glycine max
  Clone ID: PAT_MRT3847_54397C.1
aaaaaccgggccggccgacgcggacggtgccttttaccattttcacaacaatttgctagcatcttaaatttagatcatatgtgagggaatttgtgaatggtacgtgacagactggctatttctaaccattagcagtttaagacaatttgtgaaatgtttgctatttcgattgattgaaactatagggcagcgtgtttgttgtgacggactagctatttttcactgttgacattttaataaaataaataacatttctgaattgtttgctattttgattgctatatatttctcactatcagggaatacgtttataacagctcaaacatattgatcaaccaattatatatgttggatggcctaataaataagcattttttattttgtcattgtattatttttttttagcttttcatttataattttgagtccttgtcatgatattcctataaaatatttataggaattttagtc

SEQ ID NO: 92340 - DNA, 298 bp, Glycine max
  Clone ID: PAT_MRT3847_54398C.1
tacggctgcgaggacgacagaaggggatgtctaatttattcagagtgaagtgagtgttgctgcttggattttggtgatgtgtctaagttagtgagagggtccagaaaatagggaagtagggtaggataaagctctgatgcttggactcgcctattccccactatacccgtgtcgacaccacacgatttgggtgttgacacgaaatatgggtcggacccgggggaagaaagagggcgctgcaagagagttgaaatatttttccacttacatatcttttaacttaacattttaaatcttg

SEQ ID NO: 92341 - DNA, 217 bp, Glycine max
  Clone ID: PAT_MRT3847_54399C.1
gtcaaagtcagcactctgcatcaggtgacaaaattcggatatcccgctgtacttcgccattgggtggcagccgctacactgtgaactacaccaagtatcggcatgttgacaaatggccaatacaaatactcaatggggcctcatcggaggaacgtgtagaggccaaatgatggcacgttgctacatacaagccgaatgaagtgcatggcaatatgac

SEQ ID NO: 92342 - DNA, 184 bp, Glycine max
  Clone ID: PAT_MRT3847_5439C.1
tcgttctgtcgttctggggttcctttcttctgaataaatataacacttgctaagcacaacttaggtaaaagcccgttcaaggcatacaactggcacaaatcctgaatgggaagatggccttacctttggtatataaatgataaggcaaatattctacccgggatttaaaacgaccaactgtatt

SEQ ID NO: 92343 - DNA, 1463 bp, Glycine max
  Clone ID: PAT_MRT3847_543C.1
gtctaaagcaaccacttgattacacacttgtatcgaacagtgcatctatggagattgacgaagatggtcccatctatggttggctaccaacagcacctcaaggttataaagctgtatgctatgttgtcaccacaacacccactaagccttcacttgacaaaatcaggtgtgctaggttagacctcactgaccaatgtgaggcaaattcattcatttggggttcagacaacttcaattattatgattgtagaccaagcaatagaggaactcatgcacctggtgttagagtaggcacctttgttgcacaaaatgggagtcctaaccctccatctattgtttgtttgagaaacaccaacgctataccaaaatacatgcctaatctaccacaaatcaaggcaattctccaagtttactctccagtcatgtccttgcaacctgatgaagaattctttccatcttctgtggagtggtttttctccaatggagcacttctatataagaaaggacaagagtcaaagcctgtgtcaatatcaccaaatggggctaaccttcctcaggatcctaacattgatggtgcctattgggtggaccttcctgctgattcaaccaacaaagagagggtcaagaaaggagacttgaaaagtgccataagctatgtgcatgtgaagccaatgcttggagggaccttcactgacattgcaatgtgggtcttctacccattcaatggaccagctagagccaaagttgagttcttaaccgttaacttggggaagataggtgaacatgttggtgactgggagcatgtgacactaagggtgagcaacttcaatggtgaactaaagcatgtctatttctctcaacacagcaagggcgcatgggttgattcatctcagattgagttccaaagtggtgcaacaaaccattatactattcttccttgcatggccatgcatcatacccacatgctggccttaatctgcaagggacagataacataggcataaggaatgacactgccaaaggtgacaaaatgatggatatgggagcatttgaattggtttctgctgagtatttgggttatgcagttatagagcctccttggctgaactatttcagggaatggggtcctaaaattgattatagcatagatgttgagttgaagaagattgagaagttcttgcctaagaatctaaaagatgctttggagaagattatgaggagtttgccaagtgaggtgctgggagaggaaggacccacaggtccaaaagtcaagaataattggattggagatgaagtttaattgaagattgtacacttcagttacattgattctcacgtataataaagtgtgcatgtgcatattgtgtgcagaacagaactcaatgtcctattcaattaattagttaggagttatatatcattttgttacaatttaatcaaaatagcttctaacagcttgttac

SEQ ID NO: 92344 - DNA, 422 bp, Glycine max
  Clone ID: PAT_MRT3847_54400C.1
aatccataactctttcacatcaaaagaagctggcaaaatggtactctctgttgataactctgcctcaaggaagaaaaaagttgctgcttatcgctattttgtgcgcaaatccagcacaccaacaccatctgaggtgcaattaagccctaaatgattgtaggaaccatatatgatctttatatgctttgaagttaattataagtcttaactctcttcggttatgaacttatgattctgaactttgtttgagccaacttaaaggtacttagtactattgtattagtgtaatgtaaaaaaatgaggggaaaaaacgtgctatagcatggtgatttggtacatatgaaaaagcaagtggctttgcttattataatacattttactatttgggcatgatgtggtgaattggtgattacttttgtcaa

SEQ ID NO: 92345 - DNA, 222 bp, Glycine max
  Clone ID: PAT_MRT3847_54401C.1
ggtttacggacaacaacagcactcgaaatataagggaagcgaacgaccactcgatatcacagtactgggaacccactacaagctctttagatcatagaaaaaaccatgtattaaatgctgctaactctataccaccctctccaacacattttttctgcggggggaacaaaacacaggtggcccaacccaaaaaaataaccccaaaaaacaaccccaaaaaca

SEQ ID NO: 92346 - DNA, 489 bp, Glycine max
  Clone ID: PAT_MRT3847_54402C.1
tttatcgtttttctttagctaggttaaatgcatggtatatatgatgacgcagaaaattcacatgacttcggcagtaaaccaaaattaatggttgaaggaggctcaattgtgttttggaaatttaaattttagtgtatatatcttaacattcaatattgcttatgatgccactaacgcctcttctgttttcatcatccagtgcagaagcctgaaaatcttacttctagacaatttagatgtttaatttctttgttttagaattgaagcagcaccaatcaagcatgattcaacttccgttatgttgaccaatgtctattacactgaacaaccataaattatataacttacctgatgggttattagacttggccattttaaaattgtatgttgctgtatgacagttgtcttcctctcgtatcatccatcacatttttgttcttgaaaattgtctgcataaataaatattagcgagcataaagaccataattt

SEQ ID NO: 92347 - DNA, 531 bp, Glycine max
  Clone ID: PAT_MRT3847_54403C.1
ggcacaatctttcttgcgtttgctctgcttctttagcctttgctgagaattcttcaaatacctctcgctcgagcatcttccaatcttaaacctctcccgctttagtaggttaagcgaactctccttatccttcttactcttaattgtttagtcgagtcaggagtcgttcagagagcgatttgcctgagaaagcaggcctaattggatagtccatgcgagaagtccccaggaaagcaggggtttattactacaataaaaagatgggcattagaaaagcagaaggagagcgtagaagtacttcattcccctggaagatgacagacacatatcgagattggcacgaaagggttcactctaacttttggggtatcggaattcggacttacaccggcgagactccctgggttatgggatgaaagcagtcataccaggtgaattggaacctcccttaggggcgccctggaatccgaaataacgaaagcagaatggacaaggagcagggttcgaagaacgagaagagctactcaaaaa

SEQ ID NO: 92348 - DNA, 247 bp, Glycine max
  Clone ID: PAT_MRT3847_54404C.1
gcttgtagcagttgaaaatccaggttctgataatttaaaatcaatggtgatacctccaccaacagtcagagatcgtgtgctgaaagaactgtttattgaggggttccaagtaacataattgagaagctaatcaatatccaacgcagtttctttggggaggtgggctggaacaaaaaaggatagcgtgggtcaattgggagacaatatgtctcccaaaagctttaggcaggttaggcataaaagatct

SEQ ID NO: 92349 - DNA, 421 bp, Glycine max
  unsure (1)..(421): unsure at all n locations
  Clone ID: PAT_MRT3847_54405C.1
ttgtgttctaacgaaaattttttatagagaaccatgcaaaaaacctaaccggaacaattccttggaaaagggaaaaataagaaacggggtccggggaccaaaatacagaaatcacacgcgcaatggatggcgtaacactgaacacagctagcaggagagccccaactatttttatacccctccccggataaactcgccaggcagaaaaaccaacactttaagaggacggggataacaacaccataacccggggctggggccaccaccacacctatcttttaatcactccaaaggggggggggggggggggggggatgaacccacatcctcttntctcacccaaaaccggaactacaaccctcacctgacttacgggggggggggggggcgcaaccataccaccactccctgctggaccaaa

SEQ ID NO: 92350 - DNA, 609 bp, Glycine max
  Clone ID: PAT_MRT3847_54406C.1
gttcgaaaagatgatccggaactggaagtagccctctacagcgtcatgagccgcgagctgatccgcgagcaagcgatggtcagcatgcttggttcattatcagccgaggcccgcgtagcgcgctttctggtcaacctgtcggaacgttttgccgaaatgggctattccggcaagcagttcaacctgcgcatgactcgtcatgaaatcggcagttatctgggtttaacgcttgaaaccgtgagccgcacgctatccgcgttcaacgaaatgggcctgatctcggtcgagcagcgcgccattgacatcaaggatttgaatgccttgaagacactgcgccgcctgccgccatcgcgtgcacgcgaaaagcagaaggcagtcaagcaggtggcggagcctgttggacgaggagacttggcggcagcataggcgattgccgcgtgacggcaatcaccctgataaagacagacgcatcgctaccatgcgctcctgattgaaacgataacgaagctgcatatactggattttgtttggccgtttgcggcaagtacggcattgctgcaagtgctgacttgcggcttcgaaaaacagattccaccagttcctcatctc

SEQ ID NO: 92351 - DNA, 2218 bp, Glycine max
  Clone ID: PAT_MRT3847_54407C.1
aaatcccgggtcgccccacgcgtccgcggcggggtcgagtgaaagagaaaatccgagactctgattttgagagtcgagtgagtgagtgctgcttcctctggagcagaagagagtgaaagagaatatctgagactctgattctgagagtcgagacgagtgagtgagtgctgcttcttcttctgaatcaaatcattcatcactctctggttctgatttttctgacaccaaaatggtgaatcctcgaattccacgttcaaggatcccaactttcacacttttcacttctgctatctccatcgttctgtgcattttcttcgttctctcttttctcttcactgcccattcttattcctcccatcaacaccacaacgcgggttctgacggtggtgttgcacatggatttgagtcgattaggagatccgttctagctctgaaaacagatcctctcaagcctcggttggaccagattcgtaaactaaccgatgatcatcgctctttggctctcgtgtattcttcctatgcacgcaagctcaagcttgagagctcaaagcttgttaggatttttgcggagctatcgcgcaacttctcggatctaatgaacaaaccacaatacaggacccttttcagcaatgatgcatcccctgctgatgaatcagcgcttcgccaattggagaaggaagtgaaggagcgcattaagaccacacgccaggtgattggtgatgccaaggagtcctttgataaccagctcaagattcagaagttgaaggatacaatcttcgccgtgaatgagcagttaaccaaggcaaagaagcagggtgctttctccagcctcattgctgccaagtcgattccaaagagcttgcattgtctctcaatgaggttgatggaagagaggattgcccatcctgagaagtattcaactgaggggaagccggttcctccagaagttgaagatcctaacctgtaccactatgccttgttctctgataatgttgttgccgcatctgttgtggtcaattcagcaacaaagaatgcaaaggagccgtggaagcatgtgtttcatgttgtgaccgataagatgaaccttggagcaatgcaagtgatgtttaagttgaaaaattatcatggtgcacacattgaggttaaggctgtggaggattacaagttcctgaattcatcttatgtgccagtcctaaaacaattggagtctgctaaccttcagagattttacttcgagaacaagcttgaaaatgctacaaaggacacaaataatatgaagttcaggaaccccaaatatttgtcaatattgaaccatttgaggttctacttgccagaaatgtatccaaagctgcataaaattttgtttttggatgatgacatagtggttcagaaggacctaactgggctatggaagattgatatggatggcaaggtgaatggagctgtagaaacatgttttgggtcattccatagatatgcacagtacatgaatttctctcaccccttgattaaagcaaagtttaatccaaaggcttgtgcatgggcttatggaatgaatttctttgatttggatgcttggagaagggaaaaatgcacagaagaatatcattactggcagaatctgaatgagaaccggacattatggaaattagggacattgccaccaggtctaatcacatactacgcaacaacaaagccactggacaagtcatggcatgttctgggacttggctataacccaagcatcagcatggatgagattaacaatgcagcagttgtgcacttcaatggcaatatgaaaccatggcttgacattgcaatgactcagttcaagccactttggacaaagtatgttgactatgaattagatttcgttcaggcctgcaattttggtatctaaatggtcaagtttcttgtcacttggtgatgctgtgtcaggtgccgctgcagtttatttgctgtttagttttgatacataatgcttatacgtttaacagagttccctgctggtgcaagaaaaaatcctgcttctttcaattgtaaaatactatagtatagttattctctcatgtcttcctcttatttattcataacgtttaggcaataatgttatttaaagatgtggtttaatgctgaacaatattactgaattaagtcttgtgcctttcactttggctttagctgtttatttatgtttcattaagaactttcacatcgt

SEQ ID NO: 92352 - DNA, 617 bp, Glycine max
  Clone ID: PAT_MRT3847_54408C.1
ttttttttttttttttttttttttttttttttttttttttttttttttttttttttttttttttttttttttttttttttttttttttttggggggcccccaccaaaaaaaaaaaaacccttttttttttttttttaaaaaaaaaaagggggggggcaaaaccccgaatttttttcccgggaaaggtggccccaattgcccttttgggggaacaatttcccaaaagggggaaaaaccaaagcccgtggggggtactttaaaggaaaaaaccccccccccaaaaagggggttgaggggccaatttttcccccaatttttttttattgggcccccccccgggggggacccctaaaagggggggggccaaaaatcccctccccccccttagtttgggaaaaaaacccggttaaaaaaaccgaaccccttttttgggaaactgatccccccttgttttttaaaatccccccttggaaagggaaaaggacaaaatccgcgggggtttttgggaattttaaaaaaacagggcctggggagggcaaaagggggggaggggggggtgccccccccccctttttttttgggaaaaccgttttttggggaacaaaaattgggggggg

SEQ ID NO: 92353 - DNA, 1001 bp, Glycine max
  unsure (1)..(1001): unsure at all n locations
  Clone ID: PAT_MRT3847_54409C.1
gggccggaattcccggctcgacccacgcgtccgagaatattctagactctgattctgagagtcgagacgagtgagtgagtgctgcttcttcttctgaatcaaatcattcatcactctctggttctgatttttctgacaccaaaatggtgaatcctcgaattccacgttcaaggatcccaactttcacacttttcacttctgctatctccatcgttctgtgcattttcttcgttctctcttttctcttcactgcccattcttattcctcccatcaacaccacaacgcggttcaaatgcgtcggatctgattctctcctgatccagtgagggtttgattcgtgcttattttcatggcaatgtttactagaaatggaaaaagattgtgttttctattctgggaaagtacagagatttgattaagccagggttctgacggtggtgttgcacgtggatttgagtcgattaggagatccgtcctagctctgaaaacagatcctctcaagcctcggttggaccagattcgttaactaaccgatgatcatcgctctttggctctcgtgtnttcttcctatgcacgcaagctncagcttgagagctcaaagcttgttaggattttcgcagagctatcacgcaacttctcggatctaatgaacaagccgcagtacaggactcttttcagcaatgatgcatcccctgttgatgaatcagcgcttcgccaattggagaaggaagtgaaggagcgcattaagaccacccgccaggtgattggtgatgccaaggagtcctttgataaccagctcaagattcaaaagttgaaggatacaatcttcgctgtgaatgagcagttaaccaaggcgaagaagcagggtgcttgatggaagagaggattgcccatcctgaaaagtattcaactgaggggaagccggttcctccagaagttgaagatcctaacctgtaccactatgccttgttctctgataatgttgttgccgcatctgttg

SEQ ID NO: 92354 - DNA, 533 bp, Glycine max
  unsure (1)..(533): unsure at all n locations
  Clone ID: PAT_MRT3847_5440C.1
gaanggggcgagagagagtgttcaatgagacacttgaacgaacccagtttgcttggacagccataatatctgcctatgcccgccatggaggctttgagtcagtgatgagtttgtatacagaaatggagagggaaggaatcaatcctgactccatcactttcctttctgttttggctgcatgttgtagaaagggcatggttgatgccggccatagagtctttgactctatggtgaagaaacattcaattgagccaacctctgagcattattctattatggtggacatgttgggccgtgttggacgactagatgaggcagaagagttgatgcaccagattccaggagggcctggattggcagtgttgcaaagtttgcttgggtcttgtagattacatgggaatatggagatggctgagaaggttgttggtagattgatagaaatggatcctgcaagttcaggtccatatgtgttaatggcaaacttgtatgctgagaaaggatagtgggagacagttgctgaagtgcgaagaggg

SEQ ID NO: 92355 - DNA, 728 bp, Glycine max
  Clone ID: PAT_MRT3847_54410C.1
cctagcatgatggtagaggctgcatattagaaactagaatagaaccaatgtagctcatatatgttaatagctcatacatgtatggtctcattcatctattcatttcatatccaatcatttgtaactagtcatgttgagcctatcatatcatgtttaacgcgacatgctcatgctactgcagaatgagaaccggacattatggaaattagggacattgcccccgggtctaatcacatactacgcaacaacaaagccactggataagtcatggcatgttctgggacttggctataacccaagcatcagcatggatgagattaacaatgcagcagtggtgcacttcaatggcaacatgaaaccatggcttgacattgcaatggctcagttcaagccactttggacaaagtatgttgactatgaattagatttcgttcaggcctgcaattttggtatctaaatggtcaagtttcttctcacatggtgatgctgtgttaggtgccacagcagtttatttgctgtttagttttgatacataatgcttatacgtttaacagagttccctgctggtgcaggaaaaaatcctgcttctttcaattgtaaaataatactttagtacagctattctcgtatgtcttcctcttatttattcataacgtttagacaataatgttatcttaaagacgtggtttaatcctgaacaatattactgaattaagtattgtaccttt

SEQ ID NO: 92356 - DNA, 1389 bp, Glycine max
  Clone ID: PAT_MRT3847_54411C.1
tacggctgcgagaagacgacagaaggggacctcaacattctcacattccatcaccaaagcagtgtagttttccgttgtcattgccatggctttcaaaaaagtactattccaatatttcactctggctttgtgtcttgtcttcgcattttgtgcttttgagggcaatgctcgcactctcgaagatgctccaatgcgtgagaggcatgagcagtggatggctatacatggaaaagtctacacgcactcttatgagaaagagcagaaataccagacattcaaagaaaacgtgcaacgtatagaagcctttaaccatgcgggaaacaaaccttacaagctaggcatcaaccattttgctgatctcacaaacgaggaattcaaagccataaatagattcaagggtcatgtgtgctccaaaataacacggacacccacatttaggtatgaaaatatgacagcagtgccagctacattggattggagacaggaaggagctgtcacacccatcaaggaccaaggccaatgtggatgttgctgggcattttctgctgtggcagcaacagaaggaatcaccaagctgagtactggcaaattgatttctttatcagaacaagagcttgttgattgtgacacaaagggtgtggaccaaggttgtgaagggggtcttatggacgatgccttcaaattcatcttgcaaaacaaaggactcgccgcagaagccatttacccttatgagggtgttgatggaacatgcaatgcaaaagcagaaggtaaccatgcaactagcattaaggggtacgaggatgtccctgctaacagtgagagtgcactgctcaaagccgttgctaaccaaccagtttctgtggctattgaagctagcggttttgagtttcaattttattcaggtggtgtgttcactggatcatgtggcactaacttggatcatggtgtcactgctgtggggtatggagtaagtgatgatggaactaagtattggttggttaagaattcatggggagtaaagtggggtgataaaggatacattaggatgcaaagagatgttgctgctaaagaaggcttgtgtggcatagcaatgttggcttcttaccccaatgcataattgctatactttgttactactatatatttcatgtgcaattaagtacaaaccatcagaagtgtgttattgctgatatttataggtttgaagaaattacaagtggtagattcaaaccttgtaaattacaagaagtgatagattcaaaaccttgtatcacaattgttgaaaaatatcatgtataattatacttgtttattatatctatctatatcaaggaaattaaatattaaaaaaaaaaaaaaaagggcggccgctcgcgatcttagaactag

SEQ ID NO: 92357 - DNA, 529 bp, Glycine max
  Clone ID: PAT_MRT3847_54412C.1
ttgtttcgtggggccggggtcaatttcccttgttaaatttcctcactaccggtccacaataccaaaaaaactacgaaaccaaactcttatttctcttcctcaccaaacacttcatcaactctctctctctctctctgcaaacaatcatgccaggtttcttattcttcctcttttgcttcttcttggcatcatcacaacacatcgcaatttcattctccacagacaccttaagctcaacacaaattcttctaaccaaccaaaccctcgtatcaccaagccacatcttcgctctgggcttctttccggggaccaattccacatggtacttaggcgcatggtacaacaacatcaccgacgacaaaaccgtagtatgggtggccaatagagagaaccctctcgagaattcagtggttctctaaccatcggagaaaacggaaacatcgtcctcagaaatccatcaaagaagaaccccgtttggtccttcgacgcaaccaaagccaacaaccccgtgcttcagctcttggacaca

SEQ ID NO: 92358 - DNA, 362 bp, Glycine max
  Clone ID: PAT_MRT3847_54413C.1
aaacgatgggtgggaaaaaaatctaaagcggccttgaaaaggaaaaacctttccccccaacaaaaaaaccattttttttcttttaaccggaccccccggggtaacccttcccaaacattacctccgggatcttggactaaaaggacaaaacccccgccccggaaaccctttgggggtttttggccccccttcccttaaacaaggacttgtctccctttttggggatgttttgggaacccccgtgaaactttcttttttgggggggacccgcccctcccgggggtttttttttttttcccccgttggggcccaaggggtaaaaaaaaaaacccgcccccggggtttctcccctccccaccaaa

SEQ ID NO: 92359 - DNA, 406 bp, Glycine max
  Clone ID: PAT_MRT3847_54414C.1
aacctaaagccacggcctctctttgggacgaattaggaagagaaccgccaacaaagcctcataaaaagcaaaggtccactaattaatccgacagccaaaggaaattggcccaatagggttagaccacacccgccatcccttttacaagagtagatcactggattcgacaggcgtgccaaagaaaaaaagaaaccattctatgactcaccactgacttttgggaactgaagcctgactttgggaagcctgccttgaagccttccaggggagaggcgggggggaaactgaacgaccggtgagcgaacaaccttcttaggcagtgcgcatgagctgccaggaattggggagacccctaggcctaggggacctaggaggaggccagctgagtttggggggggccaaccct

SEQ ID NO: 92360 - DNA, 114 bp, Glycine max
  Clone ID: PAT_MRT3847_54415C.1
ttgttttttttacataagaagccattctaaatataactgcaagattgggactcaaacaagacaaaaggttttgaatttaatgcccgcctatggcctaacgtagataattgaact

SEQ ID NO: 92361 - DNA, 254 bp, Glycine max
  unsure (1)..(254): unsure at all n locations
  Clone ID: PAT_MRT3847_54416C.1
tnngaggngagtcgatcgtcagtacagtgtagngactacggaccgatagtggancaggantcaagacaggcgtacatggacaacgcactcgncanatagnanctgattggagtccggttgatctggcttcactacgtctcaggctcnactttgcgagcttgacccaatantaataaagatgataacagggcgtcttcatttacatagcgggccagttggtgangaccacgctgatgttatgcaatggagccaca

SEQ ID NO: 92362 - DNA, 1770 bp, Glycine max
  Clone ID: PAT_MRT3847_54417C.1
ccacgcgtccgtacgtgtctctgcaattcggatgatatcaaggactaaaaaccaccaatcaaaaaccatgaatgctaagagagaaaagggagagtgctttgaaaatgggaaagtttagttcaagttacagtacttctgattttgttcactttggagttctacttccctttcttctgttatcacagttgttctttcaacttgcatggtgtggctccatagtaaagttccttcctggattagagggaccccttccttttgttcttgaaaccgggtatgtgggagtgggtgaatcagaggatgtgcaggcattctactacttcattgagtcagagaacaatccaaaggaggatcctctcatgctttggctcactggtggccctggttgctcagctttctctggccttgtcattgaaataggtccaattgcatttaaaaatgaggaatacaatgggagcctgcccaatttggtcttgaggccacactcatggacaaaggttagtagcattatatttgtagacttgcctgtttccacgggcttcacttatgccacaacagagtttgctactcaacgaagcgactggatacaagttcaccaagtccatcaatttcttaggaagtggttgattgaacatccaaattttttgtcaactgatgtttacattggtggcgattcatactctggcattactattccagcaattgttcaagaaatttctctaggaaatgaaaaagggctccaaccatggataaatctccagggatacctgctggggaatccagcaacaactcgaaggcatgaaaactatcgaatatcctttgctcatggaatgggacttatttctgatgaactatacaggtcactgcaaaaaaattgtaaaggagagtacataaatgtagacaccaaaaatgtattatgttctagaaatatcgagacattcaatgaggttacatcaggacttagtatggtcaatattttggacccgtcatgtgattggcttgatactgaaacatcttggaggagatctctacttaagaaatatccgagaaagaatttccttaatactcatctcaaattgccatccttaaactgtcggagttatgcatacttcctctgcggttattgggccaatgatgatagtgttcgcagtgcactgcatatccgtaagggaactataggaaaatggcgtcgctgtaccttcaatatacctaacaaggaggacatctcaagcagctatgagtatcatgtaaatctcagtagaaaaggctatcgttcactgatatacagcggggatcatgacatgaaaattcctttcttggaaactcaagcatggataagctctttgaactattccattgtggatgattggaggcaatggcatacagatggccaagttgcaggatacacaaggacttactccaatcgtatgacatttgccaccgtgaagggaggaggccacacagctccggagtacaagcctgaagaatgcttggccatgttcaggagatggatatctaacaaggctttgtaggaataactaataaaactcatgttctctcttggcaagaactaaacttggcatactttgcataataaagccacagggtagattattcactaataaaaaataaatttgtgtgtctttgtcaaccaaaaatacaaaactgtatgaataggatttgttccaagtagattttaaaatattcaactatgtaatgctttggtgttgggatttgcctcactgcctaaactaaaatcaactactgtatttt

SEQ ID NO: 92363 - DNA, 252 bp, Glycine max
  Clone ID: PAT_MRT3847_54418C.1
ggcttattattggtcttgatggtagtttcttaaaaacaccttttagtggtatattgttaggggcgatgggtcgagatcctaatgaccagtactatccttttgttgtggttgatgcttaaagcaagaacaaagactcttagaagtggtttctacaaaacttgttaaatgatattggtcatgagcagaagtgggtcttcatttcagatcaacaaaagggattagtcccagctttgcagaaactgctaccagttt

SEQ ID NO: 92364 - DNA, 171 bp, Glycine max
  Clone ID: PAT_MRT3847_54419C.1
ggaactaatatggttgatgaactacaagatccaactcaacagttctacgcatttatggtacgagattatctatcaagaagcatttaattgctgttaaggatcagacataatgactgccgttgtaaattttgtgcaataaaaacataacacaagtgagtctggtgttgtttt

SEQ ID NO: 92365 - DNA, 277 bp, Glycine max
  Clone ID: PAT_MRT3847_5441C.1
aacacaaaaaaattcccttaggggggttgggttaccacaaatttacatttttttcaggggctccggggcaaaaatgtttcaaaaattaacaagggcctccgggtaagcccgaaataattttttttttttttttccgacggtgcccgaaaaagtttaatttgtcccaaaaaatggcccaacgctggtttaattttaagggggggtgcccctgaaaaacctttttttccaccccaagaaaattttccggacagacctgtttttaaatttttacgggggg

SEQ ID NO: 92366 - DNA, 378 bp, Glycine max
  Clone ID: PAT_MRT3847_54420C.1
agaaagagtgaacgttaatgagacacgtgaatcaagtaaatcattaggatgatactcgcggtgttcaaatggctgatatgataatccagataacggtatacaaaccaatgattggaacgacttataacgcgttactcttaaacgaacatctcgtgaaacacctgaaaaggaaccgtctctgcacattcgtcaagatacacaggcaaagtcatgttattagcagaatgttatgtcagctgcatgccagatgaatggtggagaatacgtccatgaaactcaggagaattgagtgcaggtgcttgagtgaaaatactctcaagattgcagagtaacatatgctgacgatgaaatgtatcagtctcatatatctatctgaca

SEQ ID NO: 92367 - DNA, 393 bp, Glycine max
  unsure (1)..(393): unsure at all n locations
  Clone ID: PAT_MRT3847_54421C.1
gaataattcctttgctgtgccatcaaatcagacaagaggcaatgaaactaagcagggagggcgtatttgcgtcgttgaagtgttatcttcatgccaatccttttctgacaacatttgtgtacgcgtgcttacctaaatcaccacacacaagtttggaacagcacatagttctccaaacattatgctactatttttacttgnataatttaggatgacaatactactgttattaatttttcgccagagaaagttgatccacgaaaactcattatccgctctccattatgtcagggctatttagctgtgccaaccacacaagatgcaatgtttcatcaacctaagttcgttgcactttactgatttttattctagttttggcaatatggcatcgca

SEQ ID NO: 92368 - DNA, 419 bp, Glycine max
  unsure (1)..(419): unsure at all n locations
  Clone ID: PAT_MRT3847_54422C.1
gagggtccgacccacgccgtacgacacttaaagatgctaaagtcacaccctcttcgtgttaaattggaagtgagaaagtgcgaatttgctgcagggcgtgtgatattttatagacaatacatggtggtcttgttatgcttcagctggtaagggcttgatgaaaaatataaaacaaaagaggttgaaggggaatagccttggggaagaagtcttaacgaagttaaatgagcatttgcaaatggggaaaggaagaattctctattcaatcttcaaggacgtggtgagaaaagcaaaaagaaagctaatacttccggacttttcaaaggcgaatatcaaattattccacttnnnctagtcgaaaagaagggcaaagagaggctcctcagagagagctctcttttggggaaagaagcttgtga

SEQ ID NO: 92369 - DNA, 486 bp, Glycine max
  Clone ID: PAT_MRT3847_54423C.1
agtcaaaaatcaaaacaaaatagataaaagaatacaatgcatagtttccaaggctagcctttagcaacaagttaaatcccattctttttccttcccacatagcaattatttcttcgtctataatttgaagcttacacccaagattagattgactaggataggacatttaataccctgaatttgtggtgttattgtacttctgtcctgttcatctattacataaattgcatcagccctactctaaggtttctggccagttccttcacgcccatgttgaattcatcctccatctcggctacgatggttgtgtcgagaacagaggaaccgaaagacaaggcgctgctattgacgacggagagatgaagtttctctatctctctgaatatgttcaccagcactgccttttccttctcgcagaggattcgaatcagcacgctcttctttgacaccctcgcctcaacttctggcagtgacaaagtcgctttc

SEQ ID NO: 92370 - DNA, 374 bp, Glycine max
  Clone ID: PAT_MRT3847_54424C.1
atttaagaatagattacaaatactaaaattaaagtattattatttttatattaggcattgtgaatattactaaagaagaaagagccctagtcaaaaatcaaaacaaaatagataaaagaatacaatgcatagtttccaaggctagcctttagcaacaagttaaatcccaatttccgataatggatcatactcctttattgttcgtccgtcacggtcacggaattgcctccctctaaccgattcagcgtgatgctgttgttcattcgttttccttcgcacatagcaattatttcttcgtctataatttgaagcttacacccaagattagattgactaggataggacatttaattccctgaatttgtggtgttaat

SEQ ID NO: 92371 - DNA, 704 bp, Glycine max
  Clone ID: PAT_MRT3847_54425C.1
gatggaacatcaaccaaaacacattatgtaagatttgcctcagtcttatgaggacctatgtatcacacctgttttttttggcaatattaagttggaactgaaactaattgatcataatagtgaattcattacttaaatttattttaatatgttgaaattggttaggatgattgtacctggttagtcatcagttttcaagtttttatttacttgttagcttctcagtatgtcagatcaaactttttcacaggttgacctgcatatatgctgcctgtaaaatagaagaaaatcatgtgtcagctgaggagcttggtaaggggatatcacaggatcatcaaatgattctcaataatgagatgatagtttatcagagtttggaatttgatcttattgtgtatgcaccatatcgctcagttgaaggttttataaatgatatggaggaattctttaatgctggtgataaccagcttgaaatgctcaagactttgcaagagacagcaagatttgaagttgataaaatgatgcttacagatgcaccacttttatttcctcctgggcagttggccttggctgctttacgcaactcaaatgcattccacagagtcattgactttgatagttatcttaggggtattttttcccgtgagaattccatgcatacaatgtccgagctttctgatcactggatgcaattgattcttggg

SEQ ID NO: 92372 - DNA, 445 bp, Glycine max
  Clone ID: PAT_MRT3847_54426C.1
cttggggggggggggggggggggggggggggggggggggggggggggggggggggggggggggggcccggcaaaaaaaaagccggcatccggggaatagccgcaattaaggccctagaaggctcggggcagaaccagctttggcaggccaataaccgctgcttgataggtgtatggtagctttcgatggaagtataccggaccggataatggaagggacacccctaccccccaaaaggaatttaggatcggccccaaataaaagcgaacataataagtaaaaaatcggggaggcgttattggataaaaagccggattaaaaaggcatgattggctcaaagagggaaatctagtgtcctgggggagaccgctgccccgggtggcccagtaccccgaaatttagagcccccctccgacccatagtaaaaagcaggttactggccagg

SEQ ID NO: 92373 - DNA, 648 bp, Glycine max
  Clone ID: PAT_MRT3847_54427C.1
attttccgttttcctcactgccttcttgtgttttctttcttttatagaaagattcactgtagtcttcttcgtgtttcccagaacaccgagccaatggatcccgtgctgatcactgatgctagatcaaattttgtggctatctgattcaagaaagatcccatcctctattgtgctgtaactttccgcgatgcgatcaaaaggtccaacggttccatatcccggtgctcgtcacattctctgatcctcagggaatttcctcagatacaccgtcttctctctgatgtacccactgatctctgtctgctacgagtaaatgactggagccttctgctgtttgcaagatcgtggacgacctgcgagagcgacagcgcgattgatcacggatgccgagcgatccttgttcgtcgtgcatcttagacgggagactactcgtcctatcctagatggacaccattaaggattctgcacgatcgctgcctgatctatcagaatactgtgggtatgacaatatcggaagttgctacaggacgactttccaataactgtggtcattgctgttctgcactttgtatctttttgtctcaactcatagtttgggttccgtttccttgcctgtttggtgctgcagacgctctacaggactctaga

SEQ ID NO: 92374 - DNA, 397 bp, Glycine max
  Clone ID: PAT_MRT3847_54428C.1
acgcgacaacactacatcaggttaccgatgccagaacacgacagcaggtggagtgatcatcattcacgatcagcgagaatgtctcccaagggttggatctttttacctgtgttatgcttctcatcactgtcacttagtctttgccttccttaggataatggacttgctatgaacttctacaaggaatcatgccctcaggctgcagacatcatcaatgaacaagtcaagcttctctacaagcgccacaagaacactgctttctactggctcatacacatcttccatgactgtgctgctcaaagtcgtgatgcttcactgatgctagactccacacgaaagagcttcactgagaaagaaacacatagaatcttctggttgacaaatatcacgttcattg

SEQ ID NO: 92375 - DNA, 410 bp, Glycine max
  Clone ID: PAT_MRT3847_54429C.1
gaaaagctacgaacctaatcaacagttgcggagatctctaaacttctcaggagagaagccatccacaccagtattggacaccattaactacccaatacacatgaaaaatctatccattcaggaacttgaggagctagctgatgaactccgtgaagagattgtttatacattgtcaaagactggggggcatttaagttcaagtttaggtgtggcagagttaactgtggcacttcaccatgtattcaacactcctcaagacaagatcgtttgggacgttggtcatcggacctatgctcataagattttaacgggaagaagatccaaaatgcacacaattcgacaaactggtggacttgcaggatttcccaagagagatgagagtcttcacgatgccttttgtgtgggtcaca

SEQ ID NO: 92376 - DNA, 743 bp, Glycine max
  unsure (1)..(743): unsure at all n locations
  Clone ID: PAT_MRT3847_5442C.1
gtttccatttgattaagagaacaaaagaaaacaagagaagagattataggaacaaaagcaattaatggacacattgagggtgcaaagcttagcttctcagtcgaaggaaacgattcctgcagagtttgttaggtcagagacagagcaaccaggcatcacaaccgttcatggaacccaacttggggttcctataatcgatttcagtaaccctgatgaagacaaggtgctgcatgaaattatggaagcaagtcgtgactggggcatgttccaaattgtgaaccatgagatacctagccaagttatagaaaaacttcaagccgtggggaaagagttctttgagttaccacaggaagaaaaggaacaatatgctaagcctgcagactcaacatctatagaaggttatggaacaaagcttcaaaaggaggtggataacaagaaaggttgggtggaccatttattccacaggatatggccaccttcggacattaactatcgcttctggcccaagaatcctccttcttacagagaggctaatgaggaatatgataagtacctacatggggttgttgataagttgttcgaaagcatgtcaatagggttggggcttgaaaaacatgaactaaaggaattcgcanggggtgataacttggttcaccttttaaaggtaaactactacccaccttgtccatgccctgatcttgntcctcgcgtgccatctcatacggacatgtcctgcattaccc

SEQ ID NO: 92377 - DNA, 496 bp, Glycine max
  Clone ID: PAT_MRT3847_54430C.1
ggaaaaaaagcaacatactccggttctagaaggctcatatgtgaaggtatgacgaaggtcatggtatgcagccttacccttacatatgtaaaaggctgcttctgaattcaaacccataatcaactagtcagcaaggttgcaactttacggctgcaccagaactcgttttcattttgtacattcatgattatggaattataaaatatgatgtaaaggtggcatttgagttgttttttattgttcccttacaaacaaaacatacatttatacaagtttctaactgatcctatgaaatacagcatatttcttattaataactaaaataagtagttcgacgtaataggaaactaaccaattattcttaatgtaacatccttttaaatacccaaaatgatcataatcaagctattacatttaacaaccataagaaagaaaacaaccaaataagtgagaggtgatgatgtacattataagagagtctagatcattcatttca

SEQ ID NO: 92378 - DNA, 816 bp, Glycine max
  Clone ID: PAT_MRT3847_54431C.1
gtttcttggagaagctccacgggatgatgaaatggtgcaaactttcaatgaaggattagttccccgaatacaattgtcaaaaactgcactcaattgtacgttaggtgactgaatcatcgttctggctatccctgttttcacatatgcaatccatactgtgagtttcgtgctatcattgtcctcatcattcacacgaatgctaaagctcaaatgtcacccatcagaaggccaagaaacaaaatttattttagctccatcagggagaccggacacttcagtctctgaccctaatgtaccgtcaggaagaatttgatggatccctatagcagtgtagaatgacatgcgactcctagtattgcgctttccatcaatacgtataccagccaacttttcctccggccttgctatttctgccagtggaggtaaagctcttcgcttgagaaaaataattttgtccctaagtggtgaaaatgacaatgcaggtacaggtggagcatcaacaatatcactgatcacagatggagggacgtgatatcttactcctacagttgactcatcatcgtaatcagcggaagcagcggcgttggcagaggaagaaatggaggcagccgcggcgtcttgagcgggagcagcggcaagaggtgctaaattgcgcacccgcgaggaagccatggaagcgaagttggcagcggttcggtgacggagcgtgaggcgcaacggaggagcgagaggaagaagagaggaattagaagggagcaaaaagcgattatacagtttgtcaagtcgcatcgaagttggtcggtatcggacgcgtgg

SEQ ID NO: 92379 - DNA, 566 bp, Glycine max
  Clone ID: PAT_MRT3847_54432C.1
aacaataggaaaatttgaggttgtcgttataggaaaattatagaaaacttttccttcaataaactttttaggattaaggctgacccttttttttgtttaaaaactctttatgatggaaaaaaatttattaaaaattattttttttaataagtttcacagctaaattaaaagggaaaatcttgtgaaaccaaccaaaattagttttttccaatcctttttaatcaataaaaaaaaatttaaaaaaagggtgtaaaaagactttttaaacggtcaagccgtaaataattaacggaggcgttaaattcctaataatttatagcagatttaacttaccataaattaggaaaaattattattattattattattaaaggaaaaaatttttgattatagatatataagattctacctttttttttcttcctaaaagggttttttgctttttttgacaattcgctaatagttactaaaacaatatttattctttaaaccccttacttatttcctaattaattttattaaaaaccaaaaccctgctctttggatttttaaattaaaatttttaa

SEQ ID NO: 92380 - DNA, 169 bp, Glycine max
  Clone ID: PAT_MRT3847_54433C.1
tgttggctggggtgctcatggtggagatgccggttcatttaaagaccctggcggtgttgacagaattggttcctatattgtaaggcaagctgcaaagagtgtcatggcaaatggccttactagaaagtgccttgtgcaagtttcctatgccattagtgtccctaaaccc

SEQ ID NO: 92381 - DNA, 600 bp, Glycine max
  Clone ID: PAT_MRT3847_54434C.1
acaaaaaagccttgcagattccgatcaattcaaagatggatgcgaccttcccaccatcccctttccatattccgttattattatcgttttctctcattttctgacaatttctcttgttctttctctaatggcggttgcagccttcaaatcctcttcgcgaagagcaacccagtcttccgcgccttcgaacgcgcctccgaacacgacgtcgtcttctggcagatcctccaccagagctccgaacccgactcgcaggtcgaggagcgtgagcgcgttctccaggggcagttccgacatttccacggccaccgagttcctcaacaagagggacaaccctctcttcttcgacgaaaagcaatccgccactgtttttcttctggaaacttccacgcccgcgaattcggcgcgaagcaccgaaccgggtcggatggaaacgggtcgggccttattcagagtgaattcgggtcgacgcacccgctccgcttcgcagtgcccggtttcgaggcggaatctgaacttttatacttccgagagtgaagctgaatctaaagaaaggaatggtttgaagttagtggggagtaacagacaaggtggtttggt

SEQ ID NO: 92382 - DNA, 647 bp, Glycine max
  Clone ID: PAT_MRT3847_54435C.1
ctttaaacagcttgaagcttctaattgattattgcttctactaattttttttttagcaatgtgtagtgttttatgaagtctctttcagttatcgatatagattcataggtccatgcaggactaagtgaaaaagagaagataagtatctgtagtacactgaaccacgagaagctgtcagctgaacttttgaggcatcttactcgaagcttggtgtttccttcagacgcaaaaccaagagcttatgttactagacaaagccgaatgaagaccttgctccaggaaaatgatcatttgaaaaacttttttgagtccatgtttcgtaaaagcttcaagaacatggaagcgaatgaggatgttgaaaagagaagctatgatgctgaagaacttagaggagattgggaaggaatgcagaatgggacccaaatggccagtatgaagaagtcagggacccatattatgagcaatgctatgtacttgccaaaactctgttcatgatttttagttgcagattttagactgaattttgtgtgtatacctgtgtagtcttcaagtattaaaggagtaaagttatgcaaatactgtacagatatcatattctatgtaacatatttcacacatgattttatataagagagaattgccactta

SEQ ID NO: 92383 - DNA, 281 bp, Glycine max
  unsure (1)..(281): unsure at all n locations
  Clone ID: PAT_MRT3847_54436C.1
gaattcccgggctcggacccaacgccgtctcgctcacgtccgtcctgctcacgcccgtccgctttaattactcatagcattgcattccctcttngatttggtagtttggttttgtgccttttagataagaacgttctgcnccaaatcaagaaaggggttttaacgatcattagtgtnngtgttttgcaaccaatggcttaagttcttttgctgctatcgatcttggcacttcttttgccatttccatacttcaaacaagtggtaaatggctgctaatgaac

SEQ ID NO: 92384 - DNA, 164 bp, Glycine max
  unsure (1)..(164): unsure at all n locations
  Clone ID: PAT_MRT3847_54437C.1
ctcgagctcgagttgattcggntaaagggatgtctcaggcacctttttgctaaaggaaaggttttttcaccgctctttaatgttgttggaattggcgttttaatgcatttagcatcttccatttttgcatcactggggggaaagttggttgcgggtcgtctcct

SEQ ID NO: 92385 - DNA, 695 bp, Glycine max
  unsure (1)..(695): unsure at all n locations
  Clone ID: PAT_MRT3847_54438C.1
ggtccggaattcccgcgtcgacccacgcgtccgtgatcaggctgattacaagctgataggatccagagtaattaacagtagatacatgtacataaccctcaggccgcttgctatcctaattacagaaaacatctattaggttgctagaccactgattaaagtgtatagaaaagtctttctccctagctctgagccatgtccacagcagaaacagtgcaccctccagcagcttggctccattgaatggttcgtttcggaagatgaccatattcctttgctgccaaatcgaccaagtcagtgctatccaccagctcttccatgtattgtatgtctttgttccaggcctcccattgacatgctgcataaagtgttgtcttggaattatagagtgcacccccaaggtttgaacccatgattgggatttataatgaaatgtaatacaggaataaccacttaaatttgtggaactgcacagaatttaatagggacttgggtattatgggatgactaagtcccacatcgagtagaaagggatgctcggtggagtatttaagtgcttcgttctccccccttaacagcttggttttaagggaggactctccaagtgcttacgtgcttaacaattggtatcaaagctggttgtcggtgtcatagagtgtgagccnnccagacgttggctctcatggacggtgcta

SEQ ID NO: 92386 - DNA, 560 bp, Glycine max
  Clone ID: PAT_MRT3847_54439C.1
atcatcagttatctagataatcttcatctaaacataaaaatcactttcccctgctagattctcgctagtacaatcataggttagtaatccgtcccatgatgttttgtttttttctttttgttctggggtctgtgtctttcgttagatgatctgcttcttgccatataagtcactttcccctgctagattctcgctagtacaatcatagaatccgagtttttgtgggttgcattgttgtgagaagatgagaagagttggtggtgatgttttgaacgtggatttggctgctgcagtgaacaacctcttcaatcttcctgaaactatggagaagttcatgtttccttcttctcgtgctcatgatcaccaccatgaaaccagaggggtctctagcatcattccagtggacattttggacactcccaaggagtatacattctttatggatgttcctggtctctccaagtctgaaattcacgtacatacgtgatgtctcactccaatatttttttcttccccccattaatgttatggtcctttggcatgtgtgtatttgttttgga

SEQ ID NO: 92387 - DNA, 737 bp, Glycine max
  Clone ID: PAT_MRT3847_5443C.1
gttctgtacctggagggagccatgagtgcagctgcgtcatcctccgctactccttccgctgcccaagtcctctccctcttccgatccctcctccgcgccgcgcgcgagttccccgattacaatatcagggagtacaccaaacgacgcaccatcgattcgtttcgccacaacgccactctctccgacccgtctcaaatttccaccgccttcgcccacggcaagtcacagctcgccgtcgttaaacgacaggccgtcgtctactccctctacgattctccgctccgcagcgtcatggaactccaacaagtccccttctaatcacgataatctcagggtttagggtttatgcctcttcatcatcgcttcatcgctttctattcattaatgccaatttgatacatgctattactgcaggttctcagtatgactctgttgaggtctccacttgctctgagaagatcagaatttcgctatttgattcccatccctcatttttttaggacaaatttatgtttttttttatatatttaaattgagtggcactccataataataaatgtaaaaccggtttttagttgttaggatgatatgagagtatttagttggacgacctgtaaatttgacatttttatttaattttttatatgatgatgatgatgatgttatccttcactatgacaaaaaaaaaaaaaaaaaaaaaaaaacaaaaaaaaaaaaaaaaaaaaaaaaaaaaaaaa

SEQ ID NO: 92388 - DNA, 304 bp, Glycine max
  Clone ID: PAT_MRT3847_54440C.1
aaaaaaggaacaaacctaaaacctttttacttttgggaaggtaaaatcatataggggagggaaaactggggccttttttatacagacataatcaacttttgacttgacccaaaaataggaacattggtacatttgggaggggggggcattcaaggggacaactttttatcccaaccgggggggctccgcctttttttaaggtgaaaactggacgggcctttctgaccaagaaataagccctaaccctgacggggggaaattaccgctgactttgcaggattgggagactaagtcctctcgaaaa

SEQ ID NO: 92389 - DNA, 498 bp, Glycine max
  unsure (1)..(498): unsure at all n locations
  Clone ID: PAT_MRT3847_54441C.1
nnnnnnggggnngnatannntatanaaagtgtttatagagtcttttgttttttttaaaccaaacaagcccccaacgtttagcatgggaccaatttgttttttgagcaaatactaatggacaaggatgcccccacatagacgggaggggttaaacccagggaaatcaatttgaaggagggtccttttttgttttgaaaaaaaaacctatactttcagcactcacatcctgttgcccgggggtgactggtgtttccaaaaaaaattggggcggggagggataatttttttttttttccacttttaaggggattttttgttatgcattggaatgctttctcaacattaaaaccttttttgggagatgtctcaaaaaatggaatattttcttttgatgcacaccaagcccgagcctttttttttgacccctgcccacaaaaacttgggaggggtcatatttttaccagtatgggtttagggggtttatgaaaaccaaggggc

SEQ ID NO: 92390 - DNA, 474 bp, Glycine max
  unsure (1)..(474): unsure at all n locations
  Clone ID: PAT_MRT3847_54442C.1
gaattcggcacgaggccggtggccggtaatggccccactggagttgtcacagggattccagctgtttggttaaactaccaaagaaatctttgaaactatcaactagcccaaaattatttcaacagcattagtctcaagtttgagtcaaacgtatatagctgcatttatcgctcacagtggtcttatctggcatgattaggattatctacagtgaaagacactagtaatctgtacccaaaaaaaagaaatatttgaagggtttggtttgttatgtactgaaaaaagaaagcattattcattgcttttccttctcgacttgctgtagaaaaactgtgacaaacagcatgaaggctgaagagggattcagaaaaaaagtaaaataaatgttgagcaaatatctggcaaactattggctcaattacgacttatgagttttcnnngtagtatatatgtacagtgaagatagaaaagaaa

SEQ ID NO: 92391 - DNA, 2059 bp, Glycine max
  Clone ID: PAT_MRT3847_54443C.1
cagcttggctgttagcaggattccgcgtttcgttttgctcgatagacagaggagagagaaagagagggagtaagtgggtaaaggaaagaaaactaaagaaacaaacctaacacaacacaaatccttgaaacgacgacggaaatggccgtttcgagctcgcacatgcgtttcacctttgagtgccgctccgatcccgatttctcgccccccccgccgtccttcgacaacctccgccgccgaaacttccgctcctccgcaggatccggcgcggcgtttcacggcatctcctccctcatcctccgcttccctcccaacttccagcgccagctaagcaccaaggcgcgccgcaactgcagcaacatcggcgtcgcgcaaatcgtcgccgcttcgtggtcgaacaacagcgacaactctccggccgccggggctccggcgccgcccgcggccaccgccacggacgccgctacggtgcctctccccgtcgtcgtcgccgccaacgaggacgtcgttgtctccgccgcggcagacgagaacggggctgtacagttaaacagtagttcttattcttcatttttgaaatccgatgcaagcaaaacgattcatgccgctgaaagactgggtaggggtattgagactgatggaattaccacccctgtggttaacacttctgcctacttttttaagaaaaccgctgatctcattgatttcaaggagaatcgtcaagtgagttatgaatacgggcgctatggaaacccaacgacggtggttctggaggagaagataagtgcattggagggggccgaatcaactgtgataatggcgtctgggatgtgtgctagcgtagtcctgtttatggcactggttccagctggtggacatcttgtgaccactacggattgttataggaagactagaatattcattgagacttttcttccaaagatggggatcacgaccactgtaattgatccagcagatgttggagccttggaatctgcattggagcagcacaatgtgtctctattcttcactgagtctcctaccaatccattcctgagatgtgttgatattaagctggtttcagagctttgccacaagaaggggactttgctctgtattgatggtacatttgcaactccattgaaccagaaggcccttgcccttggcgctgatctgattctgcactccttaacaaaatacatgggtggacatcatgatgtccttggtggttgcataagtggttcaattaaggtggtttcgcaaattcggactttgcaccatgttttgggtggtacacttaacccgaatgctgcatacctattcatcagaggcatgaaaacgctgcatctccgtgtacagcagcagaattcaacaggaatgaggatggccaaacttttagaggcacatcccaaggtgaagcgggtctactatccaggcttgccgagtcaccctgaacatgagcttgccaagaggcagatgactggtttcggtggtgttgtcagttttgagattgatggagatctacataccacaataaaatttattgattcattgaaaatcccatatattgcggcctcgtttggtggctgtgagagcattgtggatcaacctgctattttgtcttactgggatcttcctcagtcagaaagggccaagtacaagatttatgacaacctggttcgcttcagctttggagttgaagattttgaggatttgaaggctgatgtcctgcaagctctggaagctatatagacagttttcctgattcacccaagtttttttcttttataattgtgctatttgtttgttatcacatctggcgattcaattgaattttgatcgtctaatgttctgttggaattgtgttaagatgaatggtctctaatttggatgttatgaaacttgtgatgaattgttgaaattgaaacctctatttgatgatattcttacccgtttttcctacaaatatcaaagcaggatatctgagaattggaaaatgataaatggtatgaaagcagtttcgtgtgaaatttgcacgaatgtatacactaaaacgttc

SEQ ID NO: 92392 - DNA, 237 bp, Glycine max
  Clone ID: PAT_MRT3847_54444C.1
gtacaacggttaagaatttttagtttatgcccaactacaagccgaatatttttaaatgatacaagagcttattatcaaagccggcctctacatgggaaaacaccttctttgtaagccaccacatgccgtggtcaggattttaaagatcttattttataggaattgcggctcaacttataaggttacatttgggccttaataatatgaaaaggtataagaatgtgttacaaagtcacg

SEQ ID NO: 92393 - DNA, 549 bp, Glycine max
  Clone ID: PAT_MRT3847_54445C.1
cccacgcgtgcgaactatcctgagctctattcaattactcggaagggtcactggaacgggtcgttgaagccctggcccgctcccgggccggcttaacggaagccgatcggtatgcagagagtggttgttcggatgtctatcgtgagatcgagcgtttaattaagtctttatatactactttgtatccgtctttggatcacttagacgattccattcattatgcccttcattttgagcttcatcgagtgcttcatcgggttctacaacgggccttacagcgagccttacgaactgttctaagatctttgaacagctggttgcacttacagactgattgacctactgttggcgcgattgttgcgatgattgagacgatgactgattagacttctgattatactttctattataggctttagtatatgcttctattttttcttctaaagaatttttcttggaaaccattctggcagccgttcgtgcagatgatattcgtgaacgcattcgtcaacgcattgcgcaagataatactgaagatacggttgccga

SEQ ID NO: 92394 - DNA, 578 bp, Glycine max
  Clone ID: PAT_MRT3847_54446C.1
gttttaagttgtcatgttgatgatttgacactactcggggaatggtcctctacttgaatgtgaccctgtagtgaaagcatcttttgctggtccttttgttaatttttagatttggcttggtggtggttgttgtatgtttaatttaattttcaacatattgtgcaacagggatcttcctcagtcagaaagggccaagtataagatttatgacaacctggttcgcttcagctttggagttgaagattttgaggatttgaaggctgatgtcctgcaagctctggaagctatatagacagttttcctgattcacccatgttttttttcttttaataatcgtgttatatgttccttttcgttatcgcatctggcgattcaattgaattttgatcgtctaatgttctgttggaattgtgtttagatgaatggtttctaatttggatgttgtgaaacttgtgatgaatggttgaaattgaaacctctattgatattcattcccgcgtttcctacaaaaattaaaagaaaaatgaattcttgaggcaggatatataacagaatttctttttgaagcttttgtgaaa

SEQ ID NO: 92395 - DNA, 1315 bp, Glycine max
  unsure (1)..(1315): unsure at all n locations
  Clone ID: PAT_MRT3847_54447C.1
cccacgcgtccgcccgaaaattgaggaagagtgaaaatgaaaatgagaaggcggtcggggggaatattgaacacaacacccactgcacagcttcataactaaaccgccatcgcctccaagactttccgtgcccaaaagatgagaaaacgcagcatttacgcatggctagtagcacttgtttgcttcctcctactcatgatcgtcaccccagccattccccagtcacaagaataccatgatttcgccgaccaccgcaccttcctcggtattcccaatgcacttaacgtgatatccaatttcccttttctggttattggcctcgttggacttgtactctgtcatcatggaaattactttaggctcagcttgcaaggtgaactatggggctggacatgcttctatgttggcgtggctgcagttgcagttggatcttcatactatcatctcaagccagacgatgctcgccttgtgtgggatcgcttgcccatgaccgtcgcttttacatcaatcatggcaatattcatcattgagcggattgatgagaggaagggaacggtttctattatacctctagttttggcgggtataataagcattgtgtattggagattctttgatgacctgcgcccatatgctctagtccaatttgtgccatgcattgtcattcctctaatggctattttgttgcctccaatgtacacacattcaacatattggctctgggctgcagggtcttatcttctagctaaggtgctagaggctactgatgatgtgatctatgaatgggcgcaacatattgtcagtggtcacacacttaagcatctggttgcagcaatggttcctgtcttcttaacattcatgcttgctaagaggagtgttgaacctgagaggcaaagtttgcttaaaacgtggagggtttcctggacgaagttcagagagggcaactccaacattgagagctactcttactcttacacaaatgtgcaggctgtggagccccagtgatgtgttactttcccatagaacaaaaaataataaaggcttatcctggattacggaatattgttacacttgactgtggactaggtaaaacaagacatagcaagttaactttcacacaataatattatctgtaattaactttgtatagttcccgatctttatcacatagagaggaccatttagatctgtgattctgtatgtgttgtctaatgtctatttctcgttcagcatggttataatctgcacgccttcaaagttcaaacccttgtagtgcttgtcatgagaaatcatactaactganntaattaggaag

SEQ ID NO: 92396 - DNA, 1010 bp, Glycine max
  unsure (1)..(1010): unsure at all n locations
  Clone ID: PAT_MRT3847_54448C.1
gagagattcgttttggtaggtatttagatagaggagagagaaaccaaacacaaatccttgaaacgacgacggaaatggccgtttcgagctcgcacatgcgtttcaccttcgagtgccgctccgatcccgatttctcgccaccggcggcgtcctttgacaacctccgccgccgtaacttccgctcctccgccggatccggcgcggcgtttcacggcatctcctccctcatcctccgattccctcccaacttccagcgccagctcagcaccaaggcgcgccgcaattgtagcaacatcggcgtcgcgcaaattgtcgccgcttcgtggtcgaacaacagcgacaactcgggctcgccacagcagcggacgccgccacggtgccgacacaggtcgacctcgccgncgncgaggacgtcgtcgtctctgccgcggccggcgagaacgggactgtacagttaaacagtagttcttattcatttttgaaatccgatgcaagcaaaacgattcatgccgctgaaagactgggtaggggtattgagactgatggaattaccacccctgtgctgaacacttctgcctacttttttaagaaaaccgctgatctcattgatttcaaggttggattgttaaaagatttattcgcctcatgacataatgagtggataaatgtcagttattggtgtggctaaatttttccatcatttggcaggagaatcgtcaagtgagttatgaatacgggcgctatggaaacccaacgactgtggttctggaggagaagataagtatattggagggggctgaatcaactgtgataatggcatctggaatgtgtgctagcgtagtcctatttatggcactggttccagctggtggacatcttgtgaccactacggattgttacaggaagactagaatattcattgagacttttcttccaaagatggggatcacgaccctgtaattgatccagcgggctcggtcgacccaaaatccggccggactgcaggcggg

SEQ ID NO: 92397 - DNA, 263 bp, Glycine max
  Clone ID: PAT_MRT3847_54449C.1
acccttagctcagctttcagctcgagcggaacaccaaatccttatttttatggtagtgaccacactcggggaaagtctctgtctgtgtgttgacgtaacatagaaaagcaaaattggggctcacttcaatatcaataaaaagatcgtgatgttcattcctcttagatggtaccaccactaactaccctaccaccagtattatagcattttatttccattcctacaacctatccgctgtttatgagttccacagagcacacctt

SEQ ID NO: 92398 - DNA, 456 bp, Glycine max
  Clone ID: PAT_MRT3847_5444C.1
aaaccctgatacatctccatctttgactatcttcacagacttgatgtctggctgcatttggtcctacgctctgctgtagtggaaactatatgtcacaaatacagttatactgtctgttcttaccaggctgacatatataatacgacatgagcttccacggtgctgaaatcagtgagctatcacggagacataaacactaacttggttcataaccgcactatcagatataatctcacgctcatcaaatgtctataagagcgaagagagaccatgggagctagaaaagctgctggagttcgcaaccacgctcataatgatctgcgcttacagccaacacctattgaaatggctccctaggaggaagacctaccacctgatactgaacaatctgaacatatttcacctgagatttaagatagacacactaatggatctggtgatccggatgcactactt

SEQ ID NO: 92399 - DNA, 956 bp, Glycine max
  Clone ID: PAT_MRT3847_54450C.1
aggtgaagcgggtctactatccaggcttgccgagtcaccctgaacatgagcttgccaagaggcagatgactggtttcggtggtgttgtcagttttgaggtgggaatttgacaagttgctattcaaacatgtggtttcctaataacactattttttttttcttttatcaagaatggtgtattggataacatcatgtgccatattttttttatagttaaattgccaatattgcagattgatggagatctacataccacaataaaatttattgattcattgaaaatcccatatattgcggcctcgtttggtggctgtgagagcattgtggatcaacctgctattttgtcttactggtactcatttggattccatgttcaatttgtcatgttgatgattttgacactacacagggaatggtcctctacttgaatgtgaccctgtggtgaaagcatctttagctggtccttttggtttgttatagtgtcaaagtttaccttgtttttgttaatttaatttaattttcaacatattgtgcaacagggatcttcctcagtcagaaagggccaagtacaagatttatgacaacctggttcgcttcagctttggagttgaagattttgaggatttgaaggctgatgtcctgcaagctctggaagctatatagacagttttcctgattcacccaagtttttttcttttataattgtgctatttgtttgttatcacatctggcgattcaattgaattttgatcgtctaatgttctgttggaattgtgttaagatgaatggtctctaatttggatgttatgaaacttgtgatgaattgttgaaattgaaacctctatttgatgatattcttacccgtttttcctacaaatatcaaagcaggatatctgagaattggaaaatgataaatggtatgaaagcagtttcgtgtgaaatttgcacgaatgtaa

SEQ ID NO: 92400 - DNA, 193 bp, Glycine max
  Clone ID: PAT_MRT3847_54451C.1
cggaagagcgggggcgccccacgcggccgcccacacgaacgtttagttatcgaaacacccgcgcacaggaacggaacagggtagaaaagcgacccgccctagcccaacccgcaagcaacttgagcggctcaaagagcaagccaccaagcacgaaagaaaaggcagacggagccggacgaagccagagaaaacc

SEQ ID NO: 92401 - DNA, 873 bp, Glycine max
  Clone ID: PAT_MRT3847_54452C.1
gctttcccaggctgagcatggtcctgatagtcaggttgtgcttgtgatttctggtgaaggtgtggatctgaatgttatagaagaggaactcaacaagcagtgccagagtctcccaagaggagagtttgctgctaaggccctaagccacagttttattgtttatgcacatgatatgcttgagtcaatcaagttctcaaacttatatgcacccgaacatctaattgtcaacacgaatgatgcagagaagtgggagggttttattgagaatgcaggttctgtatttttagggccgtggacaccagagagcgttggtgattatgcaagtgggacaaatcatgttcttcccacttatggttatgcaaggatgtatggtggtgtttcattggattctttcttgaagttcataactgtgcaatctctcacagaagaaggcctaagaaaactcgggccatatgtcgttaccatggcagaagttgaaggtcttgatgcccacaagctagcagttaccctaaggcttgaggacatagaagtcaggcaggtatcaacatgacatgataatctacgagtcaacgttaatcattgttgagtttttcgaagatcgtaagggagaaagtggtcagtgcaaagcaaagagctttgataccatatttgagatctagagttcagagaaactagaaagaaagtgagataaaattgagaaaaatgtatttctatattgaatcagttacaattgttgagttactcatatttactgttgagctcgactcataagtacagttataactgaattagagagaccaacagtcactgtagctcaactgtcgataactactactaaataatagaaatggtccccgagtaaattactattct

SEQ ID NO: 92402 - DNA, 174 bp, Glycine max
  Clone ID: PAT_MRT3847_54453C.1
aaagcaaacgagcacttttgttattacttagagggtcccatggacaaaggcttgtatacacgttttaaatagtggttaatataaaaaatacagcatgcctcgctaatgaacaaactgagaaatcccccgctttcctttttaagttataatcctggtagattctccctgtttcat

SEQ ID NO: 92403 - DNA, 1929 bp, Glycine max
  Clone ID: PAT_MRT3847_54454C.1
cgctctcacttcaactccaaccacagagacatcaaatacaacatcgttgtttccatgacaatggaatctgcgcttacagcttctaactggaaccgttctttgattcggattcaccacactaagccacgctttggtgctattcgccccacatcaatacggtgctttatgaagtcatacaaattgtcagagctgagtgatgctgagcttcgcagcctcatcgctcgccctcgcattgatttctcttcggttttcgctctggtcaaccctatcgttgaccacgttcgcgaaagaggcgatgctgctgtcaaagaatacacattgagattcgacaaagctgaattggataacatcgttgaacttgtctccgaccttcctgatccacaactcgatgcgcatgttaaggaagcttttgatgtcgcctacaacaatatatatgcctttcatgctgctcagaagacacccgagagaaatgttgaaaatatgaaaggagtccaatgcaagcgagttgcaagaagtattaattctgttggtctttatgttccagggggaactgctgtattaccctcaacagctctgatgctttcagttcctgcacagattgctggatgtaaaactattgtccttgcaactcctccagctcaggatggtactatatgcaaggaggtagtgtattgtgcaaagaagggtggggtgactcacatccttagagctggaggagctcaggccatatctgccatggcttggggaacagaaacttgtcccaaggttgagaaaatttttggcccaggaaaccaatatgtcacagctgcaaaaatgatactacaaaacagtgaagccatggtttcaattgacatgccagctggtccatctgaagttttagtcattgccgacaagcatgcgattcctcgtcatgtagctgctgatttgctttcccaggctgagcatggtcctgatagtcaggttgtgcttgtgatttctggtgaaggtgtggatctgaatgttatagaagaggaactcaacaagcagtgccagagtctcccaagaggagagtttgctgctaaggccctaagccacagttttattgtttatgcacatgatatgcttgagtcaatcaagttctcaaacttatatgcacccgaacatctaattgtcaacacgaatgatgcagagaagtgggagggttttattgagaatgcaggttctgtatttttagggccgtggacaccagagagcgttggtgattatgcaagtgggacaaatcatgttcttcccacttatggttatgcaaggatgtatggtggtgtttcattggattctttcttgaagttcataactgtgcaatctctcacagaagaaggcctaagaaaactcgggccatatgtcgttaccatggcagaagttgaaggtcttgatgcccacaagctagcagttaccctaaggcttgaggacatagaagtcaggcaggtatcaacatgacatgataatctacggtaagcttactatcatttgatcgattacttgacttatgtaaaattagtacctaagcaactgctatttttaagtcatgtaactataaagggtattgaaattttaaattttgatgaaaatttggtttttttatagagtcaacgttaatcattgttgagtttttcgaagatcgtaagggagaaagtggtcagtgcaaagcaaagagctttgataccatatttgagatctagagttcagagaaactagaaagaaagtgagataaaattgagaaaaatgtatttctatattgaatcagttacaattgttgagttactcatatttactgttgagctcgactcataagtacagttataactgaattagagagaccagtcactgtagctcatttgtcgataactactactaaataatagaaatggtccccgagtaaattactattct

SEQ ID NO: 92404 - DNA, 872 bp, Glycine max
  Clone ID: PAT_MRT3847_54455C.1
caaaaacaatccacccacgcccaatgtgagaagattcgtatcatcacagaggcatcggaatccggcgccggataacagccgctcacggcggcgaagaaccttcgaaactcgattttcccgatggagtggctccaaacgctgcctccaccctctcacatctcgccctccgcactctccttcctcgatcacaggctccacacgcagctcgccgttgccgaggctcccaccttcgccgccgagctccagactcagtgctccgagttggatcgctcgctcgacgagttgactcggaggctcggagctggtctctccgcctacgcctccttctccggcgaaatccacggcctcttcggggccgttactgataggctgatcgctctctcctccaccgtcgtgccagatggaggaagaggcgaagaggatggcaagggtttcagagaggagcttgcgactttggcgaaggaagtggctaggttggagacggttcgtgtttatgcagagacagcactgaaacttgatactttggttggtgatattgaggatgctgtatcatttaccatgagcaagaacataaggaaacattctagtcaaaattcacaagaaatgcatatgcttgctattaaaacactgaaaacaacagaaggcatattaacttcaattacaaaagcacatccccagtggaagcatcttgtatcagctgttgatcacagagtagaccgagctcttgctattttgaggccccaggcaattgctgagcatcgggcacttcttgcttcgcttggatggcccccacctctttttgccttaaactccttggattcagatgcaaggactgcaaatcaagttgcgaatcctctactgaccatgcaagt

SEQ ID NO: 92405 - DNA, 796 bp, Glycine max
  Clone ID: PAT_MRT3847_54456C.1
ccggaattaccgcctcgacccacgcgtccggttgtaatttttttatttatcttttgcattacggcatcatgatagtagtatttctttttggcaagaacagtatctgtacgatgctgttttgtcagcttaacaatcatgtttctttacccgttttatagaagtggcaatagacgaatagccttatatgcagaatacgcttcaaaaaaaaaaaaaaaaaaaaaaaaaaaaaaaaaaaaaaaaaaaaaaaaaaaaaaaaaaaaaaaaaaaaaaaaaaaaatagggcgcgcccgtttctggaggatccaagtttacgaccgcttctcttgcccctccttatttcttttatagggccccctaatttcaatttcatgccgcgagttatctaagattcgtttgccatagatacctctctttttgtcgaatagagcttttcttaggcggaggcaggcaaccgctgtccgctcaagggggcgcagatccggttggcggccgatgccgggatgagtgatgacgtgatcgccacaagcctgggcgtcggccacttggcggtctcccacccttcgacgtttttgtcgaaggcaacctggcggagaaccagagcgaagagccgcctaccgggcagagcgcgaactcaacgacaaggaagaggcccttctggtggccaccgcctgcggccctccggcaggccgggcgctggacaccggagctgctagcgggcgaatgctcaggctgacgtggtaccaagcgtgccgccggaacgtcgttctcacgcttgactgcaacttgcccacacggg

SEQ ID NO: 92406 - DNA, 962 bp, Glycine max
  Clone ID: PAT_MRT3847_54457C.1
ttatgctcccgggttggaaattggggggaaatctgaaggggtaaccattttacacagggtgcaggtatgtccctggatacccctagctttaagaggactccctataaggaaaattgggacgccctcaaggaccggtccggaaataaataccgggtgaccaagataaaaaggtggcgggcgcccattttggggttgttgcgcttatattttggggggcgccctttttttttttttttttttttttttttttttttttttttttttttttttttttttttttttaagtagaaacttgattttacagccaacaaccacaattatacataaagaacccgacactaggatgtacaggaggacccccttttacacatctcgttggtgcagtagaaattgaagaaaaacaaacccaacactaaccataaaagacatcatgaactaatatcctagattttgtaggcacatcctacctagtaataagtccacaaagggcataaaacagagtctaatagttatggtaaaatagatggccattccttctggcagctgcatcccttttcactgatatgacccatttgagagcaacacgaatcttataccacactgctttggttttgccactacttgatatatccacatccgaattgatgaaagtagaatagctgctaaattctgctccaacaggagaaccaaataaaatgccagtttctggctcccatgttgtgtaaggaggacaatcatctatgaattgaatctctgagctttcattctctgttgaataaccacctcgcacgaatggaaattgcgatccattaaggtcacaactatcctcttcagtgtacatttcagaggaaagttcatctaacagatgactgttttgtgacatctctgttatgcctggcagtggatcagcataaacttggtggtcatgcattccttcatcagtatatgaaggagagatagat

SEQ ID NO: 92407 - DNA, 348 bp, Glycine max
  Clone ID: PAT_MRT3847_54458C.1
caaatatcctatctccctaccaaattttcaccaaatcttatttctcccacaccaatacttactatcatgggcgcctcttcacaacctcaccgagctagatatacaactcttgttcataacctctaatacccagaattcatacaatacaccaccatacatgctctaatcctcttccccattctctactcatacgccaattaactcacaactcctctgaatccctttatagacaccctattattaaacacttaaaaccttcttgtcttctatctaccttatattccaccaaagatccccatattttaaaaccacacaccatatctaacccctttttaaaataataataat

SEQ ID NO: 92408 - DNA, 512 bp, Glycine max
  Clone ID: PAT_MRT3847_54459C.1
attgtgtgggatggtgcgcctgctggtgccgccgcggcgttattgggtcgtccgacccctccgccggttattcacttggagatgcacacttggcatgtggagccgtcaaggatgtcgctatactgtgcctgcaccacttcaaaacatgtggttggttttttatatggctaacacagaagacgggaggcggatctatgaatggagacagatcatggcagatcacatggggattccccttctagagcgacatctcgacataggaaggatcttacgtccatcttactttgcgaggagaaaaatcctagggtggatgacagccacctgttactaggaagagtgcatgtgatacttacgctattatattacagccaatcgtacctttgatggattactaggctgctgacagtgaggagctgttaggggactgttgataggttaccatgcacaaggaaaggtgctaaaggagcatccacccataaaagttttcatatgaatatcaggaagcaaattta

SEQ ID NO: 92409 - DNA, 270 bp, Glycine max
  Clone ID: PAT_MRT3847_5445C.1
cttccttccccgccagaaagatccgatttcaccacacagacccgctccaggggacagtttttttacgaaaccgcttcttcaactgaaggaaccccgcaagaattctgccctacagatgccctcagagtttaaaaaattcttccctctatactcctttccaaccattccttggtagctttcacgacgacaaccttttatttctcctcatgcaacgcaaatttctttttccctcttccttaacataaaaggcttttttcttagtccaaaaac

SEQ ID NO: 92410 - DNA, 430 bp, Glycine max
  Clone ID: PAT_MRT3847_54460C.1
gataaaagaagacttgctagtgctaggctgggagagcagaacagacttcacagatcctctaatttatgtattactataaaattacagaggcctgaacatgacggtgtgtgttattattgccaatccagaggccaccacagaatgatgagagcccttgggagctgtattttgcaaatgtacacttatcagttgatacgctttgggcactaccattaaccgtaagatcgaaaccccccgttgttgcccgtgcaactaacgaccggagcgcacatcctgaaccagtttcaacctgtccgtatctccccggtatacaaccgaccgacgcgtccatgcgcccaacttcgatcggatcatctgccgcaacccaaattttgctcttgacactggattaaccatacatgtttgcactagacttgccctgccggggatc

SEQ ID NO: 92411 - DNA, 396 bp, Glycine max
  Clone ID: PAT_MRT3847_54461C.1
ctgctggcataatttatgtttagatagatagagcaagattgatcaaaagggttgcaaaggtcaaagaggagcaggcaaagattgacgaggctgctgatttgatgcatgaagttgctgtcgaaacatttggctccatggcaaagacggagaaaattgctttcattcttgagcaggtccggctatgcctagatcgtcatgattatgtccgagcacaaattttatcaaggaaaatcaggactagagtatttgacgcagatccatcaaaggaaaaaaagaaaccaaaggagggtgacaacattgttcaggatgctcctgcagatattccttacctcctagaattgaagcgtatctactatgaactgatgattcgatattacttgcacaacaatgattacc

SEQ ID NO: 92412 - DNA, 782 bp, Glycine max
  Clone ID: PAT_MRT3847_54462C.1
gcacgagggtcaaggcaggatctgttcaaatagcagggagacaagtatacattgaagaacgaagaattttggtataatcaggcctgatggtgttgttgttagaagtcgcaaggatgtcggtgtttgttatgcatttgttgaatttgaagatatgactggcgttcataatgcagtcaaggcaggatctgttcaaatagcaggaagacaagtatacattgaagaacgaagaccaaacagtaacatcccttctcgaggaggaagacggggtagaggcagaggtagctatcagtcagatgcaccaagagggcgtttcaattcaaggaactttggcaggggaaatggccaagatggcggtgatagggattataacaaatcgaaaggaaatggtttctatcgaccaagtccccaccaagagaggggacattcagggcatcatcaagtaccgagaaatgggcagaatcttgctgagtcctgagtcaacaaaaaacataagccagagaatccaattttgggtccagatatttcaactctaaatagtcaacttcagtagattagaccaaatattgatatttttcatgtcctaaattaagttgttcagggaatatggatgggatgttttcgttcttgataaattttattcaacgggcttcttgtttcatttgtttacatgaatttaatgtttagccgaaaatgtgtttaaaacacttgacatttatttattcccaattgaaatttaaaaaaaaaaaaaaaaaaaaaaaaaaaaaagcggccgctctagagga

SEQ ID NO: 92413 - DNA, 416 bp, Glycine max
  Clone ID: PAT_MRT3847_54463C.1
ggattgattgtctgcttttaaaataaaaaagaaaatgggcgaccaagaagtttattagagacttgtagaagagccatgttaatttcttgaggatcaatatcaagtgaaaaataatgagtatgtatcctctacgtttcctttaagcaggtatctttgagtaggaagtaaaacgaaactttttcagagggagacaattacattaaaagtacaagaaacaataagcaataatcaactcatgaagcttgttgaagagttctcgtattgaaggaaataattgactattggaacattggtaatattaatggtattagttggtggtgtggtcatgtttttttcctcaatgaatatagtaaaaactttttattttctattaattagggaatctagatcttttaattttcattcttattattttg

SEQ ID NO: 92414 - DNA, 483 bp, Glycine max
  Clone ID: PAT_MRT3847_54464C.1
agagctatgacgtccgatgcgcgcgtccctttcgcctgaggctaccgtatcactgtcagtgtatactgacatccgagatacacctgatcgaggaagcggctacaacgctacatcgctcatatcaatccatgggtacttactggcatatctctgtcagcggagtctccgaatatgacatacaactacgacctacttcaagttgcgcttccagcccctgatgtatctctaactaatgtcacgagtcgatcacttagaccactacttgtacgaatcactctatgatgatattcagcattctatcaagtttgacacctgaatgcaccgttacattcaataaccttgacaatatgtcgctgagcgtgaagctgcttggaaggctgatcttttttgtcccgatgcaacaattgctcgtgcagatgcaacactgcatatcgatcgtgacagtctacatgtccagaaaccagtcttaatatgaactggatc

SEQ ID NO: 92415 - DNA, 647 bp, Glycine max
  Clone ID: PAT_MRT3847_54465C.1
gcagtaaaaggattgttttccaaatcaatagtaaatgagaaataacgtctcaatcgtatgtcataaagacttggccgatatcaattcaactgtatacttactggtacggcctatttttattatgaagtcaacaaacaaaaaattcagaagaaagggctctacttctaaatgcttctgaagtttaaaaaaaaaaaaaaaaaagtccattagattgtgtttttctttcctataacatgacattatcatgttagtaagcaatatgagaggattcaatccaaaaaattaatatatcatcagagctgtaatgccaaattaggctgcaactgggaaccagcctccacgttggaactgggtgagtttgtagttccaatccttccatttaagtcattagcaagagcaaaagaattctgtttagtgggaacttccaatccctgccaagatgattttccagcaagcccttgaggccaactttgtggctcaaatccaggttcccgtgacaataaattaccagaatctaattgacttaatttgcttaagtgctgacccttaaaagaagaatcaacatttgtatgcacaatgcggttgcttatgggatccatgtcaaacatttgaggaacaactccagcactcgaagtcccagttagatc

SEQ ID NO: 92416 - DNA, 955 bp, Glycine max
  unsure (1)..(955): unsure at all n locations
  Clone ID: PAT_MRT3847_54466C.1
ccatgtctacagttttggagttgttgctttagagatagcttgtggaagaatacccataaaccatagggctcaagaaaatgaaataagtattgtgcagtgggtgtggggactctatggagaagggagaattcttgaagcagcagatcaaagactagaatggaaatttgtggaggagcaaataaaatgcttgatgattcttggtctttggtgtgctcaccctgaccataacaataggccttcaatgaggcaagcgattcaagtgcttaactggctcccgcccgtgcctcctcggccagcgcgtgtgccggttccgacgtctcctgttggccccttgctcccttacagagcgcctgtcggcgtaaccccttcagccgtagggcacaagaaaatgaaataaatattgtgcagtgggtgtgggaactctttggaggagggagaattcttgatgcagcagatccaagactagaaggggattttgaggaggagcaaatcaaatgcttgatgattgttggtctttggtgtgctcaccctgaccataataatagggcttcaattaggcaagcaattcaagtgcttaactttgaagctcccttgcccaatcttccatcaagtttgccagttccaacatatcttgatggccccttgcactcatcgatagcaccattcagcataactgcttcagtggaaggtcatagccagatcagaagctccactgcaaacacaaactcctctgggttcaccacaacttctgatgatgcttctccctctgtgtcgcttctgtactcacggtaaaagtgattttatcagaatgcttttttccttgttacgattatatttacttctctttctgtacactgtaaagtcagattttgtctgtgtatttaaatatgaaaaaagcaannnaattttctggctagttgttcatttaaggtcctacgaacaattgtgacagatt

SEQ ID NO: 92417 - DNA, 603 bp, Glycine max
  Clone ID: PAT_MRT3847_54467C.1
tgtagttaaaattgttcttgaaatgccataatgtgagtttttccttattattgtagcttgtggaattcattaattcataagcctcagaactaggctaggaaaagcaatggcataagacgacacatagtttgttgatcaaccacataacatgcgggtctaaatctatagtttgtgtaattttttaaactaatttgaacatactattatgatccggaaacagaatatgaatttagagagagagatgtgaaaagatagaagaaagataaaaaaatgcttctgttcttgaatattgaatgacatagaaggagagaattctctgctgggctagggtttccccttcacaaagggattcccttttcttctgcagagcaatgctcaattcccaactgcttacagatctgaatgttttcccttctatccctcctatttaagcttaaagccattgcccttccaactaaaaccactttctatctaattctatgatttgtgactccctaaatcctatcacataatacaactctcctacaactaacatatatagtctcgcatatcaaattcaaatgagaactccaaaggctcggcctgttttggttgaatgtaaca

SEQ ID NO: 92418 - DNA, 406 bp, Glycine max
  Clone ID: PAT_MRT3847_54468C.1
ccttgattccgctctgccacgactgagaaaatagcgacgcggaaacacgctcgtcatcacgatcctgccatccagcgcggcgtgtccagcgattccgctctccgatgagtctgcgcaggttgaagaatcgcgaggccagctgccggtgaagaatcgcgcgatttgtctggaagtcgcgattcatccccgatacagagattcaaccacgattcaggaacaaaaacgagacaacctcctattcgtatcggtagcagctggaatcgtatcgaatcgtgtgaatacgtatcgtgaatcgtacgatactagttttagaacattgctttgaaatgaactttctggttcatatccccctgctgaaaccacatttttatgcactgcaaaagcaactaatagttgtcttacatta

SEQ ID NO: 92419 - DNA, 439 bp, Glycine max
  Clone ID: PAT_MRT3847_54469C.1
tttttttttttttttttttttttttttttttttttttttttttttttttttttttttttttttttaaaaaaatggggtttttaaaattatgaaaaaaaaattggccgctttttttaaaccttaaatttgggagtgttacctatggtgtaaaaattttttcttaaattatttgcaaaaaaagggggggcaaaaaaggggggaaaaaaaacagggggaaaaggttaacccggaaaaattccggccaagataaaaaccggaagcaaaaagtgaaaaaggcggggggcctaataagggagctaactaaaataaaatggggtcgccccagagaaaaattttccgccgaaaaaatgtgagacaactttaataaaaaaaacagcaaaactctgtgaaaagcagttaggggattggccccccatgagtgttctttttccaaccagtg

SEQ ID NO: 92420 - DNA, 178 bp, Glycine max
  Clone ID: PAT_MRT3847_5446C.1
gtactacatttggcataatgacggaatatgagggagagcatatgataatctggtagttttatatttgctcacaactaactttttaaagagttatttttaatcctaaaagagatttccctgctttgatccttatagaaatgatttcgtataattaaggctaaaaaatgcacttagtcat

SEQ ID NO: 92421 - DNA, 433 bp, Glycine max
  unsure (1)..(433): unsure at all n locations
  Clone ID: PAT_MRT3847_54470C.1
tcgntttttaatttttagaaaagagcaagaaaacaaaaaaaaaaaagaaaaagaaaaaaatttaaaaaaaaaaaaaaaaaaaaaaagaggaaaaaaaaaaaaaataaaaaaaaaaaaaaaaaaaaaaaaaaaaaaaaaaaaaaaaaaagggggggggcgttttaggggaccaaaattaccttcccgggggaggcaaggaaaaaatttttttatggggcccctaaaataaaattagggggcggaggtttaaaaagttgggaatgggaaaaaccggggggtacccaaattaaatgccttgggagaaaatccccttttgcccagtgggggaaaagcgaaaagggcccaaacagaatggcctttccaaaaagtggccaagccggatgggcaatgggaaccccccttgaagggggaataaaagggggggggggggggg

SEQ ID NO: 92422 - DNA, 187 bp, Glycine max
  Clone ID: PAT_MRT3847_54471C.1
cgcccctctctcatcctccaatgttccgaccagcctcaccgatcgaccagatacgccgagtttcaaggacggcagacagactgcttcgatcaaggacggcgctgagtagcagtactaccaaggaacttggcgactggcacgacgtcacttggtcaagaccctgctgagacagaactgcacgatatga

SEQ ID NO: 92423 - DNA, 234 bp, Glycine max
  unsure (1)..(234): unsure at all n locations
  Clone ID: PAT_MRT3847_54472C.1
actnttcttcaattcatatcatatcaattagatttngagctaaacataaaattgnattcacaatacaatnnacacggaanaataaattnncngacanttcantgacnagttgangcntgnatcnggtatggcnaatctgtnctctgaatgnttattccattnggagaaacagcnacagctccaagnggcctgntcagaggnggaanttgatgtcaagggcangctttcaanacc

SEQ ID NO: 92424 - DNA, 396 bp, Glycine max
  Clone ID: PAT_MRT3847_54473C.1
ctgatcgctagaactagattgaataaaatgaaattttataccctttactagcttagatactcaaatttctttgaaagggattaaggcataacggttattcggcttatgccatgtgtgagacatttaccacttattagaaagttgcaaattacatcaaagtcaatcttatgccaattagataagtggaacccttaaatgtacattcattttttatggatattttttaaagttctcttaaatatattttttaagatgtaataatcatatgcactatacgaataaattttttaacttgtaattttaattgaatttaaatatatttgtacaatgcacatgattcttgttacaccttattactattattagcaagcatcttactcatccattcgttatatg

SEQ ID NO: 92425 - DNA, 1168 bp, Glycine max
  Clone ID: PAT_MRT3847_54474C.1
ggttgtcaacattgaccagagatgcaggtgaggtcaggtgaggcgagggaaccattcaactggcaactgctcccggtcccttcaacctcaagccaccacagcaaaaaggttccctaaatcaaatcataacaactttgtgtgctttctttccgcactgaacagtgaaaatcacgcaaacaacattaaaccctctttcatgctggcctcagactccggctctgtgctccgacccaaaccccccgtacccactcttgacccgacccgttcactgctccgccctttctgcttcgatccaggatccagacccgcccggcccactctctccctcaaaatggaactgctccgccgaatgggccgcggctgcttcaaggccgaggccgattccgccggccaggacttcttcgacgccgccgccgccgcggcgcccaacccggctcctcaccaccttgttattatggttaacggaatcattgggagtgctgctgattggagatatgctgcagagcagtttgtgaagaagcttccagataaagtgattgtacaccgcagtgaatgcaattcttcaaaattgacgtttgatggtgttgatacaatgggcgagaggctagctgaagaggtattatctgttgttaaacgttggccagaggtgcagaagatatcctttgtggcgcattctctaggaggcttggtggcaagatatgctattgggagactttatgattattcttcaacattggcacttgttggtaccagtagagactatttcaatgaagagaaaacagaattttcaaagcaattccttgaacagagttatgaagccaagattgctggtttagagcccatgaactttataacatttgcaacaccacatctcggttcaagaggaaataaacagcttccatttctttgcggtcttcctttccttgagagaagagcatctgaaactgcacatttagttgcagggagatctgggaagcatctcttcctcatggacaatgatgatggaaagcgtcctctgctcctgcgaatggttaatgactctgacattttagcgtttattgccagctttaagtgccatttaaggcgtcatggggcaatggcaaatgcaattatggatcatatggtaagaatggcgtacctcatcaattcgtcgtcaacatgaacttcc

SEQ ID NO: 92426 - DNA, 2479 bp, Glycine max
  Clone ID: PAT_MRT3847_54475C.1
cacgcgtccgaatcattccccactctctcccctgagattctccctcccccaattcctacgccaaacaaaccctctctttccccctttttcctcttttctccttcattcctagggtgcagaaaataaaaaaagatgaagtccctcagcaagttgaagaaaacacttcacaagacagtctccaaggacaaaaaggactttccccccaccgttaagttcgacgaactcgccctcgctgccaaggacatgcaagccatgagagattgctacgatagcctgctttctgcagccgctgccacgcaaaacagtgcttacgaatttgccgagtcactgcaggaaatgggtacttgtctactggagaaaactgccttaaatgatgatgaagaaaatggtaaagttttggggatgcttggaagtgtgcagcttgaacttcagaagcttgttgatagctatcgttctcacatagtactgacaataaccaatccatcagagtctcttcttaatgagctaagaactgttgaggacatgaagcggcaatgtgatgaaaaaagagatgtttatgaatacatgattgcccaacagaaagagaaaggaaagtcaaaaagtgctaaaggtgaaagtttcacgctacagcagttgcaagcagctcatgctgaatatgaagacgaagcaaaactttgtgcctttcggttaaaatcgctgaagcaaggccagtcacgcagtctcctaacacaagcagcgcgtcaccatgctgctcagttgaatttcttccggaaaggacttaaatcactagaggctgttgacccacatgttaggatgattgctgaacgacaacatattgattaccaattcagtggcctggaggatgatggaggtgaaaatgataataatgatgatgggaatgattttgacgtcattgaaggtggtgagttgagttttgactacagggcaaataagcaagggccatatattgtttccacatcaccgaactcagcagaggtggaagaatcaggccgttcatatattcgagcttcaaccccagaaactgcagagacaagtttagagaagaaccaaggagattttaaagtttcaaatagagtcggcggcagttattcagctccaatacttgcagaaaagaaatttgacccagctgaaaaagtaagacaacttttagcattttctgcagcaaagtctaatgcatatgttctccctacaccagtcaacatcaaagaaaccaaaactagctcagccccccgcactagtgccagtggatctttgcataatttgtggcattcttcccctttggatgaaaaaaagaatgagaaagatgttgatagtaaattgtcagagccgactatccctagagctcactctgttctcaaagaaagtaacagtgatactacatacacccagttaccacgcccttcagctgatggactctcacctccacaagttgatcttttcagtgctactgatactaagaaaataaaaagacaagctttttcaggtccattgactaataaaccattatcagtaaaacctgtttctggggggttttcacgtttaccagtgccccagccttcatctccgaaagcatctcctaatgcttcacctccccttgtttcttcaccccggataagtgagcttcatgaacttcctagacctcctggtaatcaatctagcaagccacgagtgggtcactctgctccattagtattaaaaaatccagaggctgccatgactaataaatttccttcagttgtatttagtgcagcatctccacttccaactccacctgtctctcggagtttctctataccttctagtggtcagagagttgtggcattaaatgtttctaataccaagtatttggatactcccccaagtttcaaaggttgataaagccgtgtcacctccactaacacccatgtcccagagagcatctaatatatctgacctggcttctcactctagcgaaatccaagtgaatgcaggtgggagctaaatctcttgcgcacatactgaggttgagttctgctgaatcttagtttaagtgtctttattctatgtcggagctaaatcacttgcattgtggagttatagggttttcccaacaaaaaggttcaggctaatatatgtaaatatgctgtttatgtattgtttagcttctcatctcaatttgtatctattatttttactttaactagtgatgatgggaactaaactctacatgattgtcattataatgtgttgtgtacatattcggatgaaaaattttgttcacttcccaagtccaacatgacgacaatgaaagaactttagcaacggaaaaagctgcttaccccatttatttattttttccattttcctggtgctcaaatttcaaactgatttctattggccgtgagatgacacttgaatattcatcaatatgaacttattacacttaatttgggtattgacttttggattatgatttgag

SEQ ID NO: 92427 - DNA, 824 bp, Glycine max
  unsure (1)..(824): unsure at all n locations
  Clone ID: PAT_MRT3847_54476C.1
tgggagtgctgctgattggagatatgctgcagagcagtttgtgaagaagcttccagataaagtgattgtacacctgaatgcaattcttcaaaattgacgtttgatggtgttgatacaatgggcgagaggctagctgaagagaggtgcagaagatatcctttgtggcgcattctctaggaggcttggtggcaagatatgctattgggagactttatgattattcttcaacattggcacttgttggtaccagtagagactatttcaatgaagagaaaacagaattttcaaagcaattccttgaacagagttatgaagccaagattgctggtttagagcccatgaactttataacattgctgcgagaagacgacagaaggggaggaaataaacagcttccatttctttgcggtcttcctttccttgagagaagagcatctgaaacggcacatttagttgcagggagatctgggaagcatctcttcctcatggacaatgatgatggaaagcgtcctctgctcgtgcgaatggttaatgactctgatgatttaaagtttatgttagtattaaagtatcagttaagctcatcaaatgctagtatttgtttttgtattgttgacaatctaattgtttgtgatggtgtaggtcagctttacgtgcatttaagcgtcgagtggcatatgcaaatgcaaattatgatcgtatcctcttttacatttaggttttaaaaaataattcatctgaccatataagcttaagcccaatgaatctaaagtcaaccacgtatgtcaaagttagcagattcagtttgtatgtgcanagaactt

SEQ ID NO: 92428 - DNA, 619 bp, Glycine max
  Clone ID: PAT_MRT3847_54477C.1
ggctcgagctctctctctctcttgctgtctgtctgatctatctctcttcttcccttctttgacccaccctcctccttctccttcaatgtcttttgcactcctcaatccattcccacactctttcccctgagattctcccccaattcccaccactccaaacaaaccctctccctctttttcccttcctagggtgcagaaaagatgaagtcctcgctcagcaagttgaagaaaattgcacttcacaagaccgtctccaaggacaaaaaggactttccccccaccgttaaattcgacgaactcgccctcgctgccaaggacatgcaagacatgagagattgctacgatagcctgcttgctgcagcggctgctacgcaaaacagtgctcacgaatttgctgagtcactgcaggacatgggtacttgcctactggagaaaactgccttaaatgatgatgaagaaagtggtaaagttttggggatgcttggaagtgtgcagcttgaacttcagaagctaggtgatagctatcgttctcacatagtactgacaataaccaatccatcagagtctcttcttaatgagctaagaactgttgaggacatgaagaagcatgtgatgaaaa

SEQ ID NO: 92429 - DNA, 532 bp, Glycine max
  unsure (1)..(532): unsure at all n locations
  Clone ID: PAT_MRT3847_54478C.1
cacagagactagcgtcgatctatcgctagnaatgtaccagagtcctgtcacggaaaatttcgcgcaatgaaacaagacgacaagacgagatccgcggccggactggtcagacaggaagtaatatacaccacgcactcaaatgacaagttcaaaaataagcctcctccactgacatacttatcttcgcctggttcagagcagtcatggttgtaatctggtgttcatcctgggttatcttcgtcatcacctaaacacctcgggctcaactctccccgattattaatgtgtccacacccaattcgccaaatggtaattccctaataacgatggtggtattacaaattatgttattagtcgtcttggtcttagtcctaaaaacgagcgggtgccaaagccaggttatagaagtccnctgtatatccagacgttggcgtgtaaatgtaacttgcgtattaaccggcggaacctgcccaggggccaacagccgcgttagattgagccaaccactggcgcctatatagccgggcagtca

SEQ ID NO: 92430 - DNA, 585 bp, Glycine max
  Clone ID: PAT_MRT3847_54479C.1
aataatttccttcagttgtattagggcagcatctccacttccaactccacgtgtctctaggagtttctctataccttctagtggtcagagagttgtggcattaaatgtttctaataccaagtatttggatactccccaagtttcaaaggtcgataaagctgtgtcacctccactaacacccatgtcccagagagcatctaatatatctgacctggcttctcactctagtgaaatccaagcttcatcttgatgggaatcaaatgtgagtatgaggcttttcagtgaatgcaggtgggagctaaatctcttgcgcacatactgaggttgagttctgctgaatgattcttagtttaagtgtctttattctatgtcggagctaaatcacttgcattgtggagttatagggttttcccaacaaaaaggttcaggcaaatatatgtaaatatgctgtttatgtattgtttagcttctcatctcaatttgtatctattatttttactttaactagtgatgatgggaactaaactctacatgattgtgtcattataatgtgttctgtatatattcggatgaaaaattttgttc

SEQ ID NO: 92431 - DNA, 209 bp, Glycine max
  Clone ID: PAT_MRT3847_5447C.1
gatctataaccactcgctcgagcaggagctcgtctcagtgtacgatgttcaaccgcgtgacgagaccgctccaaggaaatgcaaagagtcgacctggacctaatacatagtgacacgctggggatgctatcatcgacaagggcatgtgcactaaattaggacgacccatgagactccactgcataatcgacttcctcaactttgggtcc

SEQ ID NO: 92432 - DNA, 4152 bp, Glycine max
  Clone ID: PAT_MRT3847_54480C.1
cttagctttatcatgtggcattactaccaccaatattagcaccagctgaatatgattggaatttcgtttgttctctgtcatgctgctatggcttccttatcgaatatcttactgatgttttgtttgttcaatcttctagcatacccagtttcagttcattcagctggtgaagttccaattaatgtgacaaagcacttttccttctataacttcagcttcagcaacaaccccagattagtccatgatgtgaagctcctaggcagtgccaagttctcaaatgaaaagggtgctcttcaaatccccaatgaatcagaagatataagacaccaagctggtagaggcatctattccttcccaattcgcctgctagatccaagcaccaagactccagcttcatttcaaaccactttctctttccaaatgaacaattccactgcctctgagcaagctgcttatggaggaagtggcctcactttcatcattgtccctgatgagttcaccgttggaaggtcgggaccgtggcttggcatgctcaatgatgcttgtgagaatgactacaaggcagtggcagtggagttcgacacaagaaagacccccgagtttggagatccaaatgacaaccatgttggcatcaacttaggtaccatagtgtctactaaagtcatcaatgtttctgatgttggattgtcccttaaggatggttctgtttaccgcgcttggatcacctatgatggtcctcaaagaagaatggacattcgtcttggaaaggcaaaccaagaggattatccttccaagcccatgttctcagaatctatggatctctctccttatctaaatgagtacatgtttgtggggttctcagcttccacaggtaaccatacacaaatccacaacttactctcttggaacttcacttccacaagccaagcttttcttcacttgccttcatctgaatcctgccagggtaagatcttacttgagaatagcactgctgccacagaaccaacaaattcacagaagtcttctaagaatgaaccaccgcgaagctttttgatttttgtggcagctgtggcattggctctggctcttttccttggcttttacttcatcagcaagcacagaagaaatgctgctaagttgaatacttcagtggaggcagagcttcacatgccaaggcctcccaacaaaccacgacgcttcgccttttctcaactttcatcttcaacaaggtcattcagtgagatagagttgctcggcagtgataatagaggagagtactacagagggaagctttctaatggcagtcaggtggccgtgaaaaggttctcagctcagtttctcagcacacatggatcggacaagaagagattgttgaaggaaatcaaaggcattagccatgttcgccacccgaatttgcttcctgttagagggtggtgtcaagacaaccatgaaatcatggtggcctatgactttgtccccaacggcagcctagataaatggctatttggggccggtgttcttccgtggactcggcggttcaaagttattaaggatgtggctgatggcttgagcttcctccataccaagcaactagcccacaagaacttgaaatgcagcagtgtgtttctagatgtcaatttcagagctgttttgggtgattttgggtttgtgttgatgggtgcagaatcaaaacactttgagtcacaagtgtgccaaggtgctgatgtgtttgaatttggtgtccttgtgttggaagtgatagctggaagggtaagggatgagaaagaggagggaaatccagaagagaggaacctactgggttatgcttggaacttgcatcagattgatgaaaaggtgaagctggtggacaaaaggatgggatcattgatcaacctggagcaggcaattcgcgctcttgaaattgggttgctttgcactctaaatgagaacaaaggaaggccctcaatggaacaagtggtggattttcttctcaacatggataagcctattcctgagctgccaagaactcgccctgttgccttgttcccctataatagcgccaacacgggactttgcaatgcatattcttgcactttttaagtggagccatgaggttgctgaatgattatgtgggagatgtatgaataaatgtgaaaaagaccatttttaggcctgcaacaacggattgattttccaaatgctgtaagtgcttaaaatgctgtgtgtctgtgaagatggttgataaatattgtattgtattagccttggggattcattttcagtatgctttagcatcacagcctcgatgtaggattatttgtaattctgtttaggatccacttgttatatggaaagtgaaagatggttgataatgctaaaaagggaaagtagagtcaatcttattattattgttattattatttatataggttaaattatatgaagcacagctcaattgttcccttctcggggcattttcttttatttttgcccccctcccctccccaaattttttcagccccaaagctattactccaattatttctgtttctggtttatgcatgaaattatatttgggatagaatcatgtgtaataaacaagactggttgatttggaatactctagtgatcattctatcatagtgatatagcatatgggttcgtgccaaatagcaggaataaaatataaataaatattgtttgttaacatgtcattataacattaaaagaatgcactgagagctatgctctctgagttagttcatctttctcctttgcattttagtgatttctttctttcatttttgtagaatgtgttggcaataaaagggtgtataatgcaaattgcaatatattatgcttatattgataacattccaaccagatggaaggaacttctgcaagggtgaacatatattatttttggtggttgactggtggtttcatctagcatttaaattgcatgtgttcaagttttagaatattgtgtaaatgaaatgcttgttgtgagatgctgttgcatgttttcggtttttgatttggctataatgattattttatttagttctgctgtggtcctataatattgtgttgattagggtgaagggattattgtatttatttgtttttgtcatttacatatcatttacattattattaatttttcttggttgtatatatgtgtaaattttgtgttgaagtgcaccatggtggatagtttgtgaagtcccctgtaatgtaccatggggggcaatgctgtgtatgggagtgtgattaagatttttggtcttactggtagtgtcttgctggaattaaggagttggcatatgcgacaattgacactatgtggtataacataggtgggaagaggttggatattggctatgaaaaggatagtgctgctaaaatcagttttggtgagactgaaaatgatgcaaatactgatttcgatattttttacaatgttaaccagaaagcagggttgggagggaaagaaaaagctaaaagtgaaagaggttttagaaggacaagagggaaaaggaagggaaattctacgagtatataaaagggaaagaagtgcaggaagatgagaacaaggggaagggaaaccagtgcaggaagaatagaaggggaaaggaaaaaataacaaaaaaaagagaaagacgtagagaagggaaaatcaaatgagaaggttaatgatgatgtcatgaagctgttcagaaacaatcaagggaaagggggaggcctacaaaacaaaacaaaaggttctatgtacaccatttgaagatagtgacatgagtcaaaagggatgatagtgactcagattagggaatgaacatgaatggaccatgtcgaatgggcacttctagagcttgaatctgactcctcttgcggaatgcactttagaaataaaaccgtgcacacacaatagtggattactaaagaagttattaataaaatataatgataaaagctttttggtggggtccattggaaaacaacaaaagagagttgttccattgtagagatttattacttagagttacttgtattgggaaaagtattgtaagttgctgtaatgtggatgctccaagaaaacaacggttgctagttatgataaaatcaaaatacatatacaacacaatttaagtt

SEQ ID NO: 92433 - DNA, 767 bp, Glycine max
  unsure (1)..(767): unsure at all n locations
  Clone ID: PAT_MRT3847_54481C.1
ttagtttaagtctttcttctgagtcactaagaagctgcacttgctaaagtttgatacttgcttctttttttctttcctaggtgtgaagctttggaggaagaaaattcaactcaatgaggcactgctgaagaagaggttcaaccatcatgctgctgtggctcatgatgcagatcagaaaccccacatgtgcgatgctgtgatggatctcttgcatgagattcactctccagtctccaaaatgcaagctggatgccagatctcaaaccagtgctagcaaggtatgggatttcttcaattcatgtgaaagttccatttggcaaggaaattgaatctagtccttgacaacctacgatatcttgttgcaagcaaaaaaaaggtatactaggtttgaagggagctagtggttcaggtgttagagacaatgacaaagaaatcatctttatttggttgataactgggatttttgaatggtgggtatggatgggatgtgtgagatcttacttgcccgatatttgtacaatgaaccaaggatggaaggtgaatctgatgtcaaggtttgtgtcagttntatatgagtttgatgttttaagggtgacaagagtgattcttgagggaattactagatcaacttatgttacaacagtagttgaagccgcaggataaacaactcttgaaaactcctatcattccattagtccatgcaggaagagatcatttgctactggaatgagaaagtgcattgaaaatcaatatttggagaatttttg

SEQ ID NO: 92434 - DNA, 689 bp, Glycine max
  unsure (1)..(689): unsure at all n locations
  Clone ID: PAT_MRT3847_54482C.1
cccgcgacgnaaggaattaggtccaagcgtccggcagaagccatatatcatccagctgaatatgattggaatttcctttgttctctcacatgctgctatggcttccttatccaatatcttgcttatgttttgtttgttgaatcttctagcattcccagtttcagttcattcagctggtgaagttccaattaatgtgaccaagcacttttctttctacaacttcagcttcagcaacaaccccagattagtccatgatatgaagctcctaggcagtgccaagttctcaaatgaaaagggtgctcttcaaatcccaaatgaatcagaagaagacataagacaccaagctggaagaggcatctatttcttcccaattcgcctgctggatccaagcaccaagactccagcttcattccaaaccactttctctttccaaatgaacaattccactgcctctgagcaagctgcttatggaggaagtggcctcactttcatcattgtccctgacgagttcaccggggggaaggcccggaccgtggctcggcatgctcaatgaatgcttgtgagaatgactttaaggcagtggcaggtggaattcgacacgagaaaaaccccggagttcggagatctgaacgacaaccatggtgggcatcaaccttaggtaccataggggctactaaaggcattaatgg

SEQ ID NO: 92435 - DNA, 355 bp, Glycine max
  Clone ID: PAT_MRT3847_54483C.1
gatttaccgagccgacccactcgtcctaaaactaattatatctataccttttccctttctccaccaaaaacctaacatttgcaatatcgaatcttcactcttccaacattcaaaacccttatccctacctacaccacactcaatcgaaaatcctcattctcttcttatacacccaacataaaactctgatctactcgtacgcgactcttttaacagatcacatttctttatacaccccatacaacttaaactttaacttcatagccttacaatgccttcataatcacccttccaccaacaacaagcttacctacaattcctactcacacacattcaattaccctactgacaattc

SEQ ID NO: 92436 - DNA, 397 bp, Glycine max
  Clone ID: PAT_MRT3847_54484C.1
ctatcaacaccttccaaagatgaaaccgttatctcttggggaagaagctcaacatcactatcaccaaatccttattttccaagtacatgcccaaatacttaccacttcttgaactgtaatcactcacttattcccttaagccattcacattattacaaatcatgtaaaccattctctacattcgctcaaaaaacacttgaatatcctctctaattcacaccatacatgaccaaaactcaaatagttgaaaaatatcatccgtgcgttacttctattgaaacttcttttctatttattttacattctaattcgtcgggtgctcttttaccttgtaaaatcatacaattacctaacctttagatagcttcacccacatattatataaatactatccgtt

SEQ ID NO: 92437 - DNA, 508 bp, Glycine max
  unsure (1)..(508): unsure at all n locations
  Clone ID: PAT_MRT3847_54485C.1
agttcccattcaaaggcaccatctactnnnggacaagcnacagccgntncagctcaacnnagggtagtagtgtttggggtggagatgaggactcaagaagcatgtttagtgttcagtcggagcgctaccgccgacacagcattgcaggatcctcagtgagagatgatgatagccttgcaagcacacctgccattccaagttacatggcagccacaagctcagcaaaggccaggtccaaaatcataaggcattcacctgaaaaaaaaggtggtggtggttctgtttctgcaaggaagcgactttctttctcaccctcttctgctgctaattcaagaaggcattctgatcctcctaaggtggaaatggtttacaataaggatgctgctgcggctacagtaagcaatggaaggggaaggtagtgtgctggggatgtcattgccacttcagcaattcttgtaggagcacaatatctatggatctatttggataaacttctccataatcactt

SEQ ID NO: 92438 - DNA, 265 bp, Glycine max
  Clone ID: PAT_MRT3847_54486C.1
gcaacttcgcatgcttcaattgttctataccaaattacagttctatacttatagccgagaaattgcttgatgtaatgttctttcaacgaatagctgtaatcagtaggttatcgtgaagcttgttcaatgtatcgatgaactataaatctcgtggttgtgatgaattttggaattccccctccccccttttctgcgtcctcgaaaagctaggtctcgtacgtggtttcgtgtgttagtaaagtaataagtttcaatatgcagatct

SEQ ID NO: 92439 - DNA, 481 bp, Glycine max
  Clone ID: PAT_MRT3847_54487C.1
ctgacattaatcttagggctgtcaaatagatatgccagtactaaacaaagaacaaataatgaacttatatacctcaatgagacactacttttttgcgggaggggacttttggctatacatatccttaacagagcgggttctccacattcacaacataagccaccgctttaaaaaggaatatatgcacaagtatacctcagagcattaaatcttatctttgatttaactgaaggtaaagaatcaccccttctgtgtagagaaaaaagctcaacctttctatctaccaagatggaaatgcttatcttcattccttttttatctaacaaaattaaaaaataaattgcagtgcagttttgcacctaaactaaggatttcatgaaatcgctgttaaccatgatgaataagttaacgattctagtctagtccatagttaaaaaaagaaagattaaatggcgtaaacaatattgaagggaatgaattc

SEQ ID NO: 92440 - DNA, 475 bp, Glycine max
  unsure (1)..(475): unsure at all n locations
  Clone ID: PAT_MRT3847_54488C.1
gttttaggtggggtttgtactgtggcattgtttgaagtatctttttaggtttttggttgaacgaattgttaatggatcaaaacacaagcgagggaagaggtgaggtattgggtccggtttatgaaggggaagatggaaatttgagtaatttggttgaaggggttgtagttttaattgatgctgtagatgggaacagcttgggtggaagagttagtataagtgaagaagctggaacttcaggagaggttggcaaggatttcggatctgatatggagctagaggaggggattgaggaagttaaggatcaggacaatcatgatcaagaaaatatcagtgatgataaattgctcgaggttgatcagggaactagttataattcanaccatttggttaatcaagtagtgattgaaactgtggttgcaattgagtcttgtcagactaagtatgtcactgaagataataggaaattggaaac

SEQ ID NO: 92441 - DNA, 927 bp, Glycine max
  Clone ID: PAT_MRT3847_54489C.1
ttcgggatcattgttctcagatcccattgccataaattactttgtccacaatcttgatttcacgctcagcctcgcgtcacctaacaattttgaagcatttggggttgcaattgaattcttctgagcaaaccttgttcttatcgtcgccacaatagacatggtttatcattctagttttgtgaatgaagatggagtgagtagagcttgtgggtgctctcttcttcctctcaagagccacattaagggacctgctcctgtttcagatcaagacagaactgatattgtggatgaagccataaccttcttccgagccaatgtgttcttcagaaactttgacatcaagagccctgctgataagcttctcatatacctgaccttttacattaatgttgctctcaagaggcttgaaggttgcagaaccttggctgaaggaaccaaggcaatcatcaacttgggtctcgaaaaggttcctgtccctggagagtctggctttccatttccgggccttttcccccttcctcaatcacacaaggaagcagaattattcagaaattatttgaagcagattagggaagaaacaagtgggaggttactgagcgttgcatacagacctaatggcactccaaataaatggtggttggcatttgcaaagagaaaatttatgaatataatcatcccttgaactgttgtggcaaacatgcaattcttaaaccatagattgtgttgtgaaaaatacacttaaacactgttgatctgccaattaaaaatatatagtctgttttgaatctttgtttttgattttgaatatactgaactactctttgctaacacattttcacaattcgtttgttggtcagtggtcacgtactttgtaccccataaataatgaagtcagtaatcatatgacccaaccttgcttgtgctggt

SEQ ID NO: 92442 - DNA, 146 bp, Glycine max
  Clone ID: PAT_MRT3847_5448C.1
accgcttccaaaaaaccaccgaaaggggctaccttatccctctctctctatctctttctggttgatgcatatttatcactcttatggcacaatttcatcaagcgctcttactccaatcctaaacttcgttttcatttccaatctta

SEQ ID NO: 92443 - DNA, 374 bp, Glycine max
  Clone ID: PAT_MRT3847_54490C.1
tcgacccacgcctccggcttttaaagtttacgtcaaaaacatgatgctctagcaattctgaattatattgtgcttgctgatagtaaacaagttacaacatatagatttttagtttaggtcaacttttctaccattgtttattacccaaccctcacctatagaagctgtaataatggaagtcaaaggctggggaaaaatgttttagaaataagcagagtgcgagtgtaacttttaatttatatagacacttaataggatacccactctatgggctttgctgtaactgtagtactgaacattcttatttatttgagctttcaagatataatattaattagctcacttcctggagcattaataattattatttatag

SEQ ID NO: 92444 - DNA, 147 bp, Glycine max
  Clone ID: PAT_MRT3847_54491C.1
attctctttctccattgcacaacctaacatgcggagagagctctcacggtttgagggaaaatacccacttcctcactgatgcgttccaagctaccaacgatgcctactctggcagtctcatgccatgaccgacaaggggatttattg

SEQ ID NO: 92445 - DNA, 313 bp, Glycine max
  Clone ID: PAT_MRT3847_54492C.1
ttgattcgtgggcacaaacagcgcacagacgggaaggtggctgagggaaagcacaaccccgtatctaacctcagggcaggggagaatcatgtagaccaaacacccccaaaggcacaggaggaaaccctgccctctagtgcaagagattccagaactgcaatggcgagtaaaaatagcaagcctcaaagctactgcaacgcatgtgggagctatagaaataaccattgaaagccacgcaagtcctgactgcaacaaagactggtgcaacgccttagggttgaaactcatcataccaaaccctgaaaatgcagtt

SEQ ID NO: 92446 - DNA, 397 bp, Glycine max
  Clone ID: PAT_MRT3847_54493C.1
gttattcttttgaataacatccacaatttttatataagcagttatatgctgccaatcggggctgaaattgaaagagtgagcagctttggaacttatgctggctaaaacggaaatgttcaagcagggttcatggatcaagacatgaatgatgtttatgacattgggcaaatctgcgctagaaatgatcttgggacaaccaataatgttgcacaatgaacatgaaacactaaactatctgttacacgtgagcatctgaactgatgacatacatagacggagtattgaggacttacatgactacagggaatgagcagatgaatgattaatgactatgatggagatatcagtgaggtgtctttctggtgaatcaactgctaggacttctgaggaagatatt

SEQ ID NO: 92447 - DNA, 385 bp, Glycine max
  Clone ID: PAT_MRT3847_54494C.1
tgaccatgctaacgaggctgatcattacccttgccatgtaatgatcttgaaccatcctcgtcatattggacatggttctgcccctgtactgaactgccacacttctcacattgctgatatgtttgctgaactcattaccaaaattgacaggcgatcccgcatagagcttgagaaggagcccaagtttttgaagaaccgtgatgctggttttgttatgatgatttcaaccaaacccatggctgttgaaactttctccgtgtatcctccactctgtaggttcgctgttaaggacatgcgtcaaactgttgctgagggagtcatcacgaacgatgagaagaatgattctaccggagccaacgtcaccaaggctgcccacaagaagaag

SEQ ID NO: 92448 - DNA, 282 bp, Glycine max
  Clone ID: PAT_MRT3847_54495C.1
cttgggattcggctcgagctcgtacaacgtgctagcgattacgtatgatgatcttgttcggagatcagggctccggacaatggagcgatgacttattcttgctcacctatattgccaatcacggtgaaagggcttggcacgtttgggccaatggtagggtacgctatcgggccgtagagaggtgaccagctgctggtctattctaccttggtcctgatggtagatgagggaataatactcccgatgaacaggttttgttcatcggactccatgcatggtggg

SEQ ID NO: 92449 - DNA, 360 bp, Glycine max
  Clone ID: PAT_MRT3847_54496C.1
cccccaaagtaaacttaattttttaacaggatttattttattacaagtaaattcttcgcagtataccacaaaaacataagcctaaactgggaggccaaacattttttataaattttgaataacggggtttagagccaggggatgcaactgaacaaaaccttttttgtttaaaaaaattcacctggcggctgatgtaaacgggtaagaggcataagagagacggcccaattcaatactgggggggataagtttggcctttgtattttcaccagcagcaccaatagcacggtgcgggggataaaagtgtccccgccaggggtgagcctttctggagtggggggcttattgcttacaaggatt

SEQ ID NO: 92450 - DNA, 444 bp, Glycine max
  Clone ID: PAT_MRT3847_54497C.1
gggggagccaacgcaatggaaacgttttcgtttttttattaaaaaaaaaagaactctgggccttgggggttcaaacccattactagatagtatacccatacaaacccagaacacaacatcaaggggacacccctcgattaaaaaaaaatagggggggcaaataaaaaacgaacaaagatatctttctctgggggcttttggaaggggacttttacagaacccctaaaggggcaagagggggctggaatctgaccctgctttttttaaaacgctcagggaggatgaaagcaagctcaaaaaattgggaagcattgacccttgggccacaggggggggggaaacgggggctcaagtcatcaaaggggaccggccttgacccaccaaggcactcgggcacattctgacccggtatttttagaagaacccctccggggggggcttcct

SEQ ID NO: 92451 - DNA, 138 bp, Glycine max
  unsure (1)..(138): unsure at all n locations
  Clone ID: PAT_MRT3847_54498C.1
accgggttncgaacaggcaagacgcccaccccctcctactctttctaaaagactttataaggcttataaagagacatctttatcgtcattttttgaacacatttacagcacattttacaccaccaaccattctttctt

SEQ ID NO: 92452 - DNA, 322 bp, Glycine max
  Clone ID: PAT_MRT3847_54499C.1
cgatttctcctgtacttcatcgtacttcttgtgggaaatggtctttggcatgcacgacaccaaccctattatatagcgggcactcgaactgataccacttgcgatacctatatggttcttggccttaatctctcttttctttccgcccataacttcagctgttttatctttactagactcctacactgtctacattatcccttccttagcccatatgctcacttacataacagtctctgaccgactgaatgctgctgagaaacgtatgctattcattcctcactggactgccttgtatgcattgaatgcatcactcgcggta

SEQ ID NO: 92453 - DNA, 502 bp, Glycine max
  unsure (1)..(502): unsure at all n locations
  Clone ID: PAT_MRT3847_5449C.1
atctcacacatcgccgccacacaaagaggagaggaatgtccantgggtgttcctgggttgccccagcatcagaaaaagcacctacaccantcacctctacaacctcctcagcatccctcacatcaccaccagcaatctcatccaccacaagctcacctccaacagccccctttcttcccagctatcagaaattattaatcaaagaaaattaatatcagataaaatcatcataagtttattatcaaagaagctaactaataagaaaactaaaagaaaatcgggatttattcttaataattttccacgaacaataaaagcaaccaaaatattagaaagaataacttacattaacctagtagtcaatctgaagctccaagaagaagcactacttacaaaataccttaatagaagaatgtgcaatcaatataaagaaaattttaatattacctccattagcgtcaaaaataaaaataagcgttctagaataatcatagctccactt

SEQ ID NO: 92454 - DNA, 286 bp, Glycine max
  unsure (1)..(286): unsure at all n locations
  Clone ID: PAT_MRT3847_544C.1
ggaaactcaaatgncatgnngtttgagtttccttattgacaatcccaaacagtctacagtncttgatattctcttgggatctctccaagatttancaattgctggtaataactcntatggcaagctttttctggtncaacgcgtaatggccnanatcttcnggaaaaggcagattcntcggnatgaacnnggaattggggtttcttcggttggtcggttaattaaatccataaagggaattaggnatgaccctcttgttgagtangctctggctnattgaaaattt

SEQ ID NO: 92455 - DNA, 416 bp, Glycine max
  Clone ID: PAT_MRT3847_54500C.1
ctgacaagctgcatgagagatgttctattgatgaaaacaaaaacatgatgtagactaccactgctatattacatcctcaacagatgataaatcaaaaggatggatacggattactagagatagcaactatagggatacgcaccatatttatgtgcctcacatccagaggccactatcgagaaagaatgtagctggacttgcgactactgtccacaagacgagttttgatgatagccaattatctcttggagagaagtcaaactatgtctatggcccaacatgtcttcatcaagctctgagtgaatgacttatctcacgttctcactggcctactcacggtgctgcctttaattatcctcactctttattgcagcaaggccaaaacgcaattccagaagttgtccaaaattttgaga

SEQ ID NO: 92456 - DNA, 747 bp, Glycine max
  unsure (1)..(747): unsure at all n locations
  Clone ID: PAT_MRT3847_54501C.1
ccgccggatggcggctnccgccggagagcaccgccggcgcccgccgccccgcccagctcgaggcggttccgcacgaagttcagccaagagcagaaggagaagatgcacaagttcgcggagaaagtagggtggaagattcagaagcgcgacgaggatttgattcacgaaatttgcaacgaagttggcgttgatagaagcgttctcaaggtttggatgcataacaacaaaaacacctttgccaaaaaggataacaataatattgttactagtaatgatattaatattactactaaaaataatatttctactgataatgatgcaaatgggagtgatgtcaaggtttttgaaaaccctaacaatgatggtggtgaagatcgcgctgaagatccgagtagtaatcactatgatggggtgaacgttgttggtgctaatggatcttctagttcttgatctaagggggaagaaaataataatgtattagataggttaatgatgattatgatgatgatgatgatgctacaaggttaattaatcagctgtttttaatttcttttcttttctatttttgtttttaattgtttagtttttatattgttaatgagagcatgatgatcaatcagtttaatgggagagaatgttatatccggaagagaatttattttgcttttaatggttttatgctgaattaagttagcttttagttgttaccacttgttatgaatgtatattatgtttatctttagcgtg

SEQ ID NO: 92457 - DNA, 441 bp, Glycine max
  Clone ID: PAT_MRT3847_54502C.1
gcttttcaatttttcatattaatttgtcattaattcctgcaaggttggtccagaaaaatttcatgttttagtgcttcttttttttgttggtaatattgtttttttttgggtgtaggagcaacaccaaaattggttcttcaattgatgaacatcaaaagtttaagtattgcccatgtcaagagtcatttacagatgtttaggagcaaaaaggtggatgaccgaaatcaagtatttgcggatcataacagtcttgttgaaaccggagacaaaaatatttataatcttagccaactttcaatgctccaagggtataatccgagtcaaagttcatccttcagctacacaaacaattatccaagttatggattcggggatgcttcttttggtgtctacgagaaactgctacaaagacctttcgattggtctaatgcaatttcttct

SEQ ID NO: 92458 - DNA, 410 bp, Glycine max
  Clone ID: PAT_MRT3847_54503C.1
tcggccgccacgaaaaaaaaatggctgtttcttgaggaggactagcaatgagaaccagtgttaatatgtgataacaagtgaggctgcccacttccatgcactggagggtgcactagcaagtgtgttaagaggatgatgcccaaaagtgcccgcttaaaacaactcctttttttttttttcatgggactgagctggattcccaactatgatctccgacaacaattactatacacccctttgcggagcccacctatgtgcccttgtggttttcgcaaccaaaattttatttaggttgataaccacaattgttggtcagcccaatttgccgaaaaaaaactggggaagctgaaaaacaccagaagtgacttttacaaattctggttaattctacgtaaactttttttttacag

SEQ ID NO: 92459 - DNA, 586 bp, Glycine max
  unsure (1)..(586): unsure at all n locations
  Clone ID: PAT_MRT3847_54504C.1
atttcaggtcaattatgggaacttcatgcatgggctgatgagggagtatatccaactttaactgaaagtttctgtctgagtatatcacctatgaagttcttcatgagcatcatcttcatcaagtgatatgggtctttgatcacagataaaaagaacagaatgtccttctggcatcaccaacagggtagatggcaagcaagaaatagccgagttgcaggaaacaaggatatatactagggaacatttggcaagtttttagcttctaccttgctatcttgctgttcatagccaagcgggataaatataataatgcaaaagaatgtgcccttggtgtggactgcaaactgagactacaacacatactgttccgatgtgtgatgaggtttgaagactatggtttgcatcacaatcaatgaaccatatggtattcaagcaaaagaaaatattagttgagcagaatatgcagcaggtgcatcgcctcattaagtgctacaaggaggaatgaaagatggcagaagccattgacaggccanattaaagcaaactttgatgctgctgctagaaaagggtgttgacacggcattgc

SEQ ID NO: 92460 - DNA, 217 bp, Glycine max
  Clone ID: PAT_MRT3847_54505C.1
gggtagggagagaaagaaacacatatatcatatattcatttatagggtggcaaattagacttcagatatcaattccgaagggaaaaaagctacattttttttattcttttaggatcctttgatattattcttaggcttttcctcttcgaaccaaggtgtgtgattctttactgttttaggtacctaatttagcacttgactttgctggggcattttc

SEQ ID NO: 92461 - DNA, 1026 bp, Glycine max
  Clone ID: PAT_MRT3847_54506C.1
gaacttttgcatgggctgatgagggagtatatccaactttaactgaaagtttctgtctgagtgagtcacctatgcatgaaccctatagctttaagtcttcagtagatatatcacgaaatgcatttccaggaaaccaaaatgtggtggttcctcctactttagcaaacagtggtagtttatgttagaatcgttaatctatctttgacagtttcgagtgtactgcactgtattacaatcaattttgtatgcttgaaattcgcaaattcattgtatactttttaactgcatgatttttctcctccattaccatttcaattactctggtgtcagaattatggtacaatccaataaaccttgattccaaaggttgtttttatggaccatttactgccattagtctctataaaaaattaaaagattacatcagttatcctaggttagcaacaatcactattaattaattattcaaactaattaaaaatttaaatttataagaattgtgaaggcaccacagtaaaatttattttaaatgacatgcttcttttatagtactgagttggtgctttcattaaatgttaggtaatcattcacttggcagtctctttgtatcttcatgagcatcatcctcatcaagtggtcggggtctttgatcacagaggaaaagaacagaatgtccttctggcatcaccaacagggtagatggcaagcaagaaatagccgagttgcaggaaacaaggatatatactagggaacatttggcaagtttttagcttctaccttgctatcttgctgttcatagccaagcgggataaatataataatgcagaagaatgtgcccttggtgtggactgcaaactgagactacaacacatactgttccgatgtgtgatgaggtatgaagactatggttcgcatcacaatcaatgtacgattacatgttaatgatgacatatctattgctgattggattaaattgtgtctagatacagttgatgatggagctttagaatggattcttgttcttgc

SEQ ID NO: 92462 - DNA, 1526 bp, Glycine max
  unsure (1)..(1526): unsure at all n locations
  Clone ID: PAT_MRT3847_54507C.1
aacaaatgggaatctaacgaacaattgggaaaagattaccggtgatcaagccaacagtggaactgataaagtatctgggatagagggaaacagaatttctgctatttcaggccaagctgaccaagggccatttgatcatttattacttcaatcagatgaaaataaacctagcatggaccaaaatccttctccagggagacattctgatggaagcgtaaatattggtcttgaaaaaaaggctgtagtaactgatgatgatttacatactgcagttgagcctataattgaatacagaggctctggtgctcatgagactaatttagcatcctccagcaagaatcctttagaaaaactggaatatagtgcagagaatgatttgcaaactttcaactgtgaagctgcttgtgctggaacaagcagagttaatgttagtgacactgaaatgatgctaccatgtgataagattcttccagttttgcattctccatgtcatagcagaattcatatggcaataaacaaaggcaaggaaaaatccttatccgatggggatgcaaatgtaatattatcgagggaggagaatgacagtcattcaagtgttgagagctgtaacagtactggctttttttcaacaggtaagaagagacgtaactttcaacaacagttgataattgggagtaaaagagtcaaaaagcaaattgaagaatcttctggtttcaaatcctatgttaaacaggatagctcattcatgaactggatttcaaacatggtgaaaggacgggcgcaatcgtgggaaagtgtttcaaacactttggctcttacccttacaaatccagatcatcataatctactgcctgacgagaaacttttcacatgcaatatgaatcaagatcccgagccaaaaaatacaggattcaagtcctttttttcagtccatatattgtccaagcttgaagaatggaggaacgagaatgtctcatcaagaagggaagagtagtgatgatttagagccaggtaacatggaacatggaatagatgctactccaataacctattgtgcagaaaacaatagcctttccaaactgcgtttgcaatcaaataagtttgaagtatctattgggggaaatgatgccggtccgtcctcgcagcctaaggtcaaacctctaaatttttttaactgtcaggaaagcagcaaaaataacccagtggagccattcacggatatgatggttgctctaaagaagaagaaactaccaggagcagctctggctgcaagagcgtcactattatgggcacaaaattttgttgataaggattgggaagtttggaactcaaaaatttaaatgacttccactttacagccttttatcttttatcatgtaaagatttcttattttgcgtgtaacatggtggatgcntttaacannaaaaaaaaaaaaaagaagcaaatcacttgtattagattttgacaaattcaaaatttatttaagttttcctctttcaaaaaaaaaaaaaaaaaaagggcggcc

SEQ ID NO: 92463 - DNA, 416 bp, Glycine max
  Clone ID: PAT_MRT3847_54508C.1
taaatccctgtttagaaaaattccaaaccaaacagaccctaacaacaacccttcgccggagtcgcaacagaatggcagaggttccggcgccggaggcacagctcaacggcggagccccaacaacggcggcgaattcctcggatcccatcggatcgaagcggcagcggcggccgagcgtccgattgggcgacatcggcgaccagccctacgactcccacccccgccgcgccgcagcgaaaacgtggcgcctcgcctttgaccacccccggaactccgacgccgtcaagccctacaagacccgccccctcacgaacctcacccccgccgctgccgagttcggcgaaaccctagagagcgacggcaacgtggacagcgttgtaattggaagctggaaagttaaggactccaagaagcgc

SEQ ID NO: 92464 - DNA, 538 bp, Glycine max
  unsure (1)..(538): unsure at all n locations
  Clone ID: PAT_MRT3847_54509C.1
tcaancacagcaacaccagggcaaacccttctngnnnnnctgcagaggctatgccgnncacangcagnnactgcnnatctcttccacnttatggttggnnggagtaaagtgcanngaggcaaaaaaagcttaanccacctcgttctggtttcacgcaancgttgaaactaattccactacagcagatactcatacttttttttttacagngattaaggttaaggccatagttaaggtgaaagtaaccgtgggtggtttcttctcaagtctgaggttagaccgaggaatcgatgatataacagatttgcttggtaaatctctcctcttagagcttgttagctctgagcttgatcctgtgacggggctagagaaggaaacactgaaagcatatgcgcacaaagcaggaaatggcgaggagtcggttaagtacgaagctaaatttgaagttccaaatgattttggggagattggtgctgttcttgttgggaatgagcctcacaaggagatgttccttggaacaatccacctcgatggcttc

SEQ ID NO: 92465 - DNA, 415 bp, Glycine max
  unsure (1)..(415): unsure at all n locations
  Clone ID: PAT_MRT3847_5450C.1
anccaccatnanctgctcactctaacanccctnctccaccgctncnactcngctccacccgctactncctctanaaaaancccnnncaaacncnccccccccnacccncnncnncncncacnnnncccccctcccccaannannncnnccccacacctacccncnccaactntcccttcccccanccaannnccccacannnncacccccccccccccccccctcccctccacacacaacccccccccccccccaccnccaccacccccaancccccaccnccanccnccccccccttccccacaccccccncccnnccccccccccccaccccccacacccccnnccccccccccccccccccccccccccccccccccccccccccccccccccccccccccccccccccccc

SEQ ID NO: 92466 - DNA, 332 bp, Glycine max
  Clone ID: PAT_MRT3847_54510C.1
ggctagggaaccaggggtaattttggatggaaatgagaaaatattaccgattccaattaagggacattggcatatcttttggtacataccttaaactggggttcattccattttaactggaattgatgatggcctaaattattaaccattcaagcaataaccccaaattgaattttggatcaacacttaggggcggcctttatgaaattaaatggatgggaactttatgggaatgggaataaaaattggagatggcagctcatattaaattatatgtcccgggagggtctatggcttaaaagggataatacccaataaaactggttgaaact

SEQ ID NO: 92467 - DNA, 492 bp, Glycine max
  Clone ID: PAT_MRT3847_54511C.1
ggctcgagggcgtgcccatcatatctacgggctgcactgtgcactgcttgctggtaatttacaaaattgcttttaaaaatgacattttctgatcaaaagagtgtaccagaggaaatcataaaaagagcagcagctgtgttggatgccatttcaaataataaccatgttgagcggttatgcaatgagaacgtctctgctcaagatcgtcaatacaaggatgccatggagaaattgttggaatttgatattgacaaaggcgacttaaaacttttctttgaggatgtattttctctagttcttaatgcttcgtgactgaactgaagtcttctgttggtggttttcgtaggcattattgagacgccatttgtgatcatatgacatttgtttcaagatgagttgcatacctatcgaattctattgtattgagcaatccttttatggagaactaattgaaaaagagacaaaaaaaaaaaaaaaaaaaaaaaaagaaaa

SEQ ID NO: 92468 - DNA, 286 bp, Glycine max
  Clone ID: PAT_MRT3847_54512C.1
gagccaagtagtcatctatggaatgaaattaaaattataaattgaaaccaggcgaaacattttaaaagtcggggacaccgcccactgggacaattttaagtattctttctaaggataagcaggcttttgtgttaaattgatttgcaaacgtataggagtttccgtatagaacactatctttccctctttggtctgccttgagggatttaagaataattggcattttttaaggacaggatttaaattttcccattactgtgcatgaaaatatggacccgcattccca

SEQ ID NO: 92469 - DNA, 313 bp, Glycine max
  unsure (1)..(313): unsure at all n locations
  Clone ID: PAT_MRT3847_54513C.1
nntngaggtagngncgnttggtcagtanagtgntgttgacagatggnatggtttaatnaagttgtacggaaggccttcntgccangtgtgncgtgattgccgggtatancagacagtanttcgaaggnatgggagaattacatnttgaaatgcattgttgntacggngcaaangagantttaaggtggaagntaacgttggtgccccccaagnaaactnacagggagngcatttccaaaatgctcagaagtgaagtatgtgcacaagaaacantccaggtggncagggtnagtttgcagatgtcatgtccggt

SEQ ID NO: 92470 - DNA, 151 bp, Glycine max
  Clone ID: PAT_MRT3847_54514C.1
ttatcttcatatcaaggacaagcttaatagcttatagtttaatgaccatttgttttccaaagcttcttctttggttctcctaattaatttcatgcatcccccttaatgaagtgacactccaaaaataccatctttgggttttacttctttt

SEQ ID NO: 92471 - DNA, 484 bp, Glycine max
  Clone ID: PAT_MRT3847_54515C.1
gtttttctttttttttttttttttttttttttttttttttaaccaaaattatcatgggctttgattgcccttgatacaatactttaggcgaacctcacttgtttcttgcaaaaagaaaggaaggggatggcgttcagatgggaaaaaaattacctttaaaaccgaaaaaaaaatccctttaaaaccttgaaaaaaaaatcgggccccaccttctttttttttggataaagggatctccttttttcgcccatctcatttcttattttctatcccaacactttttataactttttcctcatccaaaggggggtgggtccccctcacaaaatttttttttctttccgagttataaaaaacttgggaacctggcccagggttggaaaattggacttgtcccccggggaaaccaggggaaaaaaaaccaaaaccccccaaaaatccccggccaagtgaaagaaaaaaacccttggtttccttaaaaagg

SEQ ID NO: 92472 - DNA, 410 bp, Glycine max
  Clone ID: PAT_MRT3847_54516C.1
gttgtatgtttgttaaatactgatatatcccaaataaattttaatgcattatatttgtcaccagtaaatataaaatgggcaaaatgtttgcaaatcagttgatggagtgtgcaaatgatgaatcatcatttcggtttgtcattagagatctgacaaccaaatcccccgtcctgcaaatcattctcttaaatccagatacttggtcatgttctgggaattgttctagtttagaagacaaagacccaattgctaaattaaagttacagcccataatcaaagtgcttttttctgactgtcacaatgcaacagaatctcaatcaaggttgatagaggaatgggcaacaaagaattcggctgaagacattttcatgttgactcgtcaaacacaagaattggtgggttttttcata

SEQ ID NO: 92473 - DNA, 1106 bp, Glycine max
  Clone ID: PAT_MRT3847_54517C.1
accccaaaaatattcatatcttaaaatgccaaaaaatggtaccctaatcaacatgtgccgggtttgagaatagacataaatacaaactctaaaccccatattgattcataaaatataaatatcagttagtataatagacataaatacaagctctaaactccatattgattcataaaatataaatatcagttagtttaatcccttacttcatagtattatcattttggcccttaactttacaaaatatcattccctattaatctttaacacaattattgaaaaactacagttagaaaagactaaaatattttataaaattaaagacaaaatatacaagttttttgtgagtaaacaagagtatacccccatttttatgatattttggaaggaataggcaaaaaatataatgaatagctctaataattatcaacaaattagtagaacaatatagctccaagttccaacctctggctaggccccagcagagtaatggacaagaatgcagcgtttctgacgccaattgcacgtctaatatttaaattcttcaggctctgcaaaactagaagattcatcagtaactatttatatataacaaatttttcatgtctagtaaagttttttttttttcttttataaaaagcaaagaacacgaccattggcccttttccaaccaacccctttttctttttcagccttgtcctaaactcctcctactcacactacactgcatgcaatgcagtgtatgtagtatattttctgaggcatctatgacagagtttagagccagctagccaccaaatatgaatatcaatgaatcaaataatgaatacctcagtgtcccaaaaccctttgtgctgtattccatcaacatcaatgatgcgcatttgaaaatgtttatgaaaagttgtttaaagagaaataatccttctacaacaaatgtagaacaatgcatttataatttataatttcatacaactagaaaaagtaaagagagaaaatttgaagacttaataaatgatataataaaaaacgaaaaaataacactatacaaattgttgtatctttttaataaaatcttagtgtgtaactagtgtatgccctactag

SEQ ID NO: 92474 - DNA, 918 bp, Glycine max
  Clone ID: PAT_MRT3847_54518C.1
catgagcatgtattatcacatcaatgcgtatctgtcatctactactggtatgcaatatgcatgttatgttcaacttcaagtaccgctttccattattcctgattccatttccacccttgccaaactgcgggcacaagtcccaaggcaacccccatggtatatatagatttaacgccaggggtgaacatggaattggatcatgcagctgcttccagtttctctctctaaaactcgcaaaagcgaattactgaaaccctagcctctgtttctgtgtttatttacttcgattctacgcatcgaattcaattctctgtgatctgaacccgtgaaatcaatgtgcctctttcggaatcgcagagcgagcaacggtgaccgccatcatcatcgatgaagcgatcgggtcggtggcagaggactctgatcctcgctcttctctttctctccctcgttgctccgctcgtttacgtctctcacctcctcaacactctcacttccgacggacgacgagattttcttgatgatttatcgagttttacacataggtcagatcctttaaatgcaattgaacaggaaggtgctgaagaattagaagagccaaaggaaattgtttataaagaagaagattttgattcaacaaatagttacattttgcaaaagactaatgatactgcggcatctaaaagtgaggggtacagaaataacactttggaaagaaatgtttcagaattcgaccaggacaaaaaacaaggccaggaagctcagcaaaaaggattattctccatggacggggatgtgaatgtatttaatacaactgtcacacttaagcagaatatgcacactcagtctcaaagaatgacagatgtgaatgttgaagtgatagataagaaatctagtccaaaagcaatccaacatcgtcag

SEQ ID NO: 92475 - DNA, 599 bp, Glycine max
  Clone ID: PAT_MRT3847_54519C.1
aattacacagctcaagtttccaagaccaagccaatggaaaacctttcaccattgatttacaaaaaccccattagaagaacttctaggcgatctacaatgtatcttggtgtgagaaaaaggccatggggaagatatgctgctgagattaggaacccatacaccaaagagagacactggctaggcacatctgacactgctgaagaggctgctatagcttatgatctttcatctatcaagatttgtggcattaatgctcgaactaattttcactacccttttgtgtctcttccaccacttcctatgtcgtcattgcctcctccaccgccaccgccgaccccagagttggatccaagtgttgaagtttgtctagagatgatgaatgctgcttcttacgatggtgatgatgaatctcttgttattgcttccattttgcaaagtttttctaattctggtaactgttctttttagtttttggttccaatgaggctatggcctgcctcttatcaaatcaataattctatttttttttctttgctatattcagtagtcgttaatgtaaggcttctaccaaaatttctacatatttaattacttgtact

SEQ ID NO: 92476 - DNA, 1343 bp, Glycine max
  Clone ID: PAT_MRT3847_5451C.1
tacggctgcgagaagacgacagaaggggggcgctgattagttgcattgcatcaaaccctggcagtggcaatggcagctgcgacgacggcaatacagaggttcccccaacacagatacgtcgacgcagttcgctggcttcctctacaatccgcattcgaccgattcgcagttctggctctcttcgacttcgattccgatgcttcctccatcgaaatccactctctcaaccaaaaccccttctccttggaaccccactcttcgtggtcctctccttcccgcgtttcctccctcaagccttcacacttccttcagaagcccctcatcgtcgcttccacatcctccgtgtctctccacttcctcttcttcgattcctccggtgccacgctcctaccagaggtctctctttctgagggcgcgctgcattcgcttcccgcttcttgcgttgaccgattgcgccgtggcgttgagtgcgtctccgttggggaagatggcaaggtcaacttggttggtatcggggattccaatttgaattaccggaggttgtttgatagcgccgggttggtttcatacaccgcagtgaggtgggcgtcgccgatggagttcgccaccggtgggttcggcttcggtcttcagtggtgggaccaacgtaaaccgggaggaccggtttcccagtttaagggtaactgggataagaaattgacatctgggattgtgcactctattgacattcatccctcgcgcaagcacacttgcctggctggtggttccttaggtacggtttttgcctgggatcttaggtggcagcaacaaccaattatactttcaggtgctggagctgccaacactgcggttcagtccatatctgaaagtgaggtttgggaggttcagtatgatcgttgcataaaatcaaacacttcatctacccggatcttaccttccatgatatgctcagaggatggaattctcggtgtgattgagcaaggtgaggaacctattgagctgctggctgaaccttgtgccatcaatagctttgatattgatcgacataatccatctgatgtgatatgtagtttagaatgggaagcagtagccatattgacaagacaataacattcggggtttctactttttggtggcttgaatttccgaaagtttgtaactgatagaaggagtggagctcttaacggacaatttgtgttttttatgtattccgcaatgttctattccttttctaaagccatttgcatgcaaatggattttgggattgtacaatatgtagcatgtgtataattgactttaaagaggcacattggatcaatgctactatcatccgtttttcctgc

SEQ ID NO: 92477 - DNA, 214 bp, Glycine max
  Clone ID: PAT_MRT3847_54520C.1
acttgactcgtataaaattcggctatgggccaggggtctggaagatattgcgcactcatctgtggttgattgaacatcaatcatccatcgtggattcgagttgctaaaattccgacctgaacctatttctgtgtttccaggctatccgaatacggtgtcctcattatccacggccgaaaagcccacctttgcgccctacccatgccttccataa

SEQ ID NO: 92478 - DNA, 393 bp, Glycine max
  Clone ID: PAT_MRT3847_54521C.1
atttattaatatttttgtttttttttgagagtactattttacttggcgcctgaattacaagagcaaaaactcaagcattaactaccttcacaacatactcatggaaatatgactgtactgtgctacacaacattcttatgctaaaatttaagaaaatgcgcaccctatttgaacgttttgttcatggccaaaatgcacatccattatataattgtgccgctaatatggacctgtaaaaagtttgtcatcaatgctcattacggctagagaaattattttctcacaggacatgcacctcttcgccgtttgagctagtaatgaggatgcaataattccaaaccgtaaatctcctccacatcccgccaagatagaaaatggaaactatactgcttg

SEQ ID NO: 92479 - DNA, 486 bp, Glycine max
  Clone ID: PAT_MRT3847_54522C.1
agtatatactctaaaaaacctgttcattttttccttaaattaaaaaatgtctgcaatgatccttttgcatttgggtgagttgttagattgagtacttgttcacaaggcttgttgctttcgagttgataccacgaacttattttgataagctaatattgtgaaatttgttgaaaaaagaatttataagatcataagtcacttttataagtcattaaatcaaaataatttccgtgcaataggctttcctcatggaaaatgattactgtaaatgatgcttttttaaagtcagggactaaaacatccttcatattggtccttatcttaacattagtagaaaaggcagtggaaaatgaccagagcaaatcatgaatttcaaagttagagaccagagtgaaattaaaaaggccaagtaaggactaaagtctaaaatgactgaagcatacaatatgaagactaaagtaaggcttgactctcttttattttttg

SEQ ID NO: 92480 - DNA, 342 bp, Glycine max
  Clone ID: PAT_MRT3847_54523C.1
gctagcgtccgtttaaatacacaaagtcctcgtgcgttaaatcgggggacgggaacactgacttctcgccagggcgcttcccgcagtgtttagagactgccttgtgctctagggggtgggggaaagaaaatgactgtttgtgctgggcacagacttcgtgaatcattttctttgccactcttagttgatttgctgaacactctcctatttgatataggacttcgtgtcagatttaaactttttctgtctctttctcaggtctctggtcaattgtaagatcatgctggtgaaattttggctttgtgctcccactttcctctctggggtaggactctcggcggt

SEQ ID NO: 92481 - DNA, 489 bp, Glycine max
  Clone ID: PAT_MRT3847_54524C.1
ggcgtccaggctcactactaatgaggaacgctttattttttctattttttatatgtaactttttgtggacctaccattatcttctttgtaaaatgtaggaaatatgtgaatgtccccagagagaattaccgatcctcattaacctattggactttgggaatagtgcctaactacgtataacaaatacattccacttcatatatgaacattgaagcctacttatttgtctgaaaagggggtaattgggaagtgttcccaaagtaagtctcgagtctcccgtccctagtggccttcaagattggcgatggtttgagaacctataattcccctccctaaatgaacatcggggcctccttatgtattggcaacctggaataggaaaacccttacgagatcctctccattcgaccaggaggcgtgcatgcttgacccttcctttaaggagggggtcctcgtttctggacgaaaatcttacaccaaagcgactgt

SEQ ID NO: 92482 - DNA, 344 bp, Glycine max
  Clone ID: PAT_MRT3847_54525C.1
aaaattaaagggtttaactttactaccaaaaaaaggtcaatacataaaaacccccaaagtcccccttatgaaaaccactcagggggtttttcattaagaaaaccaaagggggtaacaaaattttgaaacaaactggggcggttgggggttagccaaaaaaaaatattttccatcatcaaaagaaaattgggcctgaacattaatgggtgtatacccaaggtattgaggggggcccgtttttcctgaaacacacgggtatgagaaaccctttggaaggaaccggcccccctcggggtttgggaagggtttaaacaaggggggtttttgggggggcctaattccct

SEQ ID NO: 92483 - DNA, 286 bp, Glycine max
  Clone ID: PAT_MRT3847_54526C.1
ggctcgagctcgggccctaccccaaattccatatattgtcatcgggacctaacttaaacaacagggcgtgcgtgatcactgttggcttgctcacaatcacagtggatggcatatttcatataactgatgtcgctgtccgtttcgttaagactattgtctgaaggaatgctaagacaacctgacgctcgctgataagagcacggatttgatgcacaccacaagttcatatgctggttaaggacgcgaagcccggcattagagatcagctctatggagaaagattacg

SEQ ID NO: 92484 - DNA, 533 bp, Glycine max
  Clone ID: PAT_MRT3847_54527C.1
gatactagaagcacaagttagaacaaagagacaagaattgaaagctagaattttaaagataaagaatgaaaggcctaaatatggtcacacaaatgattgggcacgaggaacaaagtctctgacaacggcgtcaaaaacttgttaaccgattgacaagtgaaccaaatcacgcaagtagtaataaaatggtaagatctagtgttgtgtccatagagacttcgtttgtgctaaatagtttgtgtaaactaagttctaagcaatggaataaaatgagttgattgacttttaagataagagtgcataaatttaaagttcaagattaagcaaagacattaaaaactgtgcaaagttcaacgaggcaaaaacacaaacactttgagggcaagagataacttagtgctgaatttgtagaaatgttgggtgcttggcctaccaaatgaactcttgacgtaatgtgaatgatttttcaccaatcaatgttatttcaactattatcttaaccactaatttattctaataatgatctctcatgt

SEQ ID NO: 92485 - DNA, 556 bp, Glycine max
  Clone ID: PAT_MRT3847_54528C.1
tccgtgcctattgcctaaagataccatgtctcccaaaatgctctttttctcacattcttctccaaactatttaaacccttccaattcctttctttctctttaagaattcacgctttaattatctgtctctctcaagttccacggccaaagaagcattatcacactcaagcatccttccggttcgattcggtcgcggtggtcgcgaattttaaattttttttacctttacaaaaggttatccgatacgagaacggacacagaagtgtattagagcacgggttaggattaattatgaaggtgatgttcacttgttcccttcatgtttgcgtcaagtgcggattccagtgttgaccacaaatttagccgctaagctttgaaacagatataattcggaagacaaaacaactcacacatctgcttaaccaacttagctaaaccgtcattattatttgtgcttatgcctgggaacaagtacaacggcaactccagcaacattccaaccagccgtttggaaccgttgttgagggacagagagctgaggaagagtgggagggcc

SEQ ID NO: 92486 - DNA, 126 bp, Glycine max
  Clone ID: PAT_MRT3847_54529C.1
gtacttaatgattcatgtgagattaaagctaatcggaagaaggtgaaagtaagctgaattatgactattagttcttcttatcatatacacaactatatgatgtaaacctctttccctgagttgcaa

SEQ ID NO: 92487 - DNA, 1201 bp, Glycine max
  Clone ID: PAT_MRT3847_5452C.1
ctcgagccgattcggctcgagctcccacgcgtccgttcccctccccctctcattgctcctctgattcattcacccagttttttttttctgtcctcttttcctctcagaggagcctctgagtctgctcaggtgttccttgtgaagagatccttttgtttttgaggtgtgaagggaaagagaaaaaaaaaagatgaatcagtgtggttatcagcagaagaatgctttgacaagctgtgaggagatgaggatggaatcagtggtgtgccctaaaccacgaagattgggcctgttgaaccactcaacctttgatgaccacatcagacccttgaggccaccctttatcaactaccaatcagaaattgaagattcaggagttggggctgagcttctggacatcattctccccaagagatctggagggcaagtggcttcatcacccccatttttctgtggatctccacctagcagggcttcaaaccctgtgatccaagatgagcaatttggtagtaatggtaatgagaattttggtgcattttccttggcacccccttcaccatcttcctcagcaagaggctgtgttaggatgaagtttggtcacaccccagctgcagtgaggattgaaggttttaattgccttagcagggataggcgcaactgcagcatttctgctgttgcttaattcaattttaaaccatgaaaaagaaaagaaaaggggattaaagaatcaccaaagttctaagagcagaggagatttttgggactgaggagctaatcttaatttcaatcttattgtattatatctatatgtatataccgttgttcacgagttaatttaaggtgtcatgtataattgagagaaggtgggaattttctttcttcttagttttatcctttttgaagaagaataaaaaaaagggacacaccaaggagaaagaaaaaggcaagcaaaaagtcttgttcttctctcttgttaggtttatatgatggggtattttagattgaaactttcatgtgagtttcatcgagagtctgtaactttcatgtaatttggaactcagctcctccttttgtaattgtaatggtggaggaaattgaggatttattatctttggaatcttgtaagatatattttttgtgggtgccctatttgcaggtgtcgcctatttgattatatgaatagaaatgttgttcatactaaaaa

SEQ ID NO: 92488 - DNA, 416 bp, Glycine max
  Clone ID: PAT_MRT3847_54530C.1
aacaaggcccaaaaattccctttctaaaagggggaaaagggcaaaattaattgggtcctttcccggaagatctactaaataagggaaaccccccttttttttttttccttaaccttcaaaaaggcaaaaaacaacattttttttttttagggaacatgttacatcctttgggcccccggaaaggggaaacccaaaaagggccaaaaacgggatcccaaaaaaggggaactttttttttctccaacaaaggggaattttaaaaaaaatcccccccccaagggtagttttgggcccctttcaaaaaaaacaattggggaaaaaagccaaacttttctttgtttggggcaaaaaacccaggaagggggccattacttggggggccccccccaggttcattgtgagggggtactggcaaa

SEQ ID NO: 92489 - DNA, 387 bp, Glycine max
  Clone ID: PAT_MRT3847_54531C.1
ctgctcattttggcagtgttctcatcggggggcgtatgtctccctactctttactggctaattaagaactccatctctcttctcaccatcaacaacaaactctcttgcccttcctgcctctgttactgccctacccctctctctctcttccaactttcttccttgctttcgaatctctctctctcacattgttcaattaatgacctctatctaaatgatgatatttacaatcattttgtcgaccttctttactatgatttctagtttcaatagtcttttactgaatcaaacactcttcacattaacataactttttctgaaacccaaatattcgcattttattaccatcaaaactctttttaaatccttacttcaaccttaacattc

SEQ ID NO: 92490 - DNA, 376 bp, Glycine max
  Clone ID: PAT_MRT3847_54532C.1
cgctgcgacaggacgacaaagggggaccgatggtagaaacagcacacagaaaatgggcactcgagaggagtacgaagagaaactgaagaccggaaatctacagcacgatcccaccattaaccgtggcctaagaaccgccagaggccctcgctgtctatatatcctcaaccctaatgtcaaaagaggcgagtggcccatcactcccgcacagcacgactactgtgccagggcaacacctgggaaaggtggtctgcttgggttcagtccacggatgcaatacaggtttacctctgacacaaaatggtcggataggaccgcagagacaagcgatagcggtcaggattccatcatagtagctatcccccggcctaagtgc

SEQ ID NO: 92491 - DNA, 306 bp, Glycine max
  Clone ID: PAT_MRT3847_54533C.1
attgttgcaagaataagcacctaactgaccccaagtgctgaccatcctttcattaaaacgactgtagacaaccaacatattgtggacaaaaacaaaaaccccggggtctcgaggccataaagaaacctaatctcgaacccaactaaaatgaccgggcctagcgctcaaccctatatacatacacgaggccctagtatctgtagaacttgtcatcaccgtgcccgccctgagagataccacgggtaccaccaccaccatgaccacaggttccttcacccacatagaaaacgccaccgccaacaagat

SEQ ID NO: 92492 - DNA, 388 bp, Glycine max
  Clone ID: PAT_MRT3847_54534C.1
tttttgttcaaaggcccaaacacagaccttgaataaaatgcatctttcatgaaggtcaacttaaccttaaagagctgaagcatcttcaccagggaatttgcaaccaaccaaacaaaaaattcagatgcgtacatatcatgacacaatggggctgttatgatggatccatgcaattataatctcgagacagtttatgccgctgcccatcttgacccagataatcaaaccaaggatgaaaactcttcgaggacatagcaatgactgaaagaaaaaatgcgtacatccctgagccaatagcctgggagctgttaagctggtccagaatacacgcaaagctcgctagacatagactccttattggcccccatgactggattgccccatccat

SEQ ID NO: 92493 - DNA, 255 bp, Glycine max
  Clone ID: PAT_MRT3847_54535C.1
ctgacttctgaggtttgtttcattcatgttcctttctttctttctttctttctgttgtattgtgttttgggtaccctttgatctcgggtttgtggtatgttttgtttctcctatgtccttgggaaagttgcaatctttcttccttttaggtttgtgggaagtggtagttctgaacatttttttaagaagttcttttggttttattgggttgagttctggtttcttaatgttgtttctgccactggtgaatttagt

SEQ ID NO: 92494 - DNA, 271 bp, Glycine max
  unsure (1)..(271): unsure at all n locations
  Clone ID: PAT_MRT3847_54536C.1
ttaactcctcaagataaataaatcccaaantctcgaggtgttgcaccgaaataaaacaagaatctaatactgagggggtccgagaggaccatcgaccatcatggggggttttcattcgccattttttttataagagggatagccaagggagccgttatcttctgcacgcaaccaattcccatgcaaggaatgcatttgcaggcaaccgggtgccctctcttgccaaataactcacatatcccgattcttgggaactacgggacttgccaaa

SEQ ID NO: 92495 - DNA, 2512 bp, Glycine max
  Clone ID: PAT_MRT3847_54537C.1
cggccgctcgaggcggcaggccgggctttgcttgagttgagtttcttctctctttctccttcctcgtccacctctctacactcacgagatcttgctcttttttgtcaaaaagcagcaaaataatcaaatttggcaaactgcccaaactcatctctttctgcttgtccttttccctgtttggggtgtttatctgttacgcttctgcacaacacctttccctttataatccctccttgaattttgtgcaaccaaggtttccttttccttcccgtttgggttccttctcagttctcacgtgatccttttcatttttttcatctcccataatgattctctagcatctcatatcaccttgttgactttgttctctttcaagtaacaaattaattgattatggattcgaattcgcgctaccaagttcagcagcaacaccaacacaattctgggttacctcgatttcgttctgcccctcccgcaaatctcaaacaacaaggcgaagctgccaataataatgggagcgcgtgggagggttctgaaccgcttttgagattcttgaattccggggacacccatgatacgacgtcgtcgcctaccttacgagaattcgtggataataaggtttctaataatagtaaacctgcgaaggagtcatcatcacctctgagtcgcatgaattcccaacacagttatagtacttctatgttaccctctcggagtactgtggcttcagctatgatgatgttttcttccggaaagaatcagagtgcagcaagctttgatgcgtctcttctcaggcaaagtagcttccctgctggccatttctctaacaacatctcctttcagaacgggtatgatactatgaaaggtgttggaaactatagtggggtcaatggcaatgatggtgaacttagtctatctatgaacagaatgaagaatcaaataagcttctcatcaataagtccttcttcttccttgggagtgctatcaccaacttccaaaataggcacggagggtattagggtaactagcactgaggatgggaggcagggagggagcaatggtgatgctcgatattttggccctggattctcctatgcttcttggaatgagccttcacaccacaaaagacagcgaagtagtaatgatgagttactttctgattctcaggatggagaactaggaaatcaagttcaaacactttcgcatcatttgagtttgccaagaacgtcgtcggatatgtttgctatggatagtttgcttcagttttcagattctgttccttgtaaaatcagagctaagagaggctttgctacacatcctcgaagcattgccgaaagggtgagaagaagtcggatcagtgaacgaataagaaaattgcaagagcttgttccaaacatggacaagcaaactagcacagcagagatgttggacttggctgtagactacataaaagatcttcagaaagaattcaagactctgaacgataaacgggctaaatgcaaatgtataaacatgcagaagtcagaagcagatcaagttgcttgagtttcttttgtacaggtaataaaaaggaactacgccaaacatgaataggacccgggttttatattttgacgtgctgaaaaatcaatagaacaaagttaatatgcagaatgccagcttttaactcttcatgccacattgtgtattttgagttaacgggagttccagccacacagacaataaatcataattttgtatacaaaaattctaatgaattaattttagcttatttttccccgtgctcctaaacttatcaaagacttcccagagtttggattaggaggaaaatttgtggtttctttctttttattattacaaaacaatttagatgagttggatttcaggaactcaccaagctaaacagcttttaagactcaaagaatgagatatgaatttgtttttttaaaaaatgaacattgactattcttttttatggagagcaattcaatattgcagagatactttgattttctcattttattgttagggctgccaggttgtttgaagaaattaaaaagtgatgcaggtatgaccgaataagccatgaggtactccacgcttggatggatacttaaacagagattccgggaatggttaaagaatttgacgtaaaagattgattgttacactcaaaatagcaaataggttgaaatcaagtaatcaacacgggcttcaattcaacttgaaagataaagacgaaaaacagaagtcgttttaaagggtttcattttatgaacaaaaaatatcatttgaattttgacatttagggtctattacatgaatgatgtggggagcaaatgttagtctcatctggccaacttgcttgtattgcaacaaagtcatgtcgattggagggcccttatataataatcccaaacaaaaccgttcaataccaagtgtaattcgcttcaatccggtcgtgttcatagtagattatccagttaaatgttaatttgttgacaaatgtaaa

SEQ ID NO: 92496 - DNA, 500 bp, Glycine max
  Clone ID: PAT_MRT3847_54538C.1
aagcaaactagcacagcagagatgttggacttggctttagactacataaaagatcttcagaaacaattcaagactctgagcgataaacgggctaaatgcaaatgtataaacatgcagaagtcagaagcagatcgagttgcttgagtttcttttgtacaggtaataaaaggaactatgcaaaacttgaataggacccgggttttatattttgacgtgctgaaaaatcaaatagatcaagaaagctaatataagatgcagaaagccagcttttaactcttcattgctacattgtgtattttgagttaacgggggttccagccacacagacaataaatcataattctgtatacaaaaattctaaggaattaattttagcgttattctttttccccctatagttatcaaagacttggcagaatttggattagtactatgtgtcgtttgttattgaattgatgcattataaatgaaatgactcgagtaagcttgtcttaatacat

SEQ ID NO: 92497 - DNA, 1338 bp, Glycine max
  Clone ID: PAT_MRT3847_54539C.1
gtttgatttttgagctaaccagtctccaacaacaatctctctcaggaataggatatggatggctcagcctcaaagcctggtcacacaacaagaggagttggtttggttaaagcttctgttaacttatatggcaacaggattgaagatgtcaatagtcctttgctgaaaaaatatttctcaacgaagcaatcttctaaagcaaaagaactccacagagcaagcaaggatatggttcggtacaaagagaccaaacgggtagcagaatctgcaaaagctcaagcagaagctaagctttccaatgccaaacagacagtgaaagaccttttctctatgattggggaatctagctacaaggcaaaagcccgaatgcgagatgtggcaccactaaaggagtatgggaaaccaagcaagaatgatgatgataatgagtattcacaagttatgagagaattggaacatgctaaacgggaatttttccaacttaagcttgatgtggcttctgttttggaggagaaacagcgagcagaaaaggaaatcgaagcatcgagatccagcatgctgtccttctcaagagtagcacaaaaactgaggaaggagattgaggaagccagtgaagaacaagtggtggttgaattggctagaatggacgctttgaatgaaatgagagacattgaagctcttgaaaatacaaggaacagattgaaagaggccattgaagagataaatgagtcaaaagagcttgaaatgaaattggccacgacattgtctgatattgatatgttgaagaatgagttgaactttgttaagaaaagggttgaaagaggtgagagcatggagcatgtggaaggagaatcaagagatgttggtgttttagagactgcaacagaagaaatagaggcagcaaagaaggacttagcttccattagagaacaaggttttaagtttatggcctctatggatgttacaagaaatgagctgaagcatgtgaatacagccacggttcatttaaagaacactgaatcgaaaatgggtgcaaaagttcgaaacctcagttacaagctcttgagagcgaaatctaaattagaagcggtgtctgctgcagaggaaaaggccaaatcaatagtcagtaacttgtcccaaactcttgataagctcaagtccgaaacagaagcagcgaaaaaagaaaaagaaatcataaatggagaggttgcagccaccaaagaagatattaaaaaggccttgttggagataaaggtgagtgaggaaggatttgaaggcgcgaggcaggagcttgaagcagtgaaatcatcagaagctatagccttagagaagctgaag

SEQ ID NO: 92498 - DNA, 291 bp, Glycine max
  unsure (1)..(291): unsure at all n locations
  Clone ID: PAT_MRT3847_5453C.1
accaatattggctacgtttttgaaattaaagaaaaaaaatttacatagatcacatcacattctttttttttcgttgtgttttgacaaaaatttattctttcaggtgaagctcgnacaacccaacgggcgcgggggcggagcaaaaaacaaaataaaatcagagatcccaccccccctctttttttccgggccgtggggcgacatctaatgcctagcgggggggggtgtaaaattccctattgccccccgaacaaaaaaaacactcctgtttcctgaaggatctttattaaa

SEQ ID NO: 92499 - DNA, 231 bp, Glycine max
  Clone ID: PAT_MRT3847_54540C.1
ctcctttttttttttttttttaaccaaactacaaataccctttatatggggaggaaaaccaattcacatactaacaattcacatcaagaaaaattactccttcaaaagtctttccaatgaaccttaaggtggaaaaataaatatgagcaaataatggcaagctaaacatcaaatctatgaaccttaaattcaacgaattaatgttcgggtgcaagacattacctaccttga

SEQ ID NO: 92500 - DNA, 296 bp, Glycine max
  Clone ID: PAT_MRT3847_54541C.1
ataccacgagatcctctacaatcgccgtcgggttgccggaagcaccgtatttgtggggactgcaccttaaaaatcttgaaagctaaaacccttgggtctcttgatttcttaaaaagaacaaagaggggaaaatggaccagggttagatcttcaaacttacgaagggggtcaagggttgagcccaaaattggcttaagattaccagggagaggggtgagaacgcctttcaatattcctacagagaccggcgtaaccaaaagagggacatgccatccctttggatccaaaggatccat

SEQ ID NO: 92501 - DNA, 547 bp, Glycine max
  Clone ID: PAT_MRT3847_54542C.1
agctgttgatccgaaaaccaatttgcacttcagaagagcaagggtttttgctgtggtcattaaagatttattatcaaaaggaataaaaaatgctcaaaatgcaattatctccagatattcagctaaaaaattaacttctattctaaattacgatcaattcaaatcactactacctacaacaactaaagtaaaataccttacagatactaatttttttatcaatagtaaaaatatctctaaagcacagcacattaaagagttctacagtcaagttattcaaacacataactcagcaaaaaatttacctacatcctacacttcaaaactcagaccaggactatactttttccctcaaaatatcatatcccaaatcagtaccccaatcttctttataaatacagcctataactcataacaaatcaaaaacattttgacaccgaatactactaatccccataaccaataacgtgaatacgaacttgatatcaaaaactactcacctaatcaactcagtatagtgacagatattcataacagatttcttaaa

SEQ ID NO: 92502 - DNA, 496 bp, Glycine max
  Clone ID: PAT_MRT3847_54543C.1
gcgagaagacgacagaaggggtcccttatgatgggcgcgtggggtgctaataccttccccatgcgtaaacaactcccgaaccctcattttcaaaatccatagaccatcgtcttttttttggtttttctaacattttcctcaaataaacattggtggcaactccactcgttttctccctcggagacaaacgctttggcccattgttgaggccttttcgcgcccccgttaaagggtaggttgcgacactatgttgaatttttttttatgccactaagccaaatagccaccttgtatgagtaagtgaagtaatcctttgcaccccagtgagccaagcataattgaaaattgtcctgaaccctagccgaattaaatatttactgtcacaccttgttttaggttttaggaaagcattgtcttgaaggaaattgtttggttcaaatttggggggtgttatattgagttaggcaaatgattataacagcatcatgcagcttat

SEQ ID NO: 92503 - DNA, 378 bp, Glycine max
  Clone ID: PAT_MRT3847_54544C.1
ccaaaaatatttgggttttatatttgacattcaattaattttcttccaccggatcaattcatttaaaaaaaaatgatttttcttattctaacttcatgtccaaataaaaaattgaactctaaatcttaattaaagaactctgaatcaattgtgctagcaactttttggtaagccctcacccatctaattggcaatatactttcctctactcctttattataaaataatctagaaaaagaaaatgatgggacatctacatatagttatgaggttacatccagcctactatatgttctttttaattataaacatgtgtgctatgcataaaggataatgatgtatatctgctaaattaatggacatgaggcatcaatcatt

SEQ ID NO: 92504 - DNA, 400 bp, Glycine max
  Clone ID: PAT_MRT3847_54545C.1
acaaacggttcgattcctacatgcttcggattgactacagacgatgtgcatatgattgttgtgtttatgtgagaagccttgatgatgctcgggaagattcacacttcagagtatgcaatcacaactgacaagttcaagcattgcttggacttgtcgaatgttgctgagtgttagatgtgataggaccctcaacccaagaaatcaaggtggagattgttgtgcatggctcatattttatgggttggacaaatgttagagcacagcgtaaaggccacctattgttgggttatgaagcacgttgggggtgcgggtaaagcccgtagtacgcttaatattatatatcgtgatgtaactctattatttatgaataagatatagaaacagtcacagtactcattag

SEQ ID NO: 92505 - DNA, 3561 bp, Glycine max
  Clone ID: PAT_MRT3847_54546C.1
cggaaactccccgcgtcgaaccacgccgtccgatagcaatcgtaagtaattgttaccttgacctattaaaaatagtaaaacgccaccaggaaagtactctcgccgccgcattgcatccctaggggcgcgacaatagtaatcgttgattgtagtttataaagttagacacgacgtttcattccacgcgtcccgtagcattttactctgcagcagcagccaccacccatggcgtcgttttccgccgccgtcgctcagttctcccgcgtttcaccttctcacacttcgctccactctcactctcacggcacgctcttccaatctcaatgccgccctttcttcctctcgcgcacttcccattcactccggaagggtcttactttaccacggggaagagaggcaccgagtacatctgtacgtgcttcatttacagatgtttcaccgaatgtgtccttggaggaaaaacaactacccaaaggagaaacttggtctgttcacaaatttggtggaacctgtgtgggaacctctcagagaataaaaaatgttgcggacataattcttaaggatgattcggagaggaaattggtggttgtttctgcaatgtcaaaggtgacagatatgatgtatgaccttatccacaaggctcaatcacgcgatgagtcttatacagctgcattaaatgctgttttggagaagcacagtgcaactgcacatgacatacttgatggagataatcttgctactttcttgtctaaattgcatcatgatattagtaaccttaaggcgatgcttcgtgcaatatacatagctggtcatgcaacagagtcctttacagattttgttgtgggacatggagaattatggtctgctcagatgttgtctctagttattaggaagaatgggactgattgcaaatggatggatacaagggatgtccttatcgtaaatcctactggttctaatcaagttgatcctgactatttggaatctgagcaaagacttgaaaaatggtactctttgaatccatgtaaggtaatcattgccactggattcattgcaagcacacctcaaaacattcctaccacactgaagagagatggaagtgacttctcggcagcaattatgggtgctctatttaaggcccgtcaggtcacaatttggacagatgttgatggtgtgtatagtgcagatcctagaaaagttagtgaggctgtgattttgaagacactgtcttatcaagaggcttgggaaatgtcttattttggtgccaatgtcttgcatccccgcacaattattcctgtgatgcgatatggcatacccattatgataaggaacattttcaacctttctgctcctggaacaaagatctgccatccttctgttaatgatcatgaagatagccagaacctgcaaaattttgtcaaaggatttgcaaccatagacaacttggcacttgtaaacgtcgagggaactggaatggctggtgttccaggtactgccagtgctatttttggtgcagtaaaagatgttggagctaatgttatcatgatatctcaggctagtagtgagcattctgtatgctttgctgtgcccgagaaagaagtaaaagctgttgctgaggcattgcaatctagatttcgtcaagctttggataatgggcgtctttctcaggttgcagtcattccaaattgtagcattctggctgcagttggccagaaaatggcaagcactcctggtgttagtgcctcccttttcaatgcattggctaaggccaatataaatgtccgtgctatagcgcaaggttgttctgagtacaatattactgttgttgttaagcgagaggattgtataaaggctttacgagctgtccattccagattttatctctcaagaaccaccatagcaatgggcattattggacctggattaattgggagcacactacttgaccagctaagggatcaggcctcaaccctgaaagaagaattcaacattgatttgcgtgtaatgggcatacttggttcaaagtcaatgcttcttagtgatgtgggcattgacttagctagatggagagaacttcgagaggaaagaggagaagtggctaatatggaaaaatttgttcaacatgtacatggaaatcattttataccaaacacagcattagtggactgcacagctgactctgtcattgctggctattactatgattggttgcgcaaaggaatacatgtagttactcctaacaagaaggcaaattcaggaccacttgatcagtatttgaagttaagagctcttcaaaggcaatcctatacacattacttctatgaagcaactgtcggagctggtcttccaattgttagcactttacgtggcctccttgaaactggagacaaaatattacaaatcgaaggcatctttagtgggactttgagttacatatttaataactttaaagatggccgggcttttagtgaggtagtttctgaagcaaaggaagcaggttatactgagccagatccaagagatgatctgtctggaacagatgttgccagaaaggttataattcttgctagggagtcgggtttaaagctagaactgtctaatattccagatgaaagccctgtgccagaaccactacgagcttgtgcatcagctcacggcttaatgcaagagccaccagaatttgatcaggagtcaacaatgaaaaaagaaaatactgagagtgctggagaagggttgagtctcgagggaggggtggacgttacacataacaaaggagaagtgaagctgcgaacagacaagatggatcaagcattttcgcaattctctgtggcaggtatcatttaagcatataccactcgaaggtataaggtataagcattggccgttgatagttcgggagctggtgcttaagtcaccggtggtggaatatggaataataagttacatcttgcgtcttgcctcagagcttgatcctccatcgtaagtgtcattctgcaagcataattttctgcatgtatggttttgcatcctctgctccacgacacgcattatctgaagcgacgaagaattgcttttatgtccaaaacgtgaattttgatcgaaatgaatgatgtcgatggatatccgaacacatgcaaatttgtaccatctttttatttatcttgattttcttcgtaggttatttgcttcttataacgttgtagtaatgtaagcttgtttctcttatcttttgtctggaagaataataagggaatggaacagaactccattaaccttgattgtgagttatattgtaaaggaacggaagtaaacagaatttattttaattttaaacgtatgatgtccatggatatccaaaaacatgcaaatttgtatcatcaatttatttatcttgattttcttcttaggttatttgctgcttataacgttgtaatgtaagcttgtttctcttatcttttgtctggaagaataataagggaatggaacagaactccatttaccttttttgagttatattgtaaaggaacggaagtaaatagaattattataattttcaacttc

SEQ ID NO: 92506 - DNA, 3263 bp, Glycine max
  Clone ID: PAT_MRT3847_54547C.1
gtcgtagctcgattcgctctgcttaaaagaaaaagaataacctgagaagagagagcgaatatcatttatgaaacgtgatgtttgattattaagtttatcagcttaatggagaatttgaggttatattccctcagtttgaataataagattataagagcaaattaacaaaatttgtaaacatcgtttatttagcacgtatctgccaaacaaactttcaagtgattggttattccacacacagaagggtcttactttaccaccaagtaccacagtacgtgcttcacttacagatgtgaaacctggtgtgtccttggaggaaaaaaaactaccccaagggagaaacttggtctgttcacaaatttggtgggacctgtgtgggaacctctcaaagaataaaaaatgttgctgacataattcttaaggatgattcggggagaaaattggtggttgtctctgcaatgtcaaaggtgacagatatgatgtatgaccttatccacaaggctcaatcacgcgatgagtcttatatagctgcattggatgctgtttcggagaagcacagtgcaactgcacatgacatacttgatggagataatcttgctagtttcttgtctaaattgcatcatgatattagtaacctaaaggcaatgcttcgtgcaatatacatagctggtcatgcaacagagtcctttacagattttgttgtgggacatggagaattatggtctgctcagatgttgtctctagttattacgaagaatggggctgattgcaaatggatggatacaagggatgtccttatcgtaaatcctactggttctaatcaagttgatcctgactatttggaatctgagcaaagacttgaaaaatggtactctttgaatccatgtaaggtaataattgctactggattcattgcaagcacacctcaaaacattcctaccacactgaagagagatggaagtgacttctcggcagcaattatgggtgctctatttaaggctcgtcaggtcacaatttggacagatgttgatggtgtgtatagtgcagatcctagaaaagttagtgaggctgtgattttgaagacactgtcttatcaagaggcatgggaaatgtcttattttggtgcaaatgtcttgcatccccgcacaattattcctgtgatgcgatatggcatacccattatgataaggaacattttcaacctttctgctcctggaacaaagatctgccatccttctgttaacgatcatgaagataggcagaacctgcaaaattttgtcaaaggatttgcaaccatagacaacttggcacttgtaaacgttgagggaactggaatggctggtgttccaggtactgccagtgctatttttggtgcagtaaaagatgttggagctaatgttatcatgatatctcaggctagtagtgagcattctgtatgctttgctgtgcccgagaaagaagtaaaagcagttgctgaggcattgcaatctagatttcgtcaagctttggataatgggcgtctttctcaggttgcagtcattccaaattgtagtattctggctgctgttggccagaaaatggcaagcactcctggtgttagtgcctcccttttcaatgcattggctaaggccaatataaatgtccgtgctatagcgcaaggttgttctgagtacaatattactgttgttgttaagcgagaggattgtataaaggctttacgagctgtccattccagattttatctctcaagaaccaccatagcaatgggcattattggacctggattaattgggagcacactacttgaccagctaagggatcaggcctcaaccctgaaagaagaattcaacattgatttgcgtgtaatgggcatacttggttcaaagtcaatgcttcttagtgatgtgggcattgacttagctagatggagagaacttcgagaggaaagaggagaagtggctaatgtggaaaaatttgttcaacatgtacatggaaatcattttataccaaacacagcattagtggactgcacagctgactctgccattgctggctattactatgactggttgcgcaaaggaatacatgtagttactccaaataagaaggcaaattcaggaccacttgatcagcttcagcagttgttgcttcctagtactcatgctacttattttgaggagctttttcacatctatgctctctttatccagtatttgaagttaagagctcttcaaaggcaatcctatacacattacttctatgaagcaactgttggagctggtcttccaattgttagcactttacgtggcctccttgaaactggagacaaaatactgcaaatcgaaggcatctttagtgggactttgagttacatatttaataacttcaaagacggccgggcttttagtgaggtagtttctgaagcaaaggaagcaggttatactgagccagatccaagagatgatctatccggaacagatgttgccagaaaggtgataattcttgctagggagtctggtttaaagctagaactgtctaatattccagttgaaagccttgtgccagaaccactacgagcttgtgcatcagctcaggagtttatgcaagagctaccaaaatttgatcaggagttcacaaagaaacaagaagatgctgagaatgctggggaagtcttgagatacgttggagtggtggacgtgactaataaaaaaggagtggtagagctgcgaagatacaagaaggatcatccctttgcgcaattgtctgggtcagataacattattgcatttacaacacgaaggtataaggatcagcctctgatagttcgtgggccaggagctggtgctcaagtcaccgctggtggaatatttagtgatattttacgacttgcctcatatcttggtgctccatcgtaagtgtcattctgcaagcataattttctgcatgtatggttttgcatcctctgctccacgacacgcattatttgaagcgacgaagaattgcttttatgtccaaaacgtgaattttgatcgaaatgaatgatgtcgatggatatccgaacacatgcaaatttgtaccatctatttatttatcttgattttcttcgtaggttatttgcttcttataacgttgtagtaatgtaagcttgtttctcttattttttgtctggaagaataataagggaatggaacagaactccattaaccttgattgtgagttacattgtaaaggaacggaagtaaacagaatttattataattttt

SEQ ID NO: 92507 - DNA, 236 bp, Glycine max
  Clone ID: PAT_MRT3847_54548C.1
cggaaaccgagctgcagagaacaagtgttttaaaataaggaaaatacactataggggggtaacaaacgaactgggggggatcatcaaggaccataaacagataaagcaacggtttaaggaaaataaaaactatcaaaggacaaatggatgacatagaaaagttggatttattgactaagggccgaggcttgacacagaagaagacagattctcaggttagatggtctttgataaac

SEQ ID NO: 92508 - DNA, 3141 bp, Glycine max
  Clone ID: PAT_MRT3847_54549C.1
atggcgtcgttttccgccgccgtcgctcagttctcccgcgtttcaccttctcacacttcgctccactctcactctcacggcacgctcttccaatctcaatgccgccctttcttcctctcgcgcacttcccattcactccggaagggtcttactttaccacggggaagagaggcaccgagtacatctgtacgtgcttcatttacagatgtttcaccgaatgtgtccttggaggaaaaacaactacccaaaggagaaacttggtctgttcacaaatttggtggaacctgtgtgggaacctctcagagaataaaaaatgttgcggacataattcttaaggatgattcggagaggaaattggtggttgtttctgcaatgtcaaaggtgacagatatgatgtatgaccttatccacaaggctcaatcacgcgatgagtcttatacagctgcattaaatgctgttttggagaagcacagtgcaactgcacatgacatacttgatggagataatcttgctactttcttgtctaaattgcatcatgatattagtaaccttaaggcgatgcttcgtgcaatatacatagctggtcatgcaacagagtcctttacagattttgttgtgggacatggagaattatggtctgctcagatgttgtctctagttattaggaagaatgggactgattgcaaatggatggatacaagggatgtccttatcgtaaatcctactggttctaatcaagttgatcctgactatttggaatctgagcaaagacttgaaaaatggtactctttgaatccatgtaaggtaatcattgccactggattcattgcaagcacacctcaaaacattcctaccacactgaagagagatggaagtgacttctcggcagcaattatgggtgctctatttaaggctcgtcaggtcacaatttggacagatgttgatggtgtgtatagtgcagatcctagaaaagttagtgaggctgtgattttgaagacactgtcttatcaagaggcttgggaaatgtcttattttggtgccaatgtcttgcatccccgcacaattattcctgtgatgcgatatggcatacccattatgataaggaacattttcaacctttctgctcctggaacaaagatctgccatccttctgttaatgatcatgaagatagccagaacctgcaaaattttgtcaaaggatttgcaaccatagacaacttggcacttgtaaacgtcgagggaactggaatggctggtgttccaggtactgccagtgctatttttggtgcagtaaaagatgttggagctaatgttatcatgatatctcaggctagtagtgagcattctgtatgctttgctgtgcccgagaaagaagtaaaagctgttgctgaggcattgcaatctagatttcgtcaagctttggataatgggcgtctttctcaggttgcagtcattccaaattgtagcattctggctgcagttggccagaaaatggcaagcactcctggtgttagtgcctcccttttcaatgcattggctaaggccaatataaatgtccgtgctatagcccaaggttgttctgagtacaatattactgttgttgttaagcgagaggattgtataaaggctttacgagctgtccattccagattttatctctcaagaaccaccatagcaatgggcattattggacctggattaattgggagcacactacttgagcagctaagggatcaggcagctgaagtttctattgtaagcttgcaggacaaggcctcaaccctaaaagaagaattcaacatcgatttgcgtgtaatgggcatacttggttcaaagtcaatgcttcttagtgatgtgggcattgacttagctagatggagagaacttcgagaggaaagaggagaagtggctaatatggaaaaatttgttcaacatgtacatggaaatcattttataccaaacacggcattagtggactgcacagctgactctgtcattgctggctattactatgattggttgcgcaaaggaatacatgtagttactcctaacaagaaggcaaattcaggaccacttgatcagctttttcccatctatgctctctatatccagtatttgaagttaagagctcttcaaaggcaatcctatacacattacttctatgaagcaactgtcggagctggtcttccaattgttagcactttacgtggcctccttgaaactggagacaaaatattacaaatcgaaggcatctttagtgggactttgagttacatatttaataactttaaagatggccgggcttttagtgaggtagtttctgaagcaaaggaagcaggttatactgagccagatccaagagatgatctgtctggaacagatgttgccagaaaggttataattcttgctagggagtcgggtttaaagctagaactgtctaatattccagttgaaagccttgtgccagaaccactacgagcttgtgcatcagctcaggagtttatgcaagagctaccaaaatttgatcaggagttcacaaagaaacaagaagatgctgagaatgctggggaagtcttgagatacgttggagtggtggacgtgactaataaaaaaggagtggtagagctgcgaagatacaagaaggatcatccgtttgcgcaattgtctgggtcagataacattattgcatttacaacacgaaggtataaggatcagcctctgatagttcgtgggccaggagctggtgctcaagtcacagctggtggaatatttagtgatattttacgacttgcctcatatcttggtgctccatcataacgcataattttctgcatgtttggtttcacatccaccgctccgtaacacattatctgaagttgcttttatgtccaaaacgtgaattttgatcgaaacgtatgatgtccatggatatccaaaaacatgcaaatttgtatcatcaatttatttatcttgattttcttcttaggttatttgcaaaaaaaaacgttgtaatgtaagcttgtttctcttatcttttgtctggaagaataataagggaatggaacagaactccatttaccttttttgagttatattgtaaaggaacggaagtaaatagaattattataattttcaacttcc

SEQ ID NO: 92509 - DNA, 461 bp, Glycine max
  Clone ID: PAT_MRT3847_5454C.1
aaaaacccccaaatggccatgggattaaaaaacctggcggtattccaaaaaaaaaggggtggaaaaagggggccaaccaacttggaatcggtaaaattttttccttcgggaacaaaaagaaaaccgttaaaagccggcggggttaaccccaaaaaataaaaacccggggttaaccaccccccccgaaaccatttccttaaaacccccccccaacccgggggcaggtttttccaaagggggaaaccaaaaaagagccccccctttaacccctgggcttttcaattccctcccaaaagggggcttaggggggggcccccagaccagggacaaggggggctttccttttggacccccccatttttccccctaatagggggcccttttttccggaaaaacccattggcaaaaactttgggggggcccctttttttttttttccgacccccggggcggaccctggg

SEQ ID NO: 92510 - DNA, 337 bp, Glycine max
  Clone ID: PAT_MRT3847_54550C.1
acagggactcactctattcgcatcgatactttcggtggctatcatatcctacaaatacctgggatgttctacatataggcatattgtacacatatatacgcactctgttcaaagctaatttgccgaatcactgatacatgcattgctaaatctataacatgccatcaatgcacctaccagacatttcacacatatatacataaactcacaccttcaaaatgatgtttacgctaacctaaaagctaaggttatccatattccctacatactaacgaaatgatacacgcacattcatgtcccgcatgtgagataacttgataaaaagtttagtacaaaa

SEQ ID NO: 92511 - DNA, 220 bp, Glycine max
  Clone ID: PAT_MRT3847_54551C.1
taatcttattcttagaatttaaaattagttatttgatattgccattataatggtgaaggagatgcaacaaatagtgatcctactatgagataaactacatggatcgacgtcaataagagattgtgtgaaaggcagaatttcacactgattactaatgattaaaatcatattttggctaaaagacacaagcaacgctcggttgaaaataatgcctcctttt

SEQ ID NO: 92512 - DNA, 337 bp, Glycine max
  Clone ID: PAT_MRT3847_54552C.1
ttaattcaataaaatgagtcattatgggggtagggggatttcagattttcggacgcattaacttgttatgaaaacacattgataggctttacttgtggcctagctcggcaaaaagcgaaatttgcctcaaccgggtggcttttggctcccggctgataaaattacgcttctggtatttcaagagggggctcggggttacaggggatcaatggcaataccctttttcggatgatttactaaaacagggttcttattttaatttaattgagcaaagccgtgcatcaaagccaatgttaaccattggcctttaaaaaggcctttttttaaaatacctata

SEQ ID NO: 92513 - DNA, 1667 bp, Glycine max
  Clone ID: PAT_MRT3847_54553C.1
gttctgttctctgaacaatggcgtctctctctcacctcaacaaactcctctctatgtctcaccttcaccacactactctgcactccgccactcaactcttcaccccggagttccattctctgaacaatggcgtctctctctcacctcaacaaactcctctgcatgcccccgctcaactcttcaccctctatttcgccaccacgcagcagcgtcggaatttggaccaaacctgtcggaaggccgaggctactggtgcgtgtccgagcggtcacgagcgacgacgagtgggggccggagaaggaggaggcgtacggcggcggcgtagcggtggaggagaaaccgacgaagtcggagacggagacggagaagctgaagaaggccttggtggattcgttttatggcaccgatcgtggactgaaagcaacgagcgaaacgagagcggagatcgttgaactcatcacacagctcgaggccaagaaccctaaccctgttcccaccgacgccttgactcttctcaacggaaaatggattctcgcgtatacatcctttgcaggtttattcccattgttgtcaagtggaacactaccattggtcaaggtagaggaaatatcccagattattgactcgctgaattttaccgtccaaaactctgttcagttcgctggtcctttggccaccacctcaattagtactaatgccaaatttgatgttcgaagtccaaaacgtgtgcagataaagtttgaggaaggcataattggcactccacagcttacggactcattagagataccggaaaatgtggaatttctgggtcaaaagattgaccttacacttttcaaaggcatccttacctctgtccaagacacagccacatcggtagtgaaaacaatttcaagtaggcctcccttgaagatcccaatttccaacagcaatgctcagtcctggttactcaccacatacctcgacgaagaattgcgtatctcaaggggcgatggtggcagtgtgtttgttcttatcaaagaaggaagctctcttttgacaagataaacaaaacaaactagtttactttggtggtcaatatcaggcttatgtttataaataagtaaagggtctgaattttatacaatgattttgaagatacatgtgtagaacagtttgttaatgctgtgttgcgaattgttggttggttgttaatgtgatggtttatgagcagaatcgaaaggcatcaaccaacttcaagtaacatcataaaatgttttctgtgtttgactattttctcaggatcggaagtggtacaaccagtatgcttttgttgggaacagagtgagattcttgttaatctatactcttcctcaccagattggcactcaatttatacttaaatttcaatattggggtagctaattaaaatggaaataaatatttgagggaataaacatttgtattctttctcagaatagatattgaagtaaaaatgtagttgtgaaagtatggctaaatccatcttgctcatatcagtcacatgttcaatcccatagtttttttttctgggccaaaccagtttttgttctgcccaaaataaagagatacacaactaatctgttttcgacctcgctggattcaagacagagatgggagttgctattggcattacccacgtggaggtc

SEQ ID NO: 92514 - DNA, 382 bp, Glycine max
  Clone ID: PAT_MRT3847_54554C.1
cgcccctcctgataaggagatggagaaggaggatctgcggcataatcactgctcatcgacatgtctcgatgctatagcagaaagatcttagacaccaagcgtgctatgactgactgtaggtgtagttatgaagatagctcatgtttgagctgatggaggcttttcttcatacatatgatcactagatcagatcgtggtgatagagacgaactgcgagttatcttattaggaaccattttgcgatgtcttgacgagctatagctgaatatctcagaccatggtcagtattacatcgtgaagctggtctgctattaggatccggtgtaacttctgagttcaatatcatacacaatgttgatctggtttgttagtcacatcaact

SEQ ID NO: 92515 - DNA, 753 bp, Glycine max
  Clone ID: PAT_MRT3847_54555C.1
ggctcgagctggtgcccctcgcgtccggttctgttctctgaacaatggcgtctctctctcacctcaacaaactcctctgcatgccgccgctcaactcttcaccctctacttcgccaccgcgcagcagcgtcggagtttcgaccaaatctgtcggaaggccgaggatggtcgccgatttcgcgaggccggtggggcgtgtccgagcggtgacgagcgacgacgagtggggcccggagaaggaggaggaggcatacggcggaggagtggcggtggaggagaaaccgacggagacggaaacggagaagctgaagaaggctttggtggattcgttttatggcacggatcttggactgaaagcaacgagtgaaacgagagcagagatcgttgaactcatcactcagctagaggccaagaaccctaaccctgctcccactgacgccttgactctcctcaacggaaaatggattctcgcgtatacgtcctttgcaggtttattcccattgttgtcaagtggaacactaccattggtcaaggtagaggaaatatctcagactattgacacgctgaattttaccgtccaaaactctgttcagttcgctggtcctttggccaccacctcaattagtactaatgccaaattcgatgttcgaagtccaaaacgtgtgcagataaaatttgaggaaggcataattggcactccacagcttacggactcactagagataccagaaaatgtggaacttctgggtcaaa

SEQ ID NO: 92516 - DNA, 370 bp, Glycine max
  Clone ID: PAT_MRT3847_54556C.1
tttcgttttttttttttttttttttttttaagaaaccaaattccatttttcttttacttgaatcggcacaaagggcaaatcttatgttaaatgttcacctttcgcccgtgtaacatctaatgttttagggaatataactaaaaactaattcccatggctagtggcttatattttgaggatgcccaacgacaccccaaaagcaaagggcagctatcccctattgcttaagggtaccttgtaattgttgaatggctgttggaacactcccccctggccacagaggaaggcttaccgaatgcgggatcttggatctctgagatataaaaattaccccgggcccccccccactccctttgactctggataaaaa

SEQ ID NO: 92517 - DNA, 438 bp, Glycine max
  Clone ID: PAT_MRT3847_54557C.1
aaggatgatcacatctcatctttattttataatagagaagtcagaatcatgattgattatatatcaatcaattactaattattaggtaattacatatcaattagaatcataagtttctatgtaataataatacaagataatgtaaagataaatgtaatctaacattgacaatgtgaaattttggtggtgtagcattttgtggcgccaatcggaggatttggttttggcaaagcatttgagggtttagtatgctttgcagtgggccgaattttcttttagtcaaggatgatcacgtggcataatttttgctaattaccttgtttatatggctgcagtacaatttgttcctcgggttttatatattatatatagacaacaaaggaaaatttattgaataccctcctccaacattggatcaatgggtatccaggttcaaga

SEQ ID NO: 92518 - DNA, 364 bp, Glycine max
  Clone ID: PAT_MRT3847_54558C.1
caataagcccccacccataaattcccatggaggcccgaaaccaaaacccaaaaacccggggggaggaaaccccaaaaggcaaaaccaagggggaagggagttaaagcccaaacaaacaagggggggggggggcaacaaaggcttggaaaatttttaacactaaaaacccggggggctggaaggcaaaaaacctgagccccggccctggggaaacgtggccaaacccaaaaaaccggaaaaacccgggggggaatccaacctaaccctttggaagccccttcaaccccggaaaagcatcggggcacccaaacatgggcagttcccacagggcccagaagcgcccatggaagaacccgggggaccg

SEQ ID NO: 92519 - DNA, 550 bp, Glycine max
  Clone ID: PAT_MRT3847_54559C.1
aagcatatggacttcagggctgtttcattgcacaaccaacttgtaacatttacaaactttatattcaggggtttacaaacctgcacagttttggcaacttgaaaatcaaacaccacgacctacaaaaaggctacatggatcatttgtttacacactgaaggagatggaggaggcaacatgttcattcagggatgaaaatctgcttggaaaaggaggatttggcaaagtctatcggggcactttgcggtcaggagaggtaataagctctggacaaaagtttatagcccacaggaattcattataattcataagattttgtaacatcaatcatagcttccatgcagaaagcatgctttttataaaaagggttaaataagtgaacttgatatagatacatactaatacaacaagtttccttttgaagggtgtagcaatcaagaaaatggagttgccagcaattaaagcagctgagggggaacgcgagtttcgagtcgaagttgacattttgagcagacttgaccacccaaatcttggttttttgataggctac

SEQ ID NO: 92520 - DNA, 352 bp, Glycine max
  Clone ID: PAT_MRT3847_5455C.1
tacgtctgcagctcgatccgattggtctcgaacaccactatatccccaagccatgcgaacacttggacctcattgacatcaccggcaccgagatggtagatcgccatcatgctcggccgactgggccctgacctacagacgtgcaaggatgtctacgcgcgcatgacgaaacgtgtctttgaaaccggcgagaccatagccggcattgcctacccgtcgaacctgttcataggcttggagcttgggggggccctccgggaatgtgtgcgcgaacacactttgaacgaggctgaaggcaatggcgacacttccgggttcgaccttgacctgaactcggcacttagccccaagg

SEQ ID NO: 92521 - DNA, 626 bp, Glycine max
  Clone ID: PAT_MRT3847_54560C.1
ctttcttttttttttttttctttttttttttttttttttttttttttttttttttttttttttttttcccaaaatttcaaaatttcattttcaatcaatttttgggggattttctttcaccccccccaaaacttttttttggctgcaaaaaaatataacctttaaaaatctcccctaaaataaactggctaaacaatttccttttttttcacatgaaaccttaaaaaaggacccctccttttttaaaaaactttgcattcctcataaaaagggtttgtctcccaaaaatcccccaatgggtccccccccccccttttaaggccccctggccacttgcttgctactaaatggcccaaatccccccctttttggctgtaccccctttttttgtcataccaagcaacccctttaaccattttatctcccatgaccattgtcaagggggagccatttgtaaaggaaacctcaaacccgcggaagtcgataaacccaaggggaacatcacccccgtccaatacccctttgagcggcccctcagctgcctttttgaatgctgcattcacattttaagaagaaaaaccctttttttaaacattcacaaaaagggcaacacctgaaactttggg

SEQ ID NO: 92522 - DNA, 381 bp, Glycine max
  Clone ID: PAT_MRT3847_54561C.1
attcctttattatactcatactttttctctgatggaattcccctcaccaaatggattaacaagaagaactcttggttccacaaaaccaccaaaaaaatttcttaaatccatacaatgttataacaattacaatcaaaagatatcactctacaacttttttttatttccaaaccaaacaaactaactataaactgatgataataactcaccttactacaaacaatcgattacaatccatgctgcaaaaacaaaagcttatattcaaaattaattaaaaacttcttaatctgttatgcacttaagcttgaatgaacaaacacttcacaaaccttgtgaatcttattgacctgatatacttaattttacccaaaactatattct

SEQ ID NO: 92523 - DNA, 494 bp, Glycine max
  Clone ID: PAT_MRT3847_54562C.1
caaaaaagccaccaaacagatgggacttgtcctcggttaaggatgatctccatactgtaatactatgggctacagatggacacatgccataatagcatactcttgagccgaaaccttgagcactaacactgaaatagttacgcccctgatcgctatataacccatcacatgactatgcgccccctactccaatgcataacgcaagctaggctaatcttttggattcgacagactaaacctgtatgcccgccacttttcctagattcacgagccttgctaagcagatcctacagggccctacttgcatgctatctatggcacttgtgcgcggaattaaaaccggcctctgtcttgcccaaagaggccttctggctgaggacgtaccacatgcacacttcctgagaattgacaaacagagggctcacatagtgctcacagacgtgccccgcgccggtgataactggaatgaccagccaggtgctaaggatcagctt

SEQ ID NO: 92524 - DNA, 361 bp, Glycine max
  Clone ID: PAT_MRT3847_54563C.1
agcacgcgctctttcttttatagaagcttcggctttatcgcagcctctctctctcttaaagagaagaggcatggaaaaatttcacataaaggattgacggatattgaggatgttaactgggtgaaagacaataccgctgggacaacagaggtagatcatcgtaagcataaggatgaggactcatcgagagactgttagaaagaaaatgcttagatcaacaacacgagctgaacaaaagcatgggtgcttcataaccattagggtgaacctaccagaggaatcaaagacagatgatgccatgggtactactgctgccaccaccatctctggcacattaattgatccccgtgaacgcactcat

SEQ ID NO: 92525 - DNA, 559 bp, Glycine max
  Clone ID: PAT_MRT3847_54564C.1
ggaaggggaaaataaatggggggagctttggtttataaggaaaatataggaaaataattccatgaccaaattataagggggaccttctaatggttctccttttatttgggctggactcccctgtttcctacccactatatgttctaaaatggccaatcagggggcgcaaaaccccacaaaacttttactaacaaggggaaaaaaaaagccaactttatcattaagtttaaccaatcaccacctcctttggtggaaaaagttaaattttgggcccctaccaagttttggggacttttgaagcttactcataaaagattttttaaaattgaaagctttttgaatttgggagcaaaacctttgcattttagccccacttaaactactcctaaactccatcatttgggggagggaaagccttttttttggccctggatcggggcgttgttttggaacactataaaacctcaatttggccttaaaaaactgagggctggccatgtattttggaaaattgggaaactggccataaaaaaagttttcggggcaaacttttttaggg

SEQ ID NO: 92526 - DNA, 275 bp, Glycine max
  Clone ID: PAT_MRT3847_54565C.1
ccttacctaagcattcagctcgagctcgagccgaatcggctcgagtacggctgcgagaagacgacagatgggagcatcatcaacaatggctctacgcgttttaaaatattcactttcaaatgggtgctgaggacaaaaaacatcttcaacaactggttgtttttctttggtggagataccgtgggtatggcaccatatttccttggcccctaattggaatggtcctggggtttaaaaggggggagagaaagaaaaggccatttttttggtgggga

SEQ ID NO: 92527 - DNA, 755 bp, Glycine max
  Clone ID: PAT_MRT3847_54566C.1
cttagatctgttcagatgaaaggtatggtcttgactccacaagcgtataaccctgtgattcaagcactctgcaaaaggaagagaacaaaagaagccatgaggcttttcagagaaatgatggaaaagggtgatcctccggatgttataacatacaagattgttttccgtggcctctgtaatggtggagggccgatacaagaggctgttgattttacagttgagatgttggagaaaggaatattgccggagttcccatcatttggtttcttggctgaaggtctttgttctttatccatggaggacaccctcattcaactcatcaatatggtgatggagaaaggaagattctcacaatccgaaacatctattattagaggcttcctcaagattcagaaatttaatgatgcactagccaatcttggagctatcttggatcggaaaaagcccaggagattttgagtggttaaagctttgttgtaagtgcactctggtgatgcttttaagaatgttatgggaaagctcctcattgcataaaggtgctgaagcatatgaaggtgttcaaaacccaggactcaagggccaagaccatattacagacttggagtgaatacatttcagcactagtgttgccttcatctggctggcctcattgatgaataccacttcctcatcctcattgtttccagtttcaaggggacaatgcaaacatgtaacttgtagctagcacattcatatgaatatttcttaatggattc

SEQ ID NO: 92528 - DNA, 762 bp, Glycine max
  Clone ID: PAT_MRT3847_54567C.1
tcggttcagtagcgtccgaacgaacttcaccactcagtctgttgcttgtgctgatgcattgcgccgtgaaccctcgctagctcactctccgatcagatccaagtttgtgttgattctccgatccgcaatgacgcagaggaagaacagaggcaaggcttcgtgttttcctcttctcggtttcgtcctcctctgcgttctcgcgccgttttttttcttcctctcccggaggctctacgctgccccggatcaagattatatttcagctgttccaagtaaacaggttcgcaaatggagagagtggcaggctttgcaggaccttaaatcacttttttcagaagaggttcttgatgttattgtatccagcacaaatgatttggggcctttcagtcttgacaatttcagaaaaaatttgtctgcttcatggagagttggattaggaaattcaaacgctgaacatgagctaaaccaacaaacaacacatgttagacaagaaaagccagaggtgaaggaaggtagatcttcagataatccttctcagtggactgatagttccgcacagcaaacccgaaggcatttaatagagaaaaggcgggaaaagcgtgctgctgagttggtaaaaaaggataatgaagtagctgtaagagtcgaaaaacagctattgaacgctcaaaatccgccgagtcagccattactcccccaaaaaacaccccccccaagagagttgagaatgaaaccaagattctacccctcggccgacccccc

SEQ ID NO: 92529 - DNA, 818 bp, Glycine max
  unsure (1)..(818): unsure at all n locations
  Clone ID: PAT_MRT3847_54568C.1
gtttgttttgacctaataagtttgaatacaaccactttgtatggctgagttcacttaggccttactgcagggtcgtctattttatgattctcattgtgatgatctgtaaatggtacttttggatggtgttttctttgacagatactcaattgggttggaattaggagggcactccaggtgttttagtttgtgtcaccctcatttactaactaatcctcatttaagtgcagtatattttgtcctcggttaatagcaaccctctcctgttgactaacaagtttcttatgtcatgacagtatttaaaaactttgaacacttgtcttctgcttcttagcatttatggcaaattgaaaaagattaaagaacaataaattagagtttaaattagaaaaaatattcatttttatagatttagcattgtgcagacttgtaaattactagctatgtgctttttgaattataaacccatggcttttaggatttgcacagaattttatatgccatagaccatcttttctttccaaatcatatttctgatctctccatgtgttagatcttaaccaaaaaaatatatgaagacctttaaatcttctgatcacctgagcgttagcatttgcaaagccatntgttgttaactgatacatagagnatgatctttggaaggataaatcaatgtgctaacaatctttcaatgatcaaaactccagtttgctaaacatttaatttagtaaggctttttttttttattgtactacaattaatttagaaatgtcatggtaagttgctggcacaggttaggttaatttgagaatatcgca

SEQ ID NO: 92530 - DNA, 328 bp, Glycine max
  Clone ID: PAT_MRT3847_54569C.1
ctcgagccgcataatctgtggctgaaggacatgttatggtagccaagtcttttcgcctttatttgggagctagcctacattcatgggtttaattgaaagccttccaaattaatttggaaaaaaagtttcctttcaactgttttttttcctgcccaattaaactattaaaagcaagagaatggctgtgagaaaagatggtctagaaatttttcatgggcacaagaatcacattgatgaaaaatttgcatgccaaaacctacatcaggtgtctttgttgatactatagattggtcaatccaaaatgaagttgcagcagctctctctgatg

SEQ ID NO: 92531 - DNA, 392 bp, Glycine max
  Clone ID: PAT_MRT3847_5456C.1
aacactgcctatcaggcaacctggatcggacagaataaccatgatggataacaacacttttagtggaccccatgtctcatacatgcgactaaaaccattggataaggtggaacaatctaaagtctgctgaccccctcccatctgttaaatggagttttgctatgcatatcaccaactccatacattacataagcagcgtatctgctataccgcattatcatctactcatgcaaaatgtatgcatgtacatatacagaccctactgcactctatgtaaggatctttcttcataaacttcgggggcatatcaattattctattatcatagtgcatccgttcggatcattcggtagccgagggggtgctcccacgcctttctgcaagattcttat

SEQ ID NO: 92532 - DNA, 182 bp, Glycine max
  Clone ID: PAT_MRT3847_54570C.1
ttttttttttttttttttttcatcaattgtagctgaaacaatcatcaaccatcaactggaaattcataccaacaatgatttctgagtgtaaaattttctacattgacaaagggtatagaagttactaaattcttcattaaatttcaaacttctagttctagaacaaaattaaacacccttca

SEQ ID NO: 92533 - DNA, 571 bp, Glycine max
  unsure (1)..(571): unsure at all n locations
  Clone ID: PAT_MRT3847_54571C.1
gtggcatatgttttccatcttctaatcctgaagcaaaacaagaaacaaaggaaagcatgtttcaagatgacttgtggggattggaaacatcctcttgtgagtcaactgcagacaaacctttgaagattagttgcattgaaatttctagttctccttccacttcatggagatgggaaaattaatatcaacagactggacaacttcatatgatgggaactaagatcctagttagctccattaatggatcggtggtagttaattattataagtaaatgttataaaaaatgactgatctctaatagcaagtctattagaaaactgttctatgctagaaactgcatgatgacaattatgcatagaaaatactacatttattagcagttatgtattacgatttaggagtacatgtgataggaggctggcccaagcataccactcacatgcctcttaggtttaaaaactatatttaatttggacttaagttgttatttccctaaaatggcccagctatatcngacattttttgtagtcactttatgctggtcttagttgtatttaaagggtactgtgc

SEQ ID NO: 92534 - DNA, 291 bp, Glycine max
  Clone ID: PAT_MRT3847_54572C.1
catgtgccttcaatcaggcaacaataaccgggggggctggtacctctcaaaggtataggaatctcgacccatattcaaaaaaccctagcgagcatggttaaacccataggtcgcaaatgatagctgaccatgcgatgattcaatgaatacatggataagccggatgcgttgttgtcaaaggctaaccactttagcattgaatgaccttattggaccagcccttttaactattactgggcgctatggttgcacatgaacgcctctcggactattgggaatcgggcctttaca

SEQ ID NO: 92535 - DNA, 409 bp, Glycine max
  Clone ID: PAT_MRT3847_54573C.1
ctcactcgtacggaagactagctagaactaggggttgtctttagttaccaccggtttatggcaccccctagaaatggctggcaattccattcttcttctttgtatatctcttgtggatgccacagagggttccttacatgatctacatggcaagacagggtaacatgcgcctgctccaccagtggaggcaccaactgctgactatgcagtgaaatcaccatcttacccttcagggtcagtgaccacaccaactgataaggggccccctccttctcagttcccaagttgtgaagccaccatcttcaaacaccagcctctgagtaggtacccccttccacaggtcccagcagtgaagccacctacacctacattctcagtggtgtccctctctccttcttttggaccatct

SEQ ID NO: 92536 - DNA, 521 bp, Glycine max
  unsure (1)..(521): unsure at all n locations
  Clone ID: PAT_MRT3847_54574C.1
gtgataccatatccgattatccggaggcttgttaacaggctataaaatgttgttatcccaagtcgggaatagtgattcttgtcatcaatgtcaatgatgccatttgttttggttgcagaccgatgctttcttcaaaactaatctttnccgatgtatatgctgttggtgatgttgctactttccctttgaaattatacggtgaattgagaagagttgaacatgttgatcattctcgcaaatcagctgaacaggctgtgaaggtaagtagcttacctaaatttgtgagctcatgcacaaaatacatatttatcattgccccggcatgccctctctagctaattagtagatatctgcttaaacgtttctttttctggtcctccaaatcaaagtttccagtaaagagccatgcttgcagactgcagtgctgtttctcattctgtgataacttgttttatgtaggccatcaaagcagctgaggaaggaagaacagttgaggagtatgattaccttccatacttcta

SEQ ID NO: 92537 - DNA, 133 bp, Glycine max
  Clone ID: PAT_MRT3847_54575C.1
ttttagtctcctgctactgcatctatctctcactttcagaatagcatgggatttggtataacaccatcacatagaagtacaaaagcgatgtgcagctgattccattgtgtagaagagagcagagagctataag

SEQ ID NO: 92538 - DNA, 626 bp, Glycine max
  Clone ID: PAT_MRT3847_54576C.1
gcatgcgctggtgaacaaacattaagataatggtaggggaaagagaaatggttaatggttttgatgaaattttaatggtttgtaattagaagggtgttgactttggtttaaatatttaagataagataataatgattaattgatgtaagaaactagaccacattattggtttcttgcattttgggtagatcattattggttcattgaatgtttgtggtctagtttcttactcgtacttgctactagtagctttttttattttatttatttattattttactattttttttaatagggtttgattaccaagtctattccccgagtgatacgtgaccggcgttttgcggagaaccggaatttgttaactttttatttaattaataatttgtatataaatgacacgacatacattacattttttgcgagttgactaattttttctttggtggtagaagtatagaattttataaaaaaattataaattaaaatgcaatttttgttttctcatttttttaatttgggtttttagtttttttttaattgagatattttatcatcactttttaaaagtgtaccattttagtctctatttttaattaagatattttggttctcattttaaaaat

SEQ ID NO: 92539 - DNA, 1733 bp, Glycine max
  Clone ID: PAT_MRT3847_54577C.1
aaaaccattgctttatgaaagaacaacaaaaagaaaaaaagaaaaccattgctttatggtggtgacaaagtaaggtttgtttcatcaaaaagatggtggcacccattgctgtttcttctccaaagtccacacttttgcagaaccccatctgttttggtgactcaagttcaagttttgttggggggtctttgaagggtctttgcttcaatctgaaacgaaggcaacaaagaagagaattgaccaatttggttgttgcttcatccacctcaagtgttacaaatagcaatgctagtggcaggttttacttcaacatcactggttttcctttcccacttggtccttttctcaacaggcgcactattaggactgaggctgtgaaggattgtatatggctattcgaacaagagcaggcattaggattcagcagtgtttccacaaacattagaatgacagttatcaaactcaaatctgggggcttatggatccatgcacccatagctccaactgatgagtgtattcagcttattaaagaattgggggctccagttgaatatattgttctccctacttttgcttatgagcacaaagtatttgttggtccattttctagaaaatttccccgtgctcaagtatgggtagcaccaaggcaatggagttggccattgaacttaccattggaattcttcggcatttttcgtgctaaaaccttggaagatgaagatttatctgctccttgggctggtgaaatagagcaaaagattctaagctcaccagaagttggaattggaccttatgtggaggtagctttctaccacaaaccttcaaaaacactattggtgacagatgctgttatttttgtcccaagacagccacctgagtgtataagcaaagaatccttattagcatcagcaaaaaatggcttggctgttaaacttcttagtaaaggaaaggaggtacctgacgagccagtagttgacgacaaaaggaaccgacaaaaaggatgggaaagaatggttctacagatcttgtttcttggtccatcaaaccttttagaacctaatgcaagctttgaacagatgtcacaaaagttgattgtttcacctattgtgaagactctggtcttcagtaaagttcctgagaaggttagagagtgggttgatagcatttcgcgagattggaggttcaagagaataatccctgctcactttgctgctccaataagtgcaagtaggtctgatttcagggctgcatttgcatttttggatgagtttttgggggaaagtaatgctgcatggccttcactttcccttctcttctcatcaatcatgggaaaggcagccagctattttcctccggatgacatgaggaccctatcatcccttgaccagtttttggtgtctgttggtgctgtgaaaaaaactgtttcaggcaggaaaaggtgagatgagaggtgcatcacaacttggccttgccaatacttgttaacttttcaaatgtaaaataagtataattttgttacattaggagctcgattcttaaggaaaatgtaaatgttgtttgacattggactacatatacatgttgaggaaacaaggaaatgttttacatggaaaaatatttaaggcataagtgagggggtatacatgaatacaagtttggtgcattttatagtgtaaataaatgataatggatgtttggataataatgtaaaataccttgacaccatttgatat

SEQ ID NO: 92540 - DNA, 318 bp, Glycine max
  Clone ID: PAT_MRT3847_54578C.1
gaatattttaatcacaggatgggcaacacgcttgctgaatagatgaaaaaagggcacaagggggccattagtgtgttcatcggatcagttcaaaagctgatgactgcgttcgaccacgccaggataccacttcctttgacagctgacaccaccatagtctttgatactgtatccaacggactcgatttctactgcaatgctactcttgccagatttcaggctctgaacgtggatgtctacaccatatgtatcgagcccgagaaaaaatggcaagagcttgctcaaactgccaaacaagggtgggatgaccatgttctt

SEQ ID NO: 92541 - DNA, 517 bp, Glycine max
  Clone ID: PAT_MRT3847_54579C.1
ggctcgagcccactctgatatttttccagatgaaaccgcaagccgaagcagcctcttttttataagagaaggaaaaggctagagaaccatccttttcttcttcccccggtccctccttttcacacacacaacactcactctttctttctgttttcctttttctattattccacttatcaagaaaccctaatacagatacagtttccctctctctttctcaagcaatccaaagtcacaacccacacacactgtacgggttgtgcagatcagagggtgttggtacactctatctatcttttttctcccataagcagaaacaccctctctaatgtttctctctttgtcccatacccatacctcattctgcaagcgtccccttaaataataaatacaccgcgtgtgtgtgtgtatgtgagagagagagagtaagaaataaagcaaatctctctgctgtttctcttacgtctttctattttgggctctcatggattcgggtaacagtgggagtatgcaatct

SEQ ID NO: 92542 - DNA, 259 bp, Glycine max
  Clone ID: PAT_MRT3847_5457C.1
tatacaggagaactttgcaaattggcaacacgataatgaaaatttgaagatgcagatagcacagatgaaatgaaaacacaagactgatatttataccattaagcagtacattacagatagcaaattacctgactctgcactacaaccactgtatacagaggaggattctgatgtggcacacatctcatcttcctcctatacatatgacgatcatgcgtggagagcagatcttgatgcactatatcatgagcatgactat

SEQ ID NO: 92543 - DNA, 362 bp, Glycine max
  Clone ID: PAT_MRT3847_54580C.1
cgaagctcgaatacgctcagctcacaaagcatggcttgagaaaagggactaagtctatctagatgtggacaaaggcagtagaaatcattgaatgtagctattagatcttagctacatatttgtatatactacctagagggagcgagaggacaagtaggtattcagctagtaagcactatatcctatagagctggcaaacctgcttagcataaagtacaagggcttttctccgggtctcataatccagttagactagttctgactgcaaattggtacgatgcatacatcagaggatcattaattgataaaagaatattcgcatgggatggtctcatagctcatggacacatgacattcagatg

SEQ ID NO: 92544 - DNA, 424 bp, Glycine max
  unsure (1)..(424): unsure at all n locations
  Clone ID: PAT_MRT3847_54581C.1
gcttggcatggtaattatgttccatagaagtattanntttgcaaatnctgcccttataatacaggtctgtttgatcatagtgacccatctatcaatactgtgttgaccgcaccaactgataaacctggagtggcattgcttgattttgtcattttcccacccagatggctggttgctgagcatactttccttcctccatattatcatcgcaattgcatgagtgaatttatgggccttattcatggtggctatgaggtatatcatatcaaattttgtcttttaatcgctgtttgtgggaagcacgaaggatttgcatcttaatggtagtttttttggtaatatgggaaaagagcaggattagttttgggtcagttgagacaaaattttgtcttctctagtgttgtgactaacacatttgtttttg

SEQ ID NO: 92545 - DNA, 444 bp, Glycine max
  unsure (1)..(444): unsure at all n locations
  Clone ID: PAT_MRT3847_54582C.1
aaattttatannnncaactatcannnnnaaagacatcaaagtctccgcaaatattccaatacatcttcaagagaagaaactgctatatgcatgtggccatccttttttctttttctgtacggtatcaaagaattcaacaacaaaaccaaaaaaacgcaagagaaacatcctaattcctaagttaaaacgccccgcagagactagcacatgattgatttatttttctgtatggtaggatcagtcgtcggagttgtagccacttggaatgggtgaggtagaagaaggggaggtacgagtagtagtgtgagaagtagcatctccagtagtagtagaggtggtcaaagacgcaaatgcccttgcagacttgaagagagttttgaaaaccctaatcttgaccagccccctcgggggtgggagctttcgtgggggcgttttagctggtgc

SEQ ID NO: 92546 - DNA, 312 bp, Glycine max
  Clone ID: PAT_MRT3847_54583C.1
caattacctacagaggctggggatggctatgtcacacgaggtagtggacgatgatgagctcgcgccggctaacacacaagaattctttgatggaaattttccagaggattcttggataccaatttttgagaattggctatatgctgtaagacaattacctttactagctgtcattcttaatgatacatgtgactgggtgacgtggtggttacccacacacgagattgtatatattctaacgccactacattctatgctgacgcgactacttgaggactgtcacagtcttaaatatatggtagatgagtgttc

SEQ ID NO: 92547 - DNA, 555 bp, Glycine max
  Clone ID: PAT_MRT3847_54584C.1
cacgcttcaaaatttataaataaataataaataatgattcagttcacagacaaggatgctatttttcaggttgactagaacatcttttaatctgcgtatagaagctatggtatatggagttaaactaatgaccagattattgaaatagaatcgtagaaaataggtgctcttcttttatctaatagagataggagcacatcactaacttgatggtgaaaatggtatatacaattgatacttgaatacacacctacataactaccccacctcaaagagaatcgcaaaatatatacattatctagcttccaaattattttctgtcaggccatgacttctgagctccctagctattcctttttgtgaacacccaaatcattagatagcttcttgcatagctgtctatatacagaagcatctgcacatgacttacttaactttactacatatagggatgggcttatttcaaacacctttggtgccactgagagggtaccaagacatttctgggttttgatctctggcaccacttttaaaatcccattttttttctggacc

SEQ ID NO: 92548 - DNA, 247 bp, Glycine max
  Clone ID: PAT_MRT3847_54585C.1
cttcccacgcattctcttttacacgtcacgaccacgcgaacggaccgggggatttttaggctttttcccacaattttccgcatcatggagagattcaggaaatagtagtattgaaatttacacatgaggaatccctttacaacttggtcaacacaggtgcgtcctgcaacaactctgacggctgatgggtgcccatatctgttcgctatggtgcatgatatgtcagagtctacaataccaggcgatt

SEQ ID NO: 92549 - DNA, 415 bp, Glycine max
  Clone ID: PAT_MRT3847_54586C.1
cgcgtttttgtcattgttgaatggatccagaaagcaggagggtctcccatagctcatattggagacttgacctaagtgcacatacataggaaggcatcggatgtaccagggatgataaacttactggtgaccaaatttttgacagacctacaacgcgctggttcagtattctccctatggagtgtaatcttgtggaccgtcagaaggttttaactcaagagaggttcattatgaaaaaaagggacagagctttgttgtccagtttgaatgaacccatactccatggaatggactggttcggccaatagatcactgagtaagggcaacgatattctgggctgcgattatgctacccccgatggttggattaccaagcaagttatgagcaagatggcaaaaatgataaacagtcttt

SEQ ID NO: 92550 - DNA, 1111 bp, Glycine max
  Clone ID: PAT_MRT3847_54587C.1
gcagacaaaatgaagagttttttgttgtggcgtgtggccattgtggaaaaaaatagaccctatgttgcaatgttgttcattcagtttgtgtatgctggaatggccttgctttccaaggctgcaatttccaagggaatgagcccttatgtgtttgttgtttatagacaagcctttgcatcagttgctctatctccatttgctttctttgacagcaagcaaccagctcctttgtcatgcaacttgttgtgcaaattgtttctagtttcccttgttgggttaactgcaagttcaaacctttactatgtttcaatcaactacaccactgcaacatttgctgcagccgccacaaatactgtccctgccattactttcatcatgggttttttaattaggatggaaagcatttccataaaacgtgtgcatggattggccaagattttggggtccgttctaagccttgctggggcaataacatttgctttagttaaaggacctcacctgggtttcatgaaatggtatcaagaaaatcataaccatacttctcaccctttaacaattgtgcactccaaaggtgatactattagaggctctcttttgatgctgtgagctaacactgcatggtccttgtgggttattagtatagagtaaattacagtaattactctcgggattttatgaaattatataagcttctcctatttttatctaagcgtggcatatcatttagatgatgaattacatctcttctcaagtccaggtgtgaatgagtatcagtgcacacatgacaaatgtgttcagcaggacatatatattgatgattgagtagtagctgaatttatgcagtgtatagaagccacaacaatggatgaatataggaagcacattgaaaaggatccagctctggagaggcgattccagccagatgaaaccatacaaatttaaacgttctgctcccttttctgttcattttacctattctattcatttatgctggagatcagacaagtttctttttttattttaatttttatgttgctggaaaattttcaaatgtatattaatttatctctttgaatggtattacaatatttagatttattttggagctcta

SEQ ID NO: 92551 - DNA, 388 bp, Glycine max
  Clone ID: PAT_MRT3847_54588C.1
aaaattagagaagttctaaacaagcacccgagcatcaatcttccggcgagaaaactgaagaaggtgaagagaccactgaaggcactggattatctgcttggcgaatgtaaggacaggccggctgaagaatttcaagttttttgtcccgaaatttaagaacgattatcaacaaaattgccggaaggccgcgtatgaagcagcttgcccgttactgaagcaagcgattcaaatatgttgccagaaacacgcataacaaagcaagccacggtgggcgtttggatgtgcttttagttaccactttctctcttggatttgcttacgtattgctccttttgtattaggggctcctgtcccaccttgcttttggacttgagctttttatatttct

SEQ ID NO: 92552 - DNA, 437 bp, Glycine max
  Clone ID: PAT_MRT3847_54589C.1
gaaatgggaaattggaggaaataggtttgcaattaaagaacaaaagtggattccttggaagcaaaacagaatggaggaggaacagagggttgcacaagtggaattggcgaagcagaggtgcaagtgcgtcattgatgccattaacagtttaccttgttccaccaacatcactgtctcgtgcaggcgaaccctcctcaagttggcacgtgccgagctcgctttcctctctcgccgctcttcttcttccgtgcccctcagggttgttcctgatactccctcagaacgcatgatgggcctcccatcaactaggaagctggcattgaaaaacaaggttgtctttggcactggtgaccattggcatgccccaactttaacggcaaatatggcatttgttagagcttgttcacagacgggaatgtcccttctaccatcgaaca

SEQ ID NO: 92553 - DNA, 756 bp, Glycine max
  unsure (1)..(756): unsure at all n locations
  Clone ID: PAT_MRT3847_5458C.1
cgtcgcangcacgcgtacgtaagctcggaattcggctcgagatggacctcaatctagacctagacttggacttgggcagggagtcagacctagaccctgggtctgagctgggttccgagatccaagccaaacccgaactggagtcagagcttgagatagatgtccagacagagcctgagacagaggaagagtcagaaagggagaggaagtcacagccaaggaccaggacaagggctcagagcccctggcagagctacttgactgcttatcgctttggttctacaagctcccagtccgcagggccgcctcagacgcctcagacacgcccagcagaaaagagatagccacacacttgccagaactctccccagaacaacgaggacgcatggtaggtgactccaaaaagcaggcagagtagctcggcaaatccttcctgcccaacttggcatgagatccagactggggtccaagctaccagtcctggctctgtgaccccctccacctgctgacttccttctcagtggattccgggatcacatgcccatcgtgctcccggctctgtgacttaaggtggacacttgtctctgggttccgtctccagagtttgcaggtttcaccttcaaccaattttcagtgaaggcctccctacacgcactctctgggaactgtgccagcttgtctctaagttcctcctctcatctctgtttccctttctccaaagaaacgaggcttgaataaaatatggaactcttcctt

SEQ ID NO: 92554 - DNA, 361 bp, Glycine max
  Clone ID: PAT_MRT3847_54590C.1
ttacacctgatggttatctacaaagtgataagcttgttagtgactccatcgcagaactgcttgagcgcattataaaagtatgatttggtctcttatccgtagaggattgaatatgatattctaggatgattattaaggacgggcaccactgggcgctcggttgcgcttatttaaataaaactatgtgctatgaaaatattgaaatatttgggtgacaagcatgcattatcaagcttaagtaccgatctcattactgaaaataagttgagtgttaataatcgcaaattgttatatattgacatccaaatgtatactaatgtggctgtattctgtgtctgaaatgctacaaaagatattttaa

SEQ ID NO: 92555 - DNA, 408 bp, Glycine max
  Clone ID: PAT_MRT3847_54591C.1
cccacgcgtccgcccacgcgtccggcctcagttggcaatgcttcacgattagtgtttgatagatctggggaaatctatgtagagacgactggtgggactagaaatagaatcctacctcaagttgataatactcttgataccgaggtgaattactacagagcgacccttgatttcagtggagttttcacgctgtatgctcatccaaggaacaccagtggccaaccaaggtggagaatcatgaactatgttcctgacaacatttgcgatgcaatattcatgattatggtagcggttcctgtggctataatagttattgctccatggaaaatgataggcctacttgcaactgcccttatggctattcactggttgatccaggtaatgaatctgggggatgccaacccaatt

SEQ ID NO: 92556 - DNA, 332 bp, Glycine max
  unsure (1)..(332): unsure at all n locations
  Clone ID: PAT_MRT3847_54592C.1
tagttcgatatgagatcacttgcttggacttgtcatgttcttcactactagatttgtggctatgatgttttttttaacagtggaatcaaatagaggtaatggccagttaactgcctgtgaagtcttgctcttccatcatgaagaaatgggcattccttgtgagagngcggagcctcggagaaggaaaggaatggggggaactgntcacaagattgaacccgggttgcgagcttatcaagaagccagagcttctggtgctgcactctctcattcagactttatggcccaaggcaacacaaaaataagccctgagtacttgccatcgatcgggg

SEQ ID NO: 92557 - DNA, 485 bp, Glycine max
  Clone ID: PAT_MRT3847_54593C.1
cttaggttggcagtcatctctgcctgcacaaatttatcttcactaaagcatggatgtggactccatggctatatctttaaatttggattttgttttagcatctctgtgggcaatgcacttataaacatgtatgccaaatgtggttgtttgaatggttctcgtaagatgttcctagaaatgccaaacagagacaatgttacttggagtagtttgatcagtgcctatggccttcatggatgtggtgaacaagctttacaaattttttatgaaatgaacgagagaggagtgaaacccgatgcaattaccttccttgcagttttatctgcttgtaatcatgctggccttgtagctgaggggcaacggatattcaaacaagtacgtgcagattgtgaaattccattaactatagagcattatgcatgcctagtcgatctccttggaaggtcagggaagctagaatatgctttggaaatacggagaacaat

SEQ ID NO: 92558 - DNA, 483 bp, Glycine max
  Clone ID: PAT_MRT3847_54594C.1
tacggctgcgagaagacgacagaaggggactctgagagacacacagcaagacgtccttcagaggacgcggtggttgggcggggaacaagccccgggggtggctgggtcttccagtggctgcgactgataactgcgccgactattccggtgcgaagaacctctacattatatctgcgaaagggatcatagggcgtttgaaccgcatacactcggcttgcgacagcgacatggtgattgccaccattaacaaagtgataccccatctcatgaaaaaggttactgcagctgtcatcgttcgccagcacaagccatggcgccgaaaggactgcgtctacatgtatttccaatataatgctggcgtgatcgtcaatcccaaaggagaaaagaaaggttctgctgtcactggtcccattgaaaaagagtgttctgatctgcggccacagattgcatgtgcatgcaatgctatgggtcgagtgggaattc

SEQ ID NO: 92559 - DNA, 226 bp, Glycine max
  Clone ID: PAT_MRT3847_54595C.1
ctattacctacgaataattagtgttaggggacttgaacttaatcaaaatcttaaacactttatctatagattgatatctctttaatattcattctcaaattttcaacactttcactttatttcatttaaactgaagtagcgaacaagtctaacattataccttctatcaaacattacaaatatgattagcttcaaactttcaaaaacatgacgacccccattatgg

SEQ ID NO: 92560 - DNA, 565 bp, Glycine max
  Clone ID: PAT_MRT3847_54596C.1
ctgaatctgtgtctccgaaaactcctctgaatttgttacctgatagctattgggaagaaaagtggagggttgcccacaaggctgaagaactcaggcaagatagtctagaaaaacaggttcccactcgcgagaagggatggacggaaaaggtaaaattcagtttgagacgagcaaaatctgaccctcctttgtcaaggattcagagtggcagacattttaggcgcagtttgttggaagatcttcgcaaggcactcggctcagaggaagatgctgagaaaatgcagcccgatgaaacactacgccagcatgataatccttctgaagcagttgaagtacaacaagaagatagtggctgtagtggtgacagcaattacttgtctgatgatagatctccaagtggaaattctggcagtgaggaagacttgtctatatattctgacccgactagtcccccgaatgaggccaatgatcatgaaattacctcagtgaaaagtagtgttgcatctaattcacccctagacgaatgcaatgaaacttcaggtaccagttcctcatttccaatctc

SEQ ID NO: 92561 - DNA, 1223 bp, Glycine max
  Clone ID: PAT_MRT3847_54597C.1
gaattccttaccctttacagtggggttttcctattttccattttaggacttgcataatcatgaccgtagtgtcgctggttgcctctgtggattcagttggaacttatcattctgcatcactgcaagtcaatttgaggcctccaactccaggagttgtgagccgaggaattgcattggagggtttctgtagtatattggctggtctttggggttccggaactggatcaaccaccttgacagaaaatgttcacacaattgacacaacaaaggtggcaagtcggagggtggtggaacttggagcagctttcatgattctcttcgcctttatgggaaaagtgggtgctcttattgcttccattccacagggcttggctgcttctgtactgtgtttcatttgggctcttatagcagctttgggcctttcaaacttacagtatggtcaatgtaccagcttcaggaacatgacaatagttggtgtttcgttgttccttggtctatcaatccctgcctattttcaacaatacaagcctcaaaccagtctgatactgcctgcttacctggtaccttatggggctgcatctagtggaccattccattctggcaataaacaacttgattttgcaatcaatgctcttatgtccttaaacatggtgattacacttttggtggcattcatactggacaacactgtcccgggaagtaaacaagaacgaggggtgtatatatggtcacgagctgaagatattgcaactgatccttctctgcaatccgcatattctttgccaaagaaaattgctaggtgtttccgttgggcgaaatgtttgggagtctgaatattaggctatgtctgatttcttctattcatggactcatgataacattcacttctgatccctagagcttagaagatattgaagctcatgaagaataaaaacaaatatacttggatttagtcactgcaaggccgaataggaaatagtttagcactgattatgcttgtgaattctatagctgtttcacataggtcaatgtgatctgaaaacaaaacaatggagaaattattgtacttgtacatttatatattttataatcaatcaatggttcaatttttgtagttccagtttgaaatttggggtttaaatgaatccccggcaatttaaaataatgcagcaaatttatatttgtagcctttagggtcaaccttcccctgatatgctaatagt

SEQ ID NO: 92562 - DNA, 558 bp, Glycine max
  Clone ID: PAT_MRT3847_54598C.1
gactcagggggacttgtcgattttgcatattacacattcacggccgaccattacacgcgagctgggcctctttcaacttaacagcataggagaacatgggcccatgacgcaacacatgctcctcctattaatcataattatacagctttacgtacaaaacacaaacactttatattaaaagcaagaaaaaaaggacatacagatcatcttgatgaactgaaacctaaaccgaaaaacatagatccgatttttttggtggttcccaacttgattaagcatgaacggattgattgaatcacttggacttgaagggaatggccctgattaccacctgtaggcagagtgctggacgcgctacaccaatgaaaggtcccacccacaacatccagtgatcatcccataccaaggaccttggtgaagatgatagcaacacctacactactagcaggactgataccagtgccgtggattgggatggtcgcctagtgaaccaatacaccgagaacccaaaaagcaagggtgccaaaatggggacaagagagcctctggcgttacttt

SEQ ID NO: 92563 - DNA, 481 bp, Glycine max
  Clone ID: PAT_MRT3847_54599C.1
aaagcaagggccaaattcaccgattcattattatacagtaaacattgacgaaaaaggggttgatgttgcccaaagaatcattcccaaatcggaatgaaagtaaaaaaaaaaattaatagggtcataatttggaattggttacaaaaataatgactttctgataaaaagccaataaagcaatgtgtggtgggcgcatttccttctttcctttaggttgcaactttgatcttaataatcagaaaaagaaaacacttcaacatgttgaaaacaaagccataataaaaatttactcattagctttaatgggcctcggggaaatcattagctgccacgaaaaaagaagcttcatatacgtaagaacttgcacatatttttttctaacacaagcaatgagtaccctccttcacagggggaattctttttatgttttatttgaaccagagagtgattaattagtctgccaaaaagattattcagtttc

SEQ ID NO: 92564 - DNA, 419 bp, Glycine max
  Clone ID: PAT_MRT3847_5459C.1
gttgttgttatctattgtgcaatatgcttcctgtactgacggttgaacaatcatgttcctcttcctacacgcgtcaaaaataagaaagccaatcccaacataggatcaatggagagcttgaagctcttggagtcttcaaagtacatcagaaatcttgccactatagaggtggtttatagaatcatgatgaatctcggtgaagttccatgtatgtcctagctcaacgctcaatttcctagtcccaatgagcactcttgttttatgggcgactcccatactgcatctggaattgacacattcacatcagatgttgataaccaacctagattctacacagatagatgtgagagctgttgactgagtcatccgtacgatcctgcttacgacaggaatggatttcttgtcactctatattgatc

SEQ ID NO: 92565 - DNA, 121 bp, Glycine max
  Clone ID: PAT_MRT3847_545C.1
tatgcaggtgtcaactggcgcgggattcatacgctgcgccgcctgccgagctggcactctcatctgcgatccacgcgccctccgttagcagccaccgacctccacccacgcgcctcctcct

SEQ ID NO: 92566 - DNA, 463 bp, Glycine max
  Clone ID: PAT_MRT3847_54600C.1
tcttctcacgcgtccggaaaaaatggtaagccgggggctcctgtagtccatgcgggagctctaaaacaaatgctagctagactcgattgcactgactgctccatagctggctccttgtttgtggacgatacttataaggccagaactgcactctctgtgctgggcacagacttcgcgcctcatataggctgacagtctatgctgatgggctcatcactctactctatggtataggacgaaccatcacaatgaaaactggttctagttctttgtgaccactaccaacagtgacaagtgcaagctggaagaattctggatgagtgctgccactgtactatgtggtgtatgactctttgcatcgacttacacttcaacttccttgctgtgactctgttcttctcactacaccacattgactgtcagagaggtctgatggaagaacacttgggcgatgacgcaaatg

SEQ ID NO: 92567 - DNA, 681 bp, Glycine max
  Clone ID: PAT_MRT3847_54601C.1
tcccaaaagaaaggaaaaaaaaaagaaaaaaagaaaaaaatttacaaaggaaagtagaagtgaagttccaaactaagtttactttcttttcctcgaagaagggtcaaaaaagaagagatcccccctaaaaaaaggattttggttcatgaagctgtatatggtaatacgtgtagagaagttcgttgcgtgtggaatcctctctcccaattgggcttcatttttcgggtttatttttaaaatatatatataccaacgtctttttttttttttaatcaaggtcttagttactagtattactattttatggtgtggtgtctaatagtttcaaagtttttacgaagaaactgaatagtaccaatttagttgatatttctttacctaattctatgtgtatttttagccttttatgtggcatttaaatatgaatcctagaagggagaaaaaggaacatggacggactttaatatgccgtggctgtggcctgcaggacgagaaaccctatgccactaagaaattgggagagtctcgtggaattttgaggtgtgaaacgaactatttgtcatcgatgttataaaagaagcaatcgacaattaagaaaaaccttctatcactgtttcgttttttatttaataactaatgtaatgttcttgattccggaaataaatactctgttgtaatcat

SEQ ID NO: 92568 - DNA, 812 bp, Glycine max
  Clone ID: PAT_MRT3847_54602C.1
tggctcgagcttgaaaaagacattccgattatttcccacgcgtccgccaaaaccatttttttttaataccaaacaagatggccaaagagcagcaaaagcatgatcccgcggcaatcaccaactccttccaaaaccaaaaccaaacgcaggaattgcagggtaaaggtgaagtggaaaaggaggaggaggctgaggcccctttagctctaagcgttacatacaaggttttgcacatgttgggagacatcacagcagggcctgcatctatgttcgcgcaatggctccaattagttcgtaaacgcacttccaactgtcgcacttctggcttccctcaccgttcttccagcatgccttctagcccgggagaatctattgaggacacgaagaatgatcagcaaacagagattagtttgtgggagaggcttggtaaagctgaaatgttggacattgagtcgagctcattttcttgggagagactctcttcacttcaccacactgagcacactagcagcaatgaacattctgaggatgaaatgaaccgtgttcttgaggtaacagtaaattctggaggggtagtcttctttgcctttttcaatggtcttgggaacgacgatgcctcttcaaaagaagcagccgctgttataaagatatcgtcttcaagaatggcaacacaatccgaacgtcttggttatgaatttgccaaatggttgggagtccaaactccgccagctagagtcatccacaatacaagtttagagtggacccagataaaggaagctacagaaaaagcaagggatgctgcaagttctaca

SEQ ID NO: 92569 - DNA, 1315 bp, Glycine max
  Clone ID: PAT_MRT3847_54603C.1
gaagcgaacaaattacgattttcttctatctataaagcaaagagagaagaaattacggattttccatcattccagaaccgtaatctccaaaccccacttcgtcagatactaaaaagaaaccaacagtttccatacttagtatttcttctctgactgactgatcaggttgacatcttgacattgcaatcctgccttttggttccccatttccatgtttgtggattcttcctgattcaaaggcaatatattgtgtcttcatagctcagtttttgagcctcatcagttgcaacttgcaacacaaactttatctataacttggtatctctaaaggactctcagcattgatcaaaatgggcctctctagtctcccagcaccatctgaaggagtattatgtgtccttctggtgaacactgtattgtcaatttccatattcaaaggcattgtaaggacaatcctgcacattgttggcatccatcttccatcatcctccacttcaccctcttcaccagatccctcccaagccgcacctgagtcatttgaattgcatcttagtccctcggagagttacattgaagagttcagaagccggacaccgacacttcggtttgacagtgtgtgctgctctaaacgacttgaacatgactgctctgtatgcctcactcagtttgaacccgaatcagagataaaccgcttatcgtgcggtcatctcttccacaaagtgtgcttggagaagtggctggactactggaacattacatgcccactttgccggactcccttgatgcccgaagatgacacaccttgctttcagtaagcaaaacaagtgagcatgccaataagagagagtttcatgtacagtgtagtgtacatattcttgagggtttttgatgttcatgcatctgagttctgccacctttttaagttttaacctttttgccttttatggtctagagtttgtggagggttttgctttcccttcttctgtctgtgctctttagcacaaatgaggggtatactttttgcttgcatgttatgtttgttcacaatgcccaccttgtttggacctcagagccttaattctatatttgggcattttgatcctaatttggaagcatggattgcagaatccatttgttttgcctttcaaactctcctcaccatgtatatattgtgtgtaaatagctttggttgccacataatagagtatattttgtttaatttattttttacaccattaaaaaagtgtataatgagtatgtattgaaagaatgaaataattttagactattattcaatttaaaaaaaaaaagaagg

SEQ ID NO: 92570 - DNA, 850 bp, Glycine max
  Clone ID: PAT_MRT3847_54604C.1
acggctgcgagaagacgacagaaggggggctttcatttgatttgatccaaggccaatcctctataataacaacgagaagttgatacaaacaatagaatgattgagtttcggatagctcctccatcataggcattttcagtcttcttccattcacactgtaaccatcaatcatatctgtatcgattctaaaatcttcaagaagatgcagctacaagatggttctgctggtaaagtcattaataacctctcacaagttctgatttcctccgtcgccggaatgattatggacaagtcaagggtggtgggagaccagagcatcgttccccgccacaaaaaagatcactttggccgtgttgtaaagcttgagaagttctctctctatgttggtaggcaaatgggattcttagagagcgaggttccagctgagctgtgtagattggcagatgagtatttgataaaacccaaggagtgtttggaaagcatccttgaatatcttgctgatcagaaggaccctactactttatgccagaaatttattaatgagtttgatcgatgcatcctcagttatttcgcatttaattggaaccaagcttcttatattattagtcaggtattgagtgttgagtcacctccgaaaatacgactaaaaaagattctattggaagctacaagggaacagaggtttgagagagtaacgaagaatctgaaggtggcaagagtgttctctacattggtggaagagatgacagcaatatagcttgactcacaaagaacgaacgacatggtccacaatgtccacagtgagaggagtccagtgcttctggtttatggaagaggcatgggaactgga

SEQ ID NO: 92571 - DNA, 1542 bp, Glycine max
  Clone ID: PAT_MRT3847_54605C.1
taaaaataaatagataaattatcccactaggttaagttattattttagttattttattttaacaattattaaatgagtgaattgttataaatgatttttttccctgtctctttccctccaaaatccaacttccaaacacggccttagtggattaagattgtgttgccctttattaacagtggatgaaataatgcccatttacttactttagacccaagctccctgtagaggaatcctttcccatgcaaacccttgtttgcaactctttggtaaagttggttggagcagaattctagcatattcataatcaaaagggttttttcactgctccatttcatggaacccaatttggtttttgtcttccctcttggtattctgccccacggctgttttatagtgtttccgtatgctttttgctaggaaatcttctggtttttttttttttgttgcctccctctcccccgcccccgatgcatcgcaaaaacccacactactctctatccccctcatgcccctcaccccctccttccacccctctctcccatatacggttcttcgcgtcgccgcttctttgcctatctctccctcaacctcactctcatccacttctacttcaacatcttaagaaagcgaatcgattccgattcctctcaatggctgcggaacccaaggaatcgccttccaacaaccccggtctccatacaactcctgacgaagccaccaagggttacatcatgcaacaaactatgtttagaatcaaagaccccaaagtgagcctcgatttttattctcgagtcttgggcatgtctttgcttaagagattggattttccggagatgaagttcagcctgtacttcatgggctatgagaatacggcagaagctccaagtaatccaattgataaagtggtttggaccttttctcagaaggctacaattgaactgacacataattggggtactgaaagcgatccagagttcaaagggtaccacaatggcaattctgaacctcgtggctttggacacattggtgtaactgttgatgacacatacaaggcatgtgaaagatttcagaatctgggagttgagtttgttaagaaaccagaagatgggaaaatgaaaggtatagcatttattaaagatcctgatggatactggattgaaatctttgatcggaaaacaataggaaatgtaacacaaactgctgcttaggcttaagataacaccttaaggcccggcttttctgtgatatgttcttatctctgatttaattgggtcttttgctcgtatgtggagtatgtaggatttttcgagcttcccctgaatgaataatttgttgtcaaaccagaacgaaaaacaagattgtgttgtgaatcttgtattttttttttctttaatttcaaaaacctagccaatatcgaaactggtgacttgagtctactcttccattggatgtgtgatacgaatgagtacttctaaaaactttacagcagtaataatatgtgagaggagaatcctaaccagtgtcctcactttctatggt

SEQ ID NO: 92572 - DNA, 123 bp, Glycine max
  Clone ID: PAT_MRT3847_54606C.1
ccacgcgtccgggaaaagaaagtccttgatctcatattagtcccaagtggtctccttgtgtggttggcttaccatttcttgcttcttcaccaagtcatgaaacaactcaccaaaatctttatt

SEQ ID NO: 92573 - DNA, 460 bp, Glycine max
  Clone ID: PAT_MRT3847_54607C.1
cccacgcgtccgctctctaaggctaccagtaccaggagctccctatctacagtgtctctctctctctgcaaaagcaacgaagctgtgttctgatccttcaaattagattccactccaaaccacctttcctcatcaagatctattttttattctattctctcaggatcactctcttgcgcctgatgcttctggttgtttgttatttttggagacttaaatggatgctaagccgtggattaggtcaatttgatctcaactgaaactttttagcatttctgatggactcgaaaactagttctagatctctcccgaaacaccatcagaagacagctgggattcgaacccctgagacgaaagatgcagggtcttcttttcagaagatggggaaaacggagctggctgctcctgtggatttattgaagtctgcagcgaacgcatgcaagcagaatactggcgaaac

SEQ ID NO: 92574 - DNA, 313 bp, Glycine max
  unsure (1)..(313): unsure at all n locations
  Clone ID: PAT_MRT3847_54608C.1
agattaaacaaaatttttttgaggacaaaaatcctgaatgatttatacaagtatcaaaatgggaatataaacatgaataagttcaacaataccaacactgatgtgcaaatttgttcattataaggaaaaacaccattattcttacagatacaagataagaggacctgatttgagaaaatcaccacctaataaagtggatttaaaatatctggttgaccttntatatatcatttaaggcttttgaagctgacaacttgttatttatagagcttgtgtatcacttaagttttattaacaaagtgatatgatagag

SEQ ID NO: 92575 - DNA, 590 bp, Glycine max
  Clone ID: PAT_MRT3847_54609C.1
cccacgcgttcgattttataaatattaaataaaaaaaaaaaaaaaaaaaaaaaaaaaaaaaaaaaaataaaaaaaaaaaaaaaaaaaaaatatgaataaaattaaattgatataaaaaatagaaacatacttataaattctttactataaaacacaaacggcggcgcttttttaaacacagagagtgtcattgattttgaactgacaatagcttttttttttttagacaatttttttttttttgaggatggtttttttttagactgaaactttagaaaaaaaagagggtcaaaaaatatttttatattcaaaaggaattcttttttttctgttcaaagatttttttgtattgatgccgcacaatattatcttaaggctgtccgacagatgcaagagagactacttgctcccctatgaatagtcttttaccgcctgctggaggtttttttttttgaaggcggtggtttttttatcaagctacctccttcttgctttgcataactgtttaagcatttttttttttattagagacagggtcttttatactataagttttagttaggtcattttttttagcgcttcatgttttt

SEQ ID NO: 92576 - DNA, 231 bp, Glycine max
  Clone ID: PAT_MRT3847_5460C.1
cgggattacccaggcgtcccaccgcgtctgttgacagaaagaagacccttttgggagaagaaaaaaaaaggatcaaacagggggttgtgggaagagagaagcctgtggtcatactcaaactccggtggaaaaaggagcctctcgccctctgccttctacaatattgaatcagcattcaccgtcactttttttttctccgcgagagttttgaaataatacccattgttcccc

SEQ ID NO: 92577 - DNA, 267 bp, Glycine max
  Clone ID: PAT_MRT3847_54610C.1
gcgaaaagcgaccagccggaaggccatgactgccatatcgacctgaataatatatatccatgctgcaggccgtactaacagattactatgcacaccccagattattcctacacattcaatagatgaagattcgggtggtgcgaccacgagatacataattggcaaagctaacccgacaaacggcgtcccctgaaacaactaatggtttaacaacgcatcacactttattatactctacctgacccctaactcagaaatgaccaaata

SEQ ID NO: 92578 - DNA, 412 bp, Glycine max
  Clone ID: PAT_MRT3847_54611C.1
cgccaagccgtcggaaaaaaaaaaaaaaaggctagtggccgtaatattataaaaaagggggagtttcaaaaccaagcctgaacattagatacctgggcggggggcttaaaaagtcctaatttccgtgcgcataattggcctcggcttgaattttattttatccctccgctaactcatatacctgtgcggttacccaaatttctgttattgaaataccgcagaccctccctaatttaatagcttggcatcaaagcccattttagcaccctgtttatttttcaaggaggcctatacgggggggcattacgctcgttggccgacatggaatcatgaatggtggcgggtttagtggggaccttaacaggggcggctggaggaggttcctcccaactggttacactcacttcccaca

SEQ ID NO: 92579 - DNA, 237 bp, Glycine max
  unsure (1)..(237): unsure at all n locations
  Clone ID: PAT_MRT3847_54612C.1
cgtttcttgcgactcaaactcaaaccaatcgcgactggttattaaacaaaatggcggtccanatattaaaaaacctttatcctccaattcaaattcctaacactaagctatatccttctaaaaacgtgggaacgactttctaattaaccttcaacactatctctatctaacgaccctctagtttattaaatactatctctacttataaataaaatccattacttaacccaaccctat

SEQ ID NO: 92580 - DNA, 754 bp, Glycine max
  unsure (1)..(754): unsure at all n locations
  Clone ID: PAT_MRT3847_54613C.1
ctgggttttttgttttttttttttttttttttttttggttttttttttttttttttttttttttttttttttttttttttttttttttttttttttttttttttttttttttttttttttgaaaaaaaacaaaattttggaaaaaattttttttttggtttgtaaggggcacccaaaactttaaaccccccctttcctttggcctttttggccctaacccccgtttttgggaaccccctcaaggttttttcaccccttccaaattttaaaaaaatttttttttttcccccccttttaaccggggaaaaaacccccccctttttaatggttttcacccccgaaaggaccaacccccctaaattttgtggggccaaagggggtttccccctgttttttaaagggggaaaaacccaattccttgccccaaaaaaatttttttttggccttgcctttgggcccaaaaaccccttgaaacctttcaaaacttggattcccccgcgagccccccctttttttccccctaaagcttttttttttcctttcccaacaaactttttttcttttttttcttcccacccctttttaaacccaaaacctcccttttctccccccctnttttttttttggcccaagncctttccacctcttttcccttttttcccccccccccaaccctcccccccttttttaaggggcgctccacactttagaaaacaaaggttgtttcccccccccccccccccccccctttttt

SEQ ID NO: 92581 - DNA, 193 bp, Glycine max
  Clone ID: PAT_MRT3847_54614C.1
ctctctcttcctaaactgacagggaaaacctgataccgccgtcatggaagctgatatgattttgcttgacggcaaatcttggaaaaaaaacattgtcttaaactggaaaggggaacatctttaaaaatcacacgagctggttttactacccaaaatttatcgcccattttattaaatctaagtgcacaaaatt

SEQ ID NO: 92582 - DNA, 563 bp, Glycine max
  Clone ID: PAT_MRT3847_54615C.1
gcacgagaaattaacgaattttgtatttatttttttataaaaaattattagaaaataaacatattaaatcaagcaaaaaaatgtattttattaaaataaaaagtgaagaaaaaatttattaaaaacaaacacacaaacatattttaactttttttattaaactaaacgtttttacaagttaaacataatgataacgcgtttagtgaaatggaaatgactgtgcggaagatagtttctgttgatctaattggattataatttctagattataatccgtttatataaataactgtttgtaattttgtgaatattacatttaacatttattaattagaatactttatcataaaaatagattttgatataagataattattataaataattgtatatattggtattacttcattaaaaataactattttaaaaaattaatttattatataaacaaacatcttaaaataatcttaaaaattgaaaataaacgacaattttttaatattgtaaaattaattatacatttaaatataaaatctatgttttaaaaaattgtagtaatttta

SEQ ID NO: 92583 - DNA, 472 bp, Glycine max
  Clone ID: PAT_MRT3847_54616C.1
gggacataagaacaaatccattaattcccattgaagtccgaaaacagaaaccaaaaatacaggatgatgaaatcctaaaaagcaaaaacaaaagggaaagtcttttaagtacaaacaaacaaaggggggcggcggctacaaatgctatgcaaattttttacacttagaagcctgagggcttgcctgcgatgaagctgatgcactgcacttggcgaacgttgtctaaacccatgatacacgatgaagccggaggggtatgcagacttagccttttgaaactgcttcaacaactgagaagaattagtgcaaccaaacataggcagatagcacatggtccagaagggtacatcggagtattctggggaactgttgtgctcacggaacacgaaaccgagctccaactcgaattccaaacaaggaatccatccgtgcctaagaagggagcctacttactttgccaattgtgcatcaa

SEQ ID NO: 92584 - DNA, 836 bp, Glycine max
  Clone ID: PAT_MRT3847_54617C.1
ggtgtcttggtagaaagaagccttgtaactgtagattataagaacaagcttggaatgcatgatttgctgcgagacatgggaagagaaatcattcgttcaaaaacaccaatggagcttgaggagcgtagtaggttatggtttcatgaagatgcgcttgatgtattatcaaaagaaactggaacaaaagctattgagggactggctttgaagttaccaagaaataatacaaaatgtttgagcactaaagcttttaaggagatgaaaaaactcaggttgcttcaacttgctggtgtacaactggttggagatttcaagtatctttccaaagatcttagatggctttgttggcatggatttcctttagcatgcataccaacaaacctttatcaaggaagtctagtttccattgagctagaaaacagcaatgttaatcttttgtggaaagaagcccaggtgcttcttcagttccttgcaaccccccagcattgttgttctctagtgggttgtcgtaaatatcgaaactatactttatcaatccacgcaacggatcatctgcgtccacattagtcggcttcggcacatgtgcatcctcgttgtgtggaatactttgtggaacctacatggttaatgaaagtggactatcagcaactcgttattgttgttccctaattactaccaccaaatccttgcagcatttccatttcattgacacgagtgcagggcttcagaacttcaaaccaagtcttttaggtacgtgggactgacaatcctctttttagttttactcactaattgcacctctttgtttggttggtgttcccctgttgttgatactg

SEQ ID NO: 92585 - DNA, 1283 bp, Glycine max
  Clone ID: PAT_MRT3847_54618C.1
acggcgcgagaagacgacagacgggggtcaggattgttgagacatactgctatgccgaggagactgcacctatgcaaccatattataaaatttaagcagggtgcaactaacaggcacgattgctctgcatgctgctcctttatttggagaccagtctgattagaataccattattcgctacttacacgcaccagaagaaatatatcggctagggtctgcattgttaggcctcattttgtgggacgttggatatggcaacacgggtcatccagagcaaatcgaatgaaatcgccgggattgctcaacatttcatgccatggcttcctcatttacgtcgttgtacctcatggcactatcagatattttctacaactgtttgcatgaagaactcacttctaatcttgaaagggttttcgcttgaagggggcatgttaaagatataaaactatttatgtgctttcacctatctgcttaggggctgtttgttttattttgctaactccatttgcatgatttcccatgtgaaaaacacattttccaatgctccaatttctcaaagtaaatttttttcacttcagtcgagaatctgtttgatcttgaatacaaacaggctcttatatgtaagcaaagatttcaaactttgttgcgatctgtttcttattccaatgattgtttgtaatgatggaattgtggaacaagtttacttcgttgttccaatacagatcttgacatgctttatccctttatatattttgtgctgcagattgcaaggattttcctatttatgttcttttttatccacatgtggacccattttgacgaggcaagcattttctctgtgattcatataacttcacagtttttcctttgattctcatctaggaaacaaatccaaactttttgctccctaatttcaggttaaggagatctacccattgggtttttacagcttgcttgtggtgcctccagtgttggcaatgatgaatttgttttggttctggaaaattgccaagggtttggttaaaactatatcaaaagcaaagcatagcatatgagcctaccaaatggccatttaattactttagcacagttgtgattaacatttttcccccatttaacttgcaagattcagtacagttctatgctgtatatttggcattaagcaattgaatatatttttccgtgactacatgtattcagaatcattacagaacagcaagagctaaaagcctaaaaccacaaagttataatatctgtcatcacatagttcaaagattgctgat

SEQ ID NO: 92586 - DNA, 365 bp, Glycine max
  Clone ID: PAT_MRT3847_54619C.1
gaataaacaaattttattttcacagtggagttttttaataactcaatgccaagtcaatacttcttttgctcttaaaaatcatttctgaatgggttaaactttttaaccaggccaaaggggggggccctaatgcccccttttgcccctttttttattgagggggggattgaaacaccccctggaaacaaggggttcctctttttgaagggggggggcaacccttagccgccaccaaggggggtgaaaacacttcttttagaacggtcgttagagaggggagcccccccccacaccccagccatagtgtctttgttttcaccaccctttaatttcacgcggttccaaagagcagggttcaaaagaaa

SEQ ID NO: 92587 - DNA, 335 bp, Glycine max
  unsure (1)..(335): unsure at all n locations
  Clone ID: PAT_MRT3847_5461C.1
ccttaccctctttgcaactacccttccgcaccacagatatctctcccgccgctccttccgtttgcgccgcttacgactactatctccgtcttcctcaactcagaaagctttggaactccactgattttcctaattggaacaacgaaccgattctaaaaccaattttgcaagctctcgaaatcacgttccgctttctttccattgttctctccgatcccagaaccttcctgaaagcagcagaggactgctacgccgtggagaggatctggaagcttctcgcggaggtggaggacctncacctgatgatggatccggacgatttcttgaggctaaag

SEQ ID NO: 92588 - DNA, 386 bp, Glycine max
  unsure (1)..(386): unsure at all n locations
  Clone ID: PAT_MRT3847_54620C.1
cggggggcgaggaaaaaaagggcgagcaaaaagggggccctgttaagaancgcanccaaaaagcatacaggcgccgactgggtggggtggggggaagctggctaggagcttggggatgggaaaagtggatgtgggataccatggtcaggaaacaaatgcggagtgcacttggaggccagctccggtttatgctatgtgggggagctcctttatctggagatacgtaacacttcatcaatatctgcatgggggcttctattgggcaagggaatggcttgactgaaacatttgctggggctgccttcgaagagggggatgactacagcgggggacgtggttggctcacctctaccttgatgcgacagtaaggctgggtgcttgggaag

SEQ ID NO: 92589 - DNA, 441 bp, Glycine max
  Clone ID: PAT_MRT3847_54621C.1
cccacgcgtacgctatgttttactctctttatctatttacttactaacccatgcactatacctagggcctagcttaaggacatttctgggaagctatctagcaagacgataatggccatgatcaaggccaatgagaattcccctgattgtgctctctttcgtgttggaaatgatataggagaacacgcatgatgaccctgatgattgattagatgatttattaactgggttggttaaggagatgggtaattcatatagggataccagaagcctgcatggttgacacatatgtacacacagaagtgcttcgtgcagggctacgactatgagaacgctaagaaggacgagatgaatgactgctgcttagatagctgcactagctgctggccatactatttgccatacaagctttttcacaggcttcgttaggttcatcatgac

SEQ ID NO: 92590 - DNA, 546 bp, Glycine max
  unsure (1)..(546): unsure at all n locations
  Clone ID: PAT_MRT3847_54622C.1
agaatgcatctgttagcatcatcctcttctctttctccttctctcccttcttcattccctcgcccttctctccatctccaccttcactttccttcccaaactacccagcttcgcctccataccccaccacccctttcttgctcccttaattcttcttcttcttcttcttacgtggaacaatctgcttcatcttctcagatgcagaatggcttgctgtactccagagcttattgggttgctgaatctctcatagcttgggacgtggatgttggaaacgggttttcttgctacctgcttgccagcaaaaatgcttctttgaccattgcaaattgccaaattcaaggcgaggatttgaaaattaagcttcaggaggatagggttggccttcctgcaaatgtggtggagaaatttccccatattcgaggtcacaaagttttcagcctgccacctactttggatgttaagcctcttcttaaattccggntagcagttgttatttgtgattctgatggggaatgcatgaactgtactggtttgcaattacct

SEQ ID NO: 92591 - DNA, 336 bp, Glycine max
  unsure (1)..(336): unsure at all n locations
  Clone ID: PAT_MRT3847_54623C.1
gtcgaatgcacgcgtacgtaagctcagaattcggctcnatgtttccttttgngatggggagtcacggttggtgctggtttgggcttcttatcncantgacactgttgcgacnaagaatagatgntgantnctggagcagctgtgacntacnagaggctctttgcatgcantccaaacaatcgtcgcaaatgnanggtgccaagtcactcttcaaaagtgcnggtgcgaacatattgcntactgttgcaagngctggtgtgcttgctgntnatgacaagctncagactcatttgtttgggacagananatggntnctgncggncggctgaaaangan

SEQ ID NO: 92592 - DNA, 154 bp, Glycine max
  Clone ID: PAT_MRT3847_54624C.1
cctctctacggcggataaagaagattgcgacgaaggcgaaatttcacgaccacgaccacgaccacatcaccctcagagggaacctgatctacccggtgtgaaggacgaagacgaagatgaccctcctcgttcacttccatttccacgcccacat

SEQ ID NO: 92593 - DNA, 468 bp, Glycine max
  unsure (1)..(468): unsure at all n locations
  Clone ID: PAT_MRT3847_54625C.1
cgaagccagccgaccagcggtcgccatcattgtgccagtgaagcattcatccttcaatatcctttagcggatcttcctccaatcaatattgagattgactggctagggattactgggtttctagaactggaaggtgaagataatgaggtgtttctggtatccgcttttcttccacatgcgtcgctttcattgcgcactcattgcatcgtatcacctttggcctgctcttgacatattacaggcacgcttgtcatttacaccgagtcccacttatgcactgttacatacactccgatcattcgtcatgcgacccggattaatgcactgatagtcgattcttgtcaccttgttagtaccctgacaggaccattctatctttaattnctatcacccgaagagagcctgttaattcttacttgctggaaagtcgcgcattcattcgaagatgctgatgaatcctgccctact

SEQ ID NO: 92594 - DNA, 183 bp, Glycine max
  Clone ID: PAT_MRT3847_54626C.1
gaaaacgggtttttaacttattaaggcttggggctttggcgatcccattccttgaaacaatgaagttttaccttttatttctttttaaaaaaccccccaagggggagggttaacccttgccaattcttgaaggcaattttttcaccccaggttgttgttgtctcccctgaatgcccaaaacaa

SEQ ID NO: 92595 - DNA, 461 bp, Glycine max
  Clone ID: PAT_MRT3847_54627C.1
tacaacgaggcgccattagaccacttgagtgagaggggcaattttaacaatagagataaaaatatattgtgtttcgtatacttttcactttcactccattttatcacaatttgagatgaaagtaaaagcatgaggagcccatgttttttttctttcaaatcttgcaggttcatttcatgtgtaacagatattcaattcatctactttcattccaactgaacacattttactttcaataatgctatttcaaccatttaaaccaaacactaccaaagttatatagtaacctaaaattaaaatcaatacatgtgggttaaaaatggtgacagatggcatatcactgatctctcctcaagtgaacaaacttgagtgataatagccataaaatatacaatcttctagaaacgcggcatgtataactctataagcataaaataatgatttcgtgcttccctcgttgt

SEQ ID NO: 92596 - DNA, 351 bp, Glycine max
  Clone ID: PAT_MRT3847_54628C.1
ccaccggaaaaccggcgggacccattaaaaacaaaacccctaccgggccaaactaagcaaaaaagatccccccttttgcttagtaaaagattggaaggattgtttttaattggggccaagggaaggggaaaaaaaaaaaaccaattgtccaaagggaaaaaggtttaccttggggggacatttccccaaacaacaccattttcaggtttttctgggggggggtaaagttggggcccaagtaaaaaccctggtttttacccgttttttttaaaaccaaaccttttgcaacacccgggtttttggaagaaaaaccattgtggggcgaaacttgggggtttttaaggggccccc

SEQ ID NO: 92597 - DNA, 284 bp, Glycine max
  unsure (1)..(284): unsure at all n locations
  Clone ID: PAT_MRT3847_54629C.1
agtggaaataatcccaattgcataggtagaatcataatacaggaaaagcgaatagatagagagtagccttttgagggtctgctcgtattccttcttaatccttatccaattattgccttcctctttccttccctctcccccttttnattctagcttatttcccctctctttttcttcctcaattgccacatcagcattccattatattctcagctcttctgcatgactctnngccatgtaatctagcatagctaacatccttctngggtataacaggtnncccc

SEQ ID NO: 92598 - DNA, 337 bp, Glycine max
  Clone ID: PAT_MRT3847_5462C.1
tgtttatttttgactcaaggtaccggttgattataggcaatttatacagaggattgaccgtccaaaaatgaaaaactacatataacctaaacattatgacacgaggtgcccagtgagaatctctgatccgtccatctgtccctttatcaatgacggctgcagctcgaagaacgaaccctccgacaactctttagagcaacaagaattgcggataagagtctgtggtctatatgacaacgaactgtgagctcgactccgattaggactagccattaatcacagagccagattgagggcacacaccatccccgtgggcaatagcaaaacggtcagtctt

SEQ ID NO: 92599 - DNA, 295 bp, Glycine max
  Clone ID: PAT_MRT3847_54630C.1
caatcctggtttttcaggttctcgtcttttgggcaccattcctcagtccatttcacagcaaactgtttggaatcaaatggcaacagggagaacaccattgaattttgatcctagcaaggcaagcttttggccaatttctattgatctttttggggggaggatttttattggacaaaactggaaattggatccccttattccaaattcttccattaataacttggtggaagttgctggttggaagaaaggctgttaagtgggtaaaattgtggtgcttggaatggcacctgcaaaa

SEQ ID NO: 92600 - DNA, 140 bp, Glycine max
  Clone ID: PAT_MRT3847_54631C.1
tagacggggatgacttataatcttgaagtatccacagtcagtgcattgatgttgtccatgtatcatactttcatattacatgaagtagctttaactgggggtagttaatacttgtagtgttttatgagtataaaatactt

SEQ ID NO: 92601 - DNA, 1984 bp, Glycine max
  Clone ID: PAT_MRT3847_54632C.1
gtctagcccttttctcttcaaataatttcattcttcagcttcttattactttgtatctctgtgtatatttgaaaatgaagaatatgaatatgaaactaaacaccattgcattgataattgccattgcattttctgtgtggtcttcaagctgcacagcagcacgtgtcagccactggaggaaactgaaagctgctgcatctgctacttcttttaatgtgttagactatggtgctaaaggtgatggacatgcagatgatacaaaggcctttgaagatgcatgggcagctgcttgtaaggtggagggttcaacaatggttgttccatctggttctgtatttttggtgaaaccaatctctttctcaggccctaattgtgagccaaacattgtttttcagttggatggcaaaatcattgcacctacaagctctgaagcttggggctctggtaccttgcaatggcttgaattctcaaaacttaatacaatcacaatcagaggcaaaggtgtcattgatggtcaaggctcggtttggtggaacaatgactctcccacttacaatcccacagaagtgatgctggaaagcaatggaagacttccaagcacaaaaccaacagcactcaggttctatggaagtgatggtgtaacagtgacaggcataacaattcagaatagtcaacaaacccatctcaagtttgactcttgcacaaatgttcaagtctctggcatcagtgtttcatcacctggtgatagccccaacactgatggaattcacttgcaaaactctcaaaacgtggttatctatagtagcacacttgcttgcggcgatgactgtgtctctatacaaactggttgctcggacatatatgtacacaatgtgaattgtggacctggtcatggaatcagcattggaagtcttggcagagagaacactaaagcctgtgttagaaatgtcaccgtccgagatgttactatccaaaataccctcactggtgtcagaattaaaacatggcagggtggctctggttcggtccaaaatatcatgttctcgaacgttcaagtttctggggttcaaactccaatttccattgaccaatactattgtgacggtggaaggtgcaggaatgaatcatcagctgtggcagtttcaggcatacattatgtgaatgtaaagggaacatacactaaggagcctatctattttgcatgtagtgacaacttaccttgcagtggcataacccttgataccatacaactggaatcagcccaagaaactaaaaattccaatgttccattttgttgggaagcatatggggagttgaagaccacaacggtccctcctgttgaatgtcttcagagaggaaacccatcaaaagaaggaggaatcaattctaacattgattcttgctgaatttatcaacacaatgtccgggatatatagattattatgatatatacatcatggaaagttgttactagttagttattatgatatcttaaaattagttcacattcatgtaatataatgttggatttagtggattgtaataccgtgtgtcaaaaagatgttgggggagaagatttacaagcctatactacttagattgaaaaatgtatgaagtggaaagagtgtattagccatatgtaatatatcaatttttttttccaattaaaaaaaaaaaaaaaccttttactttttttttgtttgaacaacgtttgggatgttacctccttcaggttagaggggatgtagcaagggcattaatgtacatggcagtctgttatgggttccaacaaccaaggggaattccaggctttcgcctctcagatgccccaaatgttggtaggttcaacacttgaactattgaagttctcatttgacaatagtatttggatttttagctcaaaccccaagggggaatatacatgccttacatttgcatgtgttgatcaaattataagtaaattatcttgctttttatgcatttg

SEQ ID NO: 92602 - DNA, 797 bp, Glycine max
  Clone ID: PAT_MRT3847_54633C.1
tctcgagccgaatcggcacgaggaactaatgggccaaaaccctttgtatccgtactaataaacttggctcctcctcctttacccacttcttcatcatctttaaaacctgagatcaattaatgtttgctggggaggttgttcttgtggtccattgtatcagtcagtagccccagcatcagtgaaaaaggtggtttttgataacaacattagcttcttgtccttgatctatcggatcaaagttcagtgtccctcaagaaccaaatagcagttgctttcaggaaatacaaatccgggtttatttaagatgaagatgaaactctagtcagaagccatgagttggatccatggtggtggtgatagcctgataaaatgggacaaaggttcatgcgatgccttgtgcaattttcttactcataaatattttcccaattgcatgctatcaatgcactatacagatccttctacttctacttgagaagaactactaagcagcaacatggcaccccaaaagggcctaatggttatgctcaaattaccaatgcaccctcttgtaaaggactatgcatgatctcaggtcttcaatgtaatatattttgtactccatggcagatttctacaagtgtgcttcatttagatcctgtgctcttgtacctgctgaagagagttccccttggaaacttcaaaacatgttcactcttttaatcctttactgaatactagctttgtttattatagcagtaagtctatgattttgcattctatatatggtcgtaatagtactgttgaattttattccc

SEQ ID NO: 92603 - DNA, 957 bp, Glycine max
  unsure (1)..(957): unsure at all n locations
  Clone ID: PAT_MRT3847_54634C.1
attgagttcacagaattgttggtcaagcaaagcaatgaataatgcaatctctttttgtttttattttttttttcgttgactgtttaacttacagaatggtcagtaattctagattttagaggcaactgttatttaaggggttaagcagttgaaaatgaatgatgcggctattcaattgactgataatattagtgaagcaaatgctttacttgccttacaatccaagcttaaaaagaatccagggatccaggctgccgctaaatctcatgatattcccatttatgtgacaaagacaagttctttggagcatgtagcaaaagccatacgggcattagtaagtgatcatgaagatggtataaaggattctgaactaacggacaagataaaatcctcagagatgattgatgctttggaggaggcgcgaatggctatagagcatacagtgattctaaagggagaacctgtggatctactcccaagatcatcacacataatatctctgcagctggaacttgttcgcaaataccaactagaaacaaggagaatcagtggagattcaggtgtacatttgcgcatacttccatcccattatgaaacggatgaagtaaaaactagtgaaacttctgagtttgatagtgaattattagatgactttgcctccaatggcagtgtgaatggctcattcaacagcttggatagattgcccctgctacccgagtaataactacgttcacttaattgtatactcataatggagattagatataaacacgtgtcgcaagggtgatgtgaaattgtacaagtcatgtaatttttaaacatatagaaaaacattttttaatgctttttgaagcgttaagcaataagatgtacaacataccaaattatgatgtcactaatataatgtgttattatttcatgtacaaaataatagtgttaagttgacttgatccaaan

SEQ ID NO: 92604 - DNA, 1067 bp, Glycine max
  Clone ID: PAT_MRT3847_54635C.1
acggctgcgagagactacagaagggggaaacaaacatggaaaggatatagattatagaatacagaggcaccgacgtagcgacggtcaaggtccacaatccacaatccgcaaccgaataacccactacccacagatttctctctctctctctctgttggattggatcctaatatctgtgttccactttcagaggttgctccttcattcacgcccttgctctcttcaaatctattttcttcctctgctctatctatctcttgttatttttccctctcacgccaatcaccatgccttctccttcagatcaccaccgcccccaaccaaaacctaatcccaacctcctttctctgttcctcaaaccaatcatcatgctccttctcacctccctcttcttcctcttcctcggcttcgctgccttcctcctcctcaacctcttcctcctcggcggcgccttccaccgccttcgcttccgcccctccgttaccaccgcacccacctcctccaacggcctcccccctcgcgaaatcaacaagctcccccgctttcgtgtcgccaatggatccgagacccgacccgactccaattgcgtcgtctgcctggacgcattccataacgcccaatggtgccgaaagcttgctgcttgcggccacgtgtttcaccgcacgtgtgtcgacacgtggctcctcaaggtcgccgcatgccccacgtgccgtacacccgtgcgatttaatgccggaactacggttcatgacccgcctcagcgttttgaccaatttcatacctgcggaactgactgcactgctctcaccacccttttatagcttgtaagttttagttttaagccttttttaaaccatgtaagcttttttttaatctatgtatatgaattgtagcaatactttttttttcacaaatgttttggtattttttttacttctaagaataggagaatgccttaaaatctaactctgttttttctgatcaccctcaccttcgtgccacttgcctgtggttgtttaattgcccagtgtttttgttttcaggaaagttcaccgttgttattgata

SEQ ID NO: 92605 - DNA, 411 bp, Glycine max
  Clone ID: PAT_MRT3847_54636C.1
aattcggctcgagggcgaagttgtctccaccattccaagttcgtactcgatctcctttacatttacctgaatcttaacgtctactcttcgttttgcttctatccttctagcatttttggttttgtaagctaccgtctaccgagcgatcttgttttgaattttaggttccttaatagtatctgatttaattgaatgagctcgcttgtatttataaataatataattctttgtgtccttgattagagctgtctgtgtgttccttggttaaaaatgtagacaaaattttgcatgctgtgttattattatcaggtggtttttcctcgacatacatgtacgtgtatgtttccactgcgtggatggtatttgggctcttccatatagtgactgattgatttatttgattttttgatg

SEQ ID NO: 92606 - DNA, 2618 bp, Glycine max
  Clone ID: PAT_MRT3847_54637C.1
gcttattctttggagactgtttccgacttatggtgaaactgaaactcccgtgtcggggtgtttacactgcactgtcacaatgacattctccaactctccgaaacctgaaaagaagataaccaaaaacacagaaatctccaaaacccaaaagaagaaaaccaaaaacgctgaaacccccaaaaccgaaaagaagaaaaccaaaaacgctgaaacccccaaaaccgaaaagaagaaaaacgctgaaatccccaaaatcgaaaagaagaaaaccaaaagcgctgaaatccctctaaccgatggcaaaacgaagagggatagagaaatcgccaaagaggagaacaagaagaagactaagaaacccaagctcagcaatggcacttcaaaacagcgagacgagggatccaaaaagggagtagcagaaggaaaaggagaagaggggaaaatgaacgtgtttccgatgaatcgcatcagaacgatgattaagggcgaagatcccgatatgcgtgtttctcaggaagcattgttggccatcaacaacgctgtggagaagttccttgagcaattctcgcaggaagcttatgctttttgtgttcgggaccgcaagaaatgcctcagctacgatcacctagcacatgttgtaagtaagcaaaggagatatgactttctctctgattttgttcctgagagagtaaaagctgaggatgcattaagagagagaagtgcagcaggaaaaggaggaagttaaaaaatctaaagcaagctagtggagaatataagcttatactttatttaatcatgtaacattttgtaatggaaacatgcatcatgatgagtaatgctgtactttaagtttccatattgtatttattttagtaatcctattcccgtaagtgtatatgatttttcagtgactatgcatgtgcttgactctgcttgggtagagccacgcgttggtacggctgcgaaaagacgacacaacgtggcatcacgagagtaagtgagtgagagaaggagattctgatttgatctctcagatctgagcttaccgtcgccggaatccaactcaacctgggtcggattcttgggtatcatcgcatcgccattcgttttagcctctcaataagagattttagttcgcttcaaattcgaggtttgatttgaagttgaaagttggaatagcttaactgttgtgtaaaacaaccaacacacacgagcatgggaagccaagacaacaacgtagaattgtcatccaattcatttctagcttacaaatctgctaaggtgtttgttgctggtcaccggggtcttgttggctcggccattggtcgcaagctcacccaacttgggttcactaatctagtcttgcgctcccatgccgagcttgatctcactcgacaatctgatgttgaagccttctttgcttatgaaaaacctgaatttgtcattgtagctgcagccaaagttggtggcatccatgccaacaacacctaccctgctgatttcattgccatcaacctccaaatccagaccaatgtcatcgattctgcatatcgcaatggtgctaagaaactgttgtttttgggttcctcttgcatttaccccaaatttgcaccccaacccgattccggaagatgctttgcttactggacccttagagcccacaaatgaatggtatgccattgccaagattgctgggatcgaaatgtgtcaagcttacagaattcagcataagtgggatgcaatttcgggaatgcccaccaacttatatggaccatatgacaattttcatcccgagaattcgcatgtgttacctgctctcatgagaaggtttcatgaggcaaaggtcaatggtgctaaggaggtggttgtgtggggcaccggaagtccattgagggagttcttgcacgttgacgatttggcagacgcggttgtcttcatgatggaaaagtatagcggactggagcatttgaatgtagggagtggaaaggaggttactattaaggaattggctgagttgatgaaggaagtggtgggatttgaaggggatcttgtttgggattctactaagcctgatgggactccaaggaagctgatggatagctccaaacttgcaagcctgggttggacaccaaaagtctcactcaaggatgggcttgctgatacctacaagtggtacttggagaacgtaaatctatgattcagatggttaagcagaatgtgccatgtcaaattttataggtacttgtcatttcacaacgaagaattttttgttaaaaaaataattatccagagaacagtacttgaccaatttttctgtaccaattatgtcatgtgcaatgaaaatttcagtgctttttttcgtgttttcaaaagatcatgagattaagaaccatttgttggaaactatgaacagagtttttatttgcacatcatattaaagactcaaagtcgtgcatcaaataagtgttataattattgcgtgatgactattcgacacaaatggtggtgctccttcaaggcttctgaagtgtttgttgaataattttcattccaataagattcctttgtcaaaatctactgtggattataacttgaatgctttctcgtggatgagcatg

SEQ ID NO: 92607 - DNA, 399 bp, Glycine max
  Clone ID: PAT_MRT3847_54638C.1
gagagaactagtctcgagtattttttttgttagattttttatatataaaaatacccttatgaatttaatttaatgtacctgatagaagtctttgccatatttaatgcgccgggagagtttttttaaccaacaaagctagtagcatactccttccctccttgaatataagcaatacaattttatttttttttcatctcaaatataagaaaatctgaattatttatgttttattgaatgagactttctttaaaatatttttcatttaataagattaaggatcttttttatactcaatatcaaatttcaatgaaaaataaaaatagtttaggaaatatttttaccttttaattaaaaaagatataatttaacgaaattaattaatttttttaataaatatga

SEQ ID NO: 92608 - DNA, 806 bp, Glycine max
  Clone ID: PAT_MRT3847_54639C.1
tcggagaaagagaagagatggaagaagatggcaagagagacaacactgattcacccaccaattcgcaacaaacagtttctgatgatgatgaaatagactacacaaccaaaccagagttttatgacccagatcttgatgataacgatgaaaagtggattgataaaaaaaggcatggacatgactctgatgctgtgcttagctgccctgcttgcttcaccaccctctgcctagaatgccaaaggcatgaaaaatatttgacccagtatagggcagtatttgtggtaaactgcaaaattgggaatgacaaggttttgaaacaaaatacttcaagatcaagaaaaagaaatagagggaaagaaggatttgatggagatgatgcacattcaactaatattgaaacattcaagcaagtttgctgttccgtttgctcgacagaggttggtgtcattgaccaagacgagatttatcatttcttcaatgttctcccgagtgaatcctaactgattcagatgtatctgcccagcagtgtataaactatgttggtctctgaatttcactaccgtgcaaaattccaactcaggactagttgatcttagtttctctatgttttagagatccatgaagacacatttcctccacttctaatatttctcccccgtgagtatattttagaggtaaccgtcgctggaagaagaaactgtctgtggggctaaaaccgtggacatagaggtattgcttaaaagaacaaaattaacatctttggatatcctgtttgacatgagctttctcttgtatgcttttcaatg

SEQ ID NO: 92609 - DNA, 1605 bp, Glycine max
  Clone ID: PAT_MRT3847_5463C.1
ccaacccaacattcccatccactccttaatttcctctttctttcaaacttcacatgccacaactcttctccttcatctcatataaatacccttccttcttccctcttccctcttcagtcccccacgcgtccgaaaaacaccaattctccaccctctcattgaaaaaaaaacaaccaaacaaaaaaaatcaatcattttattttatttttctacgaaaatggttgatttacattggaaatcaaagatgcctagttccaaaacaccaaaactctctctctccgacaacaagtccttaccctctttgcaactacccttccgcaccacagatatctctcccgccgctccttccgtttgcgccgcttacgactactatctccgtcttcctcaactcagaaagctttggaactccactgattttcctaattggaacaacgaaccgattctaaaaccaattttgcaagctctcgaaatcacgttccgctttctttccattgttctctccgatcccagaccttactccaaccacagagaatggactcgccggatagagtctctcatcatgcatcaaattgaaatcattgccatactttgtgaagaagaggaacaaaattccgacacacgtggcactgcaccaaccgctgatctcagcagcagcaatagcagcgtgagcagaagctacagcgaggcgagcctgcttcctcggcttgccacgtgggacaaatccagggacgtggcgcagaggatccttctctccgtggaatgccaaatgaggaggtgctcctacacgcttggtttgggcgagccgaacctagcggggaagccgagcctgctctacgacctcgtgtgcaagccgaatgagatccacgcgctgaagacgacgccgtacgacgagcgcgtggagaaccacgagaaccacgcggtgcacgccacgcaccagatcgcggagtcgtggattcaccgtgccgggaagaggatctggaagcttctcgcggaggtggaggacctccacctgatgatggatccggacgatttcttgaggctaaagaatcaactctcggtgaaatcctcgagcggcgaaacggcatcgttctgcttcagatcgaatgagttagtggaactgacgaagatgtgcagagatctgaggcacaaggtgccggagatattggaggtggaggtggatccgaagggaggaccgaggattcaagaggcggcgatgaagctctacgtttcgaagagcgagttcgagaaggttcacttgttgcaggcgatgcaggcgattgaggcggcgatgaagagattcttctacgcgtataagcaggtgttggcggtggtgatgggaagttcagaggctaacggtaaccgagttgggttgagttgcgactcggctgactcgttgactcagattttccttgaaccgacgtattttccaagcttggatgccgccaagacttttcttggatacctgtgggataataacgataataacaaatggatatgaaaacgaaaaaaaaaaaaaacaaaaacgatggtcagagtgaaaatttctttatggatggataatgttattcagtttagtttgatagtgttacacgtcaaaaaaaatga

SEQ ID NO: 92610 - DNA, 398 bp, Glycine max
  Clone ID: PAT_MRT3847_54640C.1
ataggctaacaatatttttattatatataaaccatgaaaaaaaaagcaaaacatatttagtgtattatttatttcaaaagtaacataatgacaatcgcaatcacagctattataatcacacagaaccttgggtaaccttggtaaccaccttacgaggctggcccaccaaaaccccacccggcctcacatactgagggggacccccctgttactgcggcggatcgtgaaccactcctacctgcacagaatagtaaacctggctcccactcccactatcataccccacctgcgcatacgccccattatgcgggggggccgccagcccacccacacttgcactagagcccaagaaagacagcaagtccctgagccatccactccgtcaaaaacacacacat

SEQ ID NO: 92611 - DNA, 143 bp, Glycine max
  Clone ID: PAT_MRT3847_54641C.1
cgaatatctcctctagatggaataagctatttagaaattcctttgggcttaactttgttttatctgatctgaatataggtgtttatttatggattgctattacaagtattgctcccattggacttcttatgtcaggatatggg

SEQ ID NO: 92612 - DNA, 369 bp, Glycine max
  Clone ID: PAT_MRT3847_54642C.1
atattctcggttggttttttatgcttgtccatacaaacaattaatttccggtaatgttgcggtgtttggatacctcgcatacacccccgtttatagggagacccaagagacaccgaaaaaaagctaacttttactcgggggaagagccacccaaaaaggcacaataagaaactgctcgaaatatggacagagagattcatgcggatgctccagatgcccggattaaaacaacttgctattgaggaccccacgaagcgccccttgcccccactccatacaaagctttcggaaaaagaacaaatactctgggggcggaggagccaatttataggaaaaaaagaaaaggttttggggaatccgcaggggcag

SEQ ID NO: 92613 - DNA, 372 bp, Glycine max
  Clone ID: PAT_MRT3847_54643C.1
acgagctgcggtgcctcacagggactaaacctcaacaatggcctaagcggttaagttgggctgagttttggtttaacaccaactacaacaactctctgaaattgactcctttcaaagtcttgtatggttgtgacccaccccatcttttgaaaggagccattatttcatcaactgcggaagaggtaaacgtgatgactaatgacagggaccaaatgttacatgatctcaaaggaaatttggccaaggcgcagaatcaaatgaagtatgctgaccgatctaggcgttcaataccattaaatgttggcgattgggtgtatctcaagttacagccatataggcaacgatcattggctaggaagacaaatgagaagc

SEQ ID NO: 92614 - DNA, 1893 bp, Glycine max
  Clone ID: PAT_MRT3847_54644C.1
ctcattttgttggtctggtcctagagaactgcaatcttccatatgcaaaccacgggcacgttatcttgggtgatccttctcccattttgttttatcccatcagtagcactgagattcggtgtttggttgatgtgcctggccataaattaccttcccttggcaatggtgacatggcccgttatttgaaaacagtagtagctccccaggtacaaatatcctagtctttggcttggcttaatattcaaaacatggaacatattcttcaattccactaatggaggaaattgtgttttaggttcctccagagctgcgtgactcttttatagcagcagttgagaaaggaaacataagaagcatgccaaacagaagcatgcccgcatctccttatcccacacctggtgcccttctcatgggagatgccttcaacatgcgtcaccctttaaccggagggggaatgactgtggctttgtctgacattgttttgctaaggaaccttcttagacccctgcatgatctgcatgacgctaatgctctttgcaaatatcttgaatcattctacaccctacgcaaggttaatatatatataatcgaaagagtttaatagtcatgcaccttagaataaaagtattttctttataaactaattagaaaacatccttattccttagtatgcagtactatgactttggtggttattataaaagtgaacgagtttatcttacatgacagtttgtaattgaataatcgtataagaaacctttacattgttttcttaaccaaataccctgtcatgttttatcagtattggtttgagcaaatttaataggtggttcttgattgtgtttgcagccagtggcatctacaataaacacattagctggggcattgtacaaggtgttttgtgcatcccctgatccagctagtaaggaaatgcgccaggcatgttttgattatttaagccttggaggtgttttctcagatggaccaattgctctactctctggtctaaatcctcgtccattaagcttggttctccacttctttgccgtggctatatatggtgttggtcgcttactcataccattcccttctccaaaacgaatgtggattggagctagattgatttccgtgagtgtttcttgcatttctttatagacataatttttcacatattaaccataacctttgctgcaacaatattctattacaaattatgaataattctagcatgagtagagtgtttaatattcaaataaattcaacacggtctatatattttgattaattgagtctgtaaatgttgtggtcataaaagaattgttcccaaaatattagttaatggtacaacaaaatttatgattttgaaccaagtttgttcttgacattttcagggtgcctctgctatcattttccccattatcaaggccgaaggaattagacaaatgttcttcccagtaactgtgccagcgtattacagaacaccccctaccaatttggaagattaaatacacatcttggaaggaaaggcatgaatacaaaacataatctgtgcccgcattctttgtaactgtgattagtcctaccaaaattaaaggaataagagagcctagcggggaattttgttagaaggctccatacatcagggcactggttttgttcgtgtgcaatatattttgttttaataaaactttttaaacgtattattgtctactttaggacgaaatctaagtttccaagtcaatctttcaagcatcagaggtaaaaaatgtacgctttggctttaataacaagtccttgatttttggctattagtatatatcattgctgtatgcctatcccttattaaaaagacaaataatataatgtaaaagatatgccattgtgtaacgtgat

SEQ ID NO: 92615 - DNA, 652 bp, Glycine max
  Clone ID: PAT_MRT3847_54645C.1
cacgcggcccgagcatttcctccgtaaattattcatagcatatttcaaaccacactcaaaaggcttccctccctgacttggatttgattgatttcattacattgctacactatattctttttattggtgaattgctatttgctacactatattttaaggacaattatacatagactatatggggttgatggctgcgaaccaaactcaattgttgtctaagatggccatcggagatggacatggtgaagcatccccatattttgatggatggaaggcttatgatgaaaacccctttcatcccaaagagaatcctaacggggttattcaaatgggtcttgctgagaatcagcttacttctgatttggttgaagattggatactgaataacccagaggcctccatttgcactccagaaggaataaatgatttcagggcaatagctaactttcaggattatcatggtctacccgagttcagaaatgctgtggctaaattcatgggtagaacaagaggaaacagagtcacgttggatatagatcggattagttgagtttaactagtgataatattttacacacaaaaaacttaaacgtgaaatttgaaatttgcacagggctgtgggctaaattcatggggtggaacaagaggaaac

SEQ ID NO: 92616 - DNA, 546 bp, Glycine max
  unsure (1)..(546): unsure at all n locations
  Clone ID: PAT_MRT3847_54646C.1
cctcagtctgcctcaaaagcaaggcaagatggtcccgaggctacacattttgaagaattaatcaatccagcaaagcaagatgatcctgaggctacactctttgaagaattaagcaatcctgcaaaatatggcttgtgtcaaccaaggaacactgaatctggttctgttatcataaatggcagaaatctgagtggtactggatatgctgaacaaataataaaggaaaagcaaagcattcctgttgtgagtgtcaatgacaaacaggatatgggtatcttagctatttccattggagaaaccggaaatttgccttttcaacgacaaatgtcattgtgttaagtgacgatgatgaacaagaggccaatgctgcagataattcaatgggaagaaaggtggtggagagtcctgaaaattctatttggtattgtgtaggtccttatggtaaaaaaggaggacccttctcaatgtctgcactcaaacgttggagtgatagtgcctcacatcccttagaattcaaggtctggaagacaggtcagagtganacgg

SEQ ID NO: 92617 - DNA, 262 bp, Glycine max
  Clone ID: PAT_MRT3847_54647C.1
tcgtacgaatcgaaaaaagaaagatcatggcgatggcaaacttggatcgacggaagggttacgccgtagttgtgtcgacgaggtcgtcaatttgttctgtcatggtgggggacgatttcttaagggaaagaaaatcactctctgtgctggtcacagactttgtgaatcattttcttttccactcttagtttatttgctgaacactcttctatttgatataggacttcgtgctagattcaaactttcttctgctttttttctt

SEQ ID NO: 92618 - DNA, 201 bp, Glycine max
  Clone ID: PAT_MRT3847_54648C.1
gattcccggggccgaccacacgcgtccgccacatcttccgttggaagttgaattattgtttaaggaaagaatggagccgggcgtggagggtacaatttttattctgccataacttgtccagtgctatggaaaggttggccttcctattaaattttttaaaccttttaattaatttttagtattgggctatatatctattac

SEQ ID NO: 92619 - DNA, 301 bp, Glycine max
  unsure (1)..(301): unsure at all n locations
  Clone ID: PAT_MRT3847_54649C.1
ttcccggngnttccgggaaaaccccacctcattgtgctgcagaattcacagccgcttgattacaatgatgttttgtggcctaagtgtatcctctgcctaactgtattccctgttgtttccttatagtggattgtctatatggatccagtcacatagaggcttaattcaatgattcttgctgacatttatcttcaattcttgggnggacaattatccatagagataggaatattctcagggcacataccaaatttggtgttattacgagccttctaattcagtgatgtggatctatcactct

SEQ ID NO: 92620 - DNA, 1815 bp, Glycine max
  Clone ID: PAT_MRT3847_5464C.1
ctccttaatttcctccttctttcaaacttgacaaagccacaactcttctctcatctcatataaatacccttccaaaacaccaatttctccaccctctcattgaaaaacaaaattaatcatcttacttatttattctccgaaaatggttgatttacattggaaatcaaagatgccaagttccgacatgccttccaaaactctaaaactctctctctccgacaacaagtccttaccctctttgcaactacccttccgcaccacagatatctctcacgccgcaccttctgtttgcgccacttacgactactatctccgtcttcctcaactcagaaagctttggaactcctcagattttcctaattggaacaacgaaccaatcttaaaacctatcttgcaagctctcgaaatcaccttccgctttctctccattgttctctccgatccaagaccttactccaaccacagagaatggactcgcaggatagagtctcttatcacacatcaaattgaaatcattgccatactttgtgaagatgaggaacaaaattccgacacacgtggcactgcaccaaccgctgatctcagcaggaacaatagcagcgagagcagaagctacagcgaggcaagcctgcttccgcggcttgccacgtggtacaaatccaaggacgtagcgcagaggatccttctctcagttgaatgccaaatgaggaggtgttcctacacgctgggtttgggtgagccgaacctagcgggcaaaccgagcctgctctacgacctcgtgtgtaagccgaacgagatccacgcgctgaagacgacgccgtacgatgagcgcgtagagaatcacgagaaccacgcgttgcacgcgacgcaccagatcgccgagtcgtggatccacgcgtcgcggaaggttctagagaggatcgcagacgcggtgctctccagaaccttcgagaaggcggctgaggactgctacgccgtggaaaggatctggaagcttctcgcggaggtggaggacctccacctgatgatggatccggacgatttcttgagactgaagaatcagctctcggtgaaatcctccggcggcgaaacggcatcgttctgcttcagatcgaatgagttggttgaactgacgaagatgtgcagagatctgaggcacaaggtgccggagatattggaggtggaggtggatccgaagggaggaccgaggattcaagaggcggcgatgaagctctacgtttcgaagagcgagttcgagaaggttcacttgttgcaggcgatgcaggcgattgaggcggcgatgaagagattcttctacgcgtataagcaggtgttggcggtggtgatgggaagttcagaggctaacggtaaccgagttgggttgagttgcgactcggctgactcgttgactcagattttccttgaaccgacgtattttccaagcttggatgccgccaagacttttcttggatacctgtgggataataacgataataacaaatggatatgataagggaaaaaaaaaaaacggcacaaaaacgatggccaaagtgaaattttcggtttgggcattttatggataatgttattcagtttagtttggtagtgttacacctcaataaagagggaaaaagcaaaaaacaaaagatgtaatttagaaattcttttttttctttaaggaaaagtggattaaattctgtaatggtcttgatcgttgtaaaatatttaacaaattatctttggagaaatgcttccatcggtgtgttttttttttagggttcctgttaaataattatttacttatttatttgatac

SEQ ID NO: 92621 - DNA, 313 bp, Glycine max
  Clone ID: PAT_MRT3847_54650C.1
gagaagacgacagaagggttccttagttaaactaatttaatttttaagttatacgtaattaataaaaagtgaaaactctaatcctctcaggggcattaatcttccaaattttcttccaatttccagactcattcaaagtatgaaattgattgattctttgaataggttttgttttatttaagctagtataagaacttcgccgaaaaaattggggtaaaataattgactcagaaatgaagagaatcacgatgcattttccacactgagaaaggaagcacacgcttatttcatcttattatacacatatgccaaa

SEQ ID NO: 92622 - DNA, 287 bp, Glycine max
  Clone ID: PAT_MRT3847_54651C.1
caacaacctttgtgacttgccatttttttttaagatataatctccaacttcgaacaaacctctgtacatgggagagtgtgtatgttagtgcatgataaattctcatacattttcgggctgcaaatccaacttgggtcattattactggttctaagtggtctagctttaaatcaagttctttacgctaagaacaactaatattttcaagtacagtgttactgccaagtagaaattgaatcaacgtgtattatgattaccgcgcttgatgaggtataagctttaattca

SEQ ID NO: 92623 - DNA, 488 bp, Glycine max
  Clone ID: PAT_MRT3847_54652C.1
gtccggattcccgggtcgacccacgcgtccggctgcacacgatgctctacacggagctactgtggagagatttcaatgttctatctgcattttaaacactggccggtgcacctcaacgtgactgaccccctgtagtcctgttgcctgcaacagatgtataactggtcttacactatctatagtctgcagatgcacatactaaacatatctgaggttaccgtaagcgtcggattagacctgtgcaatgtacgacctttgggaccttgcaagaatggattatgacagagagaaagagtgagtttaacttacgccgggggaccataggatccctaactgatcgtgggctaaccgaaccgctaaaaccgggtatctggaggaagccgaaggggttaatccagttgatacaccgaaaccggatgggatcaagaaagcgactgttttgtacgctatgaaaagctctcaatggagagaaaactaactggatcatg

SEQ ID NO: 92624 - DNA, 484 bp, Glycine max
  Clone ID: PAT_MRT3847_54653C.1
gattccgttccaaggaaggtttcccgtcatcactgtatgacgtcctccttctttgggggggggggggggcgggagctatcgaggttagagagataaccggataccagcaattcaggagctaaacgcgaaccgcaagaagatagataaatcaacgaattaataatgccccagacagtgtttcagaccaataccgtaaactataacaaatagactggatagactagaggcagttaaacgcgtgctatatagtttcgaaaaatagaaataggagcatacatcgatatagagggttaaaaagtaaggatacgttaaggggtgcaaaccaccaacatatacgtagccatatggagtacgagggcgttcgagtataaggaagattgatgtttgaataatttgagtgggcaagaaaaaacaaagtgcaagaataaaatattagttctacttatttagtagtagtggtataattattattattattattata

SEQ ID NO: 92625 - DNA, 403 bp, Glycine max
  Clone ID: PAT_MRT3847_54654C.1
aacatcaattgtcaactggcatttgcccgtttccaaaggatcatttgaaattttgatatccgccaacccccaaaaccaacccgaaccgagcaaaaaaaaaattaaaatttcaggaagaaagccccccctcgaaaatggatagtacattcccaactctggtcacccaaagaccgcaaataaatacctaacacatcaaaagattaactagcccccccgacctccttgagggctgcatgataaaggaaccccccccccgaatggtaaggcacaccccccccgaaggaaggcgaaaaacaaggggccccccaacaagacccttgaccaaagaagaacaaaaacccccccaaaagaaagggggcccaattcctgaaaaaaaaaccacaaaaggccccaatccataacc

SEQ ID NO: 92626 - DNA, 255 bp, Glycine max
  Clone ID: PAT_MRT3847_54655C.1
actattaaaaatatatttaaaaaaaaaaaaaagaaaggtttaaggaaaatttggcgggcaggccccgcggtcgggggttcctccctgaggctccgctgtttgtccgccttcttgggtccccggcggtcccgttgccagggctgggttttcgatacgtgggccgggtgcacccttgtggccttggggtttcatccgcttgtttgcagatggcctttccccgggtgggtcccctccgttgggccttcccgccatttg

SEQ ID NO: 92627 - DNA, 342 bp, Glycine max
  Clone ID: PAT_MRT3847_54656C.1
atcgagaagacatcactttttcaattaattggatgggtcaattcacatactaacaattcacatcaagaaaaattacaccatgaaaagtaattacaatgaaacctaatgaccacttaagctctatcataaaaaagttggaagctaaacatcaaatctaggaacctaagatacaaggaatcaatatttgtttctatgttttaacatcatcagcagcagcaacatcagaattttcctatatgtagattgttgaccacaataatgaagttccttttgtacaccactacaaaaacggagaataagattcccaccaaaaccagaaacatcctacatatttgcttcact

SEQ ID NO: 92628 - DNA, 501 bp, Glycine max
  Clone ID: PAT_MRT3847_54657C.1
tccggaaattcctggcaaagtgggtcttttgattaaagggttctattcaggaagagccagatgaggtaaagccccttgcattgatctatccaaggtgagggcagtgttatcataacgtatacctcggaattcggctcgaggatacagcacatgatgagactaggataaataaggtggagcctgaccctgagcaagatggaagcattgatcttggggtaaacacgccactgttggggtcgacttcaaggacataagttgaagatgatattcaagttagccaagaaaaaatcctgacaattgatttctgatgagtttctggcaatgttttttcaaccatcagttgccaactttacagcttttagttgctgtttctgattactgttgcaatttttatctttttcagcccaaatcttgattacaaatatttatggagtattaaataataaacaagtttagtgacaaaaacccccaaaaaaagggcgcccgccgactagagagaac

SEQ ID NO: 92629 - DNA, 205 bp, Glycine max
  Clone ID: PAT_MRT3847_54658C.1
catggtgtgaagtcatcatatgtccatggtcatagctaatctttatgtgacacttaatcgagtgtttcaatttacacaaaaaatcttaataaactcagttgcatgttacgtggaaattggctgaaacattgaacatgtgatgatccaagaccatgcaataattttttccttacatgacttgggagaaaatattttttaaattttg

SEQ ID NO: 92630 - DNA, 715 bp, Glycine max
  unsure (1)..(715): unsure at all n locations
  Clone ID: PAT_MRT3847_54659C.1
aattggcaaataaatttttgggttctcggggaaaatggaagggtcnnttagcattaccaaagggggaatggctttattaaaaaaaaaatatgggatcaataaggttaaaaataattattaaaaaatataccgattaatggccaaattaacatcacttaattaactaccctttttaaattttgggcaaaagccctacatataggaccccaaggggggacctaactatgaagggcgaaggtttttaagggaaaaaattaactttaaacactttgaactggacctatctattaatagacatactcatatattaaccactttttgataaaacaccaaccgcaaaaaaaaaaattctttgagaaaacccgaatggggaaactggggtaaaattgggtgggaaaagttttaacgaactaaagctggtaacacttccaactttttttttaaccctaaaaaacctgggggtcggatttacattccacaattttacaggggcatcaacagaatccgatggttttacagaacccttaaaactggaagcgagggacccaacacatgaagggggccccaacaaaagggggagnnnncgggnnntaannngggcccacattatgaatgggccatttttattggccgaaggcctatnncggnnnttaagggacattggccannnnnnanncatacccctnnnggccacgaaaaaccggacacacttacc

SEQ ID NO: 92631 - DNA, 217 bp, Glycine max
  Clone ID: PAT_MRT3847_5465C.1
gtccctgctggctggcagggggctggatggggggcaggactaatactgagtgattgcagagtgctttataaatatcaccttattttatcgaaacccatctgtgaaactttcactgaggataaggccttgcagcggtagaagaggttgattcaaggcgggccgcgtggctcacgcctgtaatcccagcactttgggaggccgaggcgggtggatcccg

SEQ ID NO: 92632 - DNA, 199 bp, Glycine max
  Clone ID: PAT_MRT3847_54660C.1
acgccacgcgtcgcggctgattaattgacgtatataataatcaattgctcacttatgaaaggcgtatgaggagactttggcacagcacaacctaccatccacaaagtggagattttgactcattgaccaacttagcgctgaaggaggcgaatgagttgatcgaagggctgccgaagaagttcaagggcgggagttctaa

SEQ ID NO: 92633 - DNA, 728 bp, Glycine max
  unsure (1)..(728): unsure at all n locations
  Clone ID: PAT_MRT3847_54661C.1
gaattcgagctcggtacccggggatcctctagagtcgacctgcagctggtagaattagttctggacttatgcaatcatcaacatgccctttcacctttgtgaataagctacgtttaacttatattaggaagcgatttaagggaaagaagaattttcattgctaattacgttagcctatatatactaagaaagttagtcaaatgagccagcattaagtagtttcatagatttctagcatcctatatattacaacaaattcacggtcctttataaagttttgatataatgcaagtcaggacaatttctagaattgtaggattagcattcatattgctatgctctacatgccaactctgacttttgtgtaaagagtgacattaacacactataagcaatgcataggtagctactaatagcctgaaacgccgagtcttcaatttattattgtttaacttttctaaattagatgtcacatagtttgattgtaatgctgtggaagcctacaattatgtgtatggggtactcatcatngagggatgttgaccattattttatgttgcttcaacaaccacgtgtatgactaatgcacaaataaagaccaaatatgaaaaaacagagatgaatttcatgaaacggctgaaactattcctaaagcttattaacatgcaaaattcaaagggggggtgccagttttatgtcagaaataaaaaccaatctcaatctgcata

SEQ ID NO: 92634 - DNA, 179 bp, Glycine max
  Clone ID: PAT_MRT3847_54662C.1
actacacaaacacatgctttttaacaaatgtgggacctacaagggtacctgttaaaataaaatactacgcactctttaatttttcaaagaaaatgttatacattttttatggataagtgacaatctgattacaatctattgattgtccgctacatattttttctcaccccaaaaattta

SEQ ID NO: 92635 - DNA, 214 bp, Glycine max
  unsure (1)..(214): unsure at all n locations
  Clone ID: PAT_MRT3847_54663C.1
caaaggagcnagccanccaagtnggggacggtcattgggattgntctnggaacgactatncatgngnggtgttacaagaacggccatgtgaaatcntagccatgacaaangaacgtatcanctnctnggtgntcacgacatgaaactatgggacntgcagaantgcantgcaaccaaaggnatcttgtgtcangacnatnaanaattnagtagg

SEQ ID NO: 92636 - DNA, 1720 bp, Glycine max
  Clone ID: PAT_MRT3847_54664C.1
cccacgcgtccgtgtccggaaaatatcaaaataatactactagccatttacaaaggcagcagctgcaggaggtgcgtgcatcgagcggagccatgatctcgcaattcttcgttctgtcacagcgtggcgataacatcgtttttcgagattatcgtggtgaagtgcagaagggaagtgcggagatatttttccgcaaagtaaagttttgggaagatgggggactgcaggaggcaccacctgtctttaatgtggatggagtaaattactttcatgtgaaagttgttggcttattgtttgttgcaactacaagggttaatacatcaccttcttttgtcttggagcttttacaaagaattgctcgagttattaaggattaccttgggattctcaatgaagactcattacggaaaaactttgtgcttgtgtacgagttacttgatgaagttattgattttggttatgttcaaacaacatctactgaattgttgaagtcctatgttttcaatgagccgcttgtaattgatgctgcacgtctgccacctcttggacctgctgcaatttttacgcaaggaacaaaaagaatgccagggatagctgtcacaaaatctgttgttgctacagagcctgggggtagaaagagggaagagatttttgtagacataattgagaaaatcagcatcactttcagctccagtggatatatactgacttctgagattgatggcaccatacaaatgaagagctatctttctggcaatcctgaaattcgattagcacttaatgatgaccctctcctttggaagaagccagggatcagctttcgagtgttataggagctcatctggctccatgacagttatattagatgacttttttttccatgaatctctccgtcttgatagtcttgatattggcgaatttccagtcatgaactatcgttagacacagtatccagtcatgaactaccggtttgacacaggaatttagtcctccttttcgtattaatgctttgattgaagaagcagggtcacttaaggcagaagtaattcttaaagtaagtgccgagtttccctcaagtgtaacagctaacactatcaaagtgcagatgccactaccaaaatgtacctccagagttagttttgagctggaacctggagctgtaggacaaacaactgattttaaggaagcaaataagaggctagaatggagtttaagaaagatcgtcgggggatcggagcacactctacatgcaaaactaaccttttctcaggaatctcacgttaatataacaaaagaatcaggacctgtgagcatgacatttactataccaatgcataacgtttcacggcttcaggtaaagtatttgcagatagcaaagaaatctgcaacgcatgaaccataccggtgggttagatatgttacacaggcgaattcctacgtcgctcgtatatgatgccgttaagaacactgtcccctcccccgctctttgtttttctattttgttttcctgctcttattgctctttacacacatgctttgtttatttactttattctttatttgtaaattacactctaagtttacattctaagtcgaatatagatgacgttttcagtttgtcataaaacctggatgaaatacacccgtcttctcgtctcatatcatttatatggaatccccgctgtaccacccctacttttgagcaactgcctccttcccc

SEQ ID NO: 92637 - DNA, 336 bp, Glycine max
  Clone ID: PAT_MRT3847_54665C.1
tttgtttagtgcccggattacattaacacgaatgatgaatggactttcatgcctgcagaagtaatctacaacacccctgtctcagaatgtactggctaaaattggttagagcattgggaaggccgagtgaaaaggaccatcctcaacaggtgcacgttcactaccacagaggccctgttctcaatggtagacaatgaagaaattttatacggagcggctactaaacggcgttactgcgagctagaagctgggatcacatcactgcctataatcttacaaagtacaatgccaaacatagctatgaacgcaaagaaaaagctcgcacaaatactaccc

SEQ ID NO: 92638 - DNA, 904 bp, Glycine max
  Clone ID: PAT_MRT3847_54666C.1
cctggacccgagtaagaagccagggaccaccttacggctataggagctcatctgactctggaacagttatattagatgactgtaatttccatgaatctgttcgtcttgatagttttgatatagacagaactctatccctggtaccaccagatggtgaatttccagtcatgaactatcgtttgacacaggaatttaggcctccttttcgtattaatgctttgattgaagaagcagggtcacttaaggcagaagtaattcttaaagtaagtgctgagtttgcctcaagtgtaacagcaaacactatcaaagtgcagatgccactaccaaaatgtacctccagggttagttttgagctggaacctggagctgttggacaaacaactgattttaaggaagcaaataagaggctagaatggagtttaagaaagattgtcgggggatcagagcacactctacgagcgaaactaaccttttctcaggaatctcccgttaatgtaacgaaagaatcagggcctgttagcatgacatttactataccaatgcataatgtttcacggcttcaggtaaagtatttgcagatagcaaagaaatctgcaactcatgagccataccggtgggttagatatgttacacaggcaaattcctacgtcgctcgtatatgatgctgttaagaaaactgtggcctccccctcccccctttgtttttcatttttattttcctcccacaattgctctttacagtttacagacatgctttgattttttactttattctttatttgtaaattacattctaagtcgagtatagatgccgtttgtagtttgccttatttatcattcattacacaataacaagctggtcataaaacctggatgaaatacatcagttttttcttcttaaaaa

SEQ ID NO: 92639 - DNA, 969 bp, Glycine max
  Clone ID: PAT_MRT3847_54667C.1
gattcacaacacgagcatttgtttcaattccaaatcaaagaggtcgaagaaaaacaagagcaaattgggatcgaagaatttgaagaacaccacaagcaagatgcatgttgttgtggtgctcaacacgcaatcctactgcagaggcctagaacctccttcatcttctccttccgtcgtttccaacaagggaacaaggactttgagtttcaggaggctgctgctgcgtccttctcttgggattcatttatcgcgtagctttgctttaaagtgtgttgttactccgaacccagctgtggaattgccattaactgctgaaaatgtagaaagtgtattggatgaaattcgaccctatctcattgcagacggtgggaatgtggctttacatcaaattgatggcaatgttgtgcgcttgaagctacagggcgcatgtggttcctgtccaagttctgttaccaccatgaaaatgggcattgagcgtcggttaatggagaagatccctgaaattgtggcagttgaaccaattgctgatgaagaaactggtcttgagctcaatgaagataatatagagaaggttcttgaggaaatgagaccctacttggttggggctgctgatggaactcttgaattggtggccattgatgagccaattgtgaaggtccgaatcacaggtcctgctgctagtgtcctgactgtgcgtgtagctgttacacaaaagttgcgagaaaaaatacctgccatagcagcagttcagcttttatgatagtttagttcaaaacaagaatagaactatcatggcattcttgtcatttttcatgtacaacaacactaatggaaataatgtgttgcatgtgatgtatagtatatgtggccgcatgattttttttttaattcttaaatgctcttacaggggaagaagatgttatgtttctcagtaattttaaaagaacgtattatttttgttaaagagag

SEQ ID NO: 92640 - DNA, 571 bp, Glycine max
  Clone ID: PAT_MRT3847_54668C.1
actgagcatcgtctagctatctcgatcgaactgtccaaggtcctgtcacagactgagcctaatcctcacgctaacggcgctccgagtagggaccaaatacctggtccagcgcacagaaaatgttgtccgagtggcccaggtggcacgtgtgtcgtgcaatccgttgtacaagtgctggttttaaaggcttatttatattttgtatgctggtgtttggttttatattttgtttgagtcggcttaacacacgcgcgtttggtatgccaaccaaagtaaataccgttaataaacgagtaggggtaaattataccataaccaaatcgtacgggcgcaattggtacgataacacaagggccgcccaacgtacccaacgtgtgatcgaaacatggtcgggcgtaatgaacgtaggcaacatcagacacaacaagccatgcagctacggctaaacaacgtgccaaggcagtgtacaacaaagaacttgagtgaagaaggaggcgaagggcgagtacacgccaacaagataggtagcggttgccgcggaaggcgacaaggggtgggcgtgagaggaggg

SEQ ID NO: 92641 - DNA, 387 bp, Glycine max
  Clone ID: PAT_MRT3847_54669C.1
aattgacgggttgacgagcttttttttcggcgggcgccctcaaccaccttttgggcttaaattttggtacgggctaataatgaacgcaactattatttaaaaccatgaacatgaactaggttaggatcaacacttataaaacggtataactaaacgtaaatgcgtatgattataggtactctatcaaaagaaccggttctgggcactacaatttgaaggacttggaggagcgcgttttgctaatatacaaagagcaagctagagcacaatgcggaccctgattgtctgggaggatacagctcatcatagcgtgaggcaatgcccgccttagggactctctggttcttgacacagggaggtaaatgagcatcttaccggtggtgcggg

SEQ ID NO: 92642 - DNA, 239 bp, Glycine max
  Clone ID: PAT_MRT3847_5466C.1
gaaaacgcgtgcggacaagagcaaaaagacgacagaaggggattctagtgtgttattgtttgttaatataactgaagcttttggttttgttattctgcgtctattttacatctttctctcacctaaaaatgcctttctgcaatgataactgtggttgctgaagctacttcaagtgctaaaactgctgctgatgcttctagatttacccatactttatcttcactgattcaaccaccacc

SEQ ID NO: 92643 - DNA, 224 bp, Glycine max
  Clone ID: PAT_MRT3847_54670C.1
cgtcctggttttttttttttttgtagccctatcaagaagccatatatagacataatgggattgaatatattctctgtatgtgggatcctccatttgcgaatcagagtaatttgaacgctaaaatccttgcaagcccaccactggaggctttggaaatttcattcgaatatctcaactccaaacactggtgctggacataaccatgcttgctttggatgatgggg

SEQ ID NO: 92644 - DNA, 169 bp, Glycine max
  Clone ID: PAT_MRT3847_54671C.1
ggatagaccaagaaagcctgaagtggttccagaccttttgaagaatgatttggtattccagttaatgtggcagatcaccagctagatgagacgctggagcatggcagctgataatcagaagcacagtgcactggccatcatcagaagaggtcgccgcatgttgtcacat

SEQ ID NO: 92645 - DNA, 446 bp, Glycine max
  Clone ID: PAT_MRT3847_54672C.1
atagtgcttgattcttttttcttttgatattctggctctcaagaaaaatgtaatcacacccgttggtggcattactcctttgggcattgagcataattgatgagaccggcccgacctttcttcttgatgctacacacgtggtcctaaaccttgaacggtggagtgactaataccttggaacctaaaccttcttaccacaaaagctactgcatgcatcaaaacaactctgctgttgttgagattgctgctaaccacaacgttaacactggcgaccagaactgcaccagcgaaggaggagaccgtggctcttttgccattgagaccggtgtgtttaactgaagagctacggactcctccattcactggtgcagtacacaaggctttatcttacctttgggtgagcaggatgctcatcaaacttgtattgtttgacatgcatgcatagc

SEQ ID NO: 92646 - DNA, 296 bp, Glycine max
  Clone ID: PAT_MRT3847_54673C.1
cctcgtgacacttcttacctccctcttctgattatcttctacttacatcatctgcactcatctctccctatcggaccctgacctaaccaactttaccacacaacaacaatcgtattcactactccaaccatagcacagtcatcatctacatgtctaccattaccacaaagaagaggcttcgacacttgcaaatttcacgcataacttgaactatcttatgtacaagaactcatactgaaaatcaccccattcatcatcgttactatctaacaatatcactgacatgactcctcaac

SEQ ID NO: 92647 - DNA, 874 bp, Glycine max
  Clone ID: PAT_MRT3847_54674C.1
ttccacaacatcttcaggcatatttgagaatcctaagactccctcagcagaaaccgagacatcaataccgaaatcctccacaaatggagaaaaaagcgagaaaagtgcttctgaagaaaaaacactaaagaaacctgacaaggtacttccatgcccgcgatgcaatagcatggaaaccaaattctgttactacaacaactacaatgtcaaccaacctcgccatttctgcaagaactgccagagatactggacagctggaggtacaatgagaaatgtgccggcaggagccggtcgtcgaaagaacaagaattcctcggcgaccgtgtcacattaccggcacataatgttctctgaagggcttcagggagccacactcaatgcccccaatggattgcataatgctgttatgacctttggtcctgattctcccctttgtgatacgatggcatctatgttgaacattgctgagagagcacaaagttgtgttccaaatgggtttcatgtaactgagccaaatagttttgtttcctatagaaaggaggaggaggaggatggtactagtggtcactctactggagttaattctgttgcaacaacatcaactttaagccatagtggctcacatgaatcattggataaaaaagttgttgaaggtttcactcctcaatttccatactttccaagtgcaccttggccttatcctatccctccttctacatttttcccacaagggtaccctttatcattgtatactacacctgcatattggagttatatgccaccctcttggaataacaatatatcagctatctcacccgaatcttctattaacaactctgtctctaaccctactttggggaaacactcaaaggat

SEQ ID NO: 92648 - DNA, 686 bp, Glycine max
  Clone ID: PAT_MRT3847_54675C.1
aaaaaaataataatcatacctaatcaaataaaaaaaaagaaaggaataatatgcatgaacagagaaccacaaagagtataaataagaatcagagtaatattttacctaatttaaaagagaatagagagtgacttttggattaattttaagtgcgggaaaacatattattacatgtaagacgattttgagaattgaattggtcttatttgtgtcataagacaagtgagttttgcaggcaaccgagcttaagtgtgggagtttagtagtggcatgcactttcgaccatcgcatagcagatgcctactctgcaaacatgttcctggtgtcatgggccgagatagcccagtccaacaagcccataatatcaatccagccctcttttgctcggtcccttttcatcccacgaaatccaccttccttccattcttcacttcacgacttgtacgtctccatctcggcgtcacctcgaccgtcagatccaaaacccgagttccaatctgagccactcattaaccgcatatactacgtcacaggtgaaaacctcaaccttatgcagaaactggcaagctcaaacggtgtgaagcgcacaaagctcgagtctttctctgctttcttgtggaagatggttgctgaagctgcagcggctaaggttaagggtaagaaaaacctcgttgcgaagatgggtg

SEQ ID NO: 92649 - DNA, 439 bp, Glycine max
  Clone ID: PAT_MRT3847_54676C.1
tagctcgggatcgctcgagctcgagccgattcggctcgagctcgagccgcccttttttttttttgccgaagaatctctttgcttttttatcttggcttttatatcctttcttttttttatactgtctccactcactgtcggtttagttttccaggatggtgtcattcttggtgctgatacttgggcagccgggggaccaatgttgtttgttaaaacccctgagaggggaaaaaatttgggacccactttttttggccgaaaaaaatgcgcaactgctgttcttaggcgtgcccccacccccctaggggagaggtaaaatttcgtcgctcccccccagaaaagggaataaccagtgggaggggggtggcccttattaataaacaccctttttttatttttggaatgccaaaaaagggttggtgcttggtgtttttccccc

SEQ ID NO: 92650 - DNA, 273 bp, Glycine max
  Clone ID: PAT_MRT3847_54677C.1
attaaaaaacccaaaaaaaaattccaaggagtcaacccctcgaccacactacaaagactctccttcgtctttgtggctcggttcctctgggtaacatcctaactctttccgccaaagttggcattttttcttcccaggccagattagtcccactctgcctaatccatctggggtccacaaatggggggtctaatgtttgggggttttaggattccagtccatatgtttaataggggtggaagacagttaccacataaattgggggctaaagtt

SEQ ID NO: 92651 - DNA, 291 bp, Glycine max
  Clone ID: PAT_MRT3847_54678C.1
gaaaagttattttgttgatccaaataactataaacagtgtgatgaaattcatggtccgtgttttcctcgatgctacaaatttggtaacatggcaatgtcatgcgtacaatattttcctcccccgattgaacactggttatggtgcccgtacaccggaagtgaaatgcgtcaaatttgaggcttgctgtgtaagcacacaacatctttggctttgagaccattcctgaaaacttcgttgaagcaacaaacgaatacatctatggcgaacaatatatatctgactctaaaaca

SEQ ID NO: 92652 - DNA, 287 bp, Glycine max
  Clone ID: PAT_MRT3847_54679C.1
ttttaaacagaagcacacatcgtggctcattgcattaggcatttatttaagtgaacaaaattgtacacactgatagacctatgcaaaatgacactgttgcgcctactgttcaacactcttcctgatctgaagtaattcggaccagcctaagagtagtggtgctggagctaacattttgattcttgtcgcaactaagctctcccagttcagttcttgtaggaggatcaaccctagtaggaagaacgctttgcgttaccttcttgaaaagctgcgggaatttctgtgct

SEQ ID NO: 92653 - DNA, 545 bp, Glycine max
  Clone ID: PAT_MRT3847_5467C.1
caatgattttggctttcatataatgccataccttgggaccccaaacattgtttcgacaaatacttcaaaatatcgtccgtctacggtacgctattttgccccttcatgcttttctcgttgctcttctagattctattcgtttcgcgaaacttggttttcgattaattcggctcgagtcgacactttagcacagtgggcttctggaagcttccactgcaaggaaacccgattctaccattggccaaatcgcggttgttacgcattattcagagatgatgggttcgaattcgtaccatgaattcggtaacccttttaggttcaaagagggtccataaatgttcccattctttgattattttgcggagattatgtaaccatccgtttgatggtgatgggttcgaatttattgaggaacctttgaaaaaactgggttcagattatgattccaccgtggatgaaaggctccatgtgaacgaggattggggttttaagcaaaagcaattctcacttagaaaaggattcttagaaactgttaagttagatgc

SEQ ID NO: 92654 - DNA, 728 bp, Glycine max
  Clone ID: PAT_MRT3847_54680C.1
gaataacaagcaggaaggtgtagcttgcaccaaaggtattgcttttttgttgtttttgaccgcttatggattttggatgcgatagctctagcatctgtgctggaaatttccattgctgtcctcttgtcaacaacgttattttgaagcatctatatatgttagagtgatttcactctcattcctcaatttcatcaaattaagatggcaccaatcaccacctattttttgattctcatgtcctcagtgttctatgttttctgggatgcacgtgtcgcgcttgaagagttcactgtccatgaccatcttggctttccaatgtcttcattgagttactccctcaaccaccatgaatatccaatccttctatgaatctcaagcacaatatgcatctctctctgctctttatctctccaatatgatccacttagtttcaattgtgtacatggagtgttaagttatttttctttgtttcacctttaatagcgtggaagtgagttgtaagagaaaaaaaaaattaatttttataagaactccgtcttttattgttaaattacactctctgttaatttctagagagtttaatgagtttctgttggatattattctctctcttcgatttcttttctttttagttgtatagacttttttgttcaatttatatattgaatgctgtttatcctttctgttttaactttctgattcttatgttctgtgaatgtgaattggga

SEQ ID NO: 92655 - DNA, 243 bp, Glycine max
  Clone ID: PAT_MRT3847_54681C.1
ggctcgagcttcaatctcaccctatttttttccctcaaaacgacactgtttattcactacttcttagggttagggttaggtttccgcattatgatgtgaaaccctagcacgcctagagcctctttgtataaaacctctcctccgccgcgatctcctctcccatgggcaactgctgtagatccccggccgccgtggcccgcgaggacgtgaaatcgagcttctccaacgccgaccacggaaagc

SEQ ID NO: 92656 - DNA, 498 bp, Glycine max
  Clone ID: PAT_MRT3847_54682C.1
ggccataaacaaacgaggagggtttatgcaaaagcaagattcttttctcactgtccaacgccatgacgacgaggctccttagaacgatcttcatcgcccacaagctccacctccgcaaccccaaatgtattttcccacctctcctttcccgccactcctccacggccacaaattcctccgaggcccgcgaaccagcaaaggaaaccaccaccaccaccaccaccaccagttggagcatgtacggaaacgtctacgaccgcccaattgcgcagcgcgagctaaacgaccacagcgacggagacgaaaaccctagcagcgggagagcagcaaagagtgtagcagtagtgacgaagataaagggaaaggggaaggtgaaagctcagtgggtgtgctgcagttgcggccactcaacaggaaaatggtgggggcaatgccccgaatgcgaaatggttggcacaatgaacgagtttcatgagagcaaattgactgacagcaagt

SEQ ID NO: 92657 - DNA, 278 bp, Glycine max
  Clone ID: PAT_MRT3847_54683C.1
cccacgcgtccgacggctgcgagaagacgacagaagggcaaagagggcacagaaaagggaagcggctgacaaggcggccgaagcaaagcatctgcagcatttaataaggttgggtaggaagtgattctattttatttatatcaggccatcatcatggccttgaactttccttcccataagttaaatattttcttttttttatatattttttttttcttgtacattgtttctgtgctctttactctgaagcatgtaatatatcttggggaagttgtttt

SEQ ID NO: 92658 - DNA, 276 bp, Glycine max
  unsure (1)..(276): unsure at all n locations
  Clone ID: PAT_MRT3847_54684C.1
ggccatactattggggatgattcagcgactccgagatgatttcaagtccaatcaggagcaactgatcacagttcttaatacttcttctgtactgttgcaaaatcagagagaacagacgtgctttactaaagctcaggagcttaggtttgcttcttgaggctgcaaggcgagctttcacagttgatgccatggagccagctgaagccnatattttgattgttgaaagtctgactttagaggcgaatgaacatgacaatataagcatcacacacagtg

SEQ ID NO: 92659 - DNA, 609 bp, Glycine max
  Clone ID: PAT_MRT3847_54685C.1
ggctcgaggagaaagtagcatagtttcttgtggttccatttccatctttttgctctgtttctgacacaagatggtgaagagagtgaggtctgattcgggtccattgtctctgcaaaagcacaaccattggtgtgtgaagttaggagtttcaatcttcttggtgggtctcgcttttcgtcttctcttgtgggattcattcagtttctcatcggtggtagtggagacacctcctcctctggaagatgcaaaagcattgtcccctgttttctcttcctctgttcttcaggattctgatgagtttccagaaaatgatcagaagattcagacacaaatctctaagaatgaaaaatgtgatctttttgtgggagattgggtgcaagacctatctgggccagtgtacaccaatgagagctgccgtgtgattgagcctcatcaaaattgtatgaagaatggacgtcctgattcagagtacctctactggaggtggaccccacgagactgtaaattgcccaaattcaatcccagaaagtttctcaaactcatgagaaacaaatcattgtcattcattggtgattcacctctcccgcaaccaagttcagtccctacttt

SEQ ID NO: 92660 - DNA, 471 bp, Glycine max
  Clone ID: PAT_MRT3847_54686C.1
gatacaggcaagagctgcttcaatgagcctttgtataaggatatgttccttgctgcttcttcccagctaagtattgttcggcaattagatggcatagaggctgaatccacaaaaccttgtgcttccttttctctggaagcaagaactggtatcatcctcatttccttcttgaataaatattctaatatactttttctatcttagctgtgttctgtttgagcattttagccaaatttcttagatggctaactttatatgccatcttcttgtggacttgaaccctttggccccaattctgtctaattaaatactgccaactaaagcaaaaacatacaatgtacctgccagctaaaaaggaggtactggccactggccaatatttattgggtacaagattgaagtgggtgtggagcaacagatgattggaggcccttccttaatctaacctgtatatcaagttccatgccccct

SEQ ID NO: 92661 - DNA, 724 bp, Glycine max
  Clone ID: PAT_MRT3847_54687C.1
ctctttcttttttttttttttttttttttttttttttttttttttttttttttttagttacaaaaaaatgtgcaatcacttcatttcaggtggcagtccctacaaggttatataaccaacacatgaaatttacaggatgagtaatggaccattgggaccacatgcacttctagccccccatgcagtgaataataatctgtcacaacatattcaccaaaaaaatttaaaaaatataattctagcacaacattcactttgtagatttacggatatatcacgtggacctacataaatatataccatcatcatgttgcattcaaacaaaagatgaaaactagcagtttttgctagctgcctaacctctgaaacaaaaatattttaagagctgttacttgctgggtctcaatatggtttaaattggattataacccgagctcctgaagcaagcctttcttcaattttgatcaccctctcttcttctctaaatgagtctaccctcttagattgctttctcccaaaccctgatgaaggttccgggattcttttgctgctaccgttagatggtactggggatatgcctgaaccatcagttttatccatggaatttcttgatccatcagaaacaggagatctcatgcattcacttggtagctgcttggtcaatgaagccttaactgactgtggaacacattttggattccctgaggatgatgattcctctgtg

SEQ ID NO: 92662 - DNA, 261 bp, Glycine max
  Clone ID: PAT_MRT3847_54688C.1
cccacgcgtccgtccacgcgtccggctgcgtagtggctggcaaattgtaagtaagaaagtgtgggggtagagtagcggcgtatcttattattatgtaatgtatatttataattaataagccattctgcgttagttggtaaaaaaaaacatacttaaaaaacaaaaaatgaatgataatgaacaaagaggacaactagaatgacaacaagagcaaatatgtaaagtggaagtgtcgagagttaccaatgcccatcacaatgc

SEQ ID NO: 92663 - DNA, 413 bp, Glycine max
  Clone ID: PAT_MRT3847_54689C.1
aaaaccaaacaggaaaagtttattctatgggacggaagcgggggaaaacgggagctagcccaacaaaataggagcaaaaaaaaaaaaaatttgcatccttgggggggcttttccggaaatctatcgggggcaattgccattggaccccattcccgccccaaggggccaagggatccaatggacatccttactaggccgggggaaaatccggaaagctttggctcccccccagccaccccacgggtaggggggcaaccaaagcaggacagggggggctaaaaaaaccccaggctaacagccaggaatccaaatggggcatcgtttggcaagggacccatcaacagggtggccctccccaccgttcccatggcagggcaaaaaagcccaccaaacccatattcccgggggggtat

SEQ ID NO: 92664 - DNA, 226 bp, Glycine max
  Clone ID: PAT_MRT3847_5468C.1
gacaaaccaaacaactactactactactgcacacactctctctctctctctctcaatgtatgggcgccaattccagttaccgaaggattaacgcctttgggaaaccaatccccaaccaaatttggacttccaaccccccctcagctcctctcacttccaggaagggagcaatagcagcttgcatacagtatcaaccggcggtcaatgtatgacaagaaacctgatg

SEQ ID NO: 92665 - DNA, 1760 bp, Glycine max
  Clone ID: PAT_MRT3847_54690C.1
cccggccctcgcattcgaccacgagtcgaaaacacggagcgaaaaagcgtcacgagcgagagaggaaggaagagaagagaagagagatagggagagcgagcgtgagaggaagatcttcgatttagggttttcaatttcgtattcagcaaggcggcgagtgtgagatttttagagagagagaggtgaggacgctgagtgctctgctgagagattccataaccccaagaggaagaggaggaggagaaggtggatagattttttttcctttttttttgtgctgtttatttatcctcagagcggtggatagggatttttcactctgcagcgttccgttccattgtgatttgttgaagtttctgatggagcagcgaaagcttgtggttttggggattccgtgggatatcgatactgagggattgagggaatatatgagcaagtttggtgagctggaagattgcattgtcatgaaggagcggtcaactggacggtctcgtggttttggatatgttacatttgcttcagtggatgatgctaaggaagtactatcaagtgaacatattattggtaataggacgctggaagtcaaagtggcaacaccaaaggaggaaatgagggcaccagtcaaaaaagttactagaatatttgttgccaggattccacaatcagtaacagaagctactttccgaagtcattttgagaaatatggtgaaataacagatttgtacatgccaaaggatcaaggctccaaaatgcatcgtggaattggtttcatcacttttgcaagtgcagattctgtggagaatttgatgtcagaaacccatgaactgggaggttctgctgtggtggttgatcgagctactcctaaggatgatgactttaagccaataggcagaatgccgccgccgccattgccaacgccacaaggaggaggatatggcgcatacaatgcttatatttcagcagccactagatatgcagcacttggtgctcctactttgtatgaccaacctggcccaatttatggaagaggagacccttctcggagaactagtaagaaaatttttgttggccgtcttcccccagaagcaacttctgatgatcttcgtcaatattttggaagatttggtcgtatattagatgtttatgttccaagggatcctaagagaacaggtcatagaggttttggatttgttacttttgctgaagatggtgtagcagatcgcgtctctcgaaggtctcatgagatttgtggacatcaggtggcaatagattcggctactcctgttgatgatgcagggcccagtgggaattttatgatgaatagtatggaatcttttgggggatatggtggtcctgtgcgatcttatgggaggatgtatggtagcttagactttgatgattggggttatggaattgggagaccatcaagagcagattggaggtatagaccatactagtaggacacaacttattggtgccggcgaactgtggtgcagttgtttaactatgatttttaaagtttgtaagaactatagattggattttattttatccatcgtaaaccagaaatacttttttctttgaacatattgttatcttgtatccatttgtactggtgcagatgatggaaatatgatatattctagaacgacaatgttacatttcgtgctaaaaaaaaaaaaaaaaaaaaaaaaaaaaaaaaaaataaaaaaaaaaaaaaaaaaaaaaaaaaaaaaaaattagtcatttatgccctttga

SEQ ID NO: 92666 - DNA, 148 bp, Glycine max
  unsure (1)..(148): unsure at all n locations
  Clone ID: PAT_MRT3847_54691C.1
acgggccgacccacgcgtcgccggcnttcnacattttcaagaagacatattttggccgacaggcccaacattcacgcgggtttacatattgacatgccatttccaaagcatcttaatgattaaatatttgatgcacatatatgattga

SEQ ID NO: 92667 - DNA, 963 bp, Glycine max
  unsure (1)..(963): unsure at all n locations
  Clone ID: PAT_MRT3847_54692C.1
cgcctgcaggtttttgtgccgnaattcccgggtcgacccagcgtccgttgtaattctgttgttacttacagagatctatgacattacatcaccgtctacagtaattacatacctgtacagtagacctatatagttcatgtgaagggtgaatttcttatgacatgtcatcatgctggaatgtcaagatgatttgattagactttttggtttatttctgttttggtttaaatatgatttgattaattaacagcttgcacctgcaggtggcaatagattcggctactcctgttgatgatgcagggcccagtgggaattttatgatgaatagtatggaatcttttgggggatatggtggtcctgtgcgatcttatgggaggatgtatggtagcttggactttgatgatgtgagtttatacatactggtgattttatggccaataatatataagggaaatggaatttggagttttggacaatttgtctagaatttgacctgcttagcaagtacattatcttaatatgaaatattttagttttctcagtgtaaaaacaacgttaatcagtggttgtattgatgttcctagcatgtaatcacatgcactgaaacattgaagtattgaatctagtttcatgttttcaccttttgagtatttattattttcttttgcagtggggttatggaattgggagaccatcaagagcagcagattggaggtatagaccatactagtaggacccaacttatcggtgccagcgaactgtggtgttgttatttaactatgatttttaaagctgtgtaagaactatggattttattttatccatcgtaaacaagaaatacttttttcttttaacatattgttatcttgtatccgtttgtaatagtgcagatgatggaaatatgatatattctagaatgacgatgttacatttccagaataaattagtcatttatgccctttt

SEQ ID NO: 92668 - DNA, 233 bp, Glycine max
  Clone ID: PAT_MRT3847_54693C.1
ggggaaaaaacctaattggaaccaatggttccggttttatagggcttccccaaaaaactttaaaggggacgtaaaattgcgtggggagacacagctttttcaatttaaaaaaacagggggcagggcaaacaattataaaattttattggggcctcccatttaataaaagggtctccaaattggtccaaaaaaaaataatgcccccaaatgaaaattggcttaatgaaaagggg

SEQ ID NO: 92669 - DNA, 1475 bp, Glycine max
  Clone ID: PAT_MRT3847_54694C.1
ccgccggcgtcccttccactccgcccccccgtcctcggcgtagacccttgtcctgggacccacctcccgattcccaagctccccaaccgcaaaagcgaagaggtaaggcggcacggactgttccatgacgaactcctcgacaatcctcccttgagcacaccacgattccccgtccggcaaaacgacatgaacggcgtcgtcgtgtttgggcgagcgacgctccacgtggcgggcagccatgacggcggataactgagaaggaacgttgaggagggcggagtattgtattctgagggcgggggtgtcttggcaggggaagacggagcgtgcatgaatggattggcactgggtgtagacgaaggggtgggaggattggggagggaggagccattggagtgcggaggaggaaggggaggtggagtaagagatgaggaaggaggagtggttcgagagagtgaaggtgatcctagggagcctttgatggggtgcgggtccagggggagaaagaagaggatagagatcatggggatttggggtggatgcaaggaggtcaatggggagggagcgagtggccagagagcaggggccgctgtggggggtttggagactgaagagtgccgaggcgtggatggtggatgagggcaagtccaggtagagacttagggctacgtgccttgtccttgcttgccttgagctcgagcagcgcgtgtgtctgcgttgcgagtgtcgtcgttttgattcccctctctctctctctctctccaccttcactcactctgcatgcttcttcttcttctctcactctgattccgcgaaatcaaatcaaaatcagcttctcggaatcgaatctcagatctcggagatcagaaatggtggatccaactggaaaaggatcggagattgaagtcgaggactcaaactcaaaccctaacgctccttcctcagggaacagtccaagcagcaacaatgagcagaagaaaacctgcgccgattgcggcaccaccaagactcctctctggaggggtggtcctgcaggacccaagtctctgtgcaacgcgtgcgggatcagaagcaggaagaagaagagagcgatcttgggaataaacaaggggagcaacgaggacggaaggaaaggaaagaggaccggcggcgctttggggaaggaggtgttgttgcaccgatcgcattggaagaagctcggagaggaagagaaagctgcggtcttgttgatgtcgctctcttatggatccgtttatgcctgaactgaaccagaattaatcaattattattattattctagttctagatgaacaattattgaggagaattctagattttgttttaggatgttccttcccctaaccctttcccgaagtgtatatgtttagttttttttttttctctgttgaatgagtgtgtgggttggatgtcaacaacagttgtaagaaatgaaattattcaagtccaattttggt

SEQ ID NO: 92670 - DNA, 1284 bp, Glycine max
  Clone ID: PAT_MRT3847_54695C.1
gtattgtattctgagggcgggggtgtcttggcaggggaagacggagcgtgcatgaatggattggcactgggtgtagacgaaggggtgggaggattggggagggaggagccattggagtgcggaggaggaaggggaggtggagtaagagatgaggaaggaggagtggtcggagagagtgaaggagaggagggagcctttgatggggtcagggtcagagagagagaaggggataggggtctgggttttggggtggatgacggagtgaatggtgagggagcgggtgtccagatagaaggggccgctgtggggggtttggagactgaagagtgccgaggcgtggatggtggatgagggcaagtccaggtagagactcagggctacgtgccttgtccttgcttgccttgagtccgtgaacgagtgaggatcaactgctgccatcttcctaaactctctctctctctctctataaacttctctctaagaccctctttccttctcactctctctctctctcaccccactcactcactctcttactctctgcatgcttctgcttcttctctcgctctgattccgcggaatcaattcaaatcagcttctgggaatcgaatctcagatctcggagatcagaatggtggatccaactggaaaaggatcggaggttgaagttgaggactcaaactcaaaccctaacgctccttcctcagggaacagtccgagcagcaacaatgagcagaagaaaacctgcgccgattgcggcaccaccaagacccctctctggaggggtggtcctgcaggacctaagtctctgtgcaacgcgtgcgggatcagaagcaggaagaagaagagagcgatcctgggaatcaacaaggggagcaccgaggacggaaggaaaggaaagaggaccggcggaggcggcggaattggcggaattggcggtggcgcgttgggaggggaagtgttgttgccccgatcgcattggaagaagctaggagaggaagagaaggcggcggtgttgttgatgtcgctctcttatggatccgtttatgcctgaacccaattaatcaatccttttaattattattattattattatcattattctagttctagatgaacaattattgaggagaattctagattttgttttaggatgttccttcccctaaaccagtcccaaagggtatatgtttagttttttttttctctgttgaatgagtgtgtgggttggatgtcacccccagttgtaagaaaatgagaaattattcaagtccaattttggtt

SEQ ID NO: 92671 - DNA, 1844 bp, Glycine max
  Clone ID: PAT_MRT3847_54696C.1
ccacgcgtccgcttgtttcgtatttttgtggtgctgctgctggtattggctaagaggctttcaaacagaatccattgagagaaaaaaaaaaaaaagatgtaagagagagaagaaggaaaccccaacccaataatcatactcgtacttgggatgatattggatcatctcaacctcaattttctacaatattaaataaacaatcaccttcattttttttttctcctcttcatttctgatctcatccccatggatccctttgatttaatacgcgaagggtttggttgaggctgactggacatgcgctgttactacttttaaagtctgtttatgctgtagttattttgtccatattttagttaataatgaacttatccaagaaaggacccctaagggatgcaaagctattaagcccaaacaaggcaacaactctgaatccaaatgcagcagagtttgttccttttgccctcagatcatcgtcattatctggaactaccagctcggtagatgcaacagcaaagctttctgctgctggagctcttgggaaagcagtttttgatagatcagaatcatccatttcaaataattctgatgatgaggtacaccaatactggcgatgtcagctccctgatgatatcacccctgatttcaaggtcatgggagaagatgagtctcgagttcttgatgatctttctttagcaggcttatccatacatgatgacaatgaagcctccaggtttccttcttctaaaggaagtaaatatattataaatgagcaggaggaaatatctcaacagcatgttaatggcaatagcttggcagataaactagggttttccaattcaagctacagggaggacccatcttctggaagctttttgaatgttctggcaaagccttgggaggggccaattgggagtgctgaccagtgtattagcagtggtcaagagggccttacttatgatgacaactctatacatggatacttaaatgatgttttggttgaaaatgcaattgtggatgatactgatctgaatcctttggagtttttagcttccctgttccctggttttgcagcagaaagccttgcggaagcttactttgctaatggatgtgatttacatctgaccactgagatgctcaatcagttagagcttcaagttgatggcggtttcaatcagaatctgaattcaaagactctgtcagctcccaatctcagtgcaatggactaccctgcacttacttcaccagatggccagactgcttcagtaaaatatgtggttgataatgtccaacaaagtggcaatccttaccgatcatttgacagtgatgggctcgagtttcaaatctgggtcttctattccatctagaggtgctgttgactttgcttcagctgtcaggaaattggcttctcaggattctggtatatggaagtatgataaaaatggttctggtgatgcttccactggctctagtaggagtttaaatgctctggctagtgcctacaatggtggacaggggagagtcaacaatggtgatagattacagaatcgtggctctgctcgggcagctcctgtttggcttgaaactggtgacgcagttggtaaatgcttatgcttatatgcttcaactgtgagatgaattctttctataccgtgtctcctttaacaattttgaatggcagccaatatgtattctgagctgcgggaggaggctcgcgatcatgcacgtttgcgtaatgcatattttgagcaggtgggtctttgtttcatgcagtgatggacgagttaatggaaatttgaatgagaatacaatgtaacgatttggttagaacctacacacatcat

SEQ ID NO: 92672 - DNA, 1299 bp, Glycine max
  unsure (1)..(1299): unsure at all n locations
  Clone ID: PAT_MRT3847_54697C.1
acgagtacatttcggagatgttctgtgtttggaccttgaaaaaatggattggagcaagcttgccaccacaggtgaaaagccaggccctagagatagccacagtgctgttcttgtagggcacaaaatgatagtttttggtggcacaaatgggttgaagaaggtgaatgacactcatatattggaccttgttaccaaggagtggtttcgtccaaaatgtgaagggactcctccttctccaagggaaagtcacactgcaaccctagttggggatgaaagactagtgatttttggtggcagtgccacgcgtccggcaaactatttgaatgatttgcatgttctagaccttcgaaccatgaggtggacttctcctacggtcaaaggtgattttcctgtgcctagggacagtcacagcactcttgcaattgggaacaagcttattatgtatggtggagactgtggtgatcagtatcagggtgatgttaatgttcttgacatggatacgatgagttggtcaaggttgagaattcaaggttcttccccaggagtcagggcaggccatgcggctgtgaatattggaaccaagatctacatcattggaggggtaggagataaacgttattataatgacatatgggtctttgatatctgcacttgttcgtggactcagcttgatattcgtggtcaacaaccacagggtcggttttctcacacagctgttgttgcagacatggatattgccatatatggcgggtgtggggaagatgagcgtcctttgaacgaattgttagtgttgcagcttggagcagagcatccaaatgggcgttacaacatttccatgtgcaaagtttttggaacttgttggaaccatgaaaagaggaccatacctggaggagcagataccaactcgacaactccacgcaatgggaataataatatggaagtcttgggtaaatgggcttatgaagttgtatcggataaagtgaacccttgtcactttgattctggcacatcacaacagaagaggaggagaattgctattgcaaaggtgtgggatgttgaatcagaacaagaagaacattctctttcactgtcccagcattcatctccatctcaatctgatcaagaacagaccccaggtcaaaaatcaatgtttctgtcatggatgctcagagttatcattggttcanacagatcaataaaagtccaagctattgccagcttgacaatatcccaagtaataacacagctttgaagaatatcacacancgaagtgttcatctcataggaaatcaaccaaaa

SEQ ID NO: 92673 - DNA, 589 bp, Glycine max
  Clone ID: PAT_MRT3847_54698C.1
gtctccactctcaaaggacaacatcctatctctttggatacccttattgctccaaaaacctctctcacgaacaagactctaaagctctgaatacggctcatgatggatggggcactgatgagaacactgccatcagaatatggtgacataaaactgcatatcaaaggcagcatatcagaagagcttattatgaaattctgcaggaggatcttgtcaatcatctagaccctgaaatcacaggaaactttgtacattccatcctcctcctgcatactcagaactctgctaagcgtgtaacatgttttagaacaatgttgccttctaagaacggcagacaactacaatgttcattggcggaagttcggcactatcactctcactcaccaagatcttttgatgcgagatacacatcttatcatcaaccgctacaatctctccttgcaagaagataccacagctcatacctctggccttttacgccagctttgacagtggtgggtgacctcatatagatatgttggtgatgagatcaatccaaatttgccacagactgaggctgaccctcttcatgatgctgtgacagactact

SEQ ID NO: 92674 - DNA, 412 bp, Glycine max
  Clone ID: PAT_MRT3847_54699C.1
atagattaatgaccccaattccatggagggggggccaccctttttaccttatttatcaataaccttacctttcttcaaattggcaaaattttcttttaattgaatgccctggcttttttataccaggcaccaaagcctaccattaagatggggcattggtttaaacctaacttgaacctggttcatgggttttaaaaccctggttggaacccaaacctgaataggtacctggcaaatttttattggattattaattcctgggcttcctccagggaagtttaccttaattatccccaaaaggtcctggaatgggaaaattccaaggcactggtctccaggaaaatctatttaaggcacacctttctttacgggctaaaacttaccaaaatcctccacaaattttctgtattgg

SEQ ID NO: 92675 - DNA, 218 bp, Glycine max
  Clone ID: PAT_MRT3847_5469C.1
gcttgccccctacctaaactccggattcggggtggggtccggttccaaaaaaacgacaaaggggggtggccacctgtttagtaaaagatccaaaaaagcgtccaagttcaaaaaagcttttaaaccaccacttttttaaccaagcccgtcccagcaaaattttacctgcgacaccatttaaaaagcgcctgcgttctttatagggaaccgtttaaaat

SEQ ID NO: 92676 - DNA, 481 bp, Glycine max
  Clone ID: PAT_MRT3847_546C.1
ctttcttctttttttttttttttttttttttttttttaaaatttaaatcctcaaatgggcgtggggaaaatttaaaaatccaaccccaaatacacattgtatcatacacaaatcccattaactaagtaaaatgatccacagacccacattttctactcaaattgatcatcatcctcatcaggaagggtcttacttacacctgcaagaacctcaacctcttgctgttgttgtccaactaaatcaattttaacttttggtggacccaatgcaggaaattttacaaaatgcaagttaacattgcctgcaagttttctggccaattacaaaaatggctttttaaaattggagttgcttttagcacatatcttatagttctgcaaattcttctttctgtggaaaagtaaacctatttgcctttacttgcctattcttgacatcaaccttgtttccgaaaaaaacaattgggatgttttcacagacc

SEQ ID NO: 92677 - DNA, 226 bp, Glycine max
  Clone ID: PAT_MRT3847_54700C.1
ggtcattaatgtccccctgagaatcctggtgatgcgtgttgaactcaccctgcagggtatagagcatggttatgtcgatgttgacagggtagactggtagctggatacattgtgtgacctttattagactatggctctcactgacattgtcattcttgtgactaccggtcgcaccgtggactgtctcgctaacggtatgcgaagcactgaccacactatctgtgca

SEQ ID NO: 92678 - DNA, 241 bp, Glycine max
  Clone ID: PAT_MRT3847_54701C.1
tacggctgcgagaagacgacagaagggaggcaataaaaggacatgcttgtatggggttagtactgcttatgtaattaccacaacaacctgtttgaggtactattcccacataaaatgagaagattattatttatatgcaattatgaatttgtgttgtagtttgttacttgtatcatttattacttttttatctcgtaatattacaggtattagcctaccttaatgatatatgtcatgatct

SEQ ID NO: 92679 - DNA, 399 bp, Glycine max
  Clone ID: PAT_MRT3847_54702C.1
caaaaaacgggctaaaagctactttttaaaaaaaggggaacccaacccctttaacagggttttttgtggaaccaacttgggtaaaaccttaatattggcccaaaaaaaagggggggataaattatccaaccttcatttaaattaaaaagccaccctgagggggcccagttccggttaattttgttaaaaagcagcttttatcatataaggatttgaccataaaaaacctttcagcttttccaaaaaaaaaaggaggagctatgccttaaaagctttccccgccaaaaaaaagggcaaaagggaccccaaaattccatttaattaaatttttggtttaacaaacaatttcagggccccattagtattctccctatgttctgagggcagggataaccaaaa

SEQ ID NO: 92680 - DNA, 464 bp, Glycine max
  Clone ID: PAT_MRT3847_54703C.1
agtattgcatagaccctgtgctgctcgaaaatcatccccagggagggtgccaatctggtaaagttgtcgatcataattataaggttattggtgttgaagctttgagggtaattgatggatccacttttcatggctcaccgggtacaaatcctcaagctactgtaatgatgcttggaaggtatatgggagaaaagattataaaggaagattcttccataggcggaagtgaagggatcaattgagttcatattttccgttgttccatatttgtgttgttcttcgcatgatttctctcacgagtcacaatttatatcagtgattgccaatatatattgctacacttttaactctaaaaaaaacttattaatacatccaaattactgcctatatcaataccctaaaaatctgaggccgagtatgtatttacaatattattatttataaaataacttattttagtgatt

SEQ ID NO: 92681 - DNA, 400 bp, Glycine max
  Clone ID: PAT_MRT3847_54704C.1
cccacgcgtccgcccacgcgtccgcccacgcgtccgcccacgcgtccgcccacgcgtccgtacggctgcgagaagacgacagaagggggccgcatgggttgttaagttgtggcctggggccattgcattatgcatagcgagttctccgatgcgaagaagcgcagagaggaggacaaccctgaaacactcgtttccctcgcacacgacagagagaataagaatagaatgagaaagacaaagaagaatatcgatgaatcaaacgagcagccccaggttgaggtatgccctaaatccttactagactcggttatcccaattgctgcacaaatggaaaatgctgaaaccaccacagagaattctaacccaaccccccttccaaaacaattgagcaacctgaatg

SEQ ID NO: 92682 - DNA, 532 bp, Glycine max
  Clone ID: PAT_MRT3847_54705C.1
cccacgcgtccgcccacgcgtccgacggctgcgagaaaacgacagaagggcaagttcactagctcttagagttagggttttttttttttttttttttctgtaaagctaagtcgtatagctagtggcttcttttcggattctatatgcctatgaatttgtgattctattagtcccgatgaaaatttatattcagagtaatcgatgcttcccgacttagtcgatttgacaagtgaataatactcgcgttgcaggaaaaaaaaaaaaaaaaaaaaaaaaaaaaaaaaaaaaaaaaaaaaaaaaaaaaaaaaaaccccaaaaaaaaaaaaaaaaaaaaaaaaaaaaggggccccctttaaaggacccaagttaactaccccggccttgcaacgtaaaagcttttttatagggcccccaaaatcaaatccccggcccgcggtttaacaacgtgggaacgggaaaaccccgggggtaccccacttaaatcccctggaagaaaatccccttttccccagttggggaaaaaccaaaaagc

SEQ ID NO: 92683 - DNA, 405 bp, Glycine max
  unsure (1)..(405): unsure at all n locations
  Clone ID: PAT_MRT3847_54706C.1
aagggaaagcaggaccccggcgggccgaaccggaacccccggncgacccacgcgnccggtcagtaaaagcaacgcgccgaacggcggcgggcccggcccaaaaacaaagaacgggcaaaggagccggacncaaaccagacaaancggacacggaggccacggaaaaaagccccgaagcgagcagcgaagaagcacgaaacacggccagggggccggcacagaaggaaggacccacggcggggacaacacccggagccaacacaggcgcagcacccagaagggcacagcagcccgagaacaaaggcaaactccaagggaccggccatccaaggtacggcgaacgaaacccgacaaccggcccggaccaagagcccccgcaagaagctgaaaacacgcagccaggag

SEQ ID NO: 92684 - DNA, 689 bp, Glycine max
  Clone ID: PAT_MRT3847_54707C.1
ggaagacgacagaaggggagagaaaaaaaaaaaaactttcgtttctactatttcagtattgttctctctcttcacctcactcgtctttctcttttcactctcccagcatgtaacccacgccctcatgcatcgccctcttcccttccctttcaagtgagtctcatcaccttacttcaacaccgcggcgaacgacaataatccgtattcagatttgctcaccgtggacaatagtcatcatcgatccagattcagatctgctcataacgcacaacgactatcgatctagattggttcgtgcggttgttctgtgatattggatcagatctgtgatttgattccaccatgacattaccgacgaccacaaccatgcatgcctcgaaactcccacacgtcggaggagtgacgattgataccgctacggaaccttgcaatgcaattctgcaacgcctaccttgaacgtcatcacgatccaatggtggtgtttgacgccctttcctctcctactcttcatatttgtttcaaagatctatttcagagtttccatgacgacaccaaatttgaaccaaatctaggagttttcttgtttcagatctggtttttattttattgattattttgattttgttgtctggaatgaattgttgtgtttcttcacattgactcttgatctattcattggtttgttctcc

SEQ ID NO: 92685 - DNA, 393 bp, Glycine max
  Clone ID: PAT_MRT3847_54708C.1
ttttttttttttcttttttttttttttgtttttttttttttttttttttttttttttggaaaaaaaatcattctaaaaaaaaaaacctcattataagaactttaacctccaaaaggtaattttcccaattggcaaaaaactgacagcttggccaaaaaaacgttaagcaaacaatgaaggaaacttaagggggtaatgaaattaaaagctaaaaaaagatctttttcggggcccaagaaaggaaaatttcagcaaacccaaaatttaccttagcattttccgacaaaattttttggtatccacaaaaaattttaggctccccaaccccccagtagctcccgagttacaaagatggcggggggctttcccggagagggggggtttttttttaag

SEQ ID NO: 92686 - DNA, 382 bp, Glycine max
  Clone ID: PAT_MRT3847_54709C.1
attgttttgttaatttttgttatattatataattattatacgtttattatattacaccaataaagtgccgttggtcactggatctgtctggttttagagagagagagagagagagattcataggaagagaaaaacgtgtggttatgtgattgaggaagagagaactgagaaggcattgccaattctcccagcaaatctgaggccaccttcggtagagattgtttcattttcataacaaaaaaaaatgagctctaaccttatgagtgttgagctggtttgataaattttgtttctcttccaatctatttattccccttgattccttcggttcatctcaacaaacccttttgagtgcctacccttttgttgcaagttatggacg

SEQ ID NO: 92687 - DNA, 375 bp, Glycine max
  Clone ID: PAT_MRT3847_5470C.1
gttcttttgtgtgggactggggaggttaccttattaagtgttcatgaatatgtcacgcctaccttggctggtgctaaattgaaaagcttcctagctagtcataacatccccattactgatggtattgacagaactagtgcaactttgcaatctataaagttagcagagcgcgatgatctcaagagaaactctaagcacatgtctaatgttttgaggctcgctcctgaggacaacgcgcgtttatggtcacaacttaattatgttatctgtaataacctgcagatgcaagaagcttatcttgcctatctcaccaatgcgttacgagaattgtattcgcacactccagaggaagctctgcaattgacaaagaaagct

SEQ ID NO: 92688 - DNA, 822 bp, Glycine max
  Clone ID: PAT_MRT3847_54710C.1
acgagactcctttcaactctttctttgatcagttacaagattcaaactcacaacaactgttccctgctttttaaattccccccttcctattctattctctcctctgttacactgttgtgccatttgttctgatattcctcaggtatagagatggaagatgaggtaaaggtagccaaagttggagaaagccaaagagaagattcttcaagaatttttccatgtctattctgttcaagaaagttttacagttctcaagctttagggggacaccaaaatgctcacaagaaagaaagaacagctgcaaggaaggcaattcggctcgaggagcactcatgtgtttccttcccatccccactgccaacacctatggtttttgctccaacccatctagacatcataaaccctgcgatgttcatcactgcccatgcagcaaaactccctcatttgccaagccatcaaatttcagaacaatttgggtcaaatggtgcacctagatttggcaatgcactattttacgggggaagttcaataaatcggttccatgatgatgggaagagctctaacttcagctgggggaacacatctcaacatatacaattgataagtaacaatcaaaatcttggaatttggaataatggtacagagaaggatcaaaagcttgatttatctctccatttgtaaggtatagactgaaaatgagaaggtgcattattctgagttagggaattgcgggcctagtttttcttgagccaactgatagagttagttttggtatggaatactggttttcattttttgggttcatatttgtaccttacttcc

SEQ ID NO: 92689 - DNA, 405 bp, Glycine max
  Clone ID: PAT_MRT3847_54711C.1
cttattgtcttttgctctgtttactttcattttatagtgatcaatttggttgtatagaaatgcttggagatattattcctagaccccgcctagaaaccatcctaaagaaccacgagctccaccaccgtgaacttaaaccccgccagcggcacggacccagagggggggggcaaaacccggcgattaaaaaacgtttactcccagaatggaacaaaggcccggacataaacaaaaatgtctactttggcgaatccatcaaaacccaaaccggcccgtgggccttgaggaaaggctgccctaagccgggccccctcctgggccgcacggcccaagagcaaagcctggagcccaagggcgagaagggcgtgcgtgcatgcaccatcaccaaacaacaaatgttcgcta

SEQ ID NO: 92690 - DNA, 405 bp, Glycine max
  Clone ID: PAT_MRT3847_54712C.1
gttgttttccatgttgctggaagcaaaggaagactggtatatgcttcattgataccatatgctgagccggttgtgcaagctcaaagagctgaacttaactgtgacttcttccctggggagggtgatagtacatgagggagttgctcacattggtgaattgagatttggtgtctatgctccactgcctacaaaaactgatttggtggaaactcccaaggaatggcaactggatactaccttgtgacaaaatccctagtgagttgactacaactgatgagagattggtaggcacagaacatgatggatatgatccttttcttggtggaatataaaaatatgccagctgcatgatgcctctagatgaagaaattctctctaaggttgcacatgacatggttgacgaat

SEQ ID NO: 92691 - DNA, 504 bp, Glycine max
  Clone ID: PAT_MRT3847_54713C.1
ctgcgagaagacgacagaagggggagatgaatatgctgaagcagtagctgaattgctgaagtgaggatctgtgcttcttgctgaagattaatcctcaacaatttgaccatcgatcagctacagacttttacccaaatggaaggacaaataagtgattcattaagtaaacaacaatgtttgaagacaaaattaaccaacgagcttcaaaatgtccaacctccagaaatgtatgcattcgatatgcaatgcatttatagagtaccaccagtcattcgtgaaactaatcccaaagcttacacacctcaaattgtttcaattggccctttacacaaagcacgtgatgctggaaaggaagacatcatttttgagtcaatggaagagcttaaagtgaagtgtctcaaggcatttctaaatcgaacccaaatacctatgggaaccctttgtgtcacacttcaagcgttggagacaaaattcgaagtggtatgcagtgcgtataaatataac

SEQ ID NO: 92692 - DNA, 2323 bp, Glycine max
  Clone ID: PAT_MRT3847_54714C.1
cccacgcgtccgactgccctttccttattggcaataataatggcttcccttctctcatctaattctgctgctcctagtcattatgaagttaatcctaactcaagatttgaggctactttgatagaagaaacatgtagtgctcaaaaaccaaaagggaccaaaggaggagaaacttcaggttggaataataatgagagagaagagaagggtacgtgcttgagttggaaggatgtaagggtgactgcttctgtgggaaagaatggaagcaaatcaattcttcacgggctaactggttatgctaagccagggcaactcttggcaataatgggtccctctggctgtggcaaatctactctacttgattctttagcagggagattaggttcaaacacaaggcaaaccggggagattctgatcaatggtcacaaacaagcactgtgttatggaacctcagcatatgtcacacaagatgatacattactcaccaccttaacggttagagaagcagtgcactattcagctcagctccaattacctgacaccatgtccaaagaagagaagaaagagagagcagatttcacaatcagagaaatgggtcttcaagatgccattaacacaagaattggagggtggggttgtaaaggcataagtgggggtcagaagaggagagttagcatctgcatagagatcctaacacgccatgtctatactgcttcttgcttattggcaatgataatgggatccttcctctcctttatttctgctgaaaagaagtcattaccatgttaagaatgaacacaagataagaactgattttgcttcaagaaatcagtcgtgtagtaaagttttacgactttataagaagagttgttttttgtcttcttattaatctgattactttgaacccgcttctgctgcaatagagtgatttaagtctgatggctttccttgtgctccaatgatgaatcattctgttctgttactcaaaatcggttataacaattttgatcaagtcactgagataattgtaggaggaacagttacaatatccaccgaacaagctattcgaatactggtagacccttacaagtcaagtgaaatgagccatgaagttcagaaagaagtggcagtactaactgaaaagaacaccagttcaacaaacaagaagagaagacatgctggcttccttaaccagtgctttgctctaaccaaaagatcgtccattaacatgtatcgtgatctaggctattactggttacgccttgccatttatattgcattggctataagtttagccactattttctatgatctgggtactagttatcgctcaattcaggatagaggttcatttcttatgtttgtgtcttcattcatgactttcatgaccattggcggattcccttcctttgtggaggatatgaagggtttgaacgtgaaagactaaatggacattatagtgtcactgcatttgtgattgggaacaccttttcagcaatcccatacttgttgttggtttcaatcattcctggggctatagcctattacctacctggtcttcagaaagactttgagcactttgtgtacttcatttgcgttctctttgcttgcctgatgctagtagagagccttatgatgatagttgcaagcattgtccccaactttctaatgggtatcataaccggggctggaattcaaggaatcatgattataggtggtggattctttaggttaccaaatgatcttcctaggccattttggaaataccctatgttctatgttgcattccatagatatgcctaccaaggattgttcaaaaatgagtttgaaggactaagattcgctacaaataacgttggtggtggctacattagtggtgaagagattctaagagatatgtggcaagtgaacatgagttactcaaagtggtttgatcttggaatcttgctagggatgattattctgtatcgtgttctctttttgattaacatcaaaactactgagaagctgaagccaatcattgtatcattcatgtcatcatcaaggtcttcacctaagccaacaatacagatcatgcagaatcccaatgcaactcctttacaagaagttcaagtcatataaaattgaagaatctgtaggttcaagtgtggaggagaaaaaccattttcatcttcatatagatttgtgagagatcaagagatattaaaaagtctatcgtactccatcaaaacgaaagtagagaatatctagatttgtatcttcgtttatataaatgactagtgttcttaatatttctgctttctaatcattaactcaacgaaat

SEQ ID NO: 92693 - DNA, 278 bp, Glycine max
  Clone ID: PAT_MRT3847_54715C.1
cagaattcggctcgagagccaacaatacagatcatgcagaatcccaatgcaactcctttacaagaagttcaagtcatataaaattgaagaatctgtaggttcaagtgtggaggagaaaaaccattttcatcttcatatagactttttaatatctcttgatctctcacaaatctatatgaagatgaaaagatattaaaaagtctatcgtactccatcaaaacgaaagtagagaatatctagatttgtatcttcgtttatataaatgactagtgttcttc

SEQ ID NO: 92694 - DNA, 1208 bp, Glycine max
  Clone ID: PAT_MRT3847_54716C.1
ctcaaacccaaatccactcgtggaactttcaactgtgatcatcataacatcacaatcaattcatcactcaccccagcaatgaaatttgggaaagagttcaagacccatttggaagacaccatccctgagtggagggacaagttcctttgctacaaaccattgaagaagcttctcaaacagaaccttccttcaatcactaccgccatcactgatatacccatcaatctccctcttcaccttctccaacaaccctcttcgccacaacttcttcaggcttggttcgtgaggattctcaatgaagagcttgaaaagttcaatgatttctatgtggacaaagaggaagagtttgttattcgcttccaggagctgaaggagagaattgagtgtcttaaagaaaaaagcagccagggtgaagtgtacacttctgactgtgaattcagtgaagaaatgatggacatcaggaaggacgtggtcaccatccatggagagatggtgctcctcaaaaactacagttcattaaactttgcaggactagttaaaattttgaagaagtatgataaaagaactggtgggttgttgcgtctgccttttacacaacttgctcttcgtcaaccttttttcacgactgaacctctcacaaggttagtccatgaatgtgaggaaaatctagagctgctctttcccctgcaagcagaagtaatccaatctactccccctccagaaaatcagtctagaccaccggtagatagcgcaacaaatgccttacctgaggcatcctcaactcttggggatgaaactgtgtacatatatcgtagcactcttgctgctatgagagccataaagggtcttcagaaagcaagctccacctccaatccattttcgttttcatccctttttagcaaccaagatggtgatggtactggtgctgtaactgctgaaaactctgccgcaaattctccagctaccttgcagaatgaagaaagcgttggtaaagaggaaactgattctgtgtaggaaaatttttcttttatatctgcttcctgtatcttcttctgggtttctgtttcagccttgttggttgaaactaaatgaaatgtaatctttttgttcgtatatacaatcaataaatacaagtcaactagtaagatgtactttctttaacatttaccttgggaaataatacctgagctttgccatattaaaaaaaa

SEQ ID NO: 92695 - DNA, 436 bp, Glycine max
  Clone ID: PAT_MRT3847_54717C.1
aaggtttcccgtcatcactgtatgacgtcctccttctttgggggggggggggggtttactagacgacgggactacgagttgtaagtgcttcggctgttgttgtaactgtagtggtaccatcggcttagctggccaactgaggtggttcggcagccaccattacaacgagttacgaattattaccgtgaacaatttccgtaatggttggtagcgatgggttagtagggctattttaggcaagtacgtactcacaataagcgcttagcgtaaaactgttacaacccaacctactaggaggcggttaacaatattaagcaggctgccaatattgtgggttaacgtaaaggcaatggcactggtacacacgtttgccccgtaaggcataggctaataatagggggtggaaataccgaggtattaaaatgactaattttat

SEQ ID NO: 92696 - DNA, 188 bp, Glycine max
  unsure (1)..(188): unsure at all n locations
  Clone ID: PAT_MRT3847_54718C.1
acgcgcgaaccgccacacccgcgcaacgccgcggncgccaanccgacgaacgaaaacgggcagccggagccacacgaggaggaccagccgaaggacaccaacgcgaacgagccgaacaaggaagcgcaggcgaacgccgacaggaggaagaaagcgacggccaagncccagaagcccaacgaaaagca

SEQ ID NO: 92697 - DNA, 803 bp, Glycine max
  Clone ID: PAT_MRT3847_54719C.1
catggatagtgtgttggctgaactctccaaacaaggcatacccagcatccctcttggcaacaagggttcttctactcctaaaccccgtcgagatgtacgaccgaccccgccaccgggtcccacatagtagtggttttgatgatggggccagccagttacatatcaacgccctgttgactcttgtaattattttgtttctcaaatttccttcccaggttgcaactacagtggtagatttggctggaagttgggaccattttactttgcctggtggtccccgccgctacaccgaccactcatgatgtctctccttaagctgttgagcgatgatggttgatatgatatgatatcatcaggtctggtcatacaccaccatgatgcatctgagagaagacgacagaaggggatcctattccatggccacttgccaaaacaaaacattaaaaaaaaggttaagtttcaatgcagtgcatggcaccatttgttgaagctgaggactggccacgcatttgttgtggctgaaaagaaagataataatggtggtggggggttttgggttgtaagtgaccaactttggggtccacgtaaaaattgcatgacagggattggatgtcggttctgttggtgttgttgggtagggccccctagttgaggtgtctaataatggaaaaaagggtagttaggataatgttgtgaataaaaaatgagtcctggctttggtggatgctaacttgttcttttcccaatttaatttgttcacccagctaagttcaccattgagaacaacacttaatttgtgcatt

SEQ ID NO: 92698 - DNA, 255 bp, Glycine max
  Clone ID: PAT_MRT3847_5471C.1
tagaaatggatggtgggacaaatggagatcatgtgaaggtgaaagaacaaatctcaaatggtgtggcagataagaagtctactaatcatcttatgatgcctgatgatgcagaattggctatcgatgaacaaaagaaaatagaaggcagcgtagatgggtaccaatctggatgatgttactagtgaagttgacaattacatggatgctttaactaccatggaatcagaactggaaactgacaatgagtgtaaacct

SEQ ID NO: 92699 - DNA, 748 bp, Glycine max
  unsure (1)..(748): unsure at all n locations
  Clone ID: PAT_MRT3847_54720C.1
aacaggaataacactgtgatgtacgaacaacttgagagaagtctgagagtgagcagcactggggacgaagatgttaattgattgggtaggagggatcgtttgaccatctttttcttttgcctaaaatgaatgaattgaatgagatggttatacacagtgatggtgcgatcaattctgtgcactcaacacaaagtatgcagatctatacactcatgagagaaccaacagattttatatacaaaagctacaactctcatttatcttgttattcttgggcaagtagtttcatatcacattaaaagaggtgggatatgttgcaaatggtactcttcattcaacaaataccacacttcaatgaacaaatgggatgtcatataaatcataatatgactgacaatacaaccaacagtgtaatgcaactgcataataaacttatcataataatctttaccatcaaagttaattaaaaacatcacagttcataagttgcctcggtctcttctatagaacaacaataatacaacaactggacgaaatctatacactgcaatacataacatgcaagtctgataacacttagtagttctttaactgcataaactgcagttcagtaaatattaatttatctaagaaacaatgccattggcagtatttaaaaatatgannatnnttcatccatcatgaattactatctgtcacttgatctacaaatttnnnatatattgagtatgnnatattaaataatgac

SEQ ID NO: 92700 - DNA, 279 bp, Glycine max
  unsure (1)..(279): unsure at all n locations
  Clone ID: PAT_MRT3847_54721C.1
cncaagnnngcntntatnactagatgcntggntaatagcntccnnttgntgnnnccggttntatanttgggtattttgtcataaaacaaantgcnacaattcatcatgtcacggtaagttctagaagttcaaaatatccanatatanaacccgnacatccaaatcaatatgtgganattnngatnaaccgngatcacaggttgncgcnccttnaaaccggagacatgagcaatcgtgacttggtttnaagaaattctcagtttctcccntatgttcttt

SEQ ID NO: 92701 - DNA, 1268 bp, Glycine max
  Clone ID: PAT_MRT3847_54722C.1
ggtaattggtgaacataatatcatctccttcctcctcttcctccttcaagtcgaaaattgaaacagaattaaaaaccaaacactaccctgttgctttggtgatagcttaaaactcaacaagtaaatgattagactaaatgtctactgttcgctaattccaagtgcaagacaagccagacctggcagcagctatggctccttgatcatccataatcacaaagcttcaaaattttctcatcggatttccatcaaggctaaggccataaaagatgagatggacggagaaacaagcggatcttcaggacgtagctgggatcctgggttggaaattgaggtcccttttgagcagaggccggtgaatgagtactcatctctaaaggatggaatcttgtattcgtggggtgaactaggtccgggatcgttcttccttcgccttggaggtctctggctggcagtatttacagttcttggggggccaattgcagctgcaagctttaatccttcaaaagagcctctaagatttatactagctggtggaacaggaacactcttcagagtgtctttgattgtcgtgaggatttatctgggttggagttatgttggtgatagacttctatcagcggtcatcccttatgaagaaagtggatggtacgacggacagatgtgggtcaagccgcccgagatcctagctcgtgatagattgttgggctcttacaaggttaaaccagtcgttaaattgctgaaacaaactctagttgggacaggagcattgcttgttacaggagttatgctatttatctttgctacaccattggagaatttttttcgaactacctttaccaaagaagaaattaaatcaactgttcaagctcccaaggttaacacaaagctcttaagaaaagaggagctgcttaaattaccagtcgaggtgataactgatgatgatctagcagctgctgctgctgaggctgctgatggaagacctgtctactgtagggataggtattatcgagcattagcaggagggcagtactgcaaatgggaagatctgctcaaataaaggataaaaaagaggcagcatatgtagtcaatttcatttagtaaaagcagtttgcaatttgtggagactctggcccaaggccatattctattagttgagaaaattgttttaagtcattcaaagcaaagccaaagccagaaatagatggagaagaaacatagatcaaacgtaacattaacaatataaaacatgtcataatattcatact

SEQ ID NO: 92702 - DNA, 575 bp, Glycine max
  unsure (1)..(575): unsure at all n locations
  Clone ID: PAT_MRT3847_54723C.1
ggaacactcttcattgtgtctttgattgtcttgaggatttatctgggttggagttatgttggtgatagacttctatcagcggtcatcccttatgaagaaagtggatggtacgacggacagatgtgggtcaagccgcccgagatcctagctcgtgatagattgttgggctcttacaaggtactggacatcacaaagtatcacagcattgcttgaattcagaaagattttggatacagactagaagagcaatatgttaaatttgatttcttgcagcatgattcacgtatattccatgtccccaggttaaaccagtcgttaaattgctgaaacaaactctagttgggacaggagcattgcttgttacaggagttatgctatttatctttgctacaccattggagaatttttttcgaactacctttaccaaagaaagaattaaatcaactgttcaagctcccaaggttaacacanagctcttaagaaagaggagctgctttaattaccagtcgaggtgataactgatgatgatctagcagctgctgctgctgangctgctgatggaagacctgtctact

SEQ ID NO: 92703 - DNA, 733 bp, Glycine max
  Clone ID: PAT_MRT3847_54724C.1
cccacgcgtccgttcacgcgttctcagggttggagttatgtcggtgacagacttctatgagcggtcatcccttatgaagaaagcggatggtacgatggacagatgtgggtcaagccacccgagatcctagctcgtgatagattgttgggctcttacaaggtactggacatcacaaagtatcacagcattgcttgaattcataaagattttggatacagactagagagcaatatgttaaatttgatttcttgcagcatggttcacatacattccatgtccccaggttaaaccagtcgttaaactgctgaagcaaactctagttgggacaggagcattgcttgttacaggagtaatgctatttatctttgctacaccagtggagaatttttttcgaactacctttaccaaagaagaaattaaatcaactgttcaagctcccaaggttaacacaaagctcctaagaaaagaggagttgcttaaattgccagtggaggtgataactgatgatgatctatcagcagctgctgctgaggctgctgatggaagacctgtctattgtagggataggtattatcgagcattagcaggagggcagtactgcaaatgggaagatctgctcaaataaaggataaaaaagaggcatatgtagtcaatttcatttagtaaaagaagtttgcaatttgtggagactctgtggcccaacgccatattttattagtttagacaattattt

SEQ ID NO: 92704 - DNA, 357 bp, Glycine max
  Clone ID: PAT_MRT3847_54725C.1
attggatttgaacagtcacatagcattatcgctggtccgggtgggaaggaccatcgccttcaaccgccgacgcgtcaaatcctaggcaatggagttaccactggcagacgtgagcctgctgagaaactctatagacatattcatagcgatactggggggagtgctataactgatgggtggaatctatatctacgcacgccacgttcgtcgattccctttgcactcactggacgacctctaactaccgtacgctttcgtaggggcgctcgtggtaatgactcagttgtgacgcgaacattaccaatcctctaatactccgaggatccgatccacagaaaacgaaaatatccggatcaa

SEQ ID NO: 92705 - DNA, 384 bp, Glycine max
  Clone ID: PAT_MRT3847_54726C.1
ggggggggcggggggcggggggggaacctatagaggggccgccctagcaagaacaaggccataagacccgatagccagagtatagcaccaagagagacctagagaaacccacgtatccccccagcagcagcagcaacagacacgcgcgctgtataaagtagacccatgctggcgttagcgaatgcgattgtaagaccatgaataggtggattaagccattgcaacgggcgatttattttggcctcgttcacggcattggtgtaccgaaatattagttggaccgctaaagatgcgaattgttttaggacccaacatttgcgacaatgccgatggcagtggcgatggccattgcacttgacgtttaacacttcgtatcgtgttggt

SEQ ID NO: 92706 - DNA, 192 bp, Glycine max
  Clone ID: PAT_MRT3847_54727C.1
gggcttaaaaactggttcataacggggttgaagtgttccaacaattactgtcacataatagttaatgaaacaagtgcttgttttgaggaacacaatagtaaatccacgcatttaaatttgaagtgcttgggagatacacattttatttgcagcacacgacattgcattgtgaaaaacagacccttgggggaa

SEQ ID NO: 92707 - DNA, 391 bp, Glycine max
  Clone ID: PAT_MRT3847_54728C.1
gggggacaaaagctttttattcacaaaaccccaatagttttccttttataagcggaaatgggcgattcaaattccttttttttaagaaaccccccaaacccaaggcacccccggtttaaaacccccggaacaaatcctaaaacatttgaatttgcaagggggggccatgacccttttattttaaaactttaaacacaacacatactttttttttatggagcccggttttaccgctatttttgcttgaaggttatgcatgttgatctcccttgcacctgcatgggtcccaagggcattttgatcccaatttgcagcccccgtttttagttggaacccccatttaagccccctcgaatggggcctttaccggcccaacaccaaaaactagagt

SEQ ID NO: 92708 - DNA, 233 bp, Glycine max
  Clone ID: PAT_MRT3847_54729C.1
gggaaaaaaaaaaggagccctttactacagggaatccactttcccaggcagcatttacagaaagaaaagccctacaacaaatgttttacaatattttatcgcaaaagaggacttctttataaccataacctggcataaaatccacccccctatcagaaaaaggcaaatcccgacccctccaagactgtggggactcatttcttttggaacaaaagaaaccccctttttttatt

SEQ ID NO: 92709 - DNA, 318 bp, Glycine max
  Clone ID: PAT_MRT3847_5472C.1
ggcagatgagactatgtggctagatcagctgtcaaccgcatttgtgaacagacatgatcagggatacagccttatttgtaaacgcaggtaggtggttacttacacatagtttgccccgactggtatgctgcctgagatcaatgcgatgaacactatgtacggaaaagtgtggagcttcacgatcgacaagacagtagcaatggtcgtagaaccggtgtccgctgagcctgagatcaataatcacgtgcgtaagaagacgaaatgccatgctgaccatgctgataaccaagacaatgtcatcgacaattgccagctaca

SEQ ID NO: 92710 - DNA, 219 bp, Glycine max
  Clone ID: PAT_MRT3847_54730C.1
atagagctctagcttcttcgaaagccgaaccttaaacacaaacgccaaatctagcaactattgagcttttgcttcttcggttgttagctttgtattcaaattccataaacatcatgtgcacagttccccagaagatctaacaaggatctccactaaggcaaacctcagttccaactgtgtttgtatacctctcacctactttaagaccatacccatatt

SEQ ID NO: 92711 - DNA, 142 bp, Glycine max
  unsure (1)..(142): unsure at all n locations
  Clone ID: PAT_MRT3847_54731C.1
taanttgnagtcnttacncntctctaaggaccgaattaaagtgtgnagattggnatggaatgcacnccagaccnccacatgttcaagtttgcatntttctctcggggttgggggtcaaatnggtctcagttttactgaggaa

SEQ ID NO: 92712 - DNA, 2257 bp, Glycine max
  Clone ID: PAT_MRT3847_54732C.1
atgaacgaatcttctgctagtaacatggagagttatctctacctccatccaagcgaaaacccagctatcgctcttgtttccccagtcctagactcaaccaattaccactcatggagcaggtctatggtcactgcattgagtgccaagaataaagtggagttcatagatggcagcgccccggaacctctaaaaacggacagaatgcacggagcatggcgtagatgtaacaatatggtcgtctcgtggatagttcattcggtggccatctccatacgtcagagcatactttggatggacaaagccgaggaaatttggcgcgatctgaaatcaagatactctcagggagatcttttacgcatatccgaccttcaacaagaagcttcgacgatgaagcaaggtacgctcacagtaactgagtatttcacacgattacgcgtcatttgggacgaaatcgagaactttagacccgatcccatttgctcatgtaatataagatgttcctgcaatgcattcaccattatcgcacagcggaaactcgaagatagggccatgcagtttctacgcggtctgaatgaacagtacggaaatatacgatcccacgttcttctcatggatcctatacctgctatctccaagattttctcctatgtggctcaacaggaaaggcaattactgggaaacgctggaccagccgttgaaaacaaagctaacgaagatcaagctcagcaccacgaggctcatgattctgttcgtttctcccccgagcagtacaaggcactcctagctttaatccaggaaccatccgcaggaaacacgacaatctctcaatccaaacaaatggcttcaatctcatcatgtatcaatactccgacaaatccaggtatgtccctttctctcagaacaccatgcgtctcctggatattggattcaggagcaacggaccacgcgacttactccctacgcaaccttcattcctataaacaaatcgatcctatcacggtgaaactcccgaatggccagtgtgtttgtgcaacccactcaggaattgtcaagctttcatcaaacatcattttacaagacgttctttacattccttcctttacgttcaatatcatttcaatatcaaaacttgtgtcttccgttaattgtgaattgatattctcctctacatcgtgtgtattacaggaagtgaacagccatatgaggattggtatagttgaagcaaaacacggtctctaccatttaatacctgctcagctgaccaccaaaaccgtaaactccactattactcaccctcgatgtaatgtaatacctattgacctttggcattttaggttaggccacccatccactgaaagaatacaatgtatgaaagcttactatccccttctcaaaaataataaggattttgtttgcaacacgtgtcatcatgcgaaacaaaagaaattacctttttctcttagccattcacatgcatctcacatttttgacttactgcatatggacatatggggtccgtgctctaaaccatccatgcatgggcacaaatacttcttaactatagttgatgattgctcacgctttacatgggttcatcttatgaaatccaaagctgaaacccgacatataatcatgaacttcattacattcattgaaacacaatacgatggcaaggttaagatcatcagaagtgataatggcattgaattctccatgcatcattactatgcatcaaagggcatcatacaccagaccacgtgcattgaaactccagaacaaaacggaattgtagaacgcaaacaccagcaccttctcaatgtcacacgtgcacttttgtttcaggcaagtctaccaccaagcttctggtgttacgctttgccgcatgccacttacttgattaattgtattcccacgccgtttttgcataatgtttcaccctatgaaaagctgcataaacacccttgtgacatttctaaccttcgtgttttcgggtgtctatgttacataaatacactcaaggcaaaccggcaaaagcttgatgctaaggctcatccatgcatattcatcggttttaaaatgcatacaaagggatatcttgtgtatgatttgcactctaatgatgttagcatctctcgaaatatcacattttatgaggatcattttccttatctttctgaaactcagcatacacacttagaatatccagctccctcaccggaatccttctccgacagaaacgatgacccacaaacagaga

SEQ ID NO: 92713 - DNA, 422 bp, Glycine max
  Clone ID: PAT_MRT3847_54733C.1
tcgtactggttgggacaacacattactgagtaaggccaacgatattctgtgctgcgatcatgctaggttggatggttggattaccatgcaggttatgagcaagatggcagacatgataaacagtctttgtggtggtgatcaaaaattgaggcagtgaaaggacacacctgctgacggctttgatgttcacggatggtaattagcaaagaagatgtttggagagccgaatgagggatacgtactggatttccgctcacagatatctgcaataacatcattaacgagatgctcattagatatagctatgaaaaattactgcgccaggctaaagctcataacatgtttgtacaatcctataaaaaaagcgctgatgtgcacgagtatggagacgatagctgaatgagtgccaatgactgagtcaa

SEQ ID NO: 92714 - DNA, 492 bp, Glycine max
  Clone ID: PAT_MRT3847_54734C.1
tgcttgtcatcaaagttaaattccaagagaatgaagaagatactagtatcaatcaagtttctgctttgtttatctctgctctgtgttttgttcttatcatttcctttactccttcaatccttgaagccatccctcatgcaattcttcagctacatggttgaaaaaagctacatgttccttctctgcaatggcctccttcttgttttaatagccatcaactctgctccaatcaatgcctcttcaccaccaacaactgaacgtgctgctgtagctgttcacatagaagagaaaagtagccagttagaatccaaggaaccagacattgcagttgcagcaccaattgctggtgaggaaactgaatccccacataaagaagaaaagattttggtgagagtagaacaagacaatgtgctatcagattcccaagaagaagaagaagaaaaagacctagataccattgatgaagatgtgcatgacactgaagagttaaat

SEQ ID NO: 92715 - DNA, 900 bp, Glycine max
  Clone ID: PAT_MRT3847_54735C.1
gctacagacgttcacatcccatagatgtcaaccatttttttggtaaaaaaaaatataggtaaatatgtgtgtagagaagtcttacctcttaagcataactaggtgtccacattaactatatttatatcaaaatatgaaacttattttacatgtaaatcctaaaaaaaacgaacataaaattggtgctccttaatccacaaagtaaacactaaaaaagactaggagggaggttttagttgcattcactggggcactatatctgacaaagttaagaaattgagtgagtagtcttcgcaacctggctcattagcattgaatctgccaagagagaaaggtggtctttctggttggcctaccattgctgattcgttcttcaacatcaaaacaactgaagacatggttggcctatcatatgcatcttcttgaacacatagcaatccaatatgcatgtatctcaaaaactcatctccggggcatgaatcaactgacatgggatcaattagttccaacccctttccttcattccatagatgccatgcatatgatagaaggcttggagtcttgttagagtgatagaaacccgcgttacgtttccctgtaattatctccagcaatagtacaccaaacccaaaaacatcagactttatggaatataatccctccattgcatactctggagccatataaccatatgtgccaactattgtagcagtgttagcttcaccttcacttcctgcaaatatccttgccattccaaagtctgagatctttggattcatgtcatagtccaacaatacattacttgcttttaggtctctatgaattattttcagtcgagaatcttcatgaagataaagtatcccccttgctattccatttattatatccaggcgtttagtc

SEQ ID NO: 92716 - DNA, 499 bp, Glycine max
  Clone ID: PAT_MRT3847_54736C.1
ctaatttctacattttttttattaagggatggctgggattggcaagggtagtgttgaatttgaggatttgttaccggtgatcgccggtaaactgggtggtgagggtttgataaaggagctttgtaagggttttcggttattaatggataaggagaaaggggtgataacgttggagagtttgagaagaaactctgctatgatgggtttgcaggatttgaaggaggaggagcttgcgagcatgattgagggaaggggatctcgacagtgatggggtcctctctgaaatggagttctgcgttctgatgttcaaattgagccctcagttgatgaaggactcgtggttttggttccaacaggctttgcattaggaactcaacaacaaccgtaccaaatctttagcgcaaaatcataccatgatctttttcttctacccataaactcaaccttatagttctgtttgaaatactctcgtgtttgctgacggattgggattttttgt

SEQ ID NO: 92717 - DNA, 571 bp, Glycine max
  unsure (1)..(571): unsure at all n locations
  Clone ID: PAT_MRT3847_54737C.1
ccacgcgtccgcttgatgactgcgctgcagctcgtgatgaagaagtcaagtgctcatgatggacttgtgaagggtcttcgcgaggctgccaaggccattgagaagcacgctgctcagctttgcgttcttgcagaggactgtgaccagccggattatgtcaagctggtgaaggcgctctgtgctgaacacaatgttcaccttgtcactgttcctgctgctaagactcttggcgagtgggctgggctttgcaagattgactccgagggcaaggcaaggaaggttgtaggctgctcctgtgtcgttgtcaaggactacggtgaagaatctgagggccttaacatagtgcaggagtatgtcaagtcgcactagatgtaacacgtttcagtaatactctacatttggatctgggcttaatattatgcttgcgtcttgcgcttgctaggagattaggacaatttactacaagagcccatgaggatatgagcaatttggaattctaaatgttttggttatggtgctgtcatctggttntaattcaaatcgataagagatgagcatattcttgcttaag

SEQ ID NO: 92718 - DNA, 333 bp, Glycine max
  Clone ID: PAT_MRT3847_54738C.1
tggggctggggatttggcaatacttggtttggttttaagcacccaactggtactggctggtttccattggtgcttaccaccaccaattaggtgggtattgcgacaaaatgtggaattaataaaaaagaaattttccaactttaccaaactaataaatattatggagtccaattttgggattcttctgatctttatggtggcatcaaatccatgctcaccaggcaccttttccatctccctctcccaccatttcccctaacaacaattgaccatgcccagtggccatgaattatgtgcaaacagccccttggaacagctcttcctgccaaaact

SEQ ID NO: 92719 - DNA, 291 bp, Glycine max
  unsure (1)..(291): unsure at all n locations
  Clone ID: PAT_MRT3847_54739C.1
ggaagaagaagatggcattgggtgttcctgctcttcccctgacatacgtggcncacgntctggnacttgntgccannnttcttnggcgnggtcngggnccncattttaaggggngccttngccttgggatnntaananaaaggncntcnaacttcaaanctncatcnagtnctaatngnnattggcttancnagtccttgggggngaagctattataagctacaaagcattacccctgaaagaaggaagtgaagaaattgatacaccttgttttccangccatcgcattaa

SEQ ID NO: 92720 - DNA, 268 bp, Glycine max
  Clone ID: PAT_MRT3847_5473C.1
cgttcaatatcctagtataccttaatacatagttcaagacactatcatgagagcacggttcccattactgttgctgggacttgcgttcctggcttcagtctctgcctcattcagcattgcttactgggaaaaagagaaccccattacacaacaagtgtctccagagttgcaatagcgcgagagactcgtacaggaaccacgcatgcgacgctcgttgcaagctccttacggtggagtgagacgaagtgcagagggtgaacttccacga

SEQ ID NO: 92721 - DNA, 481 bp, Glycine max
  Clone ID: PAT_MRT3847_54740C.1
tttacttctagtaatattaataaatgtgaggtatagcatagaagtccaactactttgatttttttttttttttgaggaattttttttcggaagcatcttagtctatgtcctcaaagatttaagtaatatttatttaataaaaaaacatgtaattggtgtgtcatcaaataaaaaaaatgaagatatttgtctgacttggaagccttattttttatttatttttatggcctccagtaaacaatgatgatgggacttttcaatcaagaagtacataatgtggtttatttttgttaaaatcttgtaatgttgattttaaaattgggactttccccccaaagtaaatgttacagtgataagacattgtttctaagttatccgggagagatgcctacaaggactctgatattaacgagaaataagtgttttgataagttaaagcaatggaggatacttttgtatggtactttttcctcaatcctca

SEQ ID NO: 92722 - DNA, 260 bp, Glycine max
  Clone ID: PAT_MRT3847_54741C.1
acgagaacaagagaatgggttgggggcaatagtagaaagaaagaagagacaggaggacaagttggtaatttggacttaaagagagggacagtttcgttcgggttgtggttgggcgcggtgcgcagccaatcccatcgcgtcgccaccctttctttcatttttcatcattcaagccaaagtcgttcatccgtctcgccggctatgtcaaaaccaaaaccctaatcatgaatcgtctacataagaactaggagtccctcaaa

SEQ ID NO: 92723 - DNA, 178 bp, Glycine max
  Clone ID: PAT_MRT3847_54742C.1
ggagatcaccaatgtcagcgagtatgaagctattgctaagcaaaacttgcccaagatggagtttgactactacacctctggcgcataggaccactgtactctgcacgagaactaaagtgccttttccacaattttgtttcggtcacgcattcttattgatgtgagcaagatagacatc

SEQ ID NO: 92724 - DNA, 764 bp, Glycine max
  Clone ID: PAT_MRT3847_54743C.1
ttttcttcacatcacaatatcacctcaaccttagctctcggtgcttcgctgcttctattttatttgatattgcagtttgaggtgtttgacatgtgcgtgcctgcgtgcttattccaaaccaaaccaaacctgcagtacgagacaagattaatgttgtgatttgtgtgtgacgtacattccaaaactttcaatagttgaataatggctgttgagacttctgataaaccaaatttacctcatgattttgatgatgatgatgatgggccagtaatttacaaaaggtactcatcatctaagaaaaatcaattgcattcagaagtaaggaagtcaagttctcacagtcatgctggacagtcatatagacagatttctgatgcaccttctttgaatggccaaacttttagcatgcagaaaggtagtactgtcccttctcctaagccgtcacccgtgaagccttctgtagctatctctaaagcttcaaaatctcttgtcaacacctcctctacgaagttgccagtagcaaactcaaaagcaccttctttgggagataaacagaaaatgtccgttgatgttaaggtggaaccaaaatatattgaacgctgtgctaaaaattttgttgaagattcagaagatgatgaggataataaaccattgagtttttagattgaagaattctaaccatgataacaaagcgacccctgttgttgtcaaaaaatcttctgaagactctgatgatgatgtccctttggcaaaaaagttatacc

SEQ ID NO: 92725 - DNA, 420 bp, Glycine max
  Clone ID: PAT_MRT3847_54744C.1
gaccaccgacaggatgctcattaggaactctcttcattcacatcgagctgatttccatatgtcggagaggcctagttctccccctcttcttttcctgaatcctcaaaagtatcacgcattcatcttacaatactcacaataaaactttcatgactctttttcaaatatcgatagcacacgctattattgatattaataactactaacgttttactacctttctcccattcctgttactccttacatagaccctattacagcgttactatcaatacaatttcgctaaaaccacataaattaacaaaagagttaatgatatccaataacactttcattcccatgttatttacatatgcacaaacaatacatatctttcatgaatatgcacactttgccttacgaagcttaatgtatttcttt

SEQ ID NO: 92726 - DNA, 758 bp, Glycine max
  Clone ID: PAT_MRT3847_54745C.1
ggttcgcgcccgcccttcagtctgcgctcctagacacaccgcggaggaatcagagctagttgatcctcataatcagtctctcagactctatcgtgtcattttgaacatgccgtcccttcaaactgcactgcctcctgagctcgccaacaatgccactaggctttaccgtgaatgcctgcgaagagctaaatatattggtcatcggaaacataacacggagcttcttgttgatttggtgagacaacagtttaagaaaaacatgcatgaaacagatcccgagaagattcagaagttaaaggatgatgctgcgagggggcttatcaatcacatattgtatgagtcagagcaaatgacaggttctaaattcagcaagagcaaacaacctaatttgctttatcccaaatgatccagtttatccatcagttcaaggtttggcagatcaagcatgtaaaaaaaaagccttccaaggttttatgatggttattggtcatgttaaaatgttatttaaaacaattgtaagaaataggatgatggtttttttgccggtgctatttttcaaatcaatagtgccctcaagattcttaaaactactttctactttgtaccaaatgattcagtgtctatcaattcaacatttggcagcttatgaatccagaaccctgtctcctcgtggatgatttttttttttttttttacatttacctttgaagaagtaacactgatctctttggcttttttatttttcaattttagttttc

SEQ ID NO: 92727 - DNA, 587 bp, Glycine max
  Clone ID: PAT_MRT3847_54746C.1
tgttgttaatagttcagacatggataatcagaaattacccctgcagagcttgtctagtggtcactcgtggtatattagttgctatgctatctatcccaccttcgctgatttcagtaacggatccaaaagatttgagattgggatttgatgtgcatttgatagctattgcattgcaagcaattttcggtgtatcccttcgaagtattgttcatatatgggtcatgagcaagaaggggcctctgtatgttgcaatgtttaagccaattggaataatctttgcggtcatcatgggaattgcgtttcttggtgactctatctatcttggaagtgttcttggagcagccatagtggttattggattttatgctgttatttgggggaaaagccaagagcaagcaaaggaagagtgtgaagtctatgactcggaatcatactcgcccgttgtccctcttttgaagaagaagaaaatggaggaatagaatcatagtaatcattttgtttccctagcttcaagataaatgtctcatgtaatattttgaaaacaggttgaattaataaaaaaatttagtcataattctgttgattcg

SEQ ID NO: 92728 - DNA, 447 bp, Glycine max
  Clone ID: PAT_MRT3847_54747C.1
ggactatcagacatagcactagcaaagttcatccttgaattaaaaatggcctcagctcgtaccaggctatcacattctcatccttggctttcaaggccgagaatgtgggcccattgccctcctagtgagaatgctgaccataaggaataccgtgaccaaccaggactcccttggatgcccatggtaccaccaacaccgagtcaattactttggctccattatttgcacagccccaggcctatctagacaattagtaccctacagagtacggttaaaacactgctgatctgtctacatacccacattcgttctcaacgaacctctatcttttattgatgcactacaggtgggccatgctcggagactacggctgcccttaccctgactaggtgactggcaacgagccgaatatcagtaaagccgtttggttcaaggcacagccccata

SEQ ID NO: 92729 - DNA, 1964 bp, Glycine max
  unsure (1)..(1964): unsure at all n locations
  Clone ID: PAT_MRT3847_54748C.1
cccacgcgtccgtggctgcgagaagacgacagaagggggagggagctggagaggatcgggatccgtgattttgattcatctgtacttgtagagcctttttctactgcaaagggatggatgacaagtgctaactaagcactttcttcttcttcttcttcatcccttcatcgccaaacacaatgaaggaattgggcgtggttgcaatcctcttttcaatagagttcttggacgttatcgtctacactgtaagcaaagcagccatgaagaagggcatgaatgactttgtctttgtcatgtactccaatgccttcgcaacttgcctcctccttcccataaccttcttcttttacaggaaaagacctcttcctccactcacatatttcatagttgcccaattgtttattaatggctttttaagttgcagtgttcagatgctcaggttttttggaataggttacagctctcccactttggccactgctatgtctgatttaatccctgcttttaccttcattcttgccatcgtcttcaggatggaaaaattggattggaaaactaacagtactcgggccaagtccattggcacattggtatcaatcactggagccttaataattactctgtacaaaggccaagcagtcataaagaatcatccatcaaataaattgttccccaaaaaacatgtttcatctgaacaatttgactgggtattaggggcagtgttgcttgcgggtcatagctttgttctctcattgttgttcatagttcagacatggataatcagaaattaccctacagagcttgtgatagtgctcactcgcagtacattagttgctatgctatctatcccaccttcactgatttcggtaacagatccaaaagctttgagattaggatttgatgtgaatttgatagctattgcattccaagcaatttttggtgtatcccttcgaagtattgttcatatatgggtcatgagcaagaagggccctctctatgttgcaatggttaagtcaattggaatcatctttgcggtcatcatgggaattgcatttcttggtgactctatctatcttggaaggcatacgtttctttcatgtcttaatcatatgaaaaattggagtgtgcttggagcagccattatttgggggaaaagccaagagcaagcaaaggaagagtgtgaagtctatgatgactcggaatcatactcacccgttgtccctcttttgaagaacaagagaatggaggaatagaatcatagcaatcatttaatttctctagcttcaatataaatgtctcatgtaaaattttgaaaacaaattgacttaataaaaaaaattcatcaatgggtcatgaggaagaagggccctctctatgttgcaatgtttaagccaattgggcgagaagttgtcggaagggatcccttcgaagtattgttcatatatgggtcatgagcaagaagggccctctctatgttgcaatgtttaagccaattggaatcatctttgcggtcatcatgggaattgcctttcttggtgactctatctatcttggaagtgtgcttggagcagccatagtggttattggtttttatgctgttatttgggggaaaagccaagagcaagcaaaggaagagtgtgaagtttatgatgactcggaatcatactcacccgttgtccctcttttgaagaagaagagaatggaggaatagaatcataacaatcatttaatttctctagctttaatataaatgtctcatgtaatattttgaaaacaggttgaattaataaaaaaaatttagtcgtagtttggtgcgaaaccttagtctaatttgataagatagtaaaaaataatcagcttgaaacatacaaaccagtttatagtgtgatcaataataaataatcaaggcaaggtatgctaagccttttctgttaaaaaaaaaaaaaagtatnaaagggaaaaga

SEQ ID NO: 92730 - DNA, 734 bp, Glycine max
  Clone ID: PAT_MRT3847_54749C.1
aatcgacaatcctaatggttccgacaaagctcgacctgagtgtgatctcatgatgtttctgctctaactatgtttgatttggatacccaacaacaaaaagagtgttgtcgtgttgttgtagttaatagtaataggactaagtaagagtagtggaaaacatgaacaacagcagtggcggaggaggacgaggaactttgatgggtttgagtaatgggtattgtgggaggtcgccattcacagtgtctcagtggcaggaactggagcaccaagctttgatcttcaagtacatgcttgcgggtcttcctgttcctctcgatctcgtgttccccattcagaacagcttccactctactatctcgctctcgcacgctttctttcaccatcccacgttgagttactgttccttctatgggaagaaggtggaccctgagccaggacgatgcaggaggactgatggaaaaaagtggaggtgctccaaggaagcatacccagactccaagtactgcgagcaccacatgcaccgtggccgcaaccgttcaagaaagcctgtggaatcacaaactatgactcactcatcttcaactgtcacatcactcactgtcactgggggtagtggtgccagcaaaggaactgtaaatttccaaaacctttctacaaatacctttggtaatctccagggtaccgattctggaactgaccacaccaattatcatctagattccattccctatgcg

SEQ ID NO: 92731 - DNA, 382 bp, Glycine max
  Clone ID: PAT_MRT3847_5474C.1
ctcgagccgaattaataaaaaaagccacgaggaatattatattatatataattatggtttttatgactttagaatcatgcgatttgtcaaagatatttggcgactagactatattaaggaaaagtatttggtcccgacttttcttattttactttttcttacccttttccccgtctttgaatgaacaaaactagtttcttgcaaacaaacgtagttaatcggatttattttatttgttttattaattattaatgaatgagagattggaacctgaggttgagaattgctttttttattttttttttctgtaatattaattcatgctctgagctgtgcgcatgtgtttgattcacacagcagaaactccccccacctttcattt

SEQ ID NO: 92732 - DNA, 543 bp, Glycine max
  unsure (1)..(543): unsure at all n locations
  Clone ID: PAT_MRT3847_54750C.1
ggctcgagaaacaattcagtggtttgtgttactacgtagaatgggttcgtcgccgaattcaaagcccaagatcattagaggctccgcaggctatgtgttggaggatgttccacatatggccgattacatccctgatattccaacatattctaatcctttgcaaaacaatcctgcttactcagttgtcaagcagtatttcgtgcacgtcgatgacagtgttccgcagaagataattgctaataaagatagtccaagaggggtacattttcggcgtgcaggacctcgtcaaagggtgtatttcgaatcagatgatgttcaggctgcaattgtgacatgtggtggtctatgccctggcctcaacaccgtcattagggaactagtatgtgcactatatcacatgtatggcgtcaagaaaatcttgggaatcaatggaggatacaagggtttttatgctcacaatacaatcactctaactcctaanagcgtgaatgacatacataagcgtggnggaactattcttggntcatcacgaggtggacatga

SEQ ID NO: 92733 - DNA, 318 bp, Glycine max
  Clone ID: PAT_MRT3847_54751C.1
gtcgcatgcacgcgtacgtaagctcggaattcggctcgaggtggcccagggaggcgtttcgggtactcacgatgaggtcgctggtggttgtggtgttggctctgttagccgtcagtcaagcagaagaaggagccaggcttttggcctccaaatcattgctcaacagatacgctgtggaagggagggacctgaccctacagtataacatctacaatgtcggctccagtgcggcattagacgtggaattatctgacgattccttccctccagaagacttcggcattgtctctggtatgctcaacgtcaaatgggaccgga

SEQ ID NO: 92734 - DNA, 228 bp, Glycine max
  Clone ID: PAT_MRT3847_54752C.1
tcctctagagcggccgctttttttttttttttttttttttttttttttgttcaatattgtcctagtcaaggtcttaattatcatagagctaaaactcattaccaagagttgatggattccttcttaattaatcattaattctacaaaatcatattcaatattcattcaactagtataccccttctgtcgtcttctcgcagccgtacggacgcgtgggcggacgcgtgg

SEQ ID NO: 92735 - DNA, 318 bp, Glycine max
  Clone ID: PAT_MRT3847_54753C.1
gtggctcaagttattttggaggacgttatatctggaaggagcaagctgaaaagggaagtcctagttttcatcctagatacaatgctggcagcatggtgatgccatacgtacgatatgtttcctcaccgaatgaacactgactattgtgccgcgtacttgggaggtgaaatgcgcaagttggtggcctgttgtggcagcacacaacatccctggctaagagaccatccctgtctagcgcgttatacccacaatggcacccactcatggctaactctatagaggagactccaaatcagggaaccaacacgctaactttta

SEQ ID NO: 92736 - DNA, 1115 bp, Glycine max
  Clone ID: PAT_MRT3847_54754C.1
caactgatacggctgagagaaactgatatgaagtgaaagacagacagatctgaagtgtgtgtagagttaacaagaccagagagagagacgaagccaaacgaaacctaaataaaaccttgctctttttccacgccctagctcattttcttctccgttctcttctctctgttcctcactcactctcatttattcaccatgacgaaacaacaagctaattggtctccatacgataacaacggaggatcatgtgttgcaattgctggagcagattactgcgtcatcgccgcggatacgaggatgtccaccggttacaatatcctcactcgcgattactccaaaatctcccaactggctgagaagtgtgtgatggcttcttctggttttcaagctgatgtcaaagctttgcagaaggttttgtctgctaggcatttgatttatcagcatcaacacaacaaacaaatgagctgccctgcgatggctcagttgctctcaaacactctttattacaaacgcttctttccttattatgctttcaatgttttgggtggccttgacaatgaaggaaagggatgtgtcttcacatatgatgctgttggttcctatgagagggttggatatagctctcagggttctggatccacacttattatgccatttcttgataaccagctgaagtctcctagcccactcctgttacctgcgcaggatgctgttactccattgtctgaagcagaagcagttgatctggtcaaaactgtttttgcatctgcaactgagagagatatatacactggagataaggttgaaatcgtcgtcctaaatgccagtggtattcgtcgtgaatacatggacctaaggaaagattaatgctttacaggaatttactgttggagataccagacttggattgagaatgtttgaaatgcttctaaaattttaaatgacgtagtgggtttttcccatgaggcgaaattaaaaatagcatttccagtgaaattgctttgaacaagtactagtctgctcacattataactagactgtgctttcacttaaatttgcattggatttttgtctgagtcaatttatttatagctttagtgtgcattttctatcct

SEQ ID NO: 92737 - DNA, 663 bp, Glycine max
  unsure (1)..(663): unsure at all n locations
  Clone ID: PAT_MRT3847_54755C.1
caccgacaacctcgccggaaaattcctcgccgtttccggttaccggcgatggcctcggcgacgtcgtttttgggcctcggtcttcgcccctccgtcccaatttgcgccaacagaaacaacggcattcgattctctcagtttcaagtctcctttggctttcgtgagaactccacttccctcaagactttgaattcaacaccgttgaagaaaagagaagctttctcaaatgggtcttcgagaacgcgaagaaacccgttgttctctgttcgctgcacagtttcatcaagtggaaagattacacaacaggaattcacggaaatggcatggcaagcaattatctcggcaccagaagtggctaaggagaacaagcatcagattgtggagactgagcacttgatgaaagcattgttggagcaaaagaatggacttgctcgccggatcttttctaaggttggggtagataatactcggcttctagaggccactgataagcacattcagcggcaacccaaggttgtaggggaatctgctggttcaatgctagggcgtgatttggaggcattgattcagagagccagggacttcaagaaagaatatggggactcantttgtgtcggttgagcacttntgttcttggttttgcccaagataaacgatttggga

SEQ ID NO: 92738 - DNA, 1003 bp, Glycine max
  Clone ID: PAT_MRT3847_54756C.1
cggaattcccgggtcgacccacgcggctggaaaaacaatagcatcatcaccaccacgaccatcttcttcttcttcttcaagtgcagggctaacttcgtcttttccacctacaacgcagtggatctgcaattgtgaaacacccgacacttccctatcgagtcgcacgagcaactaacacagataagcctctgaaacaacaagaatatctggagaaattgtgagatggatatttcctgaatgtgtagacagagtcaaagatctgtatttggagaagcgtgtaagcacagatgaaagggagaaatagttatagctttagagggaggcatatttccttggctctggttactcttgttatttttaccacgttactgtggacatgggagagaaatccgataattgccatgactttaagatcagctcatgaatggtaccgcttaccttcagaatttcctgtggaagccccgactgaatcagtgggaactccaacactggaaaagggtgtggaaaaatccatatcccccatcagagaaaatggaacaaaacttcaacttgatactcagggggtggcagctgtagattctacacctgcagaatctctagaaactcaatactatcaaaatgtcacgccttcttccagacgtaaaggaacaccaacacttgaaaaggggtgtggaaaaatccacaacccccatcacagaaaatggaacaaaacttcaacttgatactaaagatgtggcagctgtagattctatacctgcagaatctccagaaactcaatacaatcaaaatgtcatgtcttcttccagaactaaagtttgtaattatgccaaaggtaagtgggttgcagacagcaagataccgttgtattctggattcatctgtaagcagtggttgtccacaatgtggtcatgtagaatgacacaacgaccagatttctcatttgatggatatcgctggcagccagaaaattgtgatatgcaagattttgaccagtctgcattct

SEQ ID NO: 92739 - DNA, 406 bp, Glycine max
  Clone ID: PAT_MRT3847_54757C.1
tcgtccttgcgtgcgcatacgcgttcgctctcacaaaatcgactccataatattccgaccgttatgttccattgtcgtatagatccagagtaattgaattgatgggggggaacaattctaaggaggataattacaattggcggcagaattcatctgcgcgttcaagttcctctgtgacttattggggttcatatactgacccccaataaggttctggtcactggggtgacgcgtatgagccacatcagccttgttatcctacacagaagccgtattatgcccaaccgacaccgccgccgccaaactatggcaatggacctaatcctcatgctcgcggtatagtggccggccacaaatatgtgaagcggcttgacaggatatactcgggaagtacagattactacaa

SEQ ID NO: 92740 - DNA, 262 bp, Glycine max
  Clone ID: PAT_MRT3847_54758C.1
ctcgagccgtgttgctacatgactcccgtattactctctgaatcgggtgcgaacgctggcgataactgggatggcgcaaacttggttagggaaaacgcgtctatgaattcgaatttgaatgctgatagttctggtggctcctatggttatggaaatttggtgagtgtggaagagggatggctgcgagttcaagagactgattcggacctttctgcacccttgatggatcgtggaatgaatgtccagctcggtaggggggaag

SEQ ID NO: 92741 - DNA, 434 bp, Glycine max
  Clone ID: PAT_MRT3847_54759C.1
gtaaagagaaatgaatgaaatgatatagttgagtttggagcgaaacagaagagaataaagatccggggattaataaaaatagggtgaaagatatagataattgcgtgtctgtgacaagccctgtgagtggcgaagtcagtgattatatttatcggccttgcttttcctctgtcagattttcttaccgcaacgcttcttccaaatactattgttgcaaggttaaagtgtcgttattttataatgcttatcactactactttttctgcatattttttctctatataatgctaactgttaccaagatttcaaaccacgtttctattaaatttgctctcgtatttgaagaatctttttacttataacagtcttcttaatttctgttaatacttactttgtgagttacctatttatgcttttgtattggctggaattat

SEQ ID NO: 92742 - DNA, 343 bp, Glycine max
  Clone ID: PAT_MRT3847_5475C.1
gggcatcgcttgggccttcggtggcatgatcttcatccttgtttactgcaccgccggcatctctgggggacacatcaaccctgcggtgacattcgggttgttcctgagacgcaaggtgtctttagtgacggccttattatacatgatagcacattacgccagagcaatctgcagagctgggttggccaaacggttccacaaatactactacaacatgttcggatgtagatttaacactgctatcgatggctacaacaaacgtaccgctttcatatctaatataattagtacctcttttcttgtctacaccgttttctccaccactgatcctaataagaccact

SEQ ID NO: 92743 - DNA, 442 bp, Glycine max
  Clone ID: PAT_MRT3847_54760C.1
gattaataaaaaaagtgtagtattttgagagaaagaagaaacagacaataagcatagggaactgtgaagagctgaagggaaccaaccttgtttttgttgttctcgtgttgttcgtctggattgggttgggttggcttcagggctttgaatgccatctggggtttctttctcaggctatcaagctccaaagctgacccctttctctcagttctcacttcttcttcttcttctgttcttctctttctctctctagaactataatggtagaagacgtgtgtttcctctacaaggaaattcttgttatgaagcctccaaagagatcaccaatgttgttaaggatggcagtcgtaatattttcaatggtttgtggcgtttttatcttctctgtgtgtctaatgcagataagcacccaagctaggactacatttatggactttaaagt

SEQ ID NO: 92744 - DNA, 273 bp, Glycine max
  Clone ID: PAT_MRT3847_54761C.1
gacattccagcgagtgatcggtgttcactttatctcatcataaccgtcagccacagggggagaatatgccgagcaggggcggggcccccacaaggcctgaagaggcaactcaccccgacacgtagaaggcagctatggctgagatcatctcaaccttcatcatcgtgttcgacgactcaggctccggcatcacccacaacaagctcaccgacaacggacctgacacccctgccggccacatatccgtctacatacgcccatgcaaacgcccct

SEQ ID NO: 92745 - DNA, 504 bp, Glycine max
  Clone ID: PAT_MRT3847_54762C.1
tttttgtgtaattttttttttttttttttttcaaaaaatttaagaaaattttttttaaaaaaaaaccggccttccggattaaaggatggcttggcgggttcaaccctggaccctttggattggggggcaccgggcctggtgaaacctcccttccctaataaccttgtgggaaccaaaaaaggaggtttcttccaaccggccaataaatttttgcttggggttggaaaagaacacatttggccattaagtcccaaatttaaagggggaaattttggctcccaaataagggggggaataaatttcttcctggatttgggaaacaaatccttggttttaagaacccgtttaaaaggacccaattggcaaaccccttgggggaaccctgggtccaggcccattggcttggaggcccctgccaattggagccagccactcttagggccactaagggataaattcggggcaaaattaccgggggagattttcctattaggaaccccacca

SEQ ID NO: 92746 - DNA, 482 bp, Glycine max
  Clone ID: PAT_MRT3847_54763C.1
tacggctgcgagaagacgacagaaggggggcaattaaaagttgcattgaaatagtgagatgtattgcagaagaatttacaaaaaagaatatagaaagaattacttcttcctgctacaaaacatggaatagaagtaataatatcaggcaaatgaaccctaataataagggggaaaacctaaaaatatgatgttcaataagcaacaacttatttctactacaaaggattacttttcacacaaagcaagcagaagatgaaatagcaatgaaaggtgaaatcaatgtctagagaaatattgaaacataacacaagaaataaaaaagaagagagggttgcacctggacattacttccttccatcaaaatctccttagccttctcacataaaactctaacctacaggcagaatagaaaataagagtgttaggttactttaatatttattttcccagagatcataatagtcaggaagaaatgatattgg

SEQ ID NO: 92747 - DNA, 299 bp, Glycine max
  Clone ID: PAT_MRT3847_54764C.1
tttacttcgggtgtttcttctctgaaacgatgaattattccgagccaataaggtccgggttagatccaggtacttctcattggctgtattggatgatacttatatgaatgatgttatgggcaagcgaatataaccgtgtaaacagcgggaaaacgggtaatatgacatgttgttattattagactagggaatgagagtaaggctttgggtggaagagcatggtcatatggtgctgtgctatgtttaggcaggttgttatgcttgccgtagaagaactgttagagtatgttaactatata

SEQ ID NO: 92748 - DNA, 443 bp, Glycine max
  Clone ID: PAT_MRT3847_54765C.1
ggctcgagcgggtggcgcgggtgctgctcgagccgaatctggtgcagcattcaccacatattatctccacaaatcattggtggcctttgttgtctcctgaggtgttcttcaacacctttttatcataatcgccgtgcttcattggggcgcagcagcaagaatgctgggtgaggaggaccaacaacaacagttgctgctacaataccacagaggtcctcttatcagcggcaaaatctccgataatatcatgtgcggcggctacttgaagccttagcagggcgccatcatctacgatatcatcaccttcctttcatataacaaatccacagaccaatcattcgtcgccacgtggtggggaggcacccaatactactacctactcatgaagtcatcaccaataatcatccttactgttggcacccaaatcctcgaggagaactact

SEQ ID NO: 92749 - DNA, 393 bp, Glycine max
  Clone ID: PAT_MRT3847_54766C.1
aaccaattccaaccctggtaatatcaattttttaaaaaatccaacattggcctgaataggctaattttggggtccaaactaacaaacttttggaattcccccctggataggggcctccatcactggataagaaaaaaccggggggccgggggctttcaacattcaagagggggggccaagggatcaaaactccctttggtgggattatacattttacagggttaacagggaggggcatttaacttttgggtaaacgaaagcttttgtttttgctccccccacgaaaatttttcccgggggcaattaacaacgccctgggtcatcataattaaaagggggcccccttttaaactgggaatgggcactcttttggcctgtattgagggggttttt

SEQ ID NO: 92750 - DNA, 662 bp, Glycine max
  unsure (1)..(662): unsure at all n locations
  Clone ID: PAT_MRT3847_54767C.1
ctaggtgagcgccgaagacacactatcactggaccaaattcttcaaactttggaagaaaaagtcttttaagcgcctaggttccatccctcctcttagtgtgccaaagctaccaaaatggaaaagcaaaagcagcagagaaaaccaagctctaagtaagctatacaacttcaggtcttcttgggtcactttcagcctctcttatgtttacatgcaaccaacaattttagtgctgaaaatataattggaagaggtggttccgctgaggtttacaaaggctgtctccaaaatgggcaattaatagctgtgaagaaattgactaaagggaccacagatgaaaaaaccgcaggctttctatgtgagctaggtgtaattgctcatgttgaccatcctaatactgcaaagctagttggatgttgtgtagaaggagaaatgcttcttgtctttcaactatctacactcggaagcttaggatctcttcttcatggttcagatnaaaacaaattagattggagtgaaagggataaaatcttgtcttggaatagctgatgggctcctctatctgcacgagtgttgccacaggcgaatcatttctagagatattaaggcagagaattttctgctcacgggggatttttgggccacagatatggggattttggac

SEQ ID NO: 92751 - DNA, 660 bp, Glycine max
  Clone ID: PAT_MRT3847_54768C.1
gccgtcctttttttttttttttggatccagggaaaaacaatttttttcaagttgaaaattttttttttttatggaacaagttcaatcgattgtatagaacaaaaatgaataataactcaaaaaaaaaaaaactttacaaattacaatgatgacaagaacaatgtaccattcttgtttccttcctattgatgcaaatgcaaatgcaatttatggaatcctcttggacctctagactggtaaagctccaacctgcttttggactccaacaacaacgcctcgattgctgggtcgttggcaatggaagattgcttggatgcccaatcaatgactcccagcacctcagcctgagcaagttcctcgctatccggcacgtgcattgcagtgtatgagagcaaaaccagcgcaggaatcttaaccatcttttctccaaaatacactagctgaatcaagtgcttcgctccaccggcacttataatggccttggaatgatccacgtgaaggtagttctccgtgcacgcgaatttcgttagcgcaatagatgcttcccttgacacctccgtttccctttcgtcgagaagcttcaccaatggccctatcatcctcgtttccgtcgccttgaaggtcctcgccagattcccaatcgtcttgatgcacggaatc

SEQ ID NO: 92752 - DNA, 254 bp, Glycine max
  unsure (1)..(254): unsure at all n locations
  Clone ID: PAT_MRT3847_54769C.1
catctaaaacaccaccttcacttctgcttcangttctattccctcattcactttcctcgcggcaatctcaagcgaagtgagtgcctcctcaattaaaatctcaactccccaacccacaaatttttcctccatcaatccttcctcaaaaacttttgaattcccttttttttcaacttctccaacccacatactacctaccaacgcccttgtccttttaaaacttactttgcacttaatacatatctatctttttc

SEQ ID NO: 92753 - DNA, 501 bp, Glycine max
  unsure (1)..(501): unsure at all n locations
  Clone ID: PAT_MRT3847_5476C.1
anccaggaggtttttcctattattcaaaaggggatttacaaatccatgatttgtatcattcaacaaaggaataggccggaaacaatttttttttttggtccttccaattggtttaatcattcaaatggaaccccaccaatctaaccaatctatggacccttgaactagccagcgggggccggattcatggtccttgtggcatcatattcttcaccaccatcatggtagtcacttcttcatatttttgaacttttcaaagttaagcttgccatcccctttcaaatcaaacctacttatcatcactttgccctttacctttgacttagattcccctaactttttcagcttccttttcagggcctttggggtaataaacccacacctttccgtttcttacttatcaaaggcttctttcaaatccttaaactttttttttttttccgcggcctccttcggtttgttcaaatggaccaancccaacatccgggggccggccgaatc

SEQ ID NO: 92754 - DNA, 441 bp, Glycine max
  Clone ID: PAT_MRT3847_54770C.1
tttgaaaacaatactcccttgctcccacaaggacaaacatggttgccaattattcaatagcaactcaatttagaaaattcctgccgcattacattcggtggcatctggccacctagttgatttacattctcccatttctcctcactgctgaaagcaaatataagcggaatccgagtaatatccatatttccggcttaatttacgacggcagatacaaattctggactaaacacgagaaaaatcttgctttgacagaagaggaaaagatggaagtgattagaaacaaaggcattcctgctgatgttcctgcaaagcgagctcacgaatttgaaaaacatgttgctcacgaaaagccccaaggatcaaattcctgctgatgacaagtagcattctactaaggttaacaaagttgcaaaaattatgaaccttaaacaaagtgtt

SEQ ID NO: 92755 - DNA, 277 bp, Glycine max
  Clone ID: PAT_MRT3847_54771C.1
tcagaggcctggccttttttcttttttttgctcaaactttaaatttttatcaagatgctgtggtgctaggggccatctttaaagggtaattaaattcacattgcactctccacaggtaaaaataatatgtcaaccgatcaggcggacatccttggtttatgtcgctacatcatacattgttcgaaacttattacgtctaagccataaaaaaatcgtacacccactatggagactccgaagcctaagtcataatgaactccataaactgcacataaat

SEQ ID NO: 92756 - DNA, 173 bp, Glycine max
  Clone ID: PAT_MRT3847_54772C.1
gcgagtgatagtgagtgcgtggtttttttgcagcagcaaggcatactgacaccgaacagactgaaaatgggtcgcggggtcagtactactagaaaacatagctcctaagcttatctatttggagaggatgtacctgcctacatacgcagatggggctcacactcaaaatgcat

SEQ ID NO: 92757 - DNA, 348 bp, Glycine max
  Clone ID: PAT_MRT3847_54773C.1
aaaagaaaagttcgcctggccgtggacggggtttggggcaaacttcgagggattaacagccagagcacctttttattgctgacggatcaaaggtcttggccttttcccctaggaacttcagatccattgataatattataaaacggcttaagacgcatacatggtcacaccttgtgctgaaacgggatctaaaaaactcgcacgaacaacacgactgtggaggtccatgtagggattttggggcttccttcttttaagagactgacagcgtgaacagtgtaggaccgttgaaggaaaacaacttataatcattggccgcctggcgatcgttgcccttaatggaggtgg

SEQ ID NO: 92758 - DNA, 313 bp, Glycine max
  Clone ID: PAT_MRT3847_54774C.1
ttgatcctctagagccgccgcttttttttttttttttttttttttttttgcccaactattaccccccccaaaaacccacttatcgcgggctttttttaaacatttgtctaccctaaaaaaccccacaacaaccttcatacttacacacacttattaaaaacctgtcccataaaacccatcctctttcacaattataacattttattctttcaatattttatccatctaacaatccccactacttaaaaatcttacccctaaactttaaaacacttcctacctaacaaaaatatcaattcacataaatttcttt

SEQ ID NO: 92759 - DNA, 494 bp, Glycine max
  Clone ID: PAT_MRT3847_54775C.1
tgtacaccaaccgatgtgcagctgtcgatatgaataccggtttcggttagagggtatcctgaattcaggcaagggcgccaggtctgacagggtaggaaattgcccatttttggcagttatgagatggagctatggccgcagcagttcaagaacgcggagaaggaagaatctccatcagtaccgcatcgatgtcatcgctggggctcagatgaaatgtacggcaagtggttaacatagaggctgatctcaattacctagcggtgtaagcagggtctccaaggacgcaaaactctgatggtcaatttagaccacagtcggtcaaattgccgattggtgagctcgtagggtccaatacccctgcagaccgggaagtgttatacaagatacatcttgcacagccttcctcggatccttttctcattggcccaatacggtgctgaattttcatcgcagccttagcattgtcatgggcgccaagcatgagtgcaagcatg

SEQ ID NO: 92760 - DNA, 370 bp, Glycine max
  Clone ID: PAT_MRT3847_54776C.1
tcctctagagcggccgcttttttttttttttttttttttttttttttgccccaggccctgatactttcttaatcgtgccatcgggtttctcataaactggctgggagagaaagttcatcatcaacgccttcctgttcctgaaaaggtacaacgcttctcttgtctcccagtcttttggacgctggtctctgatttggctcgtctgctccgtgttttaaggggctttagtttctggctccccttttatttcccgtgctactctggcgcctggacgcctttggtcccggctgattaaggtcgcttgcctggtcttggcctgtgttgtctgtttgcctggcctggaccgggtgttggtggttggggtccccgt

SEQ ID NO: 92761 - DNA, 329 bp, Glycine max
  Clone ID: PAT_MRT3847_54777C.1
ggttggcatattgtgccctccctctttctggctatggccctctctcaacacactgcacaaagatatgtcgatctcatatcaacgtcccaatgactgaaaaactattgggtctggtatctatcttgccggcaggccggcataccttttgggggcaggccgcgcacagaccggagcacatttaacacaagacttgtaaactaacaatgggggtggtgaggcgcgccacaatctatgaaaatggaaatgttctgaccctgtccctagacagagcctgtcgctctggctttcggtccaaacgaagaatgcttgggcgcacaaattggcgtgca

SEQ ID NO: 92762 - DNA, 243 bp, Glycine max
  Clone ID: PAT_MRT3847_54778C.1
gaaacgggaacaaaaacaaaaaaagagggaacacgggcaaaggtaaaacaaaaaccaacacatgttttaacaaaagcctttacaaggccaacttaggcaggaaaccacctgaacatatacaatttcaatactgtataggggcaagtaccaccttggggaagatgtcctccaccaaatggcacagacatcgcaaccaactgaaattgatactgctgaaactggaagctgttgaaactgaaacct

SEQ ID NO: 92763 - DNA, 115 bp, Glycine max
  Clone ID: PAT_MRT3847_54779C.1
cttgtaggtgtactttgggaggaagaaacccaacagtttattattcatatttttggggacataaggtttttattcacataacaccaatggttttccatttataaaccaaaattgc

SEQ ID NO: 92764 - DNA, 131 bp, Glycine max
  unsure (1)..(131): unsure at all n locations
  Clone ID: PAT_MRT3847_5477C.1
tanaatggaggttcaatttgccctcccatttnactaangcananatcanatcatannagagactccatctncctcttcgcacgcnacganggagtcccgcttcggaatctcanccccctctttctgcnaat

SEQ ID NO: 92765 - DNA, 466 bp, Glycine max
  Clone ID: PAT_MRT3847_54780C.1
atttctgtttcggcaattttagagcaaggggtgattatcagcccactcatcgtattaaagggaagaattaaaatgggtggccccttattggttttcctcgccatccaagatagcattggcctgtgctatgaatagttcttttagggggcgtgccagttctgatatttacactatctgcttttaagactgtgaattatggaatccttctttgacaaaagccgatgactatgtcatttaatccaaacccgtgcgcttatgcatggagcttggaatttgtgaagcgacccgtatttctttgagatatcatttgtgtatgtgcttggtctggcccctccaatgcatgatggacgagtatcaacagggtttttttttttttctaaagaagttttcaaacacatttttctccttgttgaaaagaaattttttttttttaaaaaagaggagggaggggaaaattttctttccc

SEQ ID NO: 92766 - DNA, 409 bp, Glycine max
  Clone ID: PAT_MRT3847_54781C.1
ctcgagccgaatcggctcgaggtaaaacgttggttttctctgagaatggcaatgcaggcaggggaactctgtcagcaccaaagtccacattgccctctcattttcttcaacccgattcccgattttggttccttcagcggagggttgtttctcgagcccaaaatccccgattccttcgttcgttccatttcgctgaagatccactccactcccttttcagaatccaatcctcgccgccaccggagaagggttccggcagcgtgctttctatcggtgagcttgccgagtgcaaatctcgttaccgaacccaaactgcaaaatggcgaacacgtgtcagaccaggtgacaaccttcaacggtgtcgttctgcaaagaaaggttaggggacgaggaggcaatgccgtctaca

SEQ ID NO: 92767 - DNA, 504 bp, Glycine max
  unsure (1)..(504): unsure at all n locations
  Clone ID: PAT_MRT3847_54782C.1
acggctgacgacagaagggaaccacaggagagctgcaggcagatttacaagaacaaatatataataagttcccgggtatgaaccgaacacctaagggaaatattgaatgaaaagctaacaccactataagcttcattcatgtcaggggagcacaatttatattgcaaggcagaattgactgactcaaccactttaaggtggattgcacttctaaaattgtcatttattactgttataaaatcactggtgcccttgtttttagcaattctatcttggatattttattctttgattatatttttttcttggttgaaacatcaaaagttcatagttagtatactctacaatgtgtgtctatttaaacaccagccgggcagccacccatgaactcagttgttcaactttaccaattacagatatgaagcaacaaatgataaaattctaacccacctncattcaaatgcaagcccaagggaagctctagtggcatagtacacaccaaag

SEQ ID NO: 92768 - DNA, 400 bp, Glycine max
  Clone ID: PAT_MRT3847_54783C.1
cgggtcacactttgcagtagcctatttttcaacttctatgcagcttcatgccccactgcagagttcattgtgagaaacacaggcagttcatcttcttcttctgattcttcaattcctgggaagctccttcgcttggtttttcatgattgctttgtggaggaatgtggattcttcagttcttgtgctttctttgcatgatggaaaattcaaatgggtttgaagatggtgatcaataattacttcatgatatgtagggatgtgatgcatctttgatgctactagggaataatactgaaaaaagtgatccagccaataggtctgttggaggattttcagtaatagaatcagcaaaaagagtccttgagttcctttgtcctggaacagtttcttgtgctgacat

SEQ ID NO: 92769 - DNA, 383 bp, Glycine max
  Clone ID: PAT_MRT3847_54784C.1
acatcccaacaagtaatagaaggagtaatagccttgattggcattaatatgaattttgaaaccgccatcaactaagcacaagtgtatcacaaagacaactctggtgtgtgcttgctacatttcactttacatgagttgctgaaattagttgctaagatacaagattattgttttagtaatcattggtattagtggaattgtatagggaaggtagctttactctatgctttctagatctcaatttccttcagcaatatgttttgcagtctcgagagtgtcaacctatcatttcttaaagacaaaagttagtagcttctattaataggtactgttgcaatatagacccatccaattcaaaagattttcgtctgcacatgtgtact

SEQ ID NO: 92770 - DNA, 284 bp, Glycine max
  Clone ID: PAT_MRT3847_54785C.1
agttcattacttgttcctcggaaaattgggaaattgggatggctccggttgatttgttctgcttccccttgttttctttccttctactcatcctgcgcgataccagaggcattctatcgtttgtgtctgctgagattgttcttgaagtagtattatctaatgattgttatgagtgctataatctccgtggcttgacaaggataaaacgttcaactgtactcaaggtacccttggcataaatttttcataagttacctcttattccatttgattgctacaattcc

SEQ ID NO: 92771 - DNA, 352 bp, Glycine max
  Clone ID: PAT_MRT3847_54786C.1
agcttggaaaagcgcccgagaacctattaacactttccttaattcaatattgggtaatctcttcttcactactcactggatcttcgggctattttctaggaatcgggagacccataactaaactattaccttcaacaagttaaacacacgccaactcaacaaccccaacactttggaaccctaccaacgcatttagtcccaaagaggtcctattgaaacattgaaacttcaacaccctaagctgcaatgttcacttgtcactgtattcaaacccaccctaaaacacaacgtcctccactttccatttcaactaaccttatccccaaaagatcatatgactttaaacgaaaaa

SEQ ID NO: 92772 - DNA, 1216 bp, Glycine max
  Clone ID: PAT_MRT3847_54787C.1
tcggtacggctgcgagaagacgacagaagggggaacaatgagcaattaatcaatcacattaagaaattaacttgctttcatagttttcacatatttgaagtgacatcatgaatatggaggggcagaagaaaaacaagagggtggctgttttggtgggttgcaattaccccaacactagcaatgaattgcatggttgcataaacgatgtgttggcaatgaaggacacgctggagaagcgctttgggtttgatccctctaacattgagcttctcactgatgcacctcactcttctaataaattgcccactggtgctaatattaaggaggcactggctaacatggttgatggagctgaagctggggatgtgctctattttcactatagtggacatggaacaaggatcccttccaagaaacatggccaccccttccgccatgaggaagccattgtgccttgtgacttcaatctcatcactgatttggacttgcggcaactagtgaaccgggtgccaaagggtgcaagcctcacaatcctctcagactcatgccacagtggaggcctaatagacaaagagaaagaacaaataggaccatcctcatcaactgaaaaagattccacatcaaaaccaagttgcagcaccccaaaggcaatcccatttgagtccataatgcagcaactctcatggctaacaaaagtgaacacaacagacattggcacccatctgctggagctctttggctcagaggccagcctgaggttccggattccggcgccggacctcgatctgctggagccactgaggcctgatgaggggattctgctgagtggctgccaggctgatgagacctctgctgacatgaaccccaatgtggcctgcggccagaaggcgtatggagccttcagcaatgcggttgagatggtgctgagggagaattcgcctctgctaagcaatagagaccttgtcataagggcaaggaagaagttggagactcaagggtttcagcagcatccttgcctctattgcagtgatgagaatgctaatgctagtttcttgtgtgagatgtttaataaatagtttgaatcaagaatatcgagtgtcacaacttgttaattatattgttctatgaattttatggggaataagtggaaaatcttttatcatgtattattatttttcttcttattttatttcacctccgctaactcttaatttat

SEQ ID NO: 92773 - DNA, 337 bp, Glycine max
  Clone ID: PAT_MRT3847_54788C.1
aagcgtccgtacggctgcagaagacgacagaagggtacggctgcgagaagacgacagaagggtcttcacataattttgcatatgggagcttggaaattaaatgatacagtttgttcaatactgcttgcctaaattagagtacacacgggctggtttactagttattactgattcaaaaaagataaatgaatgtttttttattaacaaataaaacaaagaaaaacattagggaattccattgttgaagcttcaaataaaaacgctattgattgccgaaagttggtggttgtcaatataggcacacacacaccttttagaaacctaaccgacccatgaa

SEQ ID NO: 92774 - DNA, 421 bp, Glycine max
  Clone ID: PAT_MRT3847_54789C.1
actttttctttctctctcccaaacgtgttcactgatctagattgtatctgcaggtttgactctctctctctctctatctctcactatctatctatcccaccataaccattaaccaccacctcttaaatatttttgcacaaatcaccaaaatttcccatttttttcaccctctgaatcacaattatgatctttgtaactaaaatcgcctgtacacacaaagagtcagcatgtgttggctgcgaagttggacaactgcttttgattctcagaggcagaaggaaacaggaccttgcaagctaatagatgtcgtcatctttctattcgagggctgcttccagagaaaggcggatagaccgccttcagaactgctcattgctctggcctaccccaccagatggtccacacagaaaggatcaaattg

SEQ ID NO: 92775 - DNA, 418 bp, Glycine max
  Clone ID: PAT_MRT3847_5478C.1
ccagccgtgtctttttcaacgaggaaaagacgagaagcgaacggggaggtttattgtgaaaccaccagcgggagggcaaggccgccaaaacacgcagggagaacggagatcaaccgccagacaaaaaaccccccaggagcccgatacgcagcccaccccagaaaaaaaccgacaaccgaaaaacacggaacagcggcaacccgaaaaacagaaaccaccccaacacacttcccccagaaccacaggaatgcctcataccccgggggaaagaaaatggggggaccaatgcaaaaccccaaaagccgaaaaaaaaagggcgccccacaacgacagtgggcagaagaaaaaaataccgacacccaaaggataacgccccccaaccagggctctacagcccccggggcggcccccagggaca

SEQ ID NO: 92776 - DNA, 389 bp, Glycine max
  Clone ID: PAT_MRT3847_54790C.1
ccaaaaaaaaaaaaagttttaaactataatttataaaatgggggaaggtacccctttttaacggggagacccctttctgccccattttggaccccttactattttggggggcagctttttttttaaaaaaaaaattttgtttttttgccccttctatttgtatactaagatatgcgaaggggaaaaaaacccccttttttcaatttttttgggggggtcaaaaaaaactaaactttgcttttttttggggagggggcaacgggaggttcaattgtgaccccccccgggttaatggggggagtgcttgtaaaattcacacccggcccaggtcccggggccacaaaaccaaaattttttggtcacccttttcttaaaaaaaatttaaaact

SEQ ID NO: 92777 - DNA, 325 bp, Glycine max
  Clone ID: PAT_MRT3847_54791C.1
cataaagaaaaaatctgatctcgattatcagttttcccgcagaaaaaacggttttctgaacaaactaaagggaaggacaaaaggcttttttctggtttaaaaaaactgcacccgggcttcaatgactggggccataccattggtagttttactgccccgtccccaaaacaaaaatctttttcccatggaacaaaaggacctaagttcttgcaaaacccaaaacggtttgggtccttccttaaagacgctttccaaaaagggaactccccaagatgtttttttcccccttttttagggcggggggggccccgaaaccccccccccc

SEQ ID NO: 92778 - DNA, 462 bp, Glycine max
  Clone ID: PAT_MRT3847_54792C.1
gtatttttttttttaatgtttgaataatttaaaaagttggagaagaccctagctcgagggcaaacccttggcactagcggacaagttgtgccttggtgactagccggacatgggctctaatcctaaactagcctattggtatatgcaaggttaatgctgcatacattatccttcccaaaaacctttggataatgaagagcctatgggcaatgggggacaaaatcttttaaatagctataaactcggctttaactatcaaaactggctatatggacacctttcgcactatagaaacttgcctgacacagaaaatcaattgaccactgcgaacatcataactgctggtacgcttggattcccaccaacgcaactttaaagccgtctgacaatttgccgccatctatctattggccaaagagattggactcctttagtcaataatagacctgttgccctacctac

SEQ ID NO: 92779 - DNA, 392 bp, Glycine max
  Clone ID: PAT_MRT3847_54793C.1
tttttgatatgatcccatcattgaaagaaaaataaaatgtacaagccagctggtgattgcgagttaaacaactcttatgatgcaacatttttcaaccaaagaataatgtctaaataaactatcttcattggctatatatcaatgtacaccatttatacatagggtgagatggttcattccacaagctcctatatatctactttgcaggatgcaaatgggggtctttagcagcagagtttccaggtttccctctcaaatatgttggaaccaaatacacgaatcttgctacatacatgcttacaaaccatgcattgttgtagatcacaacaaaagtggtaggaactgaatctgtgattgcaactttctgccattaacctgaaactacatgtaaa

SEQ ID NO: 92780 - DNA, 313 bp, Glycine max
  Clone ID: PAT_MRT3847_54794C.1
actgttaggcttttaccttcagaagctagacgggtgaatgtgacacgtggtatcggacgtggagttttacccaccactgcttgaattagttctgtatttaccaaggggtcctcacatataaacataaggtaccgcacatgactagggaaaggtaagaaaaatgatgttattactagagttgatccttttacagaagcttaactggatgttattattggcgttaagaacagaaattctgagttataacgccactgatactatgttgacacgacttcatgataacggtaagagtctcaaatatgtgcatgatgag

SEQ ID NO: 92781 - DNA, 317 bp, Glycine max
  unsure (1)..(317): unsure at all n locations
  Clone ID: PAT_MRT3847_54795C.1
gtttttaggaaaaagncgtgtagagatttttacaggaggaatttcatacagctcgaccaactgaggggcggactacaacaactaaggtggctggtgggtgcccatattcggaagctatggtgcatgagagaccaatgtctacaaaaccaggggatcatgacactggggataagatgacaaccatcaacaatatcagtgcatatgggctcaaacctggcctttcagggaatagacttttgggcaccattccccagaccatggttgagcaaactgtgaggagataaatggcaacaacgaggacaccgtcgcatcttgaa

SEQ ID NO: 92782 - DNA, 803 bp, Glycine max
  Clone ID: PAT_MRT3847_54796C.1
gactctcattttttcagtttatcagtttctcaatcgttagatctcatcttatactcaccggcgagtccatctcgcgccagcgtcgacgccgctccggccaccgctccggccaccgcctttggttccctcactttctcgtccttcttcttctcagaaatatgccttctcagaaagttgaaacgggtcatcaagacacggtccatgatgttgcaatggattactatggtaagaggctggccacggcttcatcagatcacacaattaagataattggggtgagtaatacggcctctcagcatctcgcaacattgactggtcaccaaggacctgtttggcaagtggcgtgggctcaccctaagtttggttctctacttgcatcgtgttcctatgatggccgtgtcattgtttggaaggagggcaaccaaaatgaatggactcaagctcatgtgtttgatgaccacaagtcatctgtgaattcggttgcttgggcgcctcacgagttgggtctttgcttggcttgtggctcgtctgatgggaatatatctgttctgactgcaagagcagacggtggctgggacactgtgagaattgatcaggctcatccagttggtgtcacttcggtgtcatgggcgccatcgatggcacccggagcccttgtcggtgcaaggttgcttgatccagtacaggaagctgtgctctggtggttgtgataatactgtgaaggtatggaagctaaacaatggactctggaagatggactgcttccctgctcttcagatgcacacggattgggttcgagatgt

SEQ ID NO: 92783 - DNA, 326 bp, Glycine max
  Clone ID: PAT_MRT3847_54797C.1
aattctagtctcgaccgacgcgtcagtacggcagtcagtaaagaaccgaagggggaacagtagggggcagatatcgatattctagcacaatcgatggataccatcagtcggctatcattgcttggatcgtgtttggcattatcatgattgggattgcaacaggtcattgctcgttttgtcgcattatcatcttcgggttggcagcattcgtaccgaatgtgattgcggattttcctgctgatacctctgcagcgttttgcttcgtcatatccaatgctcatatttcattcttcagctgcttctcggcttcatgccttctctctatg

SEQ ID NO: 92784 - DNA, 1278 bp, Glycine max
  Clone ID: PAT_MRT3847_54798C.1
gttctggtccggaattcccggctcgacccacgcgtccgcatttttcagtttctcagtttctcagtttctcagtttcttattcgttagatctcatcttacactcaccgtcaagttcgtctcgcgccaccgtcgacgcagttccggccactgcctttggttccctcactttctgtctcttcttcttcttcttctcagaaatatgccttctcagaaggttgaaacgggtcatcaagacacagtccatgatgttgcgatggattattatggtaagaggctggccacggcttcatcagatcacacgattaagataattggggtgagcaacacggcctctcagcatctcgcaacattgactggtcaccaaggacctgtttggcaagtggcatgggctcaccctaagtttggttctctacttgcatcatgttcctatgatggtcgtgtcattgtttggaaggagggtaaccagaatgaatggactcaagctcatgtgtttgatgaccacaagtcatctgtgaattcggttgcttgggcgcctcacgagttgggtctttgcttggcttgtggctcatctgatgggaacatatctgttttcactgcaagagcagacggtggctgggacactgcaaggattgatcaggctcatccagttggggtcacttcggtgtcgtgggcgccatcgatggcacccggagcccttgtcggtgctgggttgcttgatcctgtacagaagctgtgctctggtggttgtgataatactgtgaaggtatggaagctaaacaatggactctggaagatggactgcttccctgctcttcagatgcacatggattgggttcgagatgttgcttgggcacccaatttagggctccctaaatctaccattgctagtgcatcgcaggacggtaaagtgattatatggaccgtggcaaaagatggggatcagtgggaaggcaaggttttgaatgatttcaagacacctgtttggagggtctcatggtctttgacaggaaacatactggctgtggctgatgggaacaacaatgtgacattgtggaaggaagcagtagacggggaatggcaacaggtgacaacagtggagccttagaatgtgatttgaaaatggttagaattttcgttttgaaatatagttgatatcttgttctttgcatattatacagttgattaattgtgcttcataatgcactagttccttgacgtttgtgatccattaagtattccgtgcttggaagaatgaagttgattagtttgagttgcttt

SEQ ID NO: 92785 - DNA, 1343 bp, Glycine max
  Clone ID: PAT_MRT3847_54799C.1
aattcggggccgaccacgcgtcaacacgctaattctttttctcttctctcatttttcagtttctccgtttcttattcgttagatctcatcttacactcgccatcaagttcgtctcgcgccaccgtcgacgcagctccgaccacctcctttggttccctcactttctcgctcttcttcttctcagaaatatgccttctcagaaggttgaaacgggtcatcaagacacggtccatgatgttgcgatggattactatggtaagaggctggccacggcttcatcagatcacacaattaagataattggggtcagcaacacggcctcccagcatctagcaactttgactggtcaccaaggacctgtatggcaagtggtgtgggctcaccctaagtttggttctcttcttgcgtcgtgttcctttgacggccgtgtcattgtttggaaggagggtaaccaaaatgaatggactcaagctcatgtgtttgatgaccacaagtcatctgtgaattcggttgcttgggcgcctcacgagttgggtctctgcttggcttgtggctcatctgatgggaatatatctgttttcactgcaagagcagatggtggctgggacactgcaaggattgatcaggctcatccagttggtgtcacttcggtgtcatgggcgccatcaatggcacccggagccctcgtcggtgcagggttgcttgatcctgtacagaagctgtgctctggtggttgtgataatactgtgaaggtatggaagttaaacaatggactctggaagatggactgcttccctgctcttcagatgcacacggattgggtccgagatgttgcttgggcacccaatttagggcttcctaaatctaccattgctagtgcatcgcaggatggtaaagtgatcatatggaccgtggcgaaagagggagatcagtgggaaggcaaggttttgaatgatttcaagacccctgtttggagggtctcatggtcattgacaggaaacatactggctgtggctgatgggaacaacaatgtgacattgtggaaggaagcagtagatggggaatggcaacaggtgactacagtggagccttagaatgtgatttttcgttttgaaaatggttagagttttcgttttgaaatatagttgacatcttgtttctttgcatattatacagttgattaattgtgcttcataatgccactagttccttgacgtttgtgatccattgagtattctgtgcttggaagaatgaaagttgattagtttgagttgttttaagaaaaaaaaaaaaaaaaaaaaaaaaaaaaaaaaaaaaaaaaaaaaaaaaaaaaaaaaaaaaaa

SEQ ID NO: 92786 - DNA, 344 bp, Glycine max
  Clone ID: PAT_MRT3847_5479C.1
tcgcttcaagatagatctaaattggacccagcacctaacgcatgagggcgattcttactgcagcgtcgtgactgatcttggattacctcgactgctgatgcaccttgcctgatgcgaacatgcatatgtcaaagaacctgcccttcggtgcatatttgagctagctagcaatacttaagatggcaaggatggctataaccaagacagtgagaagatgaagcaacttcttcaagaacgactcaactatatcagtagaatgacagtttatgacctacatgtaggcaggttagatagctatattctttacactgtaatgagctcttgagttaacccgccattcttat

SEQ ID NO: 92787 - DNA, 321 bp, Glycine max
  Clone ID: PAT_MRT3847_547C.1
aacatggcaagagatcatgagcagggtttctttttattcagaagcaacttttattatcagacttgttgttttttgcatctgcggcggaagtataaacatcaaaacggctgtgtgcccatcccagactaaatgatacaagtgatggccccactccccaccgaacatattcacagcctgtgcctttccatgttgaacaaaaatggaagcacccccgggggggccccccttgtggaaaaaaacgacccccctttggatactgaccgccaactcccccttagggttctccaggccggctctttcaaatacattgaagggaccaac

SEQ ID NO: 92788 - DNA, 1342 bp, Glycine max
  Clone ID: PAT_MRT3847_54800C.1
gaattccgggtcgaccaccgcgtccgatcggtttctcaatcgttagatctcatcttatactcaccggcgagtccatctcgcgccagcgtcgtagccgctccggccaccgcctttggttccctcactttctcgtccttcttcttctcagcagaaatatgccttctcaaaaagttgaaacgggtcatcaagacacggtccatgatgttgcaatggattactatggtaagaggctggccacggcttcatcagatcacacaattaagataattggggtgagtaatacggcctctcagcatctcgcaacattgactggtcaccaaggacctgtttggcaagtggcgtgggctcaccctaagtttggttctctacttgcatcgtgttcctatgatggtcgtgtcattgtttggaaggagggcaaccaaaatgaatgggactcatgctcatgtgtttgatgaccacaagtcatctgtgaattcggttgcttgggcgcctcacgagttgagtctttgcttggcttgtggctcgtctgatgggaatatatctgttctgactgcaagagcagatggtggctgggacactgtgagaattgatcaggctcatccagttggtgtcacttcggtgtcatgggcgccatccatggcacccggagcccttgtcggtgcagggttgcttgatccagtacagaagctgtgctctggtggttgtgataatactgtgaaggtatggaagctaaacaatggactctggaagatggactgcttccctgctcttcagatgcacacagattgggttcgagatgttgcttgggcacccaatttagggctccctaaatctaccattgctagtgcatcacaggacggtaaagtgattatatggaccgtggcgaaagagggggatcagtgggaaggcaaggttttgaatgatttcaacacccctgtttggagggtctcatggtcattgacaggaaacatattggctgtggctgatgggaacaacaatgtgacattgtggaaggaagcagtagatggggaatggcaacaggtgacaacagtggagccttagaatttgatatttttccttttgaaaatggttagaattttcgttttgaaatatatagttgacgacatcttgtttctttgcatactatacagttgattaattgtgcttcataatgcactaagttccttgacgtttgtgatccattgagtattccgtgattggaagaatgaagttaattagtttgagttgttttaagatttagaatgatgttttctaagtatataatgtgacaatgtcttatattccggagttgcataattaatggctgttgcgtttaattttg

SEQ ID NO: 92789 - DNA, 258 bp, Glycine max
  unsure (1)..(258): unsure at all n locations
  Clone ID: PAT_MRT3847_54801C.1
cgaaaatngctcctccaaganngtcgtggtggttttngtggtggcggtgggttcacgggtggtggtaggggtgacagaggcagaggaaggggcggtggaggaagaggaggagacaggggcactcccttcaaagctagannnnnnnnnnnnnnnnnnnnnnnnnnnnnnnnnnncangggtggtggccntggtggtggcagaagtggatgaagggangtaacnangttgtggttcanccccatagacnttatggtattt

SEQ ID NO: 92790 - DNA, 232 bp, Glycine max
  Clone ID: PAT_MRT3847_54802C.1
gccggcccggaatgacccacgcgacccacacgaacggtttgattgtgctgatgcagaggagtcctatggggaaggtttgatacgtgcaataccaaactggggagagggtttggactatatgggaagaatccctcttaccacatctgagggttctgctgatgtcctttcccactacaatggtgaagaaggcaccaggagagaagttaatgttgatggtgaagagatcacatag

SEQ ID NO: 92791 - DNA, 1570 bp, Glycine max
  Clone ID: PAT_MRT3847_54803C.1
gtcaagaaggtcaacgaatctggtttaggtgccgggcttaaagttacgggttggcttaactgggccagaaagcccaaaggattaggacagtgagatcccataaaaacaaaacaaaaggacaaaacgacagcacttcttctcttctctcatttttcagtttctcagtttcttattcgttaatcgttagatctcatcttacactcaccggcgagtccatctcgcgccaccgtcgactgagctccggccatcgccgttggttccctcactttctcactcttcttcttcttcttcttcttcttcttcttcttcttcttcttctcagcggaaatatgccttctcagaaggttgaaacgggtcatcaagacacggtccatgatgttgcaatggattactatggtaagaggctggccacggcttcatcagatcacacaatcaagataattggggtgagcaactcggcctctcagcatctagcaaccttgaccggtcaccaaggacctgtatggcaagtggtgtgggctcaccctaagtttggttctctacttgcgtcttgttcctatgatggccgtgtcattgattggaaggagggcaaccaaaatgaatggactcaagctcatgtgtttgacgaccacaagtcatctgtgaattcggatgcttgggcgcctcatgagttgggtctctgcttggcttgtggctcgtctgatgggaatatatctgttttgactgcaagagcagatggtggctgggacactgcgagaattgatcaggctcatccagttggtgtcacttcggtgtcatgggcaccatcgatggcacccggagcccttgtcggtgcagggctgcttgatcctgtacagaagctgtgctctggtggttgtgataatactgtgaaggtatggaagctaaacaatggactctggaagatggactgcttccctgctcttcagatgcacacggattgggttcgagatgttgcttgggcacccaatttagggctccctaaatctaccattgctagcgcatcacaggacggtaaagtgattatatggaccgtggcgaaagagggggatcagtgggaaggcaaggttttgaatgatttcaacacccctgtttggagggtctcatggtcattgacaggaaacatattggctgtggctgatgggaacaacaatgtgacattgtggaaggaagcagttgatggggaatggcaacaggtgacaacagtggagccttagaatgtgatatttttccttttgaaaatggttagaattttcgttttgaaatatagttgacatcttgtttctttgcatattatacagttgattaattgtgcttcataatgcactaagttccttgaggtttgtgatccattgagtattttgtgcttggaagaatgaagttgattagtttgagttgttttaagatttagaatgatgttttccaagcatataatgtgacaatatcttatattccgggagttgcataaattaatggctgtggcgtttaattttggattatcgagattaatccatccccattagtaaaaaaaaaaaaaaaaaaaaagaacgct

SEQ ID NO: 92792 - DNA, 359 bp, Glycine max
  Clone ID: PAT_MRT3847_54804C.1
aacataagaaaatcccagagggcctgagaccagaagggatgttgactacgacgacctatatacacttaatatctcatatactatatctgatgatgttaccgacaccgttaataaaatataagtcttaggcaggagatagagcaactgtatagtggggcaactctggtgatatcatatattgaaaatatgaaaaacttggacgaggtgctaggcagggtcaatattgataaagtcgggtctgcaactcatgcgacaaagagtgtgactgtgaacactccctggtaacttgtcaagaaggacaatcattgcacagagtgaaggtgtgtggttgaacacgcatgaatagaccaccaagaatc

SEQ ID NO: 92793 - DNA, 525 bp, Glycine max
  Clone ID: PAT_MRT3847_54805C.1
caaaaaacaaactactgttctgtagagcacatggtcatggagcttaaaaaattggtatgtggtagtggggagtctagtagattgtggcttatggggatttcaacttttaagacatacatgaagtgtaaaatatgtcacccatccctagaaaccatttgggagcttcatcccttcacaattcctgttggcatcctcattctaagtttaaatcttgacagtgattttcaagctcaagagagaaacaaggtatttttcaaggatgtggcttttgaagatagagcaggagtcagaaaccatctaacttgctgcagggattgcacaataaattttgaaaaagaagctcagagcataactagcactataagtaagaaagcttgcactactagtagcttgccaacgtggctccaaaattgtaaggaagagagaagtgacataatggaagatcaggaaaatgcaaggcttaaggatctgtgcaagaaatggaactcattatgcaactcaatacacagacacccttccattaat

SEQ ID NO: 92794 - DNA, 366 bp, Glycine max
  Clone ID: PAT_MRT3847_54806C.1
ataattgtgacaaaaacggagatattgctataacaaagggggttaccaatgaaagatgcaatggtgtattggacaaagccatttttacactcaaaataccaaatgtctaacttaaatgatcttacttacctttatagtgtgaatgggaatacttagtaggctcaaagatcagtgttgtagcatttaacatgagaaacaaagtggagtattgtgaataccgttaaatgcacgctattgcctatcgaagacatttgatccattcctcggatcagatcctttagggtcatttggtgggggttcctcaaccttctttcatttggaataatactattccactgaatgcctaaaacctcatgagtgtgcttt

SEQ ID NO: 92795 - DNA, 2125 bp, Glycine max
  Clone ID: PAT_MRT3847_54807C.1
gaattcgacctcgttacccggggatcctctagagtcgacctgcagaaaggtacttaacttctcaattcattgtggataatgggttttgtgaatgggctcttatcatgcgttgttaattttgcaatatacttgattctttggtgggtttatgcttatgcattgagggtgttgttgtgtgagggttatgttgtatttgtaggttcttagttgatgtaattgaagggtattctggaatcttggaggattttggacattaatccaaattccaaaataagctattgataggtcaaaagtatttttgagaaagaatcttactgtttcaatgtacctaaggccagtagaattactggttttagggttctattatgtctcgtgattcttgacactgcacaacagtaaatttttattccccttggtgggataatgatcccgtgtctgccacaaagtcattgtaatagatttttggtatctggagtgttgtttgtgtagcttcatagtggtcttactgtgtgttttgactggtgattcttgaaatatggagttgtttttaagtttgatatttataatttactagtttatgatgataatacttttattttaatttctttcttggaacttattgtttaattcggctcgagctgaaacaaaaaatttgtctcgaacagctttcggatttttcaaacccacccatcactttctctctctaacacctttttctctctctaaagagttgcaatatcggagattttatttacgtgttgaaaagttttcagagtcagttttgtgaagaagccttagaaggttggtttcaaacttcttaatattacaagacacgatggtagcaaaaatccggcaaagtgctactgagtctcctaatccaaaacctgaggttggagagattgacaccagcccaccttttcagtctgttaaagatgctgtctctctatttggtgaaggtgctttctctggtgaaaaacctatctttaagaaggcaaaaccttattctgctgagagagttttggccaaggagacacaacttcatgttgcccaaaaagagctgaacaagttaagggaacaagtaaagaatgctgacgctaccgcgactctgcagctgaacaaaattttttgtctcaaacccatccatcactttctctctctaacacctttttctctctccagagtgattcaatatcggaggctttcttaacgttttgaagatttttcagagtcagctctgtgaagaagccttagaaggttggtttcaaactacttaatattgtaagacacaatggtagcaaaaatccggcaaagtgctaccgagtctcctaatccaaaacccgaggttggagagattgacaccagccctccttttcagtctgttaaagatgcagtctctctatttggtgaaggtgctttctctgatgaaaaacctatctttaagaaggcaaaaccttattctgctgagagagttttggccaaggagacacaacttcatgtagcccaaaaagagctgaacaagttaagggaacaagtaaagaatgctgaaactaccaaggctcaagctcttgtggagcttgaaagggctaaaagaacagttgaggatctgacacaaaagataaaagttatcagtgattctagggagatagcaatcgaggcaacagcagctgcaaagtgtcaggcaaaacaacttacagaagaaaagtatggtgtccctggcggaacaaatggtgcttggaaggaagagttagaatctgctgttaaaaggtatgcatctgtcatgacagaacttgatgctgcaaagcaagcactgagcaagactcggcaagagtatgattcatccttggatgaaaaaatgtttgctttcaagcaagcagcagaagctggagatgcattgaaggaaaacacagaaagagcatctgagctttctaaagaaatttcagctgtaaaggagtcaattgagcaagcaaagcttgcttctattgtagcacagcaacagcaaacaatgattttagctgagaaagatgttctaagacaatcatataaagctaccttggaacaatctgaaaagaaattgcttgctttaaaaaaggaattcagtcccgagcttgccaagaaattttaaatg

SEQ ID NO: 92796 - DNA, 408 bp, Glycine max
  Clone ID: PAT_MRT3847_54808C.1
aacaaaaagagttacgccctgacccaaatcaaatatgaattcacccctccctaaaggggggagcccaaacctccccccatacgattttacaccgggatctgggtaaaaaaaaaccataaaaatctcttgaggcatttggggccatgcatgaaaatgggctgtaaaaaaccaaaggcaggatttgagggggaacactgtgtttttaaaaggggggaggagccaacagggtacaaaaaaagagccaaaaaattttttccaggaggccctaatggaaggggggagactcttgcatggtgcggggaccttaggggaaggggagccaatctgggattttccccagtggatgggaagacttaaagctcgtttagggggtaacatttgatagaagcctgcagtatggatttttaa

SEQ ID NO: 92797 - DNA, 507 bp, Glycine max
  Clone ID: PAT_MRT3847_54809C.1
tactttctatccccccactttttcccaaattatcaataatatttctgttatcggcaacagtgctagctgtgcagtgtgcaccaaccaaggattgtgttttcttaatatttacagcaaacgttgtttttcgagcttggtaaatattggactggctaggattattgcataattaacttcaattgtggttattcggagcacaatacttggattataatccattttgcttcatcgcttgcttccaagtcctctcgcgtttatatttgagactcaagctagtggaaaaaaagattaacaaagtttttatggaagctagcaaatatggaaggttggttttttaggtcttggcagaagttaggttcagaggatgtgcaggaaagtgagcaattcaaatcttttccaccgatggctgagccaccgacaccccatgaacctatggcgttcttacctaggtagttcagactctcttcatgcgaaatctcaaaggctctctcagagaggcagaaacag

SEQ ID NO: 92798 - DNA, 1127 bp, Glycine max
  unsure (1)..(1127): unsure at all n locations
  Clone ID: PAT_MRT3847_5480C.1
gaaaaaatcggaaagataggataaagcaggagtgggatcttgcattaatgaacgtgatgacagcagcagcatgcattgcactagttgtttggtcccttgctccttgtcgatcatatgggaacacttttcggtttgatttacaaaatacattgcagaagcttccaaacaacatatttgaaaagagctatccacttagggaatttgacatgcaaaagagaattcaatgctttttgttcaaggctgctgagttgtgcatggttggtttgagtgctggtgcagtacagggtgcgttgtcaaactctttggctagtaaaaaggaggggagattatctgtgacagtcccaagtgtgagcagtaatgctcttggttatggtgcttttcttggaatttatgccaacctgagatatcaactgttatgtgggtttgatagagcaatgatgacccattttgacgtcattggagttgccttgttcttcagcacagcattcaggatcttgaacgttcaattaggagagacttctaagcgtgcctggcttggagttgaggcagatccactggctcagtcggatgacctcttgaaagtttataacaggacttctgagaatgtagaaaagtcatcctcaaaatggtttatatcaaaaaatgcagttgtttctgggcttgggctcctgggcatcaaacaaaggaatacagacgggtctggtgcagaatcttcagctcctaaaactcgccgaaaaaggattgttcggaagaaggttgcggcgggttctgcttagtatcttctgatgtaaaacgtggtcatagtccaattttgctgttttcttcttctggagggtcatttgtggtttactggctgcttcaccaagtccggggggcaattagtggaccaagatttttcatcacatttaactcaaatttgaggagggttttgcttttaaattttgttaggaactcttgtattgatcctttctgttttctatctgattctgtactagtatatattttgaatcttttaaataaaagtagagcaagttatttttttttcaaaaaaaaaaaaaaaaggacggccgccgacgtagtaatcatttttacctattggtncgaacacccacgtgcatataaacctt

SEQ ID NO: 92799 - DNA, 1372 bp, Glycine max
  Clone ID: PAT_MRT3847_54810C.1
gctcggacccacgctcgacctgatctccaaactgcaccccattttattgatgaagttcttcgcgataggctccctccttttcaaattgattccttacctttcttctcccttatcttcatcatttttcaagctctaccctcccttccctccactttcctccctcttcttcttttgcttctgtttttgaggcgaagaaggatggaattgtaatgctgggaatataattggagaattgggggaggagtaagggaggaaatcatacacaatgcccgagttccccttgagctcgaggttggaaagggtgcaaaatagcttgagagagaatggttctctggtgtatctcaatgtgtatgatcttacacctgccaacaattatctttacgtctttggggttggaatctttcattcgggcatagaagtgcatggtatggaatatggctttggagcacatgaatacccaacaagtggtatatttgaggtcgaacccagaagctgtcctggcttcatcttcagatgttcagtattgttaggcaggaatgatatgtcttattcagaatttcgttctttcatggagcgcctttctgtaaaatttcatggagacagctaccatctgatattttactgatgaagtttgccaacagctaactggaaagcctattcctgcatgggtaaatcggctggctcgtgttggttctttctgcaattgtcttctgccagaaattgtcttctgccagaaagcctccaggttgctgcagttagacatctccctgaacgtgttgcatttgatgatgatgatggatcaggatctgatggcctttctgcatccattgagagtgaagaagatgagcccaatcaccattttttaacttcaccaaatggtgatgttgcctttctaaaggaaaaaccagttaggctggcacgggagcacttatgattttatttggtttaccttctgttttgtattctttctttgttctcctggcttgtacctatctatgatcctagatttgagtgcaatgagtttctcaactgtaatatataagactcaaaatgcatgctttgtagaacaaagacgatagtctgttgtataatgtcctgtaagtgtcaaaatggactggttgtcctgtaaaggctattaggagtacaagcaaaaatgatgggggtatacggttaaatctgattgagttattcctttgccaatccatcctttttgtccctcttgtggctaccactaagtgtccacaatgttgtagtaacgcacaaaatgacaaattcatgtaaatcttctgtttgcactttttatgaataataaatatcatgagttgtgatttggtcccgcaacaaaaaaaaaaaaaaaaaaaaaaaaaaacac

SEQ ID NO: 92800 - DNA, 317 bp, Glycine max
  Clone ID: PAT_MRT3847_54811C.1
cccagaagcacatgccgagcaaaccgggacaggcaaagccgactttgcctctgcgcaacttcctatacatgtaagatgaggactcattcaatagcttgagatccttctgaacagagaaggggatgcccaaacttgcataatgcaatccggtgaataaggagatactatgttatataccgcagtggtggcatctgtaatagcactcgctgctcaaatatagggccaggacagatgttgacctgatttcgaaacctggcttcagacagcataaactctgggggtcgctatcacaggctgcatcgctttagacagataga

SEQ ID NO: 92801 - DNA, 275 bp, Glycine max
  unsure (1)..(275): unsure at all n locations
  Clone ID: PAT_MRT3847_54812C.1
gttgaatccatcctaagtnacttgcttgctgaaggngacacgaggtcggtagaaactaagaatgggggaagagaatgaaganacaaaaacatttaangatttgggcttatccgagtcattngtggaagcttgcgaaaaantgggttgganaaaattccattaaagatnacagacngaaagnaattcctcttgcnattggcaaggnnaagangtgataggacttgcccaaancggttccggtaagactggagcttttgctcttcccatattgcatg

SEQ ID NO: 92802 - DNA, 580 bp, Glycine max
  Clone ID: PAT_MRT3847_54813C.1
attagctatacatcagcagtgggaaccatctgtggagaatattgaaggtgaatatggacggattgttcaaaatccaactgaagaaatcaaggtgctttgtgttaacactttggaggccggagtttttagcagtggatttccgacagtttctgatcctgtggaggcatacacttaccctgaatatttgaaatctggatggaacttgaataatatactttcactctcaggatcccttctttgttttgaaagctctgaagcttcacgtaattttgcccccaagattcacatgggaatgtgcttctctccactcaactggaaagttgaagagcaccacttatactcattatattacgtgcatttgggtgaaccaaaagtgtggtatggcatcccaggaaaatttgctattaactttgaaacaatttggaagaagtatctccctgatttgcaagcaggacagcctgatatgcatgataatatggtgatgcagctatcatgctccatattgaaggcagagggcattcctgtatatcgttgtattcagtatcctcgtgagtttgttcttgtctttcccgggtcatat

SEQ ID NO: 92803 - DNA, 314 bp, Glycine max
  Clone ID: PAT_MRT3847_54814C.1
ctccatgcctgatcgctcgagaatgaacggtgtttatgggcttttgcgttatcatgtacaaagggaaagagcttttattttccttatttacaagctaatcagatctcatcatatctgctccgaaggacgagtgcccaccagatttgctcactcccgccaaatctctcgcgtgcctgcagaagaacgacgaagctgcaccctgtgatgcacaccgagttggtgtataacctggcgctgatcgatcacgtcacctatgatgagctcctctatgaaactctcttattcaacctgatcactccctccattctttctga

SEQ ID NO: 92804 - DNA, 109 bp, Glycine max
  Clone ID: PAT_MRT3847_54815C.1
atcaagcattggatccatcatgatttataggctgcaccatgcttgaaacaaaagctcttccctgttaacaagggttttaagatcatagatatgaatttgctaccattgc

SEQ ID NO: 92805 - DNA, 491 bp, Glycine max
  Clone ID: PAT_MRT3847_54816C.1
gggaaaaaagacccccggcccttttttttttttttgggtccccgggatccttttcccccggcggggcccttttaaccaaaggggaatccctctgggggttctccatttcccccccgggcccaaaggtttttccccccttgttgggggccccgggggcccccccgggatttccggcccggccccggggggggccccagttttccttttgggggggcgttttagggctgggggaaaccgggggcaaggcggttcccggggggaaatggttttccgctcccaattccccccaacttccggcccggaggcttaagggggaaggccgggggggcctaagggggggcccacccccctttaatgggggggggcccccggcccgttttccgggggggaacccgggcgggcccgttgcattaaggaaccgcccaccccccggggggggggggtttgcgtttgggccccccggggggttttttttttccccgggggggcgg

SEQ ID NO: 92806 - DNA, 344 bp, Glycine max
  Clone ID: PAT_MRT3847_54817C.1
acggccgcgcagacacaacataccgaggtgtcgactgttacttgaccatcactagcagtgctcggccatcatggaggaagctgctactgctgctaatgcgttgaatgccaaaaacgacactatttttgttgctccatctggcacggtatgattgatactttctgcttcatccacaactgctcaccataaacaccacaacatccacacatccccagtgttggggatacttgatgggagtgaacaccggatagattcatccctgtctacggaccacgccaaaaaacctgatattactctaacatcaataaccttactgactcacacttataagtcgtcttcttact

SEQ ID NO: 92807 - DNA, 336 bp, Glycine max
  Clone ID: PAT_MRT3847_54818C.1
cgggaggtgaaccgatgaaggtttataattatgcataccaagggtccaagcgttgtttgatttaatccaggtgactcttactcagaatgaaccagttaaaaacttattaaagttttaaaaaagaaccggaccattttaaaaaacaactttcctcaccttttggaaataaatggtcactccaacaagggattaaaatgaagggttaacaaaagcttgaatcaaggggttacaatttgcaatggattggttccaaacaaatgggggtgataggagtttttccctctaataaccctatttatcgaaacaggttaaaagctctttctttgcacaattgat

SEQ ID NO: 92808 - DNA, 178 bp, Glycine max
  Clone ID: PAT_MRT3847_54819C.1
gattctcaacattgtgaacgaaaactttgatttcaggcctggcatgatcttcatcaaccttgatctcaataggggtggaattaacaggtttccgattactgctgcctatggacactttggaagacaagaccctgtcttcacatgggatgtggctaaacccctcaagtgggagaaggcc

SEQ ID NO: 92809 - DNA, 518 bp, Glycine max
  Clone ID: PAT_MRT3847_5481C.1
cggacgcgtggtcggacgcgtgggttggagttgaggcagatccactggctcagtcggatgacctcttgaaagtttataacaggacttctgagaatgtagaaaagtcatcctcaaaatggtttatatcaaagaatgcggctgtttctgggcttggactcctaggcatcaaacaaaggaatgcagacgggtctggttcagaatcttcagctcctaaatctcgccggaaaaggattgttcggaagaaggttgcagcgggttctgcttagtatcttctgatgtaaacgtggtcatagtccaattttgccgtttgcttcttctggagggtcatttgtggtttactggctgcttcaccaagtccggggggtaattagtggaccaagatttttcatcacattgagggttttgtttttaaattttgttaggaattcttatattgatccttttgtgttttgctatctgattctgtactagtatatattttgaatcttttaaataagtagagcaagtatttttttttt

SEQ ID NO: 92810 - DNA, 569 bp, Glycine max
  unsure (1)..(569): unsure at all n locations
  Clone ID: PAT_MRT3847_54820C.1
cccccntccacccacgcgtccagatcacaaggcattgggtttaaagaagaaagacaaggttagccatttccggttctacttccacgagaccttcaccggaagcaacgccaccacggtcttcgtggttccgccgctcccccagtacagctccaccagctccttcggggcaatcggggtcatggacaacgtcttgacggcgggaccggagcgtacctcgaaggtggtggggagagtggaggccttggccgctgccacgtctcaaacggagtttaatttattgatattttttaacttcatattaacccaagggaagtacaatgggagcaccatcaccgtgttggggaggaaccgcacctccctaaaggttagggagattcctgttggtgggaggcactggggtgtttaggtttgcctctgggtatgctgaaactaacaccatcttttttgatccacacactaggtcgtaccattgagtgcaacatctatgtctctcattattaatgagttaaagcccaataaagagactttcatcatcaaaggtgcaagctaaggggtgccttgcccatata

SEQ ID NO: 92811 - DNA, 237 bp, Glycine max
  Clone ID: PAT_MRT3847_54821C.1
ggaccaaaggctacggattcaatatgatggcttatgctgccgtttgaagcaactcatggagcataacgctcaagcttgtaatcaaatcactgccaatttgtctacttacatggtgcaagataacatcaagctcttttgacacacaaggcacaatactgataccattcttaataatatgagtgagacgactggcattatgagccatacgcaggcactgcatgttaacatttacgaata

SEQ ID NO: 92812 - DNA, 492 bp, Glycine max
  Clone ID: PAT_MRT3847_54822C.1
aggcaaaccccccccaaaaaaggccaaaaaacttgaacttggggaaagggaaaaaaagacccctttttttaaaggggggtgggtaaacacaaaacaccaggggggccaaaaacccacacaaaaaaaaaacaaaagtttttacccccccaataaaaggttaaaattattcccaaaaaaggggtatttttggtggaaacttggtcccccaacccctcatttgcaagggcaggggttgaaaaaacaatttggcccccatttggagcccttgttttaagggggcccccccatttgagcccccccaaaaggggccttaaaaggggccccccccaaaaccaagggctggggggggggggacccaagggaacccaaggggggggacattttggaaccccccaaaccggggccgaacttggaagaacttccccaaccccagttccccccggaaaaaaaaatttttaggggaaaaaaaaaacaaaccggccccggggggcc

SEQ ID NO: 92813 - DNA, 133 bp, Glycine max
  unsure (1)..(133): unsure at all n locations
  Clone ID: PAT_MRT3847_54823C.1
tgaatatntccagctgcgaaggagcaggaagtaccatgncgatgtgaaccgtaatngtaatcntggcnnnggatnantccgaggacttcanagggcatcaacttgcatttaagatttgcncaatancttcaaa

SEQ ID NO: 92814 - DNA, 580 bp, Glycine max
  Clone ID: PAT_MRT3847_54824C.1
aaaaggcaaaaccctcccattttattaaacttttaaaaaacaatttaaaaaatttaaaaccaaaaccccaccggccaaaaatggaacccgaggggggcaaaaaaatggaaaaaaaatttttgccccccctaagcccccggggtcccccccccaaaaaggggggggggggccctccccccccaaaaaaagggttaaaattccccccccaccaacaaaagggggcaaaacccggggccctccccccccttaaattcccaaggggcttttaaatgggcaccccggcccccaagctttaaatcgggccaaaaaaaacaccccaaaccccctgggaaaaccaaaaggggggggggggttccccaaatttgggaaaaaaacctccccttttaaaaaacggaaaaacccccccctttttcctagaaaaaaaaccccccccaaacggggccgcaaaaaaggcttaaccaaaaacccccaggggttccccccccccttttgaaccccagggaaaagccctgacaataagggccccggggacccccaaccagggaataaaaaccggcaacattggcaaaaaaaaggcctt

SEQ ID NO: 92815 - DNA, 421 bp, Glycine max
  Clone ID: PAT_MRT3847_54825C.1
acggctgcgagaagacgacagaaggggcaccctatgtagaaaaaacgaaattcccaaaaaatagacagggacataacctaaagcaggatataaatatcacacatcaggtcagataatacacggccgatagcataacagagcacaccaacaccaacatcaacattctcattctctctcttttttctttcagttttggctttgatctttcaagttcaatggctggagatatagggagagccttgcctcctcctgattcagaagaattctcaaccttgttcaaccaactcctccacaattctcccccactaggaatggaccccaatcattcaccttctgatttcaccccacacaacaccaccatcaacatcaacagcaacaacaacaacaacactggtccttcctctccctcaaatttcaattt

SEQ ID NO: 92816 - DNA, 410 bp, Glycine max
  unsure (1)..(410): unsure at all n locations
  Clone ID: PAT_MRT3847_54826C.1
cacgctgggagaagacnacagaagggagggtaataaaatcaaagtttggcggttttatgaatttgagtgaaacaaggtcagccagtgaatgaatctacgtgggggggggacttgaaaattgtaaatcatcatcctcaacagggtcaattgctaaataattccatagcttggaaagttggacgtttatataaatttaaatttttggacgacacttgtatatggtaagataacatattactataaaaataccctatgctctatagtatatctgttcagcaaaattatttcattcactaaatgggagaattcaaatattcaagttggtaatgggacttcaaatggcgtgaaccctttttctacaatgaaatatatatggctgtatcatttctacaagaactttatgggaacat

SEQ ID NO: 92817 - DNA, 889 bp, Glycine max
  Clone ID: PAT_MRT3847_54827C.1
cccacgcgtccgcccacgcgtccgcccacgcgtccgcccacgcgtccgtcagaggctttgtcacacggtgaaaatttggcctccaaatcaccgccaattcctcaagatgcctgcaagcctaaagattcagcggacaatgagagtaaagataagaaaatagaatcggaatctataaaagaaagctgttcaagcctggtagaagagaagaatgaaacactaactcttccggataaagaggatagtaaaacagaaattgatgaaactatgaatgatgccgagttgaatgaaaacccggagaaatccgatgctgtattggatggttaaaactcaatgtctagtagacagatatttgttgtaccgtgtaatcatagtagtctcaatcagcatttttatcacattaaaagtgaagtaaattataaacaagaaggcactacagcatatacggtagtagttattcagtcccgtgcaactaactcgattagaaattgttccttttcatgtgttgtattagacggatttatttttcaaggaattgaatgaagagtatgatcaattgtatactatactacacggcacgttacccttcattatatgagttagcagagaactgaggaaatttccgtaaaccatttctgcaaggaagaatattagcggaataaatggttagcagagcaagtcttgaacagcttacctcagttaatattccgccaatattaactgaggtaagcgtcttggacaaagccatagtgttttagttgctgaataaaaatggttagcagagcaagtcttgaagagatgttactgtgatatttcctgctatgtttcgtttttaaagagcactgttataaagtgcagtaacatgtttgtaatgagtgtgcctcccgttccc

SEQ ID NO: 92818 - DNA, 451 bp, Glycine max
  Clone ID: PAT_MRT3847_54828C.1
cccccggctcgagatgcaaggcagggaaacaatttgctaggtccgttctttgtgctgagctacattgctcaaaaccaaacaggccggacacatgcggaaactgcgactgtgctgacaggactgactgagccacggcaaacagctgtggtgttgtagaacagactgaaaagagcaacgtctagactgaagacaaggtagaaccagcacagggtcatgatcagaagtgctggggagggactaactggacttgagcggactgcaattgtggccgttaaggaagatgtccgaaagcgtaattgctatgtgagcgtcggtgcagagctcgaaaaaatgtaatctgaggatgaataaaagtgggctgtgctgctaggaaagattttgatgattgcttgcgcattcccacctgcatttgcttttgatggggcgaacaacgttatggggaccaggacac

SEQ ID NO: 92819 - DNA, 643 bp, Glycine max
  unsure (1)..(643): unsure at all n locations
  Clone ID: PAT_MRT3847_54829C.1
cgggtcggccacgcgtccgcccacgcgtccgtggaagaagctttgaaaatgcgtgaaatgatggaggctaagggattgtaccctggagttgttacttttaattcaattttgcgcaagctgtgccaagatggcaggataagggatgcaaacaaactcttgaatgagatgagtgaaaggaaaattcaagctgacaatatcacatgcaacacactaattaatgcttactgcaagattggagatttgaaatcagctttgaaatttaagaacaagctgttagaagctggtctaaaacctgatccatttacatataaggcactgattcatgggttctgcaagacgaatgaactagaaagggcaaaggagttaatgttcagcatgcttgatgctggatttacccccagttattgcacatactcatggattgtagatggctacaataagaaagacaatatggatgcagttttagcacttccatgagtttctgagtagaggtctttgtcttgatgtttcagtatacagggcattgataagaaggtcatgcaaggtagaaagggttgaaatgtgctgaagggtattcaatcatatggaaggaaagggtatatcangtgaaaagtgntatctacaccagtcttgcatatgctta

SEQ ID NO: 92820 - DNA, 462 bp, Glycine max
  Clone ID: PAT_MRT3847_5482C.1
ggctcgaggctagggctgtcttatttaaataatgcaattgattttccgtggagtttagattataagatgtaaagacagggtttatcaattgaggaagtatatttttctaaaaaaaaaaaaaaaaaaaaaaaaaaaaaaaaaaaaaaaaaaaaaaaaaaaaaaaaaaaaaaaaaaaaaaaagggccgccggccactaaaaagtttaataaacccggaaaataatttcgaacccggacccggaaccttaccaattttcacttttacgaatgggaagaacaattgggacatacaaaagcaacggtattacctgcatcaaaacgtaaatcgttaacggttccccatgacaaacaagcccggagccataagctaaaactctgagagccctaatgcgtaagctaaaaaaaatttaatggcatgggggaagccccccattcccaaagggaaaaccagaccccccccctg

SEQ ID NO: 92821 - DNA, 381 bp, Glycine max
  Clone ID: PAT_MRT3847_54830C.1
ccacacccgtccgattggtacaaggtagggttgttgttttgttgcgtgaccaaattgaggggtggtggttaattatggggcaccgagggattaagtttttgtgcaaatagcgacgtaaaaatttgttttttgccccggggggacggccagttttaagaagaaggccataataaatttaagttccaatttaaagggacctttaaccaaaatccatgccatttcccaaaatggttttgcctttagttgaacttggggggggtttgggtaaagtttaaagccagccaagaccaaaggcggaggtaatttggaatccctgtttggtattgataaggcttttccagaagaaataatttagaaacctgttgggttttttttggaaga

SEQ ID NO: 92822 - DNA, 720 bp, Glycine max
  Clone ID: PAT_MRT3847_54831C.1
aagttggtgaagggaaatccacatttcagaaactactacagatgcacttcttctggatgtcctgtccgaaagcacattgagactgctgtggataattcaaaagctctcatcataacgtacaagggaatgcatgatcatgacatgcctgtgcccaagaaacggcatggcccgccaagtgcttcacttgtggctgcggcagcacctgcttcaacgaacaatgtgcagttaaaaaaaactggattgctacaaaaccaggaaactgaagctcaatgtttagaggacacagaaggagagttaaccggggaagcgttggaccttggtggtgagaaagcaattgagtcggctcgaactcttttgagcataggttttgaaattaaaccttgttgaatacatctttcataaatcatgcagttgcattgcatctatattaattaattggtaggcctcatgtaattttggcggtttcccatgtttaccttctctttcttgatttctttactcatgtatgtagtcttttagtggagcagttatatttgcttgtacacatgttcagcttgtctgaaacagcttgcgtagtcgagcgaatatggaattgacttgtatcttattctcagggagagtgagaacaggtgaggatagtgttatcattcaacttcactcacacattgtttgtttgagtgtaaatagaaaggaatgaaataaaaaggaagtcgataggat

SEQ ID NO: 92823 - DNA, 387 bp, Glycine max
  Clone ID: PAT_MRT3847_54832C.1
gtagagtcacgcatcaaattcccatcacttacaccatagcttagccaccctcgatcactagctatttctgatttctctaatatgactatggtggtcctcacaccccttttggccatagtcggtattattctcctacttaaactcgtctatgacaacctctcatgttactggctcacaccactacgcataaaaaagatgatggatatgcaaggtgtccgtggccctaaaccttgtttcttcacaggcaacatcctagacatggcttcccttgtctccaaagcaacctcccaagacatgaaaaccataagccatgacattgttggccgtcttctcccacattttctactttggtctggccaatttgggaaagaggtttctatattggaa

SEQ ID NO: 92824 - DNA, 443 bp, Glycine max
  Clone ID: PAT_MRT3847_54833C.1
ggttctacatagcatctcctttaccaccattctagatatcagagaactttgcagctctcttaggtttttaaaaaacaccacgcaaacagcaagatggccacttccgacagtaacatgctactaaattatgttccagtttatgtgatgctcccactcggagttgtcaatgttgacaatgtttttgaagacccagatggccttaatgatagagacggataccgccccattgcaaggatgctgtctcgccatcatgccattttgaactttacatgtcttgagatgagggactcagagcaaccctcagatgccaaaagtggaccacaggagcttgttcagcaggtattgagtggaggttggagagaagacatcagagttgctggagaaaatgcacttccaaggtatgatgccacagcttacaaccaaatcgtactgaatgcaagacc

SEQ ID NO: 92825 - DNA, 228 bp, Glycine max
  Clone ID: PAT_MRT3847_54834C.1
cccacgcgtccgcccacgcgtgcggttgtgggaagtcttatccctactatgctgatagtaaggcctacgttgaggctaatgtgagggggagcgaacactgcatcgggtgtaagagataccaagagaatacaacgttcaagacgctcagcttcttgggggtggatgtggacgccctactagacatagccgctgacgagctctgcatgatatataatgttcgcgcacgca

SEQ ID NO: 92826 - DNA, 1211 bp, Glycine max
  Clone ID: PAT_MRT3847_54835C.1
ggataaaatagtttattaacttcgggataggaatacacacataaaaagtacacgaaagtactttgtaaatgtttaggcagggctacttcatggcattattatcagcattgcaaattacaggggctggatgctttatttatattagtagatattatttccagcagattatttaattactcatggcaccaaattgggaaatcaaccatcaactttcatgtctgtctctggaagccaggggaatggcagtgttggtttaattgcttccaaaaaaacctcaatgggaatctttggggcaaatggcttcaatggtgttatggcgtgattatacttttgagggtttgcacagtaatcctgatctgcatgcatctttagcacaaattttttgaatatattaaaatttgatttttgcagtagatcatctgatagacgaaggtatgttactccaaacatgcttagttttggagggccattgttattgacaccttgcggtcttgcattcagtatgatttggttgtaagctgtggcatcataccttggaagtgcatttttctccagcaactctgagctctcctgctgggccaagcccaacttcaatgtctataataagtccagattctaaaaaatctgacatgttttctctgaaactcttcatgtagtcactgtatatctcaatggctgttcttccatggaatataggctcgttgtccacaccaacagttagatattccttattcctgaatcctgagcggttggtgtagaagatatcaggatttgattctccaatgtcaagcacccactggggaattgggatgttaactacatctcctacgttccctccacattgatggaatgacataatagcttggagtgtcaagccacattcctgaaccaactgaaacaaactcctgtaggcactccaatcatactgcttaggccccttcagttctatgatcccccaccacacatcaaccataaccccatcaacacctgcggctcgaagctgcaagagctgttctttaaggccatctgggtcttcaaaaacattgtcaacagtgacaactccgagtgggagcatcacataaactggaacataatttagtaacatgtttctgtcggaagtggccatcttgccgtttgcgtggtgttttttaaaaacctaagagagctgcaaagttctctgatatctagaaagatggaaaaggagatactac

SEQ ID NO: 92827 - DNA, 1022 bp, Glycine max
  Clone ID: PAT_MRT3847_54837C.1
tacacacataaaaagtacgcatgagagtactgtgtagatgttttttaggcagtgctacttcatggcattattattagcatagcagattacggtggctgcatgctttatttatattggtagatattatttccagcagattctttagttactcttggcatcaaattgggaaatcaaccatcaactttcatgtctgtctctggaagccaggggaatggcggtattggtttagtcgcttccagaagaacctccaggggaatctttggtgcagatggcttcaatggtgttatggcatgattgtacttttgagggtttgcacagtaatcctgatctgcatgcatctttagcacaaattttttgaacatattaaaatttgatttttgcagtagatcatctgatagacgaaggtatgttactccaaacatgcttagttttggagggccattgttgttgacaccttgtggtcttgcattcagtatgatttggttgtaagctgtagcatcataccttggaagtgcattttctccagcaacttggatgtcttctctccaacctccactcaatacctgtgtgtgtgttcatgtttggcaatttaaccgctataatacagcctttacacttggcatcatctttaacaagcagagcaagctttaaactagagaaaattgtaatgcattacctgctgaacaagctcctgtggtccacttttggcatctgagggttgttctgagtccctcatctcaagacatgtaaagttcaaaatggcatgatggcgagacagcaatcttgcaatgggacggtatccgtctctattattaaggttgtaatatccagctgtaagctcagcagcatgattttcaactttgtaccaccagtgaattccagatactttgattgctaatttgactttacagctcaggaaggctttgttagcttcatctagtatttgatcaccatggttcagcaatttgttagaataccaggtcaagaagaacttccctttttcagtgacataagtgccattt

SEQ ID NO: 92828 - DNA, 686 bp, Glycine max
  Clone ID: PAT_MRT3847_54838C.1
acaataatgaattgtgaaacaaaaaaatgcaaataaatcattaaaaatagtataaaataaaatatataaagtaagattatatgcctaattgactgttttgaaatgttaaagtagtaggtgataaagcaaagaaatcataaaaaataaaataaaataaaaaatattgaataagattatatatatgattaactattatgtaatgctaaaagtagtaggtgataaagcaaagaaatcataaaaaataaaataaaataaaagatatagaataagatgatatatatgattaactattatgtaatgctaaaagtagtaggtgattcttagtcttgaatttctatctcttgtcaaattcattgaatgtaatgcatcgttataagaactttctcctcttatttgcacaaaaaagtttcaataattgtaagttaacataatggtacagtattttctaataaccttataattcatttaacaataataattattaaaataattgttaaattatttatatacatatttttttattagttttctcttattctatttaacaatacatgaaagataataatataaacacagtcatatctttaaaaaaaatataaaaaaattacactacattttaaaaataatccttatttaaaaaattattaataataatgtaaaattaaaaaaaattaacaataaaaata

SEQ ID NO: 92829 - DNA, 155 bp, Glycine max
  Clone ID: PAT_MRT3847_54839C.1
gagagcgacgctttctaaatgttttggtatgcaagatgcattgacaacgtcgtttccttttctgctgagaaccctatatgaatatatgtctacggcttgaatggaatcggaccctctgaaccataaatataggaagatgttcctgggtcactatt

SEQ ID NO: 92830 - DNA, 481 bp, Glycine max
  Clone ID: PAT_MRT3847_5483C.1
aaaaaaaaaacaacctcagttcaaaaaaaagtctaatggggggccaaacccttagtttgggggggaaaaacaaaggcaaaaaggggccatcccccccccccgggaaaaaaccaacggttacatagcttcttaaaactgggggggaaaataaaggaagggcaaaagggggggccccgtagtcaaggaaaacttttcttaaaaaacatctttaaatggaaatccaactttttaatttttttgggcatggggtcccaagcaaaacctaacggggggattggaatttaatcccaagaaattcctagggggaagggccccatttggccctgaaagcaagaaatttttaagggcttcccgggaatgggggggggcggccccccaagggggggtatccaaaagggccttttccaaccaaaacccaatttccttttttgggggggccggtaggctttaataaaggggcccccattggtgcgggggattt

SEQ ID NO: 92831 - DNA, 374 bp, Glycine max
  Clone ID: PAT_MRT3847_54840C.1
gccgcgagcagacgactgaaggggatcgccttttcagaggaacaatggctgttacaggtttcaacgtgctgggtcttcgtgtttgctctgtctcttcttcttccttttcagatctgcgctgatgaatcatccaataaagagttcgtactcacattgtatcactctaactttcacgacactgtcaacaagcaccatttcatgcgtcaatcgagttctactctccatggcgtggccactgttagaagcttgctcccgagtatgataaagctgcttctatcttgagtagtcatgatcctacccatgttttggcttaaattgatgcctatgaggagaataacacacaccttgcatttcaatatgatcttatgggatac

SEQ ID NO: 92832 - DNA, 238 bp, Glycine max
  Clone ID: PAT_MRT3847_54841C.1
gttagttaatgcttatctaatagggagtgagtgagtgagaggatatactagttagagcggaagcatgggcactcatagaagcaatcccagttgtaccatcgctgcaacctttctagcaatttgatgatttgttgtttctctgaaagcatagggtgagagacatacaacatgcgcccaaagctgaaggtactctaatttgttttgcgtttggagacagggtacgaaaaatgtgttattt

SEQ ID NO: 92833 - DNA, 169 bp, Glycine max
  Clone ID: PAT_MRT3847_54842C.1
ctcaagcctcaacttgcccttaaagatgatctcacccaaacaagttcctttttctgactacttctatcgcaatgatcaccattgctaccagatagggacttattttctgtctatcaacgcatctcattacacttaatgcacttttattagacacacaccacacacacct

SEQ ID NO: 92834 - DNA, 465 bp, Glycine max
  Clone ID: PAT_MRT3847_54843C.1
cttgatcagcaaatagttggctcggttatagagttgaatttgattccttcgaaaaagatctaaaaaaattttgagtttgaatttgtgaataaaaaaacaaataatcataagagaagatcttaataaagataaatatgccgatatatataacatggttaaaaaatattctctttctatcaaattagttaactatcaatatactttctgattatttgacgattatatcctctgtacaggtacttttcactggaaattcttgtgtgaagatagtgactttgaacagaacccagaagttaaatactcttaattatgaaatgatttatcaaataaaaaagaatttacaaatgtgtgagaatgacccttccgtgaaactcgtgatattgaaggctaatggaaaagctttttctgctggtggcgatgtagtgtcagtaatcatgtcttcacttgcaggacactggatctatg

SEQ ID NO: 92835 - DNA, 614 bp, Glycine max
  unsure (1)..(614): unsure at all n locations
  Clone ID: PAT_MRT3847_54844C.1
nnnnnntttcactctcactatgnnnnatncctncaaagagaaagtggggcaaagtaacataagtgagaattcacccctttaagtttaaaatatgcctatttcttagtagataatctatgcctaattatttttgttattgcgttcccatgcgcgctgaatcccttccccatggcattaacagcttatctacctaacctaaaataattacatcactatactaagaactgtttctaaagctatatatgtatacaagtattgcaaataaacatttgaagccgactaaatatgcagcttcgatgcatatcctcctgccaatttacacataccaagatggttgccattctttgattatcttgtgagtgaaatctggccacaactggtctcttgaaggtggtaggaagcttgtcagtaggggatgctcaaaatttgagtattcacataactatcacctacctaataaataactagattataagccgatattataactataatcataactaaattttaaaatataagaataatttgatataactagttattatttttaaaatgagtatatacctaattatgaataaactaattatataataaggtatattcaaaataaatta

SEQ ID NO: 92836 - DNA, 371 bp, Glycine max
  Clone ID: PAT_MRT3847_54845C.1
ttgtggatgggtgctttagaattttaattaatacctctatctggagcttcctataattaaaatgcgtgtttatatatggcaatgtttttatatgtttttttgtatttagtgaataatctttatattgaaatagctctgattatttttatgctggattggttcattcgcagagaaagatagagagcttgggttggggatgcttttgcggaaatcaagtctcaaagaaagaagggtcaaagaggtattctatattgttgataatatggaatagtgtcaatctacatgaaagaacttattattgcataggttctcttgaagagttatttgtttcctctcattctcatacaatgaatttaatttttatttggcta

SEQ ID NO: 92837 - DNA, 710 bp, Glycine max
  Clone ID: PAT_MRT3847_54846C.1
cccacgcgtaacaaaaaacaccatttgtagcacgcgggtttgatttttctccaggtaatgaaattttagcattttactaacaccctttttcttctttgtatttggggatgctttttttaaaaaagaaaattattttattttttgtttctgtatctgggtcttggaaatgtaataatagtttaattggctcgtcactctttaaaataatgagtattattgttattgataagtgtagtcaatggggacgtataatgatgggtgtttctgcattatcaacataaagaaggactaataatattttttaacttatggtttttctggtgatttgaattaaagtgagtatttttctgttgggggttgattagtttattctggtatctgtgtgggatttccaggcatttacggaaggtgggggatttgactttgttggtgaaaggtgtcagctaaggaggttacggaaggtcaagtttgtttgtttgattgattggagtttctgttacctctacagcactgaatgtttgttgttgccttttaattcagattttttttctctcttttgggggtttccaatttccatcaccgaatggaattggatcttctttcatctcagatcaattcattcttgctgggttttgattgttttgagtggttttctgattccatttgggaaagttttgacttttcatggttcaatccctcctcagttgttg

SEQ ID NO: 92838 - DNA, 186 bp, Glycine max
  Clone ID: PAT_MRT3847_54847C.1
tttttcattaaaaaatcgatactcaatatggggagataggacaaactaaacgtggatgaagaaaaccaacttaacgagtgaaattagaaactcatatgcctcaccacgccttgaacaaattaccaaacttgcctgcctattctatactccccgcggaggcaaagactaaaaacgtggtcaccctcc

SEQ ID NO: 92839 - DNA, 385 bp, Glycine max
  Clone ID: PAT_MRT3847_54848C.1
atatgggtagggggataaccttctagaatgacgttatttgtgctggatcagatattggacttgatggtgctgcttatgataatatcatgaactacccataatgattgatgccaaatggtgacaaagagacgatcctgaaggcaatgtggttaaggcttagatgcgaacatgaatagggaaatcgcgctattgatgatgtggaaactcctagaggactcatgtaacatctttaacttgctaaatctagaacagcactgtcgataatcacaccaggaggaaccattctgcataatgagctatggagaaaattttggagagagggcaatccttgtggatgtgcatacttgcagagcacttcactgattaaaggaatgattagactggt

SEQ ID NO: 92840 - DNA, 423 bp, Glycine max
  Clone ID: PAT_MRT3847_54849C.1
ccacgcgtccgctagcctggagccctggttgctggtccacactctaacatgaagtctgatcgctctcattactcatgctctcgttggtacgggtccaagtggcgggacgcatcccgtcctatagagatctaccgaaccaggtgttggctacgcttgctgtggcagccatcttaagctgcgcgcctattcacttgccacccaccacttggattttgccttgagccttcatcggttgttgattggttacactgttcgactttctttgggtccatggttgtcttcgtgtttggccctctcggtaagagcgtaggtgctttctcaacatgaatacgtggggaatctcaatttggaaaggttgtggtgttgaactttgcgctgctgtgcgtgtgagtatgacaccgttattgcctgtcatccaatggg

SEQ ID NO: 92841 - DNA, 441 bp, Glycine max
  Clone ID: PAT_MRT3847_5484C.1
aggggaaaaccactaaaattttattcctctagcgattgaacttaataattaaaatgccaatttttactcaaatgaataaaatgaaatgtttatcctataaaattttatggacccttgatcttgaaaagaatcagtcaaaagtaaacctgtcatgggttaaatttccaattcaaaaaaaatttgggtcccccattttttgaagggttcaaacttcaattctttaaaattggagtccatcatgctttttaactcaaaaaatgacccccgaagagttttgtaataaggaaatgttattttctgcgtgaaccaccactattgaatttaacccgggggggtttctcaaactaaactttaaaacattttttaggggacattttgcccccaaggccctataatttaaaaaattttaaatcgcaccaaaccatcgcaaaccaaaacttt

SEQ ID NO: 92842 - DNA, 1402 bp, Glycine max
  Clone ID: PAT_MRT3847_54850C.1
gtaagcttggttcccggcgtccgcacgatccatctacacggtcaaaaagaaaatcgttttccttgagaaaatacggacacagagacagagagagggagagagagaaggaaatgggaagcacaaagtttctattgttggtgatggtgtttctcgcagtgtgcgtggggacatgcaggccttggggtgatgatgtagttgaagatggagaggaggccaaacattttgcagcaaaagccgtgcatgatgtcgaggaagagacccgctcttgggctgattgggctcaagacaagttctccaaaagtttcggggccgaagaggatcatgaaaaacaagcgactcaaaacatgaagtatcaagctgaagatgctgcttcaagggccacggagagagtgaaatctgcagcatcaggagcctcggactatgcttctcaaaaggctacggatgctaaggaagcagtttcaggtgctaaggtcatcaaaatgccaacagatagcattaacaatgcaaaacacacaatgggagatacctacgaggatgctaagcaaaaaatgaacacagcttcagataaggcttcaagtatggctcacaatgccaaagataacacggctgagtccatggaatatggaaaagatatagcagccaatgcctatgaccagggtaagcaaaaaataaacattgcttcagatacagcatcagagaaattctatgatgccaaggacaaggcaagtgatgttaggcataaagtgaaaggagccatgggttgtggaggagataaggccaataatgatgctaaaaataacatgggcgtgaaaatggaacatggaagggacaaagtagccgaaacttttgaccaggctaaacgtgaagtgggtgaagcatatgtatcagcaaagaataccatgactgaagaggccaaagctaagtacgaggctgcaaaggagaaggcttcggatgcaacaggtgatttaggagctaagatgaggaacaccccaaacgtataagcgcatggttagtttaccgcttattcttaactatgacaacctctattagtttttagctctagtttccacaagttatcgtttatattgtgctttaatctcttgtaatgtgttagtcttttacacgttcttgtatgcttttctctttaatagagatgcaaaaaatacttgttagacattatgaaaaagtcattacgtacaaatctattctccataatgataggagagagcctgaaaggtcccacggttaggttcttctatgatctatcacgatgccaggtagattcatatacagggtgctgccccataatgttgtagggactttgcagcttatatatagtaggctatatgtatgtgtaattataacattttgcagttagtggatcctctcacgattggtataa

SEQ ID NO: 92843 - DNA, 323 bp, Glycine max
  Clone ID: PAT_MRT3847_54851C.1
tgggctttcatttgcttcggaattcgggagggactgaagaggatatcagctccggaagcaccgctgatccaacacctgatgccagttctgctggggcatcatgcccagctgttgcagcgaatgttggcagcataaatgggtcaagtgatggacaagtctctaaagcggcttctctctcatgtgctggctcacaaccaccatgggcttcattgagcacaagtgctggtggttattcttttgggtcttcaagatcctgaagttgaccttgggaaagaggagattcattgagacgcttggcttcatttattacttcaaattggctt

SEQ ID NO: 92844 - DNA, 314 bp, Glycine max
  Clone ID: PAT_MRT3847_54852C.1
atcttactagtgatcaactccatcacgaccacgtagacggacgagaatcgacacggtgcgatcttcgaactttcacacgttctacctacattcttagaccacttctacctttgcctacttcctacgctgccatcaaccacatgggaggccaatcccttatcttcgaaacatgctcaacagaagactatggtttggatacggattagaacacatttctttccgcacgtgcgaggacctgctttacgatcatagagccagttcgatcaccgttcacagccgatttcacatttgcaaggactcattaatgattaaaa

SEQ ID NO: 92845 - DNA, 442 bp, Glycine max
  Clone ID: PAT_MRT3847_54853C.1
taacgctgataataagctatcaggctatgcacctgcgcagagagtctctcttctaatgctacatgtggcatgggactgtgctggcacggtgcacttgatcatctcgaccggaggtctctcgaaaaccttgtggaacctgtccgaacttcttcaccgggctgacaactgactctacatcgatgctaggcttttggagcctctatgcgcggtgttctctatttggagctacgccgattactacctgatagctaggcggagtactgtgcaagtcacgcgtggacctgtattgtgcttccatcctgcaactgaggactaacatgagcttgcatcatatggtctctagcacgatgccactacaggctctgaccatatgacagatgtgtttagacgtgctatagtgcttagtgaccgatatatagctgctctgtcttgaggtgacaca

SEQ ID NO: 92846 - DNA, 187 bp, Glycine max
  Clone ID: PAT_MRT3847_54854C.1
cctaggaaagtaaatcaagttctagacggaatgttgttgagggttctaactatctttaaggaagtggaaaagccacaaaagatggtatacctgatgtgcgttcacactaaaatggagaaataggtgaaaggggatatgatgaatgacctagtgagaagattaccttgatgacacaaacaattgatgc

SEQ ID NO: 92847 - DNA, 258 bp, Glycine max
  Clone ID: PAT_MRT3847_54855C.1
tcttcctctccttttcgatggcaaagggttgctccaacaacacttatgaagaggctagaaaacaaagacttgaagaaaacaaaaagaggtttgaggatttgggaatttcgaggatttcaaaaaacttgactgaaatcgcaagttctgcaaagaagaagctgcgtcatgttcctaaacagaaaacaaagaagacaaatgttgaagtggaacctaggcgatcttctcgtgtgcgaaacccagttcgttcataccgtgaag

SEQ ID NO: 92848 - DNA, 271 bp, Glycine max
  Clone ID: PAT_MRT3847_54856C.1
ctctatcaaaacatactctgggggaatggtgaagcgtgtgaatggtacccaagacgctaacatacctatttctggtgttgctgatatcgtacgttgtactgctagttatgactgatccatggaaaacatagtgaatctacacaaatgtttactgttgataactcagctggatggtgtcatatccgcagggtctaccgacaccatgaaacatgtcaatgggtctgcgatcttttgtaaatatcctgattacttcctactgtccgcacctatg

SEQ ID NO: 92849 - DNA, 294 bp, Glycine max
  Clone ID: PAT_MRT3847_54857C.1
ctcgagccgaatcggctcgagacggatgcgagaagacaacagaaggggacagcctatgctactacgcgctcttattttgtgcaaattggtggacaataactgagaaactggtgatactctcaagcaggggtttttttctgtaccatctaatatctggagtttaactgcagaaatctttccttctttagggcctattaagtgatgtcttaagaccgcagattatatttgctgccgggtctattcagcgcacgatcaagcccgatgatctttgctggtacatctggatattattga

SEQ ID NO: 92850 - DNA, 428 bp, Glycine max
  Clone ID: PAT_MRT3847_54858C.1
ataaaaaaaattatatgtggagtctacttcatttatagcaaaatgtgtaataatcgtaaatttactatataatatgcatgttcaatcaaagtttgttcaactttgtcctttccttgaattgtcctccaaatctatccgtttaaaaaccaacatttaattttcaatccaaaaaaattttaaaaaataaggtttatatatatttttaatctcacaaatttaaagtatattatttttagtttctcaaattaatatttatttatttaatctttcaaattcgtgaaaatatatttttagtccctactaagtctggactaagttttagcaatttaaatatataatttatgatcattttcaacggtttcttttactaaaaaatattttattaatttaagagacttaaaaaataaatttttattttggacctaaaa

SEQ ID NO: 92851 - DNA, 298 bp, Glycine max
  Clone ID: PAT_MRT3847_54859C.1
ttttgtttatgagaattaactgcgttgcatgacaccagtcatgatgaccatgaactagatagggtgggattccctgcgtgaaattgattcaatcgctgtaaattgtcattgatcataaacaccatagaattgcctctttacaactagcgactatattccgaactgatgcgtacggttatatggtcttacataattcttgactctaagtaccgtatcattgatcacgtgaattggcaccctagtagaatactaacgaggccctcactaaacatcgcaatacaatctatatgcaatgatt

SEQ ID NO: 92852 - DNA, 699 bp, Glycine max
  Clone ID: PAT_MRT3847_5485C.1
gatcagaagggcagttggtgagactcgtatgtgttcctaaatccagtgaaactggagttgctgttatgctaaatctgagggaccttgattgttatgctctcagttttggaactcaattcagctcataagaatgcagaatgaagttgaagtggttttggaagtttgttcatggtgctgttattggtgtatcttgggacatcagccaagaactgaaaattgaagctgacagttgaggaaggctatctgcgtttctttagtgcaatatatttttgtaatattgatatatattgacttctatgtttatttttcttattagttttcaatgtaacatagtatttatacattagttgataatcggtttgcactaggatggaagtcaatattattggtttggtcttaacttggctggttcaagaggaatcaatcatctgatggtagaatctgactcttttagccattaagatgatcaaggatggctgcttagacacccacctgagtgcgcctctagtcaaatctgttctttcttggaataagtagctgatgctttatccaagcatggtctttccttagtagatagattgttttttattcagttccggtttttctttatgtaagacgtgctgatgtgttgtctacgaccttccctcgtgggttagttttcttcttaaagcttagttctacctcctttgaaggtggcct

SEQ ID NO: 92853 - DNA, 275 bp, Glycine max
  Clone ID: PAT_MRT3847_54860C.1
ttccataaacaactcccccaaaccccctcttcccccatctcacactaccatacccatatctatctaccttcaatcattacccacaccacaccacccaatctctattctcaaaacccctcccttccttacttatcctccctattcatcaccttctacaacccactccacaccaccaaactcaaccttaccaaactctacctttaccactctctctcttactacttaacccacctatatttcctctccaacctttcactctccattaacaaaatttc

SEQ ID NO: 92854 - DNA, 1638 bp, Glycine max
  Clone ID: PAT_MRT3847_54861C.1
ggtttttcaatctataaattggaaataatttagataaatcacgcacaataacagtaattgcaagtgaaaaaacagagccaaaatcaaccaagccatggctagaacataagttgcctatataatggcactctatgtttctacaaaagaaaagaaaacaacaaatcagaattgtgaccgcaaaggcccaaactaatcacgaattctgaattatcaatatttcattgagctaagatggtaatgccataatacaagaaacgccagttttaaggcgcgatcgaggttaagccaccagttgagatggaaaaagtggggtaaaaaatggacttgatcctgtacacagaaataataaaagctaagtgtacagtgggtgctatttttacaaggggcttgaataagaggagacagcctctgatcaaattttttagtttcctccgcatgaagaatgctctgaaagaaccaaggaaaggcaacgtgtggattggcctttctattgcaagggtgtcttctgagtggcttttagttaataaaagttggttccaagactctgagataaaaagtatttgaatctttattcaagtctatttgctgaagggtggttgcttatttcctcgctccaaggcatttctccatagtctgtaccttatcccaagcttgtcataggatactgggaaattccacacattggcaccattgttcatccgctcttgctggcctaacactagccgtagatcctcgtttaaaacctgctctgcaaaatatctccatagatgttgcataaaaggaatatgcttaagcacaggagcaaaatccagtgacattctgtacagcaatcttgttttttgttttgaagatggtaagcagacatgaagttggtgcaggtgtgtggcacactgactggtgctttgtccttccagtttaccaggcttcgaaattccaatggttgatagaaccatgcaaggtggccgaaactccatatcaattggataggggtcccagtatccttgtaggccagatgcaggtgtcaaaaatttcaccaagctgggaacactccatcccttagcaaaagttgaagtgtgagtaaaaggggcatgtgcaagatccaaaaggttgtccaaaagtaacccgtgttcgatgggaagctccatgacaatctcagcatgcacttcaaacccagatggaggtagcaaagatggaagggtagccgtcggggggtcattgccaggccaaacccagatcatcccctctgtttcaaaacatggcaatgactttatcttcacatttagcagtcgagtagacggcattttctcacattttccatcagtagtatattcccagcctaacatcaaacaattagatattttcaacctgtaagttttaatgtgtataacatataactcattgctaggatatattttcatgtatgtgtatcttttgatatatgcatatatgaaccagtgcatataactcattgctaggatataatcatgtattgaagcaaaaatttccttaagttggtgtaaagagtcatcattcaccaactactaaccatggtaagggcattggatacgaccctcattcaccgaaccaaggtgtagaggacatgctctgtgtgcacaggtgttctgaacacacccaggc

SEQ ID NO: 92855 - DNA, 986 bp, Glycine max
  Clone ID: PAT_MRT3847_54863C.1
gtcatgcatgaagagtgggttatttgaatccgccaagcctcttctggaaacatatgttaactctgctgcaaaaggtgatttgatactttacacctgcattttagctcatcttgttaggtgtcaggaagagaaaaatgagaggcatttgatgtctatccttagtgctacaaagcataaggcacactcttttatgtgtggacttttcacaggcccagaacataggggacagccagtgttaacttttgtccgggaattctttcaaggtattgattatgaattggaggagggagctgctaagtactttgtcaatgttcttctcaattatctagttctaatggggcagataaatcgagctcgatgtgtttggaaggttgcttatgagaataaacttttccctaaggctatagtctttgatcagcatattgcatggtcccttgatgttcgaaacttgtcagttggagcggctcttattgcagtagtgcatactcttcatagattcagaaagcgcatgctatattatggcattgtaccaagacggataaaattggttacaggagcaactctgaagattgtgattgcacagatgttgagctcagtagagtctccatttgaggtgagtaaagtggttcttagggcatcaggagattctgtcatggagtggtttaagaaaccaatcgttcagcagtttcttctgaatgaaattccatctaggtctgatattctgatgcataagctaaacatacttttccccagttctgcacctgaacttagatctctatctcctcctaaacctctcattgcaagcagggcaatgtaatcagttttgctatctacggttagtaactggtgtttgagatgttattgtttgtccaatgtcatggagtggcgcacactcttcatgttctgaaagctgatgctacaaacagatatggtactattcaagaatttcgaatataatctatgaagatttatattcttttcccccc

SEQ ID NO: 92856 - DNA, 139 bp, Glycine max
  Clone ID: PAT_MRT3847_54864C.1
ctggactgagccagcgagaaagggaaaatgctttggcacggagagggctgggatcgtgaagactcaagccatgtgacacgatgtgcaatgccgggatcgtgtactacgaggcgtcatgctcataacaagactgatacga

SEQ ID NO: 92857 - DNA, 254 bp, Glycine max
  Clone ID: PAT_MRT3847_54865C.1
cggccaacaatggcgtccttcgatgaagctcctcacggaaacaccaagaacggcgagaatatcttcactaccaagtgcgctcactgcaacaccgtcagcaaaggtgccggcgtcaaacaactacccagatctgaatggtttgtatgacggacagctcaggtggaactcccggatatgccgactctactgctgacacatacatgaccgtagttcgtgaagaaaataggctctcgtgactacttgatcaaggccaa

SEQ ID NO: 92858 - DNA, 313 bp, Glycine max
  Clone ID: PAT_MRT3847_54866C.1
ggaaatattcaactatgtgggtatagcccttcaaccccatgttctttcacaagctccatcacaaggagtcattgccccaactccagaagtactgtcagaacagcaccatcgtaggaacctcagtaccaaagacataattctcatagtagcaggagttctcctagtagtcctgattatactttgttgcatcctgcttttctgcttgatcagaaagagatcaacatcgaaggctgagaacggacaagccacggggagagcagccgctggaaggacagaaaaaggagtccctccagtttctgctggtgatgttgaa

SEQ ID NO: 92859 - DNA, 264 bp, Glycine max
  Clone ID: PAT_MRT3847_54867C.1
ccggcctcagctacagcctgggctccagctttggctctggcgcgggctccagctccttcagccgcaccagctcctccagggccgtggttgtgaagaagatcgagacacgtgatgggaagctggtgtctgagtccctgacgtcctgcccaagtgaacagctgcggcagcccctcccagcctacccctcctgcgctgccccagagcctgggaaggaggccgctatgcagggtagcactgggaacaggagacccacctgaggctcag

SEQ ID NO: 92860 - DNA, 254 bp, Glycine max
  Clone ID: PAT_MRT3847_54868C.1
tcctcgcgtccgcccacgcgtccgtccacgcggtgggctacttatagacgggcgcgggtttataaaacagagaaagaaagattatttatgaacatgaaggtgtgcgcgcgcgaaccatccataacagaaacaccaatggcttcacatgagtatattcaccaccattctctttgccgtcgacgcccggaatccggtcatatattttcctcggcggcggtagcacaaacacggacatcttcgtcgccgactcatcg

SEQ ID NO: 92861 - DNA, 716 bp, Glycine max
  Clone ID: PAT_MRT3847_54869C.1
aaaaaaattcttcatttatgggccatagataggagagggaaaatccaaacaacacaatctactatcaatttttttttaaaatcttctccaaacataagtcaggaaaaggaaaattatccctgctaaattaactccccaaggaataaatggcccctttttcgagtatatatcctattctaaacatgaaatctaaaacacccaaaatatcatccaccctattttcttgtgatagactgttaatcaggtactcaaaagtctgcttctggggtttctgcttccaactcagcatgtttagcaaccattcaattccaaatatactggcggtaggttccaaaagcctatcatgcatatttttccacaatgttattgcaccctttgggtttccgactatacaaagttgttttataagaggactaaaagagaaaaccgatagctctaaaccctgggccaaaagaaaatttaatagttttcttgccttaactatcttcacttccttgcaaagggccttaataagacagttgtacgtaatcaaatcaggaacgattcccttttgaaacatttcttcaaacaagctctgtgcttcatctgtccttccatgcaaacacaaacctgaaatcattgtgccatagctaactgtggtttctgcataacctctatcacgcatatcctcaaagatcttccttgcctccgcaagatcaccaatcttacaatacccc

SEQ ID NO: 92862 - DNA, 359 bp, Glycine max
  Clone ID: PAT_MRT3847_5486C.1
ggcgtccactaaccccgctccccacctcgcaagattcccgcgtcgaggaagcctcaggcttgaggctatccgctacgagggaccacgctgctggggggccagcctactgtgtcgaacacgggcccctcctttccgattgataagcgcatctatcacccgactccccctgctttaccaccgaaccaaggcataccgacctggtcaccgaattcgaccggacctgcgcgcccttcctattgagtcgataactgcgacatggatctgtctgggaaatgtatcctacattccacctcaccgagctaaggaagcggggcttggactctaataatggtgctatgccgttcgcggaaacgcggcca

SEQ ID NO: 92863 - DNA, 406 bp, Glycine max
  Clone ID: PAT_MRT3847_54870C.1
ggaatcaaggactcaattcctgcttggattaaatttgctgtacaggctcccggtgaaattccatacagcggaatatactatgatcccctagaagaggtaagattctagacttcttacatgtaggatacacttagaaaaagagatgacaaatctaaatatctctttttccattatgggatagaattgtatctatgacctctctttgtagtactcatcatgacagaacttttaatggtgatatgcaatgatgttgaaagttttgtagtttcttttaagccattggcacactctggctttattcttatattaggaagaaatatcccccactcttttgcccaaagggataatgttatgatcgatgtatataagaagtgtatataagaagtgcgatatttaaccatgtttc

SEQ ID NO: 92864 - DNA, 244 bp, Glycine max
  unsure (1)..(244): unsure at all n locations
  Clone ID: PAT_MRT3847_54871C.1
gcaagantggnacttcgttgnttngtgatgtccctttctgttctnttcactcttggtnttngcgagagnnagcnatgccaganacgaagatntttggcatgctgtttngccaaacantnccatnccaagttcattgcgagatcttctaaagcctgncnctgcnagtgttnanatcgntgatcacnctntgcaaattgaagaaacacagtgcccganancctncttctatnaagaagacctncat

SEQ ID NO: 92865 - DNA, 471 bp, Glycine max
  unsure (1)..(471): unsure at all n locations
  Clone ID: PAT_MRT3847_54872C.1
acggctgcgagaagacgacagaagggcatggaaaaataattaactcattttttcatgattaagtaaataaagttttaaattgaaacaataatgaagtagtaatctttgtagcacaatgaggtgttacaatgattactacattttagataattgcttggtggagaaaggtaagtataagagttgtgatagaggtagtaggggtcaaaaaatcgctatggtgaaatagttatagatgttttgcaataatatttgctgcaactagctgtcttttcttgttttcactatggcgaagccaactcttgctgcaatgaatgcttctacaaagacatttgtatctgttattgctaaggtgaggctagctatttgctatcttttctgcaaagacatttatctgctatcgctacaacgaggtcaaccctcaatacaataaatgcttctacagaggacaactntgtctctatacttgtcatt

SEQ ID NO: 92866 - DNA, 324 bp, Glycine max
  Clone ID: PAT_MRT3847_54873C.1
gggtgggaacttggtgttttgttttttttttttgtagtactaacaaccgcccaatgaagggatgatatgcacccagaccctggagcgcagcgcaattcgcgcaggagagaccaaacgacccacacatgacaagcacctagcccagggacgccctccaagccaaaggatggataacaacctcaccaggggcgcggtttgttccaagcacagagaaggcttcagcatgccccccacacggtttggacctacgcagcccacacctggcttgaccttcccactttataagagaaggtgcccttcctcagcccaactccaccggtaggg

SEQ ID NO: 92867 - DNA, 411 bp, Glycine max
  Clone ID: PAT_MRT3847_54874C.1
ctcgagccgaatcggctcgagacggctgcgagaagacgacagatgggcggttataccaattaagattgaggtcgtggaaaatggcctcttccacatagtgtttaacatcgacaaaatatgggaatccaatgtcgaatacgagatgagtgttaatggaaaataacatggaaaggtgattccttggatgagcccatgagctcgtgaaaggtgaaaaacgaggaacattcttgaaaataagggggtgtttgatttgattattttctctttttattttcactcaaaataaaaaatgctgatgaaaatatgtttgattagattttagtttttatttttagtgaaaatattttttcaaacgaaccatatattagaaacaataaaatctcgtttttcttatttttaattgaaaccaaa

SEQ ID NO: 92868 - DNA, 412 bp, Glycine max
  Clone ID: PAT_MRT3847_54875C.1
aataagaaaaatatgcgggaaattggcaatactagggaagccagaaactttgatattttttggcctttggaccagaaaccatttgctgaaacccaatgaaattaagtcttgatttgaggggagggctgaacagggggtcgacaataagggcaatggggatgggatgccagcccacgaaaaaaggctgccgaatgggacttaagggaacatgaaagggtcataacctggtggtttaaccccaaatcttttaaggacaccggacacacttttctatttttctttaacttggtcccacgccataaccatgaacactttaataacttcctaactattccttcattcttttttttggacctggtttggctcacttttccttcttttcttggaatctcacttgacccgtgtgaagaaa

SEQ ID NO: 92869 - DNA, 431 bp, Glycine max
  Clone ID: PAT_MRT3847_54876C.1
ggctcgaggagggataagattcaagaaataataaacaacatacacaagtcaacgagtgcacttcgcttcgctttattttttaaattcttacatgtgccatgaaagagtgcatggcaatccactatcggtcacgccggccttcacgtcggaaacgcctgctgggagctctactgtctcgaacacggcattcagcctgatgggcagatgccaagtgatcagactgatggtggaggtgatgatgctttcaacaccttcttcaatgaaactggggctggaaagcacgtgcctcgtgcgaatgatgagatctcgagcctactgtgattgatgaaggtaggactgagacataccggcaactatttcatcctgggcagaatcatagccggtaaggacgatgctggatacaactttgcccatggccagtataccattgg

SEQ ID NO: 92870 - DNA, 339 bp, Glycine max
  Clone ID: PAT_MRT3847_54877C.1
ccttattccactcggctgcacattgattttgttcactgcacaactataatagggtcacactctacatactgtggtgctaaccaaccctatttttcctgaactggttatccagtcatctgagatcgctggccatttgattaatgataatacctatatgtatatatagaactatggtagcaaagagacccatggtgcggttatctcactcgagtctgcgcggatcattcacattccattgaacaagattgctaccaattaccactgcaatttcactacggcttatggaggtcagttgcatgcaaacgctaaccataatggttctatcatattttgggatat

SEQ ID NO: 92871 - DNA, 910 bp, Glycine max
  Clone ID: PAT_MRT3847_54878C.1
cggccgctcgaggcggcgggcggattcaaaggggaaaaaaaaaaaaataaaaaaagcgtgttgcacaaactccggctggccccagggccacgccgggcatggtaaatagtactattttgtgtcaatctcctcatcgatctcattttgtctctgattagagcttcaaaatggataccggtgaaggtaagtcagcacaagcaccaaacatcaatgctccacccactggacaatggactactggtttatttgattgctttgacgacactggaatttgctgttctacctggctctgtccacattccatttttggtcccaatgcggaaattatagaccaaggaagaacatcttctagatctgcaacttacatattttgtggccttagcttggttgggtgggcattcttatattcattcaaattcagaagcaagctaagagccctctacaacttaccagaagaaccatgcggagatctttgcgttcactactgttgtttagtgtttgctattagccaagagcgacgagaacttaaaaaccgtggattggacacctcagtaggttggaagggaaacgaattcgcaatgagaaaagctaacctagtacctccaccagttgtgcccgccatgactcgctagaatttctcatgtcaacgatacaatttggagtagacttgctgttatatacaatctggtgctataagttaggagtttaactttcttagtttttaatatctagtatcagttgctttataatttcctgttgttgagtatgtagccactttgaattcaataaagaagcatcagtttgcaagttacatatatacttttcattctctacaaaatctaaaaaaaaattatctccctaagatttcccacggacaacaatgattacctttatatgttgagtgttgcct

SEQ ID NO: 92872 - DNA, 937 bp, Glycine max
  unsure (1)..(937): unsure at all n locations
  Clone ID: PAT_MRT3847_54879C.1
gctgcgagaagacgacagaaggggactggtatatatactatttgatttgacgttgcttttcttgggtcattgctcatttgctcttatttgaaatccttgctttggggtgaaattgtagttaacaagaacatggtttctaaaaagaatgatggaaatagtcagtttaacatataaaatagaatgccaaaactgtcaactgtcaatttcttattattgttctttttttggtcagcagtggaagtaaatctgctatcgtgactaatacgacagtcgaaattgtggttcctgatgatactattgactcagcagtgataaattcaagaagcattaatgattttagtttgggattgacatctcgaaaaggcggcttagaacttgtgagtggaagtaaatctgctatcgtgactaatacgacagtcgaaattgtggttcctgatgatactattgactgtgtatacggggaaaatggtcgcaatttggttcgtctgagacagatatcgggtgccaaggttgttatccatgaacctcgtcccggaacaagtgacaggattattgtcatatccggtacaccagatgaaacccaagcagcgcagagccttctccaagcatttattcttagtggctcatgacatatcccctctctccaatggccccattatttagttttgttcgcttcctttttctctccacctgaaatcatgtaatatccagccttgtattattcccaaacagtcatccgtggttagtggcgtaagtgtagttatttaaaatcaataacttgattcattagtgcataacaaagtatcgttaagcctttcattcacaaacttggataagtttatatgcgtatattttntgttttcttgttcaccagcttaccatgttattcttatgaacttgcatttgtgatcactaattggatttgatttcaaattac

SEQ ID NO: 92873 - DNA, 375 bp, Glycine max
  unsure (1)..(375): unsure at all n locations
  Clone ID: PAT_MRT3847_5487C.1
gggggtggaccataccgctaggcggggagcccggtcgaggtggtgacgaaaagacctcctcatgtgcacaagtaggcgccggtggcggcgacgggaagcctagaggtcaatggcaattgagccgggccgagccgtgatctggtcgatctgccgatctagaccccttccgaattgatgcaccccttaagtccggacgttgttaagatcccctccggacattcgcgggacaacaatgacaacaataaacggacacgaaaatgannnanaaaaaaaaaaaaaaaaaaaaaaaagtggttgtctcagaggacttaagtccatgcatgtgcgtacgtgatgctacagtctcctcacagcgctattcaaacctaacctatc

SEQ ID NO: 92874 - DNA, 359 bp, Glycine max
  Clone ID: PAT_MRT3847_54880C.1
accccgtcggattctttgaagatctacgcgctaatcggctgagcgagcacagtggtcattatatttagaggaggagatgcggttggatttacatgaatcataaaggaataattatctgctatgagtgtcatgtttccaatgattcatgaacgcatgtaattactaataggcatctgaatggatgcggctatttggaagacatgagatcatgagatactaacatatctagctacactacaaggctggcatgactgatgcaagagattggacggtaaagtctgggattgcactgcgaagacatttctgcgtatgtggagactgacgatgttgtttaactaaacttatcatgttggaaactt

SEQ ID NO: 92875 - DNA, 496 bp, Glycine max
  unsure (1)..(496): unsure at all n locations
  Clone ID: PAT_MRT3847_54881C.1
tacggctgcgagaagacgacagaagggggtccttcaaagggaatggtttgatgaatattctgagaaacatttgcgacatggtgagagacccctgaatcaggataccaactcatagaaggggctgaaggaacacttgtcagattggcttgaggaaagttagtgttctgggggtactgattgtactgagactgatgagactgttgtatctgatgggaattagtgttctgattggagttagcagaggtctgagattgattctgatcaggatactgaatgggataatccataggctgagtaggaacataatcatcattgtgcctatgatgacagtaagaagccccatgaccatatttatgacagatttggcactggatatgagcaaatcaacctctgtgtggccaccattgcaaccaccacgattaaaattccagcccgcgttgccactgccaccacggccagcgcncgcgttaatgtacctatttccaccattgtaatt

SEQ ID NO: 92876 - DNA, 154 bp, Glycine max
  Clone ID: PAT_MRT3847_54882C.1
acactccaacgtttggaactctctccctaaaatctacggtcctggttctctctctctccgtgtgtgtgtgaatccacatgttctgatctcgaagtatggccttatgtgctgcacgcagtgcttccgtatctatgccaatgatattggcttcatc

SEQ ID NO: 92877 - DNA, 299 bp, Glycine max
  Clone ID: PAT_MRT3847_54883C.1
atgtttggtgtgcttccaaagagaagaatactgatgcggcatgggaagtcacagggaaaccagggtctggcagttctacatgtccccttatgcccacactcgatcaatattccacgagctcaaacggtatttcttgaagaagaggatcatcggcgtgagggaagagttgtgagtttgagaacgagatctcaagacctttcagagaatttcaatttctcaccttttagaaattgcaacaatttaaattctctaataaattacttttttcaattaaaattttctatccaaacgcactctaa

SEQ ID NO: 92878 - DNA, 577 bp, Glycine max
  Clone ID: PAT_MRT3847_54884C.1
ggctgctgcggtttagtagtgcagctaaacgtcgacgaacaaggaaggaataacgaaagagccttcaacgctgatttttgtagaatattggaccgacaaatagttaccagcttccaccctgtctctctgcgattgagaaagggactcacgttctctgttcatcacaccctctctctctctctcttcgtctctctctctcatccatgtgcatttcttgtctcatattaggcttcgagttcagaggtcgcccccttcatagcttagaagcaacttccgcaacgttttctccttgatttcttcagctctagttctctctcccaagctttctccagctttgcaactagctgtgtctggctctggccatcatcaagtcttcttcagaaaattacaaatggattcatcacaaagtgcagctcttgggggaaatggtgggagtggtggaaatgggacgttgatttctcaaaatattgacatggcagcctctgcaacaggagctgatgattctatgcagaagctgaaccaggtcagcaattccattcagaaaaccttaggccttatccatcagctttacctcaca

SEQ ID NO: 92879 - DNA, 449 bp, Glycine max
  unsure (1)..(449): unsure at all n locations
  Clone ID: PAT_MRT3847_54885C.1
gggggtgctcttatntctgttttcctcttttttttttttttttttttttggggctgaagcaagatatctcaaacccgatcggctttttgttttgggaaaaaaaaaagggtgacccggccaagctttttgggggctcatgttcaatgcaaaccactttttggtctacaggtcttggaacccactcccgctttgggggggccccccgaatacccacaatttggtgtgacccttttctgggagaagaatttgtggaaggtcatttcccgcccttctgaaccgcaaagaattctatttgtaaacaaaagggcccccccttttttggggggggcccatttaaaacccaaccttccctggttcacatgggaaaaatatttaccccctccaccagagaagaagcgcccgggccccctttactctaaccgggcccttaaaaaaaacctggaaatggg

SEQ ID NO: 92880 - DNA, 3675 bp, Glycine max
  Clone ID: PAT_MRT3847_54886C.1
cccacgcgtccggtttagtagtgcagctaaacgtcgactaacagggagggaataacgaaagagccttcaacgctgatttttgtagaatattggaccgacaaatagttaccagcttccaccctgtctctctgcgattgagaaagggactcacgttctctgttcatcacaccctatgtctctctctcttcgtctctctctctcatccatgtgcatttcttgtctcatattagtccgattcccgggtcgacccacgcgtccgggatttccccgacttcaccttagctatcgccgaaaacccgtaccttcatataaacatatatatatctgatactctcacgtttcacgcgtccttctcccaccgcaccccacacttccggcaccgtcggaactcagcaccgcacatctgcaccccacactcgtcttctcacaaccgtcaatcgcagtcacagcgcacagcttcgagttcagaggtcccccccttcactgcaacgttttcaccttgatttcttcagctctagttctctctcacaagctttctccagctttgcaactagctttgtctgactctggcatatatttttgttcttcagaaaaatactaatggattcatcacaaagtgcggctcttgggggaaatggtgggagtggtggaaatgggacgttgatttctcaaattaatgacatggcagcctctgcaacaggagctgatgattctatgcagaagctgaaccaggtcagcaactccattcagaaaaccttgggccttatccatcagctttacctcacagtttctaccttcaatgctgcctttcaaatgcctctcctccaacgcatcaatggccttgttgcggagcttgacaacatggttaaattggcagagaagtgcaacattcaggttcctatggaggttgtcaatttaattgatgatggaaagaatccagacgaatttaccaaagatgttataaacagctgtattgcaaagaatcagatcaccaaaggaaaaactgatgctttaaagagtttgcgcaaacatcttttggaggaattggagcagaacttccctgatgaggttgaaacttttagagagagtcgtactgctgcagctgctgagttgaaacgtcaggcacaaagcgcactgccaaatggagatgtgagagttaaatcagagcattgagtgatatatttcttgtgtcttctagcgtttatgtatgcactgtatagtggagttcagcactgttccttgtttctgcatgttggttaaatgctgtaaatttgatgactaatttttgcttactattaattacttaatttggctggttataattatataactataagctaatacccgtatcctctatcttcggatgctatgtgccgcttcaagaaaaacattctggtaattctagaacatgtaaagtttttttttccagggtcccacgcgtccgcccacgcgtccgcccacgcgtccgcggacgcgtgggggctgcgagaagacgacagaaggggcgccgaagaccactaccggatcagaagacaggttcaaaccggagcaaaaaaacttgttacgatggtttcttccgacaaggatccacgagaggaagtccttcaagcatggtacatggatgatagtgatgaagatcaaagactcccccaccacaaagaacccaaggagtttgtctcgttggaccaacttgctgaacttggagtccttagctggaaattagatgctgataaccatgaaaatgatccagagctgaaaaagattcgtgaagagcgtggctacacctacatggatgtttgtgaggtctgcccagaaaagttgccaaattatgagcagaaaatcaaaagcttctttgaagaacatcttcacactgatgaggagatccgcttttgtgctgctggaagtgggtattttgatgttagggattgcaatgatgcttggattcgagtgtgggtcaagaaaggaggaatgatcatcttacctgctggaatttatcatcgctttacactagatgagagcaactacattaaggctttgcgtttttttgttggtgagccagtttggactccacacaatcgtccaaatgaccatctccctgcaagacaacaatatgtcaaggattttgtggaaaaggatgttggcaaccatgctgttgatgccgccgcgtaagatctggttccgcctaatcgtagtacgtgggactgagactttgtgttgctaaagtaaggtttgaacaaatgaaaataatggtgcctttaaataaagggtcccagctttttatgttatggtttttgtgtagatgaccctttaagccttttacccacgcctgtgtttctgtgtaggtgaccctttgaaagattaatatgatatctacatttcatgtacgttctatatattgtagatcagcagtgttgtttgtttctgcattgttgtttaatgctgtaaatttgatgactatttttagcttactatttattatttaattaaaatccgctcagaaaacagcatcgaacccgtcgtagcagaaaaacttgtcaccatggtttcttccgacaaggatccacgagaggatgtccttcaagcctggtacatggatgatagtgatgaagatcaaagactcccccaccacaaagaacccaaggagtttgtctcgttggaccaacttgctgaacttggagtccttagctggaaactagatgctgataaccatgaaaatgatccagagctgaagaagattcgtgaagagcgtggttacacctacatggatgtttgtgaggtctgcccagaaaagttgccaaattatgaacagaaaatcaaaagcttctttgaagagcatcttcacactgatgaggagatccgcttttgtgctgctggaagtggctattttgatgttagggatcgcaatgaagcttggattcgtgtgtgggtcaagaaaggaggaatgatcatcttacctgccggaatttatcatcgctttacgctagatgagagcaactacattaaggctttgcgtttttttgttggtgagccagtttggactccatacaatcgtccaaatgaccatctccctgcaagacaacaatatgtcaaggattttgtggaaaaggatgttagcaaccatgctgttgatgccgccgcgtaagatctggttctgcctaatcatagtaccacatgaaaaggaccaagactttgttgctaaagtaaggtttgaaaaaaagaaaataatggtgtctttaaataaagggtcctggcttgttatgccttgatgtaccctcgccagtgtttttgttgcctgtccctgtataaagattgcattgtattattattagaattgggtacagaataaacataagcatatgttagtatgctgatgtatatttatgtatgcttgggctgtatttaaattttacgagataaaattgaagcgggagaacctagccttaaatataggtgacgtcatagatagatgtggtttagtgtgatgctaatatttttcatgatgaatatctcatgcgctttaaagttgtccatcaagtattagtttttccatctgtggaaaagaaacagattgcaacaatcattcttttggatagaatatgatattggatacagtcatgcccgaaaaatgtaaaatttttgggttgggatgaattgttgctaatttttgggggcctt

SEQ ID NO: 92881 - DNA, 445 bp, Glycine max
  Clone ID: PAT_MRT3847_54887C.1
cggaattcccgggtcgacccacgcgtccggaccatcttgtccttctgagagtaggaactctggggagccatcttcagacggggctcttgtgaaactctgcttgggatgggcagattcggcttgtctgtctcctaaaagacaattttttgaatatgtattatatatttcagttgatgcatagtggagtgacacctaggaacctgcaggtggctgcgtgacacaagagtgagagcgagaggcatctctttgttaaagtttgactgtgtgggagctttctaaggagaaacagatctatctgcatacagcctgcagagtcctgccgtaatttacatgtgtctttacatcttccttgctggcatgaatgttttgtatttggaagtttttttttgagatactacataagaaactgttgaatcattattatcaatgaatggtaagatgattg

SEQ ID NO: 92882 - DNA, 186 bp, Glycine max
  unsure (1)..(186): unsure at all n locations
  Clone ID: PAT_MRT3847_54888C.1
tcagnacttgatcccaanacgggtaaggtgacnaanaagtcaccccgntgtctcactgcaaancanagtgcagtaattgaggngatttngaatnagacagtctgtgtggtagagttctctagtngnnaagctcntggaagggtgtccctaagatcaatggganganngattgctgtnggantgcna

SEQ ID NO: 92883 - DNA, 281 bp, Glycine max
  Clone ID: PAT_MRT3847_54889C.1
gtcatggccgcaggattttcgtggtcgcggtttatgtgccagctactggtcgattcatcatgaacctgttctaatgaaccagggacagttgacaaagtgtgtgagattgtgaataaacaactggctcttactgatgataatgtaatcaacggagagtcaaaatttacagcacttgatgcttattctctagacacggttgagattgtgatgggacttgatgaatcgtttggaatcactgttgaataatataatgctcagactattgcaacagtttaagatgc

SEQ ID NO: 92884 - DNA, 2059 bp, Glycine max
  Clone ID: PAT_MRT3847_5488C.1
ggattacgtcgtccttaatttatattatacacgtctctagctagctacataatattctcttcttccacacacacaaaagaaaaaagaaaattgtttagagtgtggagggtaaaaaatgagcaaagttcttcaggcgaagttggaggcaactccaacatgggctgttgcagttgtgtgctttgtgatgcttgctatttcaatcctcattgaacatattcttgaagaacttggaaagtggttaaaaaagaaacacaaaaaggctcttcatgaagcgctggaaaaggttaaaggagagcttatgctgctgggattcatatcgttgctcctagtgatgtttcaagatcacatttctaatatatgcatcccaaaaagcgttgcatccacttggcatccttgtgatcccggtgatgagcgtaaaaaaccagacggatattatgacaaatgcgcagataaaggtaaagaccaagtagcttttatgtctgaatatagtattcaccagctccatatattcgtctttgtgcttgctatttttcacatcctacagtgcatcatgacactgactttgggtagaaccaagatgtctatatggaggaagtgggaagacgaaacaaagagtcttggccatcagttccaccatgatcctgagaggttcaggtttgctagggatacaacgtttggacgaaggcacttgagctcatggagtcgatcaccaggttccttatggatagttagcttcttccgacaattctacgggtcacttaataaagtagactacatggcattgcggcatggattcctcgtggcacatttgactccagcaaatgaggcaaaatttgatttccagaactatatcaagagaacacttgatgaggattttgcagctgtggtgggcataactccaaccatatggttctttgctgtgctaattctgctcacaaatactcatgggtggtattcttatttttggattccatttatcccagtaattataatcttgttggtgggaacaaagctacaaatgatcataacagagatggcactaaattcggctcgagggggggaagtggtcaagggtgcacctttggttgagccaggagatgaattgttctggttcaatcgaccccgcctcatcctctttttgattcatcttgttctctttcagaatgcatttcaactagcgttttttgcttggagcacatatgacaatgggttcaaaataaactcttgtttccacaaaactactgcagatattgtcattagacttacaatgggggttctcacacaagttctatgcagttatgtgactttgcctctttatgctctagtcacccagatgggttctaccatgaaacctactattttcaatgaaaatgttgcagtagccctgaagaactggcatcacactgctaaaaagcacatcaaacacaacaaggattctacttcaaatacaccattctcaagcaggccaggaaccccgacacatggcatgtctccagttcacttgcttcacaagcaccctagacacagtgacagtccagtagtttctccaagggcatacaattacgaaaatgaacagtggggtgttgaagggatacattccccaagccaccacgcaagagatcatgatcctgatcatgaaaagaccatgcagatgcagatgcagatgcagcagcagcggccagctccaacagcagaattgcctcctagtggactcaatcctattcgaactcaacatgaaatcaacattgctttatctgaattttcatttgggaggggacaccacactggtagtaatactaataactaaatatgagtattagaaacatttccttgttttgttttgtttttttttttttttttttatctttttagcttcaattcatatcgagcacatctacgttgtaagtaaaagacgggcagtgcttttgaagatttttattatctgtatatgttaagatagtaacttttcctcttttatttttttaatcatccgatcaaccttatatttgttagtttttaaagattgaaatgaaagttaagtaatatatttttacaaaaa

SEQ ID NO: 92885 - DNA, 381 bp, Glycine max
  Clone ID: PAT_MRT3847_54890C.1
ggggaatcctctgtctacacatagaccctatataagaacacatactctattcacactgacatgctctcttctcatactataaaggctacgctgtcttatatccatcaaaaaccaaaaccctaatggcaaagcgcggaagacgcaaccgactcatctaccatcacggtctccgacgcagtttaagacaacgatggcccttatgcaacaggcgccattgccggtcacaaagtacatgacacgaggaaaatgagaaatgggtcccaatgaccatactgatccacctatttaaagatggaagaatccgaagccttgaacagatctacctacaatcgctctagatcaaagagcaccatatcatcaacacgctcgagggttccaacc

SEQ ID NO: 92886 - DNA, 308 bp, Glycine max
  Clone ID: PAT_MRT3847_54891C.1
cccacgcgtccggaagaatgttagctgataaggacatgaccaatgcttgcaaatcatctccacaaaaaacaacttaagttgcctttccacctgtgaggttaacggggctcataagagtgggcaatgttagttgtatatattgtatgacttgtaggatgcagtttgttcccatataagtatttaagttgactagtagatttttggaattgatcaatgagccaagatgtaaatttgaattttgtacaaaaataatgtcgtgtgatttgagactcgagtgcagttattttagaaaatcgtttcttgaagta

SEQ ID NO: 92887 - DNA, 1004 bp, Glycine max
  unsure (1)..(1004): unsure at all n locations
  Clone ID: PAT_MRT3847_54892C.1
accagaaatcgggtggaattttaattttattgagacgaatctctggtactaatgtactacatgtcttcacgattccattttacattcatcttagaaggatcgtgcttcagagcttacatgggtaaattgatgaaaacaagaaaaagataaaacacaactgctacaaaaacatttagtttcatttacactggactcaaaccaaccacaccacatgccaatcttcccccagcatttccagtgctcaaactaagttcttgcccaccctttccaaggtcatcctcaagctcatgaactactaaggctcttccaactactgaattgggtccaatgagtggtatctgattgtccacagttgttgcttctgcaactccatcggcattagcaactatgtttcccaggtcacccgcatggcgaattttatcctccggagcaccatgtttgagtttattaggattanaatgtgctcccgtagaaatacacccatttgtcgtatcaccatactcatgtaggtgaaaaccatgaagccccggagtaaggccagtgatgcgaacagaaactgtcgtcgggccatcgtcttcttggatgagagtggcgacgccttcgacggcggaggtccccttgaggacggcgacggccttcttggtggcggcgaagacggtgaggggcttggagcgtgaaagcgttatggattggggagtgagcttgacggagacgccggagaaggatgaccggagaaagggctgaggtcggaacggcgacggtgaaacgacagcgttggccgccattgctagctgcattgtgagggacgaggtgtttgtgatcggacgcgtgggtaaaaacacaagcagcaaccattaatcatttcagctgcaatgcaacccaagaaagaaatgcataacaccaatattccaaatcccatgaaattgtagatgaacctgtctcatcaagtgggaaaaaaaaaaggttggcattagcaaggaataaaaatgaatcgaacgcgtggg

SEQ ID NO: 92888 - DNA, 1024 bp, Glycine max
  Clone ID: PAT_MRT3847_54893C.1
accattaatataaaatatcaacataggttctttctcaagcagacaacaaggactacagcaatcaatttcattggggaataaacatctgactgcatgatgaattttattggggagtacagacccgactgcacgatgaatctccagtaaaggactaacaacatgttttcatgattcatttgcacactcatctttagaaggacattatgctttacagtttacattggtaactgaagaaaacagtgagtcatcatgcttcacagagaacataatatctgataacataacacgactgctacaaaaaattcgctgcactgattatgctggagtcaaaccaaccacaccacatgctaatcttccaccagcatttccagttgtcaaactgagttcatgcccaccctttccaaggtcatcctcaagctcatggaccaccaaggctcttccaactactgaattggggccagagagtggtatctgattatccacaattgtagcctctgcaaccccctctgcattagcaactatgtttcccaggtcacccgcatgacggacttcatcctcaggagcaccatgtgtcaatttattaggattaaaatgtgctcccgtagaaatacacccatttgtcgtatcaccatactcatgtaggtgaaaaccatgaagccccggagtaaggccagtgatgcgaacagaaactgtcgtcgggccatcgtcttcttggatgagagtggcgacgccttcgacggcggaggtccccttgaggacggcgacggccttcttggtggcggcgaagacggtgaggggcttggagcgtgaaagcgttatggattggggagtgagcttgacggagacgccggagaaggatgaccggagaaagggctgaggtcggaacggcgacggtgaaacgacagcgttggccgccattgctagctgcattgtgagggacgaggtgtttgtgataatgcaacaaaaaatgtgtgaatttgtccccacctgccgtcttctccgcagccgtcggacgagaggcgag

SEQ ID NO: 92889 - DNA, 1925 bp, Glycine max
  Clone ID: PAT_MRT3847_54894C.1
gacacaagtaaccagttgttgcacttgcataattaatatagaatattaacataggttctttctcaagcaggcaacaaggactacacaaatcaatttcgttggggaataaacatctgaccgcatgatgaattttattggggagtacacactcgactgcatgatgaatctccagtaaaggactaacatgttttcacgattcatttgcacactcatctttaaaaggacattatgctttacagtttgcattggtaactgaagaaagtaagaacgtgagtcatcatgcttcacagaagacataacatcagataaaataacacgactgctacaaaaacatttgcttcactatttatgctggagtcaaaccaaccacaccacacgctaatcttccaccagcatttccagttgtcaaactgagttcatgcccaccctttccaaggtcatcctcaagctcatggaccaccaaggctcttccaactactgaattagggccagagagtggtatctgattatccacaattgtagcctctgcaaccccctaagcattaggtctcctcctccaccagtctacaaatacaagtctccacctcaaggtctccgacttcggactcaccgcattctccgaccaccttaaagaggacgggctgttacacaccacgtgcggcacgcctgcgtacgtgtcaccggaagttattgcaaagaaaggctatgacggtgccaaggctgatatatggtcatgcggagtaatcctctacgttctcctagctgggtttttaccctttcaggatgataatttggttgccatgtataaaaaaatccatagaggggacttcaagtgcccaccgtggttctctctcgatgcgagaaagcttgatacgaaactgcttgatccgaatccgaatacgaggatttgtatttctaaagtgatggagtcttcttggtttaagaaaccggtgccgaggaagcttgctgccgaaaaggtggatttggaggaggagaagattgagagccagctggagaccatcaatgctttccacataatttccttgtcggaggggttcaatttgtcgcccttgttcgaggacaagaggagggaggagatgaggttcgccaccgcggggacgcccagcaccgtcatttcgcggctggaggaggtggccaaggccgggaagttcgacgtcaggagtagcgagaccaaggtgaggcttcagggtcaggagcgtgggaggaaggggaagctggcgattgccgcggatatctacgccgtgacgccgtcgtttatggtggtggaggtcaagaaggacaatggggataccttggagtataaccagttctgcagcaaacagcttcgccctgcgcttaaggatatcttctggaattcctcccagaattccgcacctgctagtgcttgaatgatgtctgattctcgtttttgttcaggaactttgagttgttgataagatctttctctctgtcgcccagaattgtgattgaggatataaaaagagaatcaacaacggatgattcgatatgcatgaaggttaattgattctctcatgtttgtgtttcaatttgttgaaagttactttcacctttttcttttctttcattgctgcctttgctctttattttgttccttctgtagattattatgtccttgagccttcacgagtcacgcctgtgcctaatacaaagaataggaattcgacttttttgtggcgtttcgttcttgttgagaaactcgtgtatgtgattgaggaattgcttctttggttgcatcactatcccaccccttgaagaattgctcgcgcgaaaaaaccttcaaaataaactttaaaggataaatcatcttttaatccttcataatataaacagctatcaaaataagaaaatacaaaataagtcctcttgctatctgcttcagaaaa

SEQ ID NO: 92890 - DNA, 2599 bp, Glycine max
  Clone ID: PAT_MRT3847_54895C.1
gctcagtagttgccggccgccctccttaaattttttttagacacaagtaaccagtcgttgcacttgcaccattaatataaaatatcaacataggttctttctcaagcagacaacaaggactacagcaatcaatttcattggggaataaacatctgactgcatgatgaattttattggggagtacagacccgactgcacgatgaatctccagtaaaggactaacaacatgttttcatgattcatttgcacactcatctttagaaggacattatgctttacagtttacattggtaactgaagaaaacagtgagtcatcatgcttcacagagaacataatatctgataacataacacgactgctacaaaaaattcgctgcactgattatgctggagtcaaaccaaccacaccacatgctaatcttccaccagcatttccagttgtcaaactgagttcatgcccaccctttccaaggtcatcctcaagctcatggaccaccaaggctcttgcatactgagggcaagtggcgagtgaggaatgcagagaaatgagaattcgtcattggctgagtccttctgaggcaggtggccctgccaaacgcagaagctccggcagaaattgccaccgcaaacacgtcgaagacgggtagtaatagcactcggtttcattctcccacattcccaattctgagcgttaagatgagtgagaaagagaaaggcaataatagtgagggacagtcgacgttgctgcacggcaagtacgagcttggtcgtgtgctggggcacggaacgttcgccaaggtgtaccacgcgcggaacctgaatacagggcagcacgtggccatgaaggtggttggaaaagaaaaggtgatcaaggtcggaatgatggagcaggtcaagagggagatctcggtcatgaagatggtcaagcaccaaaacatcgtctgaactccacgaagtcatggtccagtaagtccaagatctatatctccatcgaactcgtcccgcggcagagagctcttcaacgacgagatataaggtacctcaatcaccgacacttggacactcttctaccccctctgcattagcaactatgtttcaccggccgcccgcaacatgtgacattcatcctcaggaacaaccatgtctcaagttattaggattaaaatgtgctcctgttgatatacacccatttgtggtatcaccatactcatgtaggtgaaaaccatgaagccccggagtaaggccagtgatgctaacagaaactgtcgtcgggccatcgtcttcttggatgagagtggcgacgccttcgacggcggaggtccccttgaggacagcgacggccttcttggtggcggcgaagacggtgaggggcttcaagcgtgaaaacgttatggattggggagtgagcttaacggagacgccggagaaggatgaccggagaaggggatgaggtcggaacggcgacggtgaaacgacagcgttggccgccacagctagctgcattgtgacggacgaggtgtttgtgatattgcaacaaagaatatgtgtgtgtcgatttgtggttggttgaggatgaaaggaagatatataatcaggagacgatcacatgctttccacataatctccttgtcggaggggttcaatttgtcgccgttgttcgaggagaagaggaaggaggagatgaggttcgccaccgcggggacgccgagcagcgtcatttcgcgcctggaggaggtggccaaggcggggaagtttgacgtgaagagtagcgagacgaaagtgaggcttcagggacaggagcgtgggaggaaggggaagctagcgattgcggcggatatctacgccgtgacgccgtcgtttatggtggtggaggtcaagaaggacaatggggatacgttggagtataaccagttctgcagcaaacaacttcgtcctgcgcttaaggatatcttctggaattctgcacctgccagtgcttgaatggtatattatatatatgatgtctgattattgttttacaacaccatttgtcgaccttgttattttattttatttttgtttaggaactttgagttttgttgataagatctgtttgtgttttgttgtttaaattgttagtttggtacttggggactggttagtgggtacttactctctctgtcgcccagaattgttgttaagagatgcacacgttgtggatgattctgtcatgtttgtgtttcaattatgagtgtgtaatttggagtgcttgtggggcttactttcacctttttcttttctttcattgctgcctttgctctttattttgttccttctgtagattattatgtccttgagccttcacgagtcacgcctgtgcctaatacaaagaataggaattcgacttttttgtggcgttaaaaaaaaaaaaagaaactcgtgtatgtgattgaggaattgcttctttggttgcatcactatcccaccccttgaagaattgctcgcgcgaaaaaaccttcaaaataaactttaaaggataaatcatcttttaatccttcataatataaacagctatcaaaataagaaaatacaaaataagtcctcttgctatctgcttcag

SEQ ID NO: 92891 - DNA, 267 bp, Glycine max
  unsure (1)..(267): unsure at all n locations
  Clone ID: PAT_MRT3847_54896C.1
taatattantaattntcatgatttnagaagcntncgnttcaaagcgaaaagncctnatagtagaagaaccctccataaacctggagtnagtacatngataccccccatggnacnacacattcgaagaacccgtatacataaaatctagacannaaagganggaatcgaaccccccaangctggtttcaagcnaaccccatggccnccatgacttnttcaaaaaananaaanaaacaaaaaanngggggccacagttgnataacatnt

SEQ ID NO: 92892 - DNA, 474 bp, Glycine max
  unsure (1)..(474): unsure at all n locations
  Clone ID: PAT_MRT3847_54897C.1
cccgaattccgcctgaggacggctgcgagaagacgacagaaggggaggcctaaacctctatttggaccatttggcccttgaagcatttgatttcgttgcatattggttaagacatcatttgaattctaatttctattaaccaaagcaggatttgattgttctctatcattcattattcgagctaggatattaacattttttttcaggattattattattaataggttcctcttgtataggtacttcctgaattacatgtctattcccaagttggtttctaggaatgaccaaagtatctctttttcgagttaaaatatcattcatctactgataaattntattggtagttcttaacataggatttaagattgaggcgatatgatttgttaaagtgttaaccctttcatgattaatatggtctatttgttgtctaaagattgctaatgtttcattaaaaacaactgtaaagatcat

SEQ ID NO: 92893 - DNA, 284 bp, Glycine max
  unsure (1)..(284): unsure at all n locations
  Clone ID: PAT_MRT3847_54898C.1
gtctcttcatctcgaganagagacagagaaaagacagagagatggggaagaaagaaaaagctaaggnacgaagcgaacaacgattgcctganctacacttcagaggaccattccctattctcatcaaccagangtggtggtccaaggcaaactgtggctntggttacaggtggncntagaggnntcgggtttgagatttgtagacaattgcccatncatggnttgactgtcatactgacntcaaagagctatgcggtgttgaatcattcaggcttgcaagangg

SEQ ID NO: 92894 - DNA, 758 bp, Glycine max
  Clone ID: PAT_MRT3847_54899C.1
tagataaaatacaatgtaaatgaattcgggcctcaaagaagcattttttttatataaaaaatatggaattgtagaccacatgggagatcacactactgaaagctaatacagttaataatttacagcttgatcttttcagaacagaaacaacaggaagcctcaatttccgcccaaagaaaggcaattaaaagaatcctcataaatttaacaccaaaaggactttccatccacgtttgctaagagagaaattataagccacaccggctgctagaagtgtattattgatcaacattaattgcggtttactgtgcagcggtttacttgaaaaggcttttaagatgtgcaccaaagagtcttaccccacatgactagtcatgaatcagagaacttctctcaatcagatggaagtagtccaagaattaatttgtccttcagaagcacaagaagatccggtttcatgtttttaacgttactggggtgatgtagaagacgcaaccgcaacttgtatgagcggatgccctggaagttttggtgactcaggacttggttgaagaagggatgccctttcagggtttgaaagcataagttgttgcatgtccttggaaagcacactgaaaacggcccaaaggtctccctttagtttctgagaggtagccatcgaatcaatgccactctttccagattgctgcagctgtatttctctgaggagaagtctttctatgacactggaggaatccacaatttccaattcaggcagt

SEQ ID NO: 92895 - DNA, 400 bp, Glycine max
  Clone ID: PAT_MRT3847_5489C.1
cgagggcgtgaagtatgttggcttctaggtgcatctctttatagtgttgtgttagttgtttgtgtgtcaattaatagcgtgatgctctgcacctaattctgagttgaattccatcaattctcatttgcttttgtcaattatgcattcctatttgcttccagttttgtgcatttcctttgggatctgtgttattgtccagctttggttgtgtggtgtttaatttcaacacttatgttcataagtgttcatgtttgttcttgagggattttagataaacccttgtgtttgatcgttggaaaaattgtttaagcaaatttgagtgttttgcaaatgttgaaggttgagtattagcaatagaaaaggactgaaaagtagataaaaaaacgaaaaagatattggg

SEQ ID NO: 92896 - DNA, 412 bp, Glycine max
  Clone ID: PAT_MRT3847_548C.1
ttggggggggggggggggggggggggggggggggggggggggggggggggggggggggccccgggggggggggggatatccctaaccaaaggggaaccataatttggccccgaacccaaaaccgggatagaaaacccacaggaaggtgaccgcccttgggcttagcttacggggaaggccccaaaaagctctcacaatttggaaaactaggggagataaatacaagggggggaggaatatggaataccaaaaatcaaaatagggaagttttttaaaggtagaatggaattagataggcccccagcaaccaagtaagggttggtgaggtatggggaggcaaaattacccaaacgatgccaaaaattaggcacttttggaaaccaaagattccccccaaggttgtgcaaaccca

SEQ ID NO: 92897 - DNA, 502 bp, Glycine max
  Clone ID: PAT_MRT3847_54900C.1
atgctccaaacgcttggtgccattcgcacagctttaaattgtatttgacaaatttacttgacagttaacttaatcatcttttagtgctggataaaatgcgtagttgggacattaacggactgtttgagatcaccaatgcgcttgttcatgttcacccgctgggatacttaaaaccccaaactggtctataccgcacaagagtatgcatggattgaccattgaccttaattcagggataggaggatcttgaacatggctatcgaggaacgacaccaactgaataatgagtgaccattatcccgaacgtacctttgacaatatgaaatgggtgaggggaccatccacgaaacctttgtttatgacgacatcaactaatttcgcatacgaacacaacatggatttggcccgaacaaactaaagtgttttgtgggtaaagggccaaactgaaaaggctggtgcgcttaaagatactaacgggacctgaatagtagcaggtgctaag

SEQ ID NO: 92898 - DNA, 291 bp, Glycine max
  Clone ID: PAT_MRT3847_54901C.1
cccacgcgtcctctctatctaatgagagtgcgtggtgtgtggtgtgtggataacaaacattccaacccacctaaacaatcccaaataacctgcccgccccatctaagcatcacatcttataatactcgctccaccaaccaaataccttgcctatcttgtcccccaacttaaactcacaaaccccttgcttcccccaacttaacatccaaacacccaatccccccccccccacctaccttacaacccaaacccccctcaccaaccgccctactacccaatagccccacccca

SEQ ID NO: 92899 - DNA, 353 bp, Glycine max
  Clone ID: PAT_MRT3847_54902C.1
gttaaaaaaaaaaagatgtttattactcctaaacattgcagtgggcagtttttcacctttaagttttgacaattccagatttttgattacagggactagtaattacaaaaaccttgggaacactacaacaaaaactcaatctcgccctaaaagcaaacataagcttccaaaatgaaatattgatttgatccaccttacaagtccagtgcactttaggaacggaatttgggatatgttttgcagcttactagaaaatagtaatgccattttttgaacctatagtgtttccaacgaagaggaacaaagatgattgtgaacaaacaattccattgggattgtttgggggtctcgcc

SEQ ID NO: 92900 - DNA, 404 bp, Glycine max
  Clone ID: PAT_MRT3847_54903C.1
gggcccccaaacaaagggattttttaacccctccgggggtaaaaggggaaaaaaaacaaaaaagggcaaatccctcctaggggtttttccaaaacctaaaaaagcccccaaaaaaaaacattccccttttgggaaaaccaaattttttttcacaggggcgaaatattaaagccccttagggaaaccccccttcccaattttcccaattccagcattttaaaggggatctgggggaaccccagcccctatcctccccaaattttggggaaaaaaaaaaacccccctttcaaagcccttgggggttccttttttaaaaaaagttccccttaacatccaaaaagagggtttggtaaaaaaaattggttgccccctccacaagaacgggaaaaaaaaaccccgggggg

SEQ ID NO: 92901 - DNA, 472 bp, Glycine max
  unsure (1)..(472): unsure at all n locations
  Clone ID: PAT_MRT3847_54904C.1
tacggctgcgagaagacgacagaagggcccagttctattattgatccccctgatgcccctctaatcattacaacattcctttataatagaatgctcatacctctactactcataatcaatccagcaattcccttactacccctcaacctcacagactagcattaaatattattttttggggcctacagccgaaccttaaaaggcttatctcacctaaagtcacggttcctcacagtaccttgttagtcgtcatttatgactaacttttgggttgaaaagctttttgaaaatcatgttttttccccaatttatggggctttttgtaagtttgtacatatttctagggttagtttgatttttatgcaacagatatttccttncttgggatttaaagaggtttcaacttcagtttcaggggaaaagatgaaaaataaaaaggttgttgtggctggggtctcactaaacaagactt

SEQ ID NO: 92902 - DNA, 324 bp, Glycine max
  Clone ID: PAT_MRT3847_54905C.1
cccatgcttccgctccttccctgagacaagcgtgatagctcgtccagggaaagagcaacgacacaggggtttgagtcctggcgccatcgtggccatggtggtcgcgaactgcgtggcactgctcgtggtggcgtcgtttgtggtggcgcattgttgtgctagagggaggggttcgagcttggtggggagtggagagagctatgggaagaggaagagtgggagcagctacaatgggagtgagaagaaggtgtatggtggtggtgagagtgatgaaactagtggaactaataggagtaggcttgagttatttgaacggtggagtgc

SEQ ID NO: 92903 - DNA, 454 bp, Glycine max
  Clone ID: PAT_MRT3847_54906C.1
aattcggctcgagcttcaaacaactggaatatttactgtgtcactgtttcaagccttgaatagcctcaagaattccttgagaatgagtgactcgtgacaagtagtccattcagataaaatgaaaaacatctcaagctatatattagacatatacatcacaaacttcatttactatgtatgaaagacctagagagaactggcatagtttaagggctttatttagtttcttcttttattcaatatatttattatcaggtatgtgtacatctaagagagagatatctggggaaagtgagaggagggacagtgaaagatgttgtccaatttgattttctgtccttccagtatgtttgcgacattttgaggaaaaactgttaaaatatgttgttttttcttgctaaaaactggatattgtttcctgacttggtaaatttgaaacatgcttcattttcct

SEQ ID NO: 92904 - DNA, 493 bp, Glycine max
  Clone ID: PAT_MRT3847_54907C.1
ggctcgagataaaggaaaaaaaaataaaaaacaaactgtaacaaaagctaataaaaataaaaaggtggaagggaaaaaaacgagtgcaataaggaattggtttgtgggcctgccgaacccctcattagactgcctttccatctggtgaaggggatcaaagatgaacgtgctaatcccgggatttgtctatattgcactcgaagaaacgcagccatggttgggctctctaccatacatttccctgtcctttgtatacactacgatttttacttctttgactagagggacccggagggttgccttccgagcacgtttctgcagatggacagtttttttctacagcatatccatcttgacctaagatttcgtggagatgatggaacaaacaactgtgaccttgtttaactgtacttcacccgggcatagacaccgcagacgacacgcttatgcccctggctttttaaacaacaagatatgatctcctgtccgtttt

SEQ ID NO: 92905 - DNA, 160 bp, Glycine max
  Clone ID: PAT_MRT3847_54908C.1
tctttccccaaatagtcaaacaaatattttgacaactactaatattcagttttttaagattttttaaaaaattatatacccaaccacactcatattacctatcttaatcattcaatccactaatccaaaataaattctattacttccattttactaatac

SEQ ID NO: 92906 - DNA, 417 bp, Glycine max
  Clone ID: PAT_MRT3847_54909C.1
ggaaagatgcgttattatgagtcaactcttctttctgcatacaaggcatacttgcaaaggctagtagccttagaaaagaagcctttatttcagcatgtagcagttcgttgtatttgttctttgcttgatgcaaatccccatttcaactttcgtgaaagtttgttggatgctactgtcagaaacataagctctcctaatgacgctataaggaaactttgttgttccacaattaattcactctttgcaaatgagggtaaacatgggggtgaagttactgtggaggctgttcgattgattgccgatcatgttaaagctcataattgccaaatgcacccagattccgttgatgttttcttgtccctttcatttgatgaggatcttgtgatggctaaaaggatagaagatgatcagaaattt

SEQ ID NO: 92907 - DNA, 124 bp, Glycine max
  unsure (1)..(124): unsure at all n locations
  Clone ID: PAT_MRT3847_5490C.1
ctcgagcgcggacatgcaaggggggagagccgtttgtaccaacctatacatccggagacgtanctagcagccggaattaactatgctgcccaagaattttttttcactaagaatggccatgttg

SEQ ID NO: 92908 - DNA, 615 bp, Glycine max
  unsure (1)..(615): unsure at all n locations
  Clone ID: PAT_MRT3847_54910C.1
agaaaaagagttagtgttagcagaagagacagagaagtaaacaaaccctagtgaaggaagagatgattcgcagaatcatcgcagtggtgagcagatcatactacacgagcaggtcgaagaaaccgagcctgtactcgaaaatcagccccctcgggaatcccaacactagtgtggtaccggtgctcgacgattgggtgttcaaggggaacaagcttcgtgtcgcagaacttcaacgcatcattcgtgaccttcgcaaacgcagtaggttctcccaagccctccagatatctgagtggatgcacaacaaaggtgtgtgcatattttctccaacggaatatgccgtgcatttggatctgattggcaaggttcatggattctcttctgcagaaacctattttgatgccttgaaggatcaacacaaaaccaataagacctacggtgctctcttgaattgctatgttcgccagcgccaaaccgataaggcgctgtcccatttgcagaaaatgaaggacttggggtttgcttcatcgcctctgacttataatgacattatgtgtctatatacaaatattggacagcatgagaaagttccngatgtgcttcgtgagatgaaac

SEQ ID NO: 92909 - DNA, 212 bp, Glycine max
  Clone ID: PAT_MRT3847_54911C.1
ctctctttcgatctaggtactaaccctaacgcgcttcgaatcgtggcttcctcaggctcgcagaacctctctcgaagataatcttcatcttcttcgtcttcggcattgcaacaagtaaacgcgttgactcggatggtttagcggatatttcggcggacatcaaagtcgagattaaagctgtagccaaagctatgattactaaggtgcccata

SEQ ID NO: 92910 - DNA, 346 bp, Glycine max
  Clone ID: PAT_MRT3847_54912C.1
ggggggggttcaaacccgattggggaggtttttttatgcccaaatttttcccggggaaccacccagggggggcccaacttttgttgaaaacctctttggcccgaggttcccccctaaaaggaaaggatttttctacatttggggggttaccaccattttcaaaaaaatttccccttaaaagattccaattccaaattcttaaaaccataaaataggcaaggtttttagtccccaaaaacagggcatccgggtggccctcttcaaagaccaacattttttgttgaccccaccaaaaaacccttggaattggataggaatttggcaaaaaaccaaagggcattttttt

SEQ ID NO: 92911 - DNA, 424 bp, Glycine max
  Clone ID: PAT_MRT3847_54913C.1
aaaaaggggaaaccaagttttaaacattaagctaaagaaaaaaaacagaaacttgttctgcccaaggcggggaaaaaaaaaaaattaaaaaaaatttaggggggggggaaggggggcccaacaaaaaaggaagggaaaaaaaaaaaccttgttttaaaaacaaagggcggcccaaaaaaccaacttgaatcccctggtgttaaaaaaatgtatggaagagggggaaaaccccgttggatttttctaaaaaggaaaaaatcttcgaaacaagggggattgggctaaacaaaaaaaaaatttttttaaaagcttttaaaaacccaaaaaaaaattatccccagggggccacttttatttttataacccacaattaaaattttgaattgaaaacaaaaccggccgcgggggtcaacccggaaattcc

SEQ ID NO: 92912 - DNA, 491 bp, Glycine max
  Clone ID: PAT_MRT3847_54914C.1
ggctcgagctctagcttgtccgcttttctatgaacatcctctctacaaccgacaacctccgactacatctcttgacagctttttaacgtgcacccgcgatttctacgatccgttcccatggtgcattctgtgcacccttgccgtaccgtaaagaaccctacgctgatatcacaattaggctcacgatttctcctacaacggaaagggctagcacttgctgcagcggcgactagatctgcaaggactacaccgcccactgaaccgacctcggacgcgctccctatcaagacgtggatgacttctaccgaccctgcgatccatatgaggcgaactggcgcctatatggacatgccagagcatcatcggacgggacatgaccggcataagaagtggctacatagcttccggaacctgcacgcggaatcactagagctaaggatggcatgaaccgcagggactggctttctgaggcaggtgcacacagtgcttca

SEQ ID NO: 92913 - DNA, 482 bp, Glycine max
  Clone ID: PAT_MRT3847_54915C.1
aaataatccctttaaccacattgctctctatctcaaacaaaaatgtttcatttgctaatggtctaaaacatggttcctctaacatcattaagcatgtttgtttaaacttttggatttgcgaacagatgttacgaggagaaaaaaccagtttcaactaaaagtggtttgaaaagcacatgattaagtgtgcaaacgtgaattggtgtgttgtattgactgttaagggcatgtttgctttcccatttcactatgtgggcacactttacaaacttagttttatgagaaactacaaattccaacttgtccattttaggttttaaatgaaaaaacaaacacgctgcattatggtgcaatcaagactaaatcttgcataatagtaagaagaaagtatatttgatgataataatgggtcatttcatgagctccattgacttagatctgcacagaataggtgcattcgaagttcctagatacttctccta

SEQ ID NO: 92914 - DNA, 882 bp, Glycine max
  unsure (1)..(882): unsure at all n locations
  Clone ID: PAT_MRT3847_54916C.1
atcctttgtttcgatgccaaaacagacccttgacaaccccattttttcttcttattttttttatctatttgtttttcagttaatctcattctttgaatttttatggcaataatattgcctttcagttttctctcttgcccccgaagtcactgaaaattcttgggaaaatctcaaaatcaggtttttctctcttttttttcttcccttttctgtttctggggcttaaatttcacttgagaattcattgaacccagatacaaaaattcaatcttttccctcttcccattatttttctgtgtacatagacacttatctgtaccactgaattgaatttctagaacgagagagagagagagagagagagagagagagagagagagagggaaaatggccagtgcacacggtcttgctccaattttcaaattgggttttgtgttttcttctgtttcaccatcacaaaggaagaggcaccctttgatgtttcctgcatcacactgtggattttccctcaaattctatggtgggctatctgccagatcctgcaagttcaaaaacccttcctttgtcagtgcaaaacacggttcattaaggggttttagggctctgaaatccgttgaaatggaccaatatgtgaccagtaacgatgaaatgagtgatggattctttgaggcaattgaggagcttgagaggatgacaagggagccctctgatgttcttgaggagatgaatgaccgtttgtctgcaagggaactgcagncttgtgttggtgtatttctcccaggatggaagggactcatggtgtgctttggaggtgtttgattggctgaggaaggagaatagggttgacaaggagaccatggagctcatggttgccatcatgtg

SEQ ID NO: 92915 - DNA, 528 bp, Glycine max
  Clone ID: PAT_MRT3847_54917C.1
gttatatgttactatccactctctgttatttttaatctattttagtcaacaactttggcttaattcttccaatgacacccggataaatatttcaatctagaggtcaacaagagaaaacctcaacaaacttttgacgtctaaaaggaatggtcagtacttcaactaaactatgtttcaatttttctagccatggtaacataatgtttaagtcatgtacctatgttgagttgttccctacgtggtgactattttatttttcaatacaaggaagattttttctaccaatagtagaatgggttgctagaccacttttctattgttcattattgttaacaacgtggaaaacataatatgaaatcatcttttaatataagacttagtgtatgagattaaagtgaaaagcaggaacatggacaacgtttcaaattaaaagacctggttttaaataaacagaaccaacatgagctgaaacaaattggttattaggtaatttaacatatgtatatacttttgtgtatgagtgaaaaa

SEQ ID NO: 92916 - DNA, 313 bp, Glycine max
  Clone ID: PAT_MRT3847_54918C.1
tttttcaacttcgcggtgtgagtgatacggagagtgctacccactccgaatatatcatgctactaaggtataattctcggtttcaacgtccaaccgcgatcttaataaacagaactatggcaacacgtctcaggcatttgctactctaccccgactctgaaaaaattgcaacaccaatgcccatggcagaccgacccttgtgccgatagaccacatgtccttccccgcacgccttgccgatcggaccctcagacttgcgccatcgcgtgcgatggctcaaaaggatccctacggagcgtatgcagcccaggcc

SEQ ID NO: 92917 - DNA, 353 bp, Glycine max
  Clone ID: PAT_MRT3847_54919C.1
accacgcgtccaataaggcgccaaaaaaataacaaaagggaattgcaaaccattaggaacccccatcccaattcttagccgccattttcccagggcttcaacctttcaagttaacccataaaaatttccacaccttggatgaaatccctcaaggataaggatcctaacccatctaaatttgaaaattcatttggacaggcaccgtttgatctggaaagtaccactcaggagctcaaaagtgatctgaaggatttatacagacacccatccgtgccagttgacgtttctggataccgtatagctgtagtcattcatgtcgcttacatattaaagataggtttccgtaagattca

SEQ ID NO: 92918 - DNA, 561 bp, Glycine max
  Clone ID: PAT_MRT3847_5491C.1
aaaaaaggaataaacccttttgaaagggatttttataaaactaacaaccaacaccctacaaccaaattcacattaaaaaaaacaggattttttaaagggcggtaaaaaaaaaaacccagccctcagaaggaaacagccccacccaaccatgagggaaaaccacacctctgcccaaaaaaaaaagggatcccgccccaaaaatttttttctttgggtccccaaaaccccccaatatttggaaaacacccccccccatccttttaaaaccatttggggggccacccttttttttgcatttttttggccagcctttgaaacgggaaaagtctaaatttctcggcattgcccacccaaaattccccattttcaaaagggctttgaccgggcccaacccttgagccagggggaggcaccttctttaaaaaaccaggaaatttttctttcaaggaaattgcaaaaggaaaaagggggtatcttgtcttcggaacaggggggccccttccccaaaaaaggcagtttttggaatgggaaaaaaacctttgggctggggggtgggacccc

SEQ ID NO: 92919 - DNA, 275 bp, Glycine max
  unsure (1)..(275): unsure at all n locations
  Clone ID: PAT_MRT3847_54920C.1
ctgagtcttgccattgaagtataagtcttgnccttctctcttcaactccgaacattagagatcatcatctatggctgcctcagtttccactgtcggagctgtcaacagagctcttttgaacctgaatgggtctggacctggggtttcagctcccagttcatccatctttgggagcagcttgaagaaggttattcgctcaagggtcctcaacacaacagatttcctctggaagcctcaagactgttgctgtagaagagaagttagagattgaagag

SEQ ID NO: 92920 - DNA, 623 bp, Glycine max
  Clone ID: PAT_MRT3847_54921C.1
ccacgcgtctgcttacacttagtactcgaaagaagatatcatcaattttagaacatctaaaccgtaaatggggtaattcaagcatagcagctggagaagtaatgctttttccttatggtattcaaagggaaaacttggttaattgtccgagatggacccaggaatctactcttagtgcagcagatatatatgcaatgattggaagtccacccatcttccgtttaaggtatggctggttctccaatactgagcttgggttattaaatatgcaagtgcctgtagcatctggctccatgctcagacaatacaaaagtactgtggacaatgctaaggatcagattgtgaattcagtttcatttcctacaccattgactaatactcattccatggagctctctgaagattgcagaacatccatgaacagaaaccgtactcttatcactgcttcaactgaggaatctcgtgatcctacagccaatacactgtggcatggaaaagatgttagggatggagctgtgtctacacagttggaagacatggatgagttgaaaataagcagtggagcaggactgtcagctggagagtgggctgatagccttaccaacattagtgtgggggatcta

SEQ ID NO: 92921 - DNA, 1508 bp, Glycine max
  Clone ID: PAT_MRT3847_54922C.1
attattatggttttagaagccttggagcaccaattattgaaggatcggaagaagaatgtgaggaagcgacccttacagggggggaattgtcttcctgctgcacctaccgcagtctcaaatcaaagtagagcatcaggaaatgatgcccgtgcagttaaactggtacttgttgacaatcaaaatattttaaaattgggaccttttaaaccatcaacgaagcgcactgtaaacatgggtgttaaccatagtaacaccaacccagattcaaataccatgaaaccaacaaggcaacgaaagaaatctggtacgatttcaacggctgcttataaaaaatgggagaaggctgcaattgctggtgtttctttagttgcagatgctgctgagcatttggagcgagctgcaactgttaaagaaattgaacaagaccaggagaatccaggagaaagatgttctgatcccgctgattatgtcctgccctctttagccaaatgtccacaaaagcaatttgttgataacaatgtgaacaatattatgaaacttaagctccagttatttccaattgatgaacctactcgaagagcattggaaatggataagcataatccacacctggagcttacacttagtactcgaaagaagatatcatcaattttagaacatctaaaccgtaaatggggtaattcaagcatagcagctggagaagtaatgctttttccttatggtattcaaagggaaaatttagttaattatccgagatggacccaggaatctactcttagtgcagctgatatatatgcaatgattggaagtccacccatcttccgtttaaggtatggttggttctccaatactgagcttgggttattaaatatgcaagtgcctgaagcatctggctccatgctcagacaatacaaaagtagtgtggacaatgctaaggatccgattgtgaattcagtttcatttcctacaccattgactaatactctttccatggagctctctgaagattgcagaacatccatgaacagaaaccatactcttatgactgcttcaactgatttgtctaatgctagaggaaacaatgtttacctgaatacaagcactgtggaatctcgtgatcctacagccaatacaccatggcatggaaaagatgttagggatggagctgtgactacacagttggaagacatggatgagttgaaattaagcagtggagcaggactgtcagctggagagtgggctgacagccttaccaacattagtgtgggggacctactttcaggagtgtcccaggatcttgataactgcatgaatcctcctattgcagagagttgttgtgatgttcagcaaattccttttagtagtgattcttttgatgctgctgttgctgctcacatgtgtggacaccaagacaggatgggacgatcctctctgggggtgggtatgtcttccatctgggatgctgaagaaacttgtgatgcctttttatttaaaaaggatcctattct

SEQ ID NO: 92922 - DNA, 275 bp, Glycine max
  Clone ID: PAT_MRT3847_54923C.1
ggggaaagggaggggactttcatttttatttttacggggctttggtataaaaaatgaattggaaaggggtgttccttattgccccccccagaaacattaaaaaagggctcctgcttttttatttaccccccgttttaattttatgagggaacaattttggggctcccccctgggggcccttattatgaccgcaaaaaaaaaatttttttacttgggaaagggggggggtttagctttttctttacgatttcccaaacaaactgggttttttgggg

SEQ ID NO: 92923 - DNA, 254 bp, Glycine max
  Clone ID: PAT_MRT3847_54924C.1
ggcctcgtgtctatataggttgcatgaaatcgggcgaggtgttctctgacttaacccacaagtggtacgaatcagactggtggaaaagtggtgatgggaaatcgtactttcgacacgcttctggtgaaatgtttgtcatatccagggccatagctcagttcatttctataaacaagtccgctctccggacatatgcccatgatgatgttagtgttggatcgtggatgattggccttgccgtgaatcatgtaaat

SEQ ID NO: 92924 - DNA, 143 bp, Glycine max
  Clone ID: PAT_MRT3847_54925C.1
tcttgtgtttgatcttggttaaagacaccttatttctcttatggctgccgctatgctcgtccgattgaaacaggtctgttcaggcatgatcttaccccatggcggggcttagtcttttttttaggggggggtaacttgatctt

SEQ ID NO: 92925 - DNA, 713 bp, Glycine max
  Clone ID: PAT_MRT3847_54926C.1
agacaacgttgtagccttttttttcatttctctgctcccacaacatggcttcttcgatctcccaaggtctcgtgttcaccacagccatggtcgtctccaccactgttctttaccttgcattctctgggcaaaagacttccccgcctttccaaattcccccaaattccagttcttcccactccaacaaacaaattcttcgctcttgcatatattcagaggagaagaaacgggaaatgaagaagaataagaagaaagtgaaatttgcggaaaatgtgatggtgaagttagtagaaagaaatagtaaggtaaaaaacagagaagaacaggggaggcaatacagagtatcattatcaagcagcgagtgcagaaatgaaattccagaaaaacgtgaaatgccagcgaaccgaattgctctgtataatgggattttgaaggatcgggtgcataggatggcgtgctgtcactaatcaccctatgcttcttcttcttggctcgctcttccatcttccttctgcggtttgtcttctccactgtaacctctttcaccgtcctttctgcttcctgagtgttcagtttttttcttgccggcaacgatctggcctgcatgactattaatgtttgtacatatttatcaacaagggtttaatgactattttttattattgtacatgacaaatttaaaaagattaaataagtctggagtcccatgtaaa

SEQ ID NO: 92926 - DNA, 542 bp, Glycine max
  Clone ID: PAT_MRT3847_54927C.1
ccccaaaaaaaccaggcctaaggaaaagggggcccaggccaaggagcaaatcttgttcagttaaacaaaaacctttaagcccaacattatccttcaaaaaagggaacataataaagccaaaaaagggggcttgggaataaaaaaaatccttttttccaaagggaatcctggctttcaaacaatcccaataaacttacgggggtctcgctaaaggctaaaaggaaagggggggggaaaaaagggatcaaccactggcccatcctgggaaaaaaaaaattgggcaaagtcccactgaatatcaccccaaaaaatcccccactggccggactttaaaaacttaaacaaaggacaagcccgggctccattcacttcaatctaccccaataacggggggacaaacttggaatgggggggggccacatttcttatcaaagaggggaaattcaaattaaaagggagggcaaacaaaccccggaattggaacatgggttccgggttccccctccccaaattgattacagggaaaagccaaaatccccccc

SEQ ID NO: 92927 - DNA, 302 bp, Glycine max
  unsure (1)..(302): unsure at all n locations
  Clone ID: PAT_MRT3847_54928C.1
taacctagttcttatccccagtacctagcaacatacaacaaaacaagagaaacgccgacgnnnnncatgagggcttttttaacctagcagagaatcttcctactctgcaggggcatctgtttgagacacagtacattggagattgctaaatgggactgctatagagcctgctcttacacagtacccattagagtgatagcgccggaaggcacgatattgacgcgagaatcggcacanntgagnngtgacccttacgcaaaatcnnnccctacagcagctacgctctaagagtgatccgtgga

SEQ ID NO: 92928 - DNA, 901 bp, Glycine max
  unsure (1)..(901): unsure at all n locations
  Clone ID: PAT_MRT3847_54929C.1
ttttttttttttttttttttttttttttttttttttttttttttttttttttttttttnttttggaaattataataattgtaagtaaaaaaatataattaaaacacacgaccacatttctgtaaataacttaattttgcattttcaaaatttactgataaattctcacaattttcctcactcaagaacgtgagacttagccgttcattttttttaatatttcaaaatgaaaagcatacttcctgctctttcatatggttagcagtagggatacttgttgtttggcaagtaacctctctgctagaaatgtaaggatctacatcggtcgaaatgctatttctacgtcgggccaggcaccgtctttgctacaggtgtcgttgtttcccgacaacgattacgacggtgcacccataacccgtcgttgtaataaaaaatggcaacgtcagacccactttaggacagtcatcgtaaacatgaaagcaacgatgagtattgattaatatnccgtcgttgtcttaagctttcaacgttcgcggttgtcattaaacgccgccgttgtattcagcantatcaacgtcgtttatacataaatgtcanntcgttgtaggttactacatcaacgtcgtgcatgggcaaacgccgtcgttgtagtaatgacttcaacgtcggccattaacataggctgtcgttgttttcatcattttcaacgatgttgtgtatgtcccactgtcgttgcagtttgttggtgtcaacgtcgggctgccaaagaacgtcgttgtactacgttcatcatacgttcatgacggctgtacttgtgaccgtcgttgtattggtcaantcaatagataacgacgagtnttgtgttgaccgtcattgaattccagaccctatgcagaagaaag

SEQ ID NO: 92929 - DNA, 397 bp, Glycine max
  Clone ID: PAT_MRT3847_5492C.1
ggtcgctccagatgatgggacccagaaacttggtaggaaaacacatcggaggcccccactggggaaccagctcttccaaaaccatgagacgcctcaaacgggcgggaaagcggccaccggccaaaaaaaaatggctattgctgtgaaaaaaagacgttgggcgttttggggaaaaatgccaccaccctgttccgaaaccttgtccaaaaaagggatcacagaattggtcaacttcgcaaagagaggcggtatgcgcatagggcaccattgggcttaaaaaaaacctgatgccctaagcccgggctgacggacgcggggaggggaattaaatcacttaaaggaggggatcccgaaatccaatgaatggggggataactcaagaaagaacatgggaaaa

SEQ ID NO: 92930 - DNA, 421 bp, Glycine max
  Clone ID: PAT_MRT3847_54930C.1
ttatttaattttttttttttttttcttacagcacttgtctaagagaattttttttctctaactcaacaaaagctgggaaccgaggttaagtttactcatcttctttacgccaaccgaactaccaaaaattagaacccacacatttcagaggaggcccatgacaaaatgcaaaaaaaaaagccaaaaggaacactctgtaactcccctggttaaggaggaactctactcaaaaaaacactgatcttgcctttcccccatgaataaacaaacccttgaaggctcgtctggggtgcgattgaaggaactcaagaaccacgaacattgttcgggcaaccaccaactccactaacatatccatcatttaggaaccccgcctctaatgggaatcatcatacgccaaaaaggcggttcacaaaatgtc

SEQ ID NO: 92931 - DNA, 1134 bp, Glycine max
  Clone ID: PAT_MRT3847_54931C.1
tattcccttcttttttgttcctcaaaataaaaaataaaactttttattatctgcaggttttgcatttgtgtttctgatttttgtgtacctaatcccaatccgtttcttttcaatcttctcttcgaccccatttcctagatctgcttgtttcttccatcatcaactaatcatggttcttcacagagaactcgatcatctcttttcatcccctttcgttgaccctcccaaagatgatgcgaaatccagtggcatgtcaattgaaaagaagattgagttcctcgagagtttgactggaaaggtcacaaatcggaggtctcggaggtggttaaatgatcgtctcttgatggaactagtaccacgtttaaatgcagaggaaattagaggcttgtttgctccaccaccttggggtgatgaagttccaccttcaacattttccatgacgaacatggaggagtgggacagattcaggaatattgacatggataaagaggttaatataatccattccctggaaaactctatagaaaagaggaaaggtcacattgatgctgacaagatggcagtgttgaatggttggcatagaatcgattgtagaacaagagatgcgcttcgccgtagttgtctttctgagctcattgagggttatgaggaatgtgtacgagctttcataacagaaagcacagatggagatattcttgaactacaaattcaggatccttttcatagattgttactgcatggagtttgtgagttctacaatctggcgtcggatacagtgtcaggttataatggcgtggagtcgtcaaggattacaaagataaagaggaagaaaaagggttctcctgtgctcccaaatatcaccctgtcccattttctgaagatgtccaaggaaggaagttggtagtttcttcaggcagtgttgttcatacaataaaactgaaccttagtgttgtcccagggtgaacaatgtgcaatatttcgtatttattcagaatatcactgtaaattagttcgatgacctgtattttaattggtttataccatcggtctacgcaagttgttgattgttggtttacattgttgtagctgattattctgattttaacaaatactatatcttaaggttgaaaaatc

SEQ ID NO: 92932 - DNA, 276 bp, Glycine max
  Clone ID: PAT_MRT3847_54932C.1
gtccgaatcccggtcgcccaaccttccttgaggtatttcacttctgcttccaatatttccttcctgtgaaacgacacagttggcgtatatcggcgccttagatcctctcacgtgacataactagaatgtctccggcagttttatcgtcaataaaccctgactgtcattgacatggtaatcatctcatgagacgaccaactttgtatattcatccgtgtggatctaaacgatctttgctatcaaggccaacatcacaagttgagaattgtaaattat

SEQ ID NO: 92933 - DNA, 173 bp, Glycine max
  unsure (1)..(173): unsure at all n locations
  Clone ID: PAT_MRT3847_54933C.1
ctcgctctatgtctcagtctctgtgtgtgcggctgaggattncgnacgantgaccttcncncgtttctcgcaaagtttnagtaatcantggtaaggnaaaggttcanatcaacattgtcgncattggacatgtcgactctgggaatnanctannactggtcacttgatctaca

SEQ ID NO: 92934 - DNA, 152 bp, Glycine max
  Clone ID: PAT_MRT3847_54934C.1
gtaaataaaaatgaggggtcgttcataattataacatagccgaatgcatggttgaagtggttgtttgttgctcttggaccctccatgttaaatggatggatactcttgtcccatcttatcaactggtagggcatatgccccaagccatgata

SEQ ID NO: 92935 - DNA, 243 bp, Glycine max
  Clone ID: PAT_MRT3847_54935C.1
tatttttttttttgttttgcaagggtatcatctagaaatggggcttgacaacaagggcgaaagttatttttccctttcaattctctaaaacttgtatggaaaaataaagtattacccctgccttcatgcccctgtaaataatactcttcttggattgcaattggtaattgaaaacggcggcccaattccgaggttaccttcgcccccgtgagaattccagctctttctggggccctcaacttt

SEQ ID NO: 92936 - DNA, 273 bp, Glycine max
  Clone ID: PAT_MRT3847_54936C.1
aaacagaatgatgacagtgcttacgcgctatatccattctacgccttccatttccaagatcaagtcagtgtcaattcgcgggagagatctcttctcttcaaatgtctgctctaaagttgaagaagcacttaatgtgcctccacccccaactgataaggttcttctgtctggaagcgatctgcttgttgtatcacactcttttatagaagccctagaacgtatcatctctgctcaaaatccttacaggcctggtaggtcattccttcatcattc

SEQ ID NO: 92937 - DNA, 328 bp, Glycine max
  Clone ID: PAT_MRT3847_54937C.1
accataatataccatccttggtttttgtcctatttcattgggacatagttaagaggcaggtgcttcagcaggcgaagggaccaaccacagaaggattatatttacaacatgcgttatctataggagagatcacaaacaaaaagggggtaaaagtctttcttttggagctatccacatactgattgaggctcacttccacaggagtatagttcaatccccaagcggtatgcctccactttggatacctgagatattggcacatactgggttatcatctgcacacttctctggaagtaggaatgtcaggcacaaatcacctaaaactgtc

SEQ ID NO: 92938 - DNA, 715 bp, Glycine max
  unsure (1)..(715): unsure at all n locations
  Clone ID: PAT_MRT3847_54938C.1
ggacactcccagagggaggacaaaatttttatttacgaatggctacagttacagcttcagagttacaattacaagatcaccgcttcagcaggaagaaattagcaggaattgtggttggctgtactatcttcatcattgcggttactgtattcggattgatattttgcattaggaggaagaaactcaagcagtcagaagcaaattattggaaagacaagagtaaggaggatgacattgatttaccaatatttcactttttatccatctccaatgccacaaatcagttttcagagagtaacaaattgggacaaggcggctttggacctgtgtacaagggcatattgccagatgggcaagagattgcagttaagagactttctaaaacttctggacaaggtttggacgagttcaaaaatgaagtcatgttggttgcaaaacttcaacaccgcaatcttgtaaaacttcttggttgttcaattcagcaagatgaaaagttgttggtttatgaattcatgccaaatagaagcttggactactttatttttgattcaacaagacgcacattattaggttgggctaagcgattcggaattattggtggaatagctcgaggacttctatatctgcatcaagactctagactaanaatcattcatagggatcttctggaggatgaggaaatcttcattattggcataaatggaatgtgggggag

SEQ ID NO: 92939 - DNA, 492 bp, Glycine max
  Clone ID: PAT_MRT3847_54939C.1
tttttcgtttggtttttttttttttccgcacccttttttttttttatttcgggtttgcgggtcctctggggaccaaaaattttttttttttttaacgcccctaaaaacccattttccttggccacctttaaaaagatccctcaaaaaaagggccaaagcccctgaaaaatttaaaacccaaaccgtgcgttttttaccaaaccccctcaaatcccacttagaaagggccccttttttttattttttttaaccctccccccttaccttcaaggggaaaaccctttgggaatcccttggaatccccgccgacgttttaaaatacgaagggcttctgaaccccctccaagccttttttgctattaacccaaaacccatgctccccatattcagcccccaaatttgaaactgaaaatttgtttgagaacccatggcgctgaaatccccggatttactctaaagggggccttggacccaacagatttccacaacccc

SEQ ID NO: 92940 - DNA, 460 bp, Glycine max
  Clone ID: PAT_MRT3847_5493C.1
aaaagttagagatgaactccaaatagacttgaactttgaaggaaaacagacaactattgaatcatatttcaatagagtgtaatatatttttttcagtttctatgaattattaatttatgattttcttgggatcgaaaattataaagggatctcacggaaaattattatcttattattttatcgaggttttcaattttttacattggcccaagtcgggaccgaatttattattttagagagtttattaatttaccaaatattaatttaaagagtttgtactgtagttggaaccgacttaggacacatcttagtagtttagtacttctagtgtgatagttgtctgatctggccataattttttttttattgattttgatgtattgtgagagaattttctccaagggcatgtaatttgttgtagcaagggtgtaaaatgtattttgcttgttaacataccaaa

SEQ ID NO: 92941 - DNA, 298 bp, Glycine max
  Clone ID: PAT_MRT3847_54940C.1
gataaagttcctccttcgttcgatcgcgtggtacacttacaaattcaaatgcaagcatttgatgttaccatcgttttttacttagatctgatcttaatcgattcctgcacgatgttcctccttccacgtttttgacgaattaattgggtcttgaagttgtagatcgaaccttgcacgtggtcttgccgtgttttattctcagatccttggaatcattagcaattttgcttagttgttctatcttcatgatgaaaatccatccgagtttttcaatgttacgattctaatgttatgaatt

SEQ ID NO: 92942 - DNA, 247 bp, Glycine max
  Clone ID: PAT_MRT3847_54941C.1
gttctagatcgcgagcggccgccattgaccactttactttataattctgttgattctgttgatgatgcaacgccttccccatgtgttgagatacgaaggttgaaggaaggtgacattttttctaaaaggtgaacaaaatgatgaaatgtctgtatcattagttctccgcatagctgatccgaatggtcagtataacttatagtagatttttactcttaacaaaaccatgtttataatatattgatag

SEQ ID NO: 92943 - DNA, 232 bp, Glycine max
  Clone ID: PAT_MRT3847_54942C.1
gatctcttccccagctgttgccactgtcaaccgtgccggtgcctgcatggttgctccattcactggcctcaagtccatggatggctttcccaccataaacaccaacgatgacgttgcctccattgctatctacggtgtaacagtgcaatgcatacaggtgtggacaccagttggcaggaggaagtttgatactctttcctacctgccagaccttgatgatgcagcaattggc

SEQ ID NO: 92944 - DNA, 223 bp, Glycine max
  Clone ID: PAT_MRT3847_54943C.1
gcgcgaacaattacagcttctgcaagaacccggctcttatgtcatggaacctgccaaagaaatgggaaacaaccacgtccttgtctatgtccacccataaggaaaatatgccgatgacattgacaacaacattgacattactcatatcactccatccactatacctgcactccgcaacgacacgcatgttcttcttcttaatcctgccaagccaccgccgatc

SEQ ID NO: 92945 - DNA, 218 bp, Glycine max
  Clone ID: PAT_MRT3847_54944C.1
aagaacctttctttgccgactcaattgccaccgacggggcggctgtggaaagctagcctacctctcatgcccctttgcctaatcggggtcatgcgcttcaaactggccattctcttgctaactgaaaaggacataggcgctctagcaatgattaccgttgaggaatctcgtgtattatttcttgtgatcccaagtttgtcatctgaacaacttgtacc

SEQ ID NO: 92946 - DNA, 414 bp, Glycine max
  Clone ID: PAT_MRT3847_54945C.1
cgtttccattctatctctatcttcacatatctctacctccctcaaacagtttatgctagctcttgttccaatggcttcctcagttaaactcttatttttgtgctttctctcattgttcatctctttctccatagctcaaccctctttcagaccaaaggcacttgttcttcctgtcaccaaagatgtttctgcctcagttcctcagtatgttacacagatcaaacaaagaaccccacttgtgccagtgaaactaacagttgatcttggtggtggctacttttgggtgaactgtgaaaaaagctatgtctcatcaacctcaaaaccagctcgttgtggctctgctcagtgctcacttttcgggttatatggttgcaatgttgaggacagattctgtagtcgttcttttagcaacac

SEQ ID NO: 92947 - DNA, 1990 bp, Glycine max
  Clone ID: PAT_MRT3847_54946C.1
gttgcactggggctgccttctgctttgcactccgttcacatgcggtgagtggtcggctctccgttcggtcccttctctcgatgttcatccctgtctccctagctcgcgcctctttcagtccgatggccctccttcttcccgttccccaagttccttctgccgccgtgcccctgttggccacactgatcccacatcccaccccacctctcgcagggattcgtgctcttgttcgtggtggccgctgcttgtgcgcggtcgccgtcttgggctgtgtcacgcgtcccccaaggcgtggctttttatctctatctttcttcacatcttaaccttgttcttaccagatggctgcctcagttaaactcttatttttgtcctttctctcgttgttcatctctttctccatagctcaaacctctttcagaccaaaggcacttgttcttcctgtaaccaaagatgtttctgcctcagttcctcagtatgtcacacaaatcaaacaaagaaccccacttgtggcagtgaaactaactgttgatcttggtggtggctacttgtgggtgaattgtgaaaagggctatgtctcatccacctctagaccagcccgttgtggctctgctcagtgctcgcttttcgggttatatggttgcagtactgaggacaaaatttgtggccgttctccaagcaacactgtgactggtgtctccacatatggtgacattcatgcagatgttgttgctgtcaattccactgatggaaacaatcctactaaggtggtttctgtgcctaaattcctcttcatatgtggatcaaatgttgtccaaaaaggccttgctagtggtgtcacaggtatggctggtcttggcagaactaaagtttctcttccttctcaatttgcctcagctttcagctttcatagaaaatttgccatttgcttgagttcttctactatgacaaatggtgtaatgttctttggtgatggcccttacaattttggttatttgaactcggatctctccaaggttctaactttcacccctctcatttcaaaccctgttagcactgctccaagttatttccaaggggagccctcagtggaatactttattggggtgaaatctattaaagtctcagacaaaaatgtagcattgaacacaaccctgttgtctatcgatagaaatggcattggagggactaagattagtactgttaatccatatactgtcatggagaccacaatttacaaagctgtgtctgaggtctttgtaaaagaggtgggagcccctacagttgcacctgtggctccatttgggacttgctttgcaaccaaagacattgggtctacaagaatgggtccagctgttcctggcatagatctagtgttgcagaatgatgtggtgtggaccatcattggtgccaattcaatggtgtatgttaatgatgtaatttgcttgggttttgtggatgctggatcaagcccaagcgtggcccaagttggatttgtggcgggtggttctcatccaaggacttcaatcacaattggagcacatcaattggagaacaacttgctacaatttgatttggcaacctcaaggcttggcttccgctctatctttttcgatcacagcaactgtgccaactttaactttacctcttctgcttagaatttgatattattctactatattcaaaacttgtatcttaattaagaccaatgtgtgtagacgaggagatgaataagtgaggttatatttatgcataacctccatagtcttgttcccttttgtctacaaaataaagagcacatggaggacgtattcatcttacatcttgaattactccattatacgacatggtaaccattgttataaagtgatgaataagtgatattatatttatgcatagcctccatagatttatttcctcttgtttgatggagatgaaaagacgtaataatcttaaaaaaaaaaaaaaaaaatcgagactagttctctcc

SEQ ID NO: 92948 - DNA, 385 bp, Glycine max
  Clone ID: PAT_MRT3847_54947C.1
ctcgagccgcctagctctttgctcgttattacatacagtatatactatattcagaagattgctagctacatactgcatcaattcaacgttgttcttgttcaccatagcttctgtcccagaaatatcatgggctttgatatctctaaaccagggcttcgacttggtcttggtcttggtctccatgatgatcactcatcagaaaattgcatgaagaccaatgaacaaagccaaaggcaaagacaaagccagaagaaaaaggaaacagatccatgtaacaaggcttacccatcacttaagttaggaccacccgatgatgaggcaaacaataataatcaacaaattacaaatattgaatccgatgaatactattatttccacccacatg

SEQ ID NO: 92949 - DNA, 328 bp, Glycine max
  Clone ID: PAT_MRT3847_54948C.1
acgaggaaaaggggggtttgttttttttatttgatttgggaagacaaagtcttttgcctacatacccgaatgggatcaaaatcatgtagttcggagtagaaagtcaagtgattggttttgattgattttaaagttcgaaaaaagaagagtttaggcaaggtaagaggccgaaaaggcatagaagaaataaaagaagtgagttcgattgattttaaatttgaaaaaatgttttgattgattaaagatttgattaagaaagaaagaataaagattgatcccttttttttttttttttttttttggaaattatgcggagataagtctaaac

SEQ ID NO: 92950 - DNA, 503 bp, Glycine max
  Clone ID: PAT_MRT3847_54949C.1
gccaagaagagaagacagaaggaaaagacaataatattatgaaagacttggaagatgggagccagatgatggtggtcaatttctacccaccatgccctgaaccagacctaaccttggggatgccccctcactctgattatggattcctcacactcctcctccaagaccaggtggagggtttgcaaatccaattccaaggtcaatggttcactgttcaacctatcaataacgctttcgttatcaatgttggtgatcacctagagatatacagcaacgggaaatactagagcgtgttacatagggttattgttaatgcagaaaagaaaaggacatctgtagcttctctgcatagccttcctttcaactgcaccgtgagaccgtcacccaaactcattgacgaagccaaccccaaacgttacgcagacacgaattttgatacttttcttgcctacgtgtccaccagagagccaaagagaaaggaattcctggactctaggaaattg

SEQ ID NO: 92951 - DNA, 307 bp, Glycine max
  Clone ID: PAT_MRT3847_5494C.1
aatacgggctttgattactaccttgcaaccgacgacacggttgcagtgacatggttctatggctataactaaggcttttggcaaggaacatgttacagggcataaagctaattgctccatttcagatgaatttatggacatatctcacgaatgtgtagatattccctagattgaatgatttgcatttgtcaccattgctatcattattgatggagtgggcgctcaaagaatgccaacgcggttaagatttgacgaaatctacaatataacctgttaggaagtgaacgggagagtaacagctaaccga

SEQ ID NO: 92952 - DNA, 895 bp, Glycine max
  Clone ID: PAT_MRT3847_54950C.1
tacggctgcgagaagacgacagaagggagataatggcgaaacggtttcagcctcacaaaagttccgacggtttatgatttatgtacatgccaaaggaatgattgtggatgatgaatatgtaattcttgggtctgccaatataaatcaacgatctttggctggatccagagatactgagatagcaatgggtgcatatcaaccccatcatacatggagtcaaaaaaagggacatccacatggtcaggtatatgggtatagaatgtctttgtgggcagaacacacggggaccatagaagcttgcttcaaggagcctgaatgtttggagtgtgtgaaaagtgtgaacaagattgctgaagacaactggaagaagtacacagctgatgattatagtccattgcaagggcacctaatgaagtatcctgtgtctgtaaatgccaatgggaaggtaaagtccttacctggatttgagtctttcccagatgtcggtggcaaggtgcttggctcccggtctacccttcctgatgctctaactacgtaataggcataatagcataccctcttaatttctacgtgaaataagtacaccaagtctcagagaagaagagagggactggattggattgctggcgtgcttggtatataaagttaaaaagaggccttgcccctgcattttttttcaactatttacacggtatagtatgcaacaggctgcgtatagtaaattattaattagtggactgtatgtcacagccccaatgtaaattcgtattagtatccattcttttttgccaagtggtggaacgcgctataaaccatggtatcttaattcttaaatcagtaaccccgcctgaaaggcaattgatttcaaggatatcgttcatcactgtactagtgc

SEQ ID NO: 92953 - DNA, 720 bp, Glycine max
  unsure (1)..(720): unsure at all n locations
  Clone ID: PAT_MRT3847_54951C.1
taaagaaattcaatagtacaacgcacgttaacaagaccaattaagtcaagctaccatggcctaacataacagccattatatgtgcatgcccgaataggcaattgtgacaagtctacctataataaatgtgtgattacatttaaggagcatttcattggtcgaatgatgtcactgaatataattccatccccaataatctactaaagatactttcatcaattattggctcaaaaggactgtcactagaaaaccatgagatacaagattgaaagacaaaacacccacaacttgaacaagggagagagcatagtgcttcagactgcagttgcatgcagattcattctgcaagaactgaaacatgaggcttaaaatcaactatgctcaatgctcattccacgaattgaatatactttacactctgaaggcttgcatttgtgtagcatgcagattgcataactacttaaaagtagcattcataacttcatattgaaaatttcgtgattaagaaaacactatcacgaaaaaaggcagtatgtcaagtcaaaacttgctcacggaatcaaaaaaggaaaaacaaaaaacacagcnnnttgcgcaaggaagcaccatgtgcttgtcttcgcttcttctgcttctccaacacccctttaacagaaatggggcacacgagaggcacctatttctgtctttttctactatctatactttacttcgcaactt

SEQ ID NO: 92954 - DNA, 594 bp, Glycine max
  Clone ID: PAT_MRT3847_54952C.1
gggaaaaagggttatggactgaaggcaattgagaatgtagctcaaggccagtttcttattgaatacgttggagaggtacttgatatgcaagcatacgaggcacggcaaagagagtatgctttgaagggtcatcggcatttctattttatgaccttgaatggcagtgagggcacagatgcaagtgcaaaaggaaacttggggcgtttcattaatcatagttgtgatcctaattgtcggacagaaaagtggatggtgaatggggaaatctgtattggactgtttgcattgagggatattaagaaggatgaagaattgaccttcgattacaactatgtgagggtttttggtgctgctgccaaaaaatgttattgtggttcacctaactgtcgaggttatataggtggtggtgatccacttaatgctgaactgatagttcaaagtgattcagaagaagaatttacagaacctgtcatgctcaccaaagatggtgaaattgaagattctgtacctacacccgagtattctaataatgttgatacacaatctgctaaacatatgttgaaagacagggatatattggacaattctacaact

SEQ ID NO: 92955 - DNA, 234 bp, Glycine max
  Clone ID: PAT_MRT3847_54953C.1
tttcacatgctacacaacgacgtaacgttgcgggtgttcgaagacgccatagttttacttttttgatatcactacataaaataccgtcgggttaatttttgatcagtgtgaatgtacaatcttgcaatctacaacatccatgcttacgaacacttctctacaacctcatatctctcttattgtgtcacctaaataaaattcactacactcaacttacacccctcaacatgcaca

SEQ ID NO: 92956 - DNA, 637 bp, Glycine max
  Clone ID: PAT_MRT3847_54954C.1
ccccatgaatttattgtctagcgctgttcatgcatcctccaccaacgagtctggagccccacgaatttattgcctagcactgttcggcaattctccattctccacttttttcggagccccatgaatttattgcctagcgctgttcatgcatcctccaccaacgagtctggagccccgcgaatttattgcccagcacttttcgccaattctccattctccacttttttcggagccccatgaatttattgcctagagctgttcatgcatcctccaccaaagagtctggagccccgcaaatttattgcctagcgctttttgccaattctccattctccacttttatctgtagccccatgaatttattgcctagcactgttcatgcatcctccaccaacgagtctggagccccgcgaatttattgcctagcgcgattcgccgattctccattctccacttttttcggagccctatgaatttattgcctagcgctgttcatgcatcttccaagaacgagtctggagcaccgggaatttcattgcctagcgctgttcgccaattctccattctccaatcttattcagagacccatgaatgcattgcctagcgctgttcatgtgtcctccaccaacgagtctgg

SEQ ID NO: 92957 - DNA, 303 bp, Glycine max
  Clone ID: PAT_MRT3847_54955C.1
cggacgcgtgggtttaaatgtggagatcttttgttggagatctcggctttgaagttactaagatgactcctccctacattaaatgtacagactctttcttcatagcatttggaaatccgggtggtgacaccatcaattatgaggctttaccgcacaagttgaagcagatcggagagattcaagaaaaagttgtattgaattttttacaggaggaatttcttacagcttgactaaatcaggtgcgtactgcaacatctctgacgagtgatgggtgtccatatttgtaagctgaggcacatgata

SEQ ID NO: 92958 - DNA, 1360 bp, Glycine max
  Clone ID: PAT_MRT3847_54956C.1
ccacgcgtccgcctcgagattttctctccctcaaaaaacccttcactcctttccctctcttttctaattttttttttagattcacccaaaacccgacaacccacacatggggaagtacatgaagaagtccaaaatcgccggtgacgtcgccgccgtgatcatggaggctccgccgccgcactcccacctcggcgtccgcacccgcgccaagactctcgccctccagaatacctccccggactcctccgcctacctccagctccgcagccgccgcctcctcaagctcccccctaccccgccggaaaatccccgccgctccgccgccgaaaccgccgccaattcccgcctcgccaaaacgacgtcgtcccgtaacgccgaaaagttcgcatctttcgatgacgacaacaataccgaatgctctttcggcgaaaatttcttagacgccgaacccagggaggaaaggagcaccagggaaagcaccccttgtagttttataagggactcaaatgccattcatacccctggttcaaccacaagacgcgtgactcgccaaataatccatgagcacatccaaagaaacattccaacggcttatgagatggaggagttctttgcttatgccgagaagcagcaacaaacaatatttatggacaagtacaatttcgacattgtcaatgaagtacctctgcctggacggtacgagtgggtcccagtactccactaggagtgtcatatggtgataatatgggatttcaagagccattagacttgtattttaattttaacaactagaagaagctttgactaaccatttagattgcttgaggctcttgtttaacaagctacaagggaaaggatctgtttagaaatttccaatatccgattagtagtttagtagtgtctttctgatctgtagggtgtagggggggtatatggtatatctagtttctaagtcatctttaatgtaatttcattaccttctgtttatataattcagcggggattagacatgatgttcttgtagagaggtagtactcatccatcttagttcttcatgctggaaatttggcttactgaagttttaaccttggggaccatcttaatgaatgtcttaatgtcagcgaagggattcaaacttttaagatgcctgacaatcagaatgtgtttgattaagcggttaaagtcacgttcattggacaaacccgccttccaaagccccaaagctaaaggaatgtgatggcgttacggaaaagagaaaacataaaggttaatatatttcggttatctaattttcatatactaatgttaaaaaaaacattgtattgtcaatcaatcataaacatgactttggtgattctgt

SEQ ID NO: 92959 - DNA, 407 bp, Glycine max
  unsure (1)..(407): unsure at all n locations
  Clone ID: PAT_MRT3847_54957C.1
cccacgcgaccccaaaacacgcggaagggagaagcangaaaaccggagacaggaagaagaagaagagcacccacagcgacgaaagaaagggcaacaagcggaagcagagaggaacccgccgcaaaccaccacaggctcaaagaagcacacgcaacaaccacacaagcagacagaaaacaagggcggccaggggccagagaccgcacaagaaagcagcgcgcacagcgcaccaancccacacgagccgcgccccccgcacccccagcagagacccnaggaccacacccgagacgggaacaacagcaagcaacacgacagaacaacacggcacgacaaccnccncccacgccccnaccagnncgcaacaccaaaaacacaagagcccccacacgcacgaccaacaaaac

SEQ ID NO: 92960 - DNA, 443 bp, Glycine max
  Clone ID: PAT_MRT3847_54958C.1
aaaaaaaaaaaacccccccctggggaaaaaaaaaaaacccagaaccccgggaaaaggcaaacccggggccccggaggaaccccccggcccccccgggggcctttacccccccttaaattaagggaataaatagggaagggggccccccccccaaaaaaaaagaccccaaggggaaaaggaaaacccaaccccccgggggggaaaaaaaaaaccaaattaaaaagccccttccccccgcccccccctgggggcgggggtggagggggggggccccatataccgggggaaaaagggcccccccccaaaattggacccaaacacgggcgcccctttgggggtaaaagaggacccccccccccgtttttctccggggggaaaaaccgcccctgttccccgcgaaagaaacccggacccccctttggggggtaaaaaaaccccccccg

SEQ ID NO: 92961 - DNA, 326 bp, Glycine max
  Clone ID: PAT_MRT3847_54959C.1
ggaggaagtgctgaataatgctctaggcagagtcaccactatcgaacaagacttggttgcaacaaaaaaggcacttgatgatgcccttgctcgacaagtagaactccaagctcaaattgacaagaagaagaaaaagaagaacaagttgttccgcttccgctgttttgctgcgtgatctcaaatgcatcaggaagagttgtaaaattggaggctttctatttcgactgcctgtttgattaaaaacctctgtccaatataaagtttgacattccttgacaatattgtgcatatgttgataaaattaaggcatggttttgttttaaaat

SEQ ID NO: 92962 - DNA, 960 bp, Glycine max
  Clone ID: PAT_MRT3847_5495C.1
ttttttgtaaagccatagccttcaatttttttaaaatttttttctgcaccctttctagttttttttttccttttaacaaggcaacaagttacaatcactgtttcaagcatgcaatgttaaaaaatacaaggttaaaatcaaggaaacatgagagagattgattacacaaatgatacttttgtccttcacgagagaatggactacaccttaatgtgtcagtgcaccaaaaatttaaactgggagtaattcaagcctaacaaggctaatatcatagatcgtgtacatgtttaaggactgtataaatacactgcaccttctccatgactaaggcgaagcactgagatttgaaaaaggagcttgtataactcatcaaggacgtcatttgatattttgtatggacagtaaaatatgttacccactattattagcacaatccatagtagcaatctagcatctgatgccaatgaggaccaaatgagaactgggttaaaacatgtcctttgtcaagataattcttcatcatctagccacctgagtgttggcaaaactttaacgagaaatgacctgaagttctcatcagctactgcattccctgttatgtttaactctgtcaatgtcaagcttccaaatatcaagaaagcttcccaaaattttgtggcattaatgctgccagtgaggatttcaaaacggtcccaggcaaattcttcagtatgtgatacaggagaagagcataagtatctcgtggtgtcaatcgagtgagagcctaactcattgtatgaaatattcaacactttaagtgacttaagcaatctcacaggccccaaagcagtaaaactaccaaatttattatgactcaaatttaagccagatagaagttgcatggcctccaccccttcgatggattgaagttcgttggggctaaggtttaccatttgcccccacataattctcaatggatcc

SEQ ID NO: 92963 - DNA, 325 bp, Glycine max
  unsure (1)..(325): unsure at all n locations
  Clone ID: PAT_MRT3847_54960C.1
acttgacctgctttaaagcatgtgcaaagtacaagaatgttagatcagcagcnccatccttgtantaggcaaagaccaancaancatcatcgcccatgctctcaccaacaaaaaattagaaatctgtaatcttagaaagcaagtgtggagttnctccctggatatactgcttaaacaactcctgttactctgcatcgaacttgggagtgcagatgttgatgaacctgttgatctgaataacagactgctggtgatcgaatgcgangggctgctgaaatctaaatgtgtggacaatatgagcaaccttgacaggtacgtgatgaac

SEQ ID NO: 92964 - DNA, 1262 bp, Glycine max
  Clone ID: PAT_MRT3847_54961C.1
gtaacctcgaagcgcagtaacactagtaaccactgattcattgttgtgttgtgaaaattgaaaaagcttcattcatcagaaatggctctacaatttctgaaacaccccttaaccatctcacgaggcttgcacaacgagacaaccttaacttttatttctcggctacgaaatccaaagctcctattctcagtgagatgcgaagacaatgctcagattgcaacttctttcaggagctatgctactgcaaaatcagaaaaggttttgcaagtgaggaagaaaaagcggttggatgaaatatgtgttgaaaaatatcagcaatatagtagatccgtcatccagtcatggattttgcaaggcaaagtatatgtggatgggaaggtgataaataaagctggtacccctgtgcctggcaaagctgttgtggagataaaagctgatgttcccaaatatagctggacacaagttagaagctgccattgaactgcttggtgttgatgttgctggtaaagtagctcttgattctgggctttcaactggaggatttactgactgcttacttcagtatggtgcatcacatgtttatggagttgacgtaggttatggacaggtagctgacaaaattcgaagagatgagcgtgtatcagtgatagaacggacaaatttaagatatcttgctgaactcccacaaaatgttgatttggtgactttagacctctcattcatctctattctcttggtgatgcctgccgtggtcaatgccatgaaggaaaatgcagcattagtgactttggttaaaccacaatttgaagctcgtagatctcaagtaggaaaaggaggaatagtgaaagatcctgctgttcatcaagaggtccttgagaagattataaagggagtagagaattttggtttctgttgtaaaggttggattgagtctcctctgaaaggtgctgagggtaatacagaattccttgttcacttcaacagaacccataatatagaggttcctgaagatctggagtaaattatagaatttatacttaatgtgcattttttcaaccttaggagaagattgtcagtttggaagatatgcgggtgagctgtattcttgtaaagtgatgagtagttgtgccattgaatgatagtggtcaaattttttatgaaccattgaaagaaatgaacaatgattagtgaatgtgattgataatataaacatggtattttgagcatagaaaagcaatttccaaatctgcatatgttaaaaa

SEQ ID NO: 92965 - DNA, 365 bp, Glycine max
  unsure (1)..(365): unsure at all n locations
  Clone ID: PAT_MRT3847_54962C.1
aagacgacagaagggatattgaacgaattaattgacttttctttttgaaagtttcgttacctgttangcgtttgatttctgctagtttttgaaatatgcttactatagttacattccaagactttgcatgtgtgtatggtgctactgttacttaactttcttaagcatgcttctttttttttttcatctacttggcttccttttatgttggcagatctaattccaaagctggaaggttgtgccatgtgccatgtgcacttaatacctctggaaggttgtgccatgtgcacttaagcattccaagactttgcagttttgatctgatcctagcatgttatacatggatagggacgattctgcaatac

SEQ ID NO: 92966 - DNA, 327 bp, Glycine max
  Clone ID: PAT_MRT3847_54963C.1
tagcgaaaaatgacaatcaagaacacattcattccccttctatatcttacatcgatagtcggttcgccctgccgcatgcctttcacatttaagaaaagtctcgaatcttggttcatagatgggcggaacactaagcaatccgaaattctctcgactgatattaaagaaaagagtcttctaagaaaatgcatgcaatctgaagaactgatattcttagatgacacgttaaaggaatgtccggaaacacatctgcagaacctgcgtactggaatctataaaaacaccttccagttgatctatacgcacaactgctatcgcatgaacacg

SEQ ID NO: 92967 - DNA, 168 bp, Glycine max
  Clone ID: PAT_MRT3847_54964C.1
gcacgcaaactcagctcggaattcggctcgagttaaaaaacacactttataaccaaacacacctcatggacagcaaccaaatccggccattcaccgcggaggacttctctcactcctacagcctatacgaagacacagactctaacaacagtctgaacaatcacaaca

SEQ ID NO: 92968 - DNA, 422 bp, Glycine max
  unsure (1)..(422): unsure at all n locations
  Clone ID: PAT_MRT3847_54965C.1
tcttcattttacaacgtcgtcaacgcttaggagttaggacagtgaatttctcaaacctcagctgtcgttataaaatccagcacttcccttctcagtttcgttcggttctgttctattctctgaacaatggcgtctctctctcacctcaacaaactcctctgcatgcccccgctcaactcttcaccctctatttcgccaccacgcagcagcgtcggaatttggaccaaaccctctctctcccccaactctccacactctcctccgccaccttccgccgncgaacgcaccctctcctccgcccgacgatggacccgcaaccgccggaaccttccgcgcccgccgcctcggcggaggacttcgtccacgtcacggatctgaagatggagagcctctccgagagcatggttcgaatcgacgagcct

SEQ ID NO: 92969 - DNA, 460 bp, Glycine max
  Clone ID: PAT_MRT3847_54966C.1
ggaaaaaaaaaatttaaaaattttcccatggtttgtttgggtcccgggatgacacaagaaaataccttaaaaaaaaaaaagggcccccttaggggggaaacccccccggggaaaggggaaccgggtccccctggtgtgaaagaaactttaatctacccttttccacaatcttgaaaacataatcggggggggcaaaaaaacgttgcaaaaacaaagcccaaagcgtttcccattattaaacttgccataaaaacccccatttttccaaatattttttttcccctagggcccttatcatgaaaagaaagacattccaattttggggggtacccctgaaagaaccaagggcctggggtggccctgttttaaaaaaaaaccgggggaaaaagggtgcaatggctcccccaaaaaaggggcctacccaaaaaatccaaggggcatcccgtgggttatctggggg

SEQ ID NO: 92970 - DNA, 302 bp, Glycine max
  unsure (1)..(302): unsure at all n locations
  Clone ID: PAT_MRT3847_54967C.1
ccccanccaaagggaaggaacaatggtttaaaacaacaaacaaactattgggttattaagggaaatctaatactgaaaggggcggaaaagtcagggggggccattgattatgaagggaattctaatattcaagggcaaaactaacaacttcacttggttacaacaaaacaaaggctcaactctcaagccacatttatatggggctcaaccaccgctcttggctattgcaaaacaccttcatgtcttctttgaaagcaggcaacgcagccctctcttaaaaggcaccaaaaacccttgaaccc

SEQ ID NO: 92971 - DNA, 184 bp, Glycine max
  Clone ID: PAT_MRT3847_54968C.1
tttggaaatttggataagaattgactcaaggggacttaggaggattaatgcaagaaaaagatttggtacaacaattataattaaatagggtataatattcctcgaactaatagcttttattagcgactgaaaccagggggagaaatttgattcctgatatcacttctatctaacaaataatatt

SEQ ID NO: 92972 - DNA, 482 bp, Glycine max
  Clone ID: PAT_MRT3847_54969C.1
cccacgatacgaacccattaggaccaaataaggggaagaaaagaggacattattctagagtcaaattaagatgaaggccattactatcattttgattgttctgcttgttctttccgttgggattgaaaatgaggggccattgaaagtgattgaagcaagaacctgtcaagataggttgggcgcgctaaactgtatacaagacgaatgtcatattagttgcataaaaaaacatggaaagttaacaaaagttgggtgcagtatgcctttatatgattgcatatgtctctacccatgttaataagtgtttgaccttcttcctacattgtccctatatgaatgtcaatttatttgtaccagacaatgatggaatcaaagaaaataaaattactttttgacaataaaaaaaaaaaaaaaaaaaaaaaaaaagccgcccgttttaaagatcccaactttacttccccggcctggcaacgtattacttt

SEQ ID NO: 92973 - DNA, 111 bp, Glycine max
  Clone ID: PAT_MRT3847_5496C.1
gatcagcctcctaaaacaatggcttctttcaatctgtcttattcttcctcaccagacgtctcgggtactctggcgagcaaacatgctaaatcattcattgatgcgcctgtt

SEQ ID NO: 92974 - DNA, 415 bp, Glycine max
  unsure (1)..(415): unsure at all n locations
  Clone ID: PAT_MRT3847_54970C.1
ggaagtgaaagattgctcttgtgttcaaacttcactttacaggtaagacggaggggaccggaacaactttgccccaccaacctatagctaccaaaccttatgaaccgaagctaaaaacaanaaaatggacacttaataatctgtcacctgtcttccttactagaggggaggtcctctccaattacctgatagaacatctcgtatctatggtaaggtataactggtaacgcataatctccggagttaaataaagaaaggctgcataggtgattacctcatctaacattaagggacaatttcgtatacaggagccctacctttgtttgtactaaattcaagcattctgaagatcatattggaccagttgccaattcattacactcaaatgaactcaataggcctggtgcctgccctg

SEQ ID NO: 92975 - DNA, 415 bp, Glycine max
  Clone ID: PAT_MRT3847_54971C.1
gacattacaccgaaatttgaatgctcataaatctcctcactccttgcgactagaacagaaatcaaacaaacgaaggagagaaagcttaaactcgtgagttcgtgcactgcttcttcttcttcttctttgcgagcgtcttcgaagaaacaacacgaaaatgtcggtgctgatcgtgacaagcttaggggaccttgtcgttgatttgcacaccaacaaatgccccttgacctgcaaaaatttcttgaagctttgcaagattaagtactataacgggtgtctatttcacactgttcaaaaggattttactgcccaaactggcgatccaactggcacgggaactggtggtgattctgtttacaagtttctttatggtgatcaagctcggtttttcagtgatgaaattcatattgatctg

SEQ ID NO: 92976 - DNA, 480 bp, Glycine max
  unsure (1)..(480): unsure at all n locations
  Clone ID: PAT_MRT3847_54972C.1
tcccggggggacgcacncgtccggtgcagatgcaagatgcataaagagagggggtgaagatatacatctccctacaaatgtataaacaagcaacgtgttgctacgaggggtggatattatctcaggctactgaggcagtctaccacttagcatatgctgagctactttatacgcttggtggggtagaaaaccttcaaactgccaacagatactggggatgtactattgagtttagccggggcgaaaataccagagcactctttaatatatgcttgtgcacctctgctgttacacaggttactaaaggggaaagcaaggaggacaaagaagggggccatttacaatctctatcagccaatggattanagaaagagtacaatcagagagctcccgacaaggtttctcaacttacaactgggcttcaagagtgtaacattgtgatcatgatncagcatctcttaaagagtattatttagttac

SEQ ID NO: 92977 - DNA, 301 bp, Glycine max
  Clone ID: PAT_MRT3847_54973C.1
acgaaggtcggctggagaagacaagaaggtcggctgcggaagacaagaggggaacgcaccaaaaagaaatctcaatttttgagcagcaacactttctctgttctcgaaaattctcagttgagagaaaatctgatatgtcgggcaagcgtatgtcgacatcacctttggtgacatcgaagtaccacctactacgctgtatatcggcaaacggagcgttggctcaagaccgacttcctcagtaaacctgagagataactgcatatgaatgacttatgagcctggacacttgctcaactggatt

SEQ ID NO: 92978 - DNA, 445 bp, Glycine max
  Clone ID: PAT_MRT3847_54974C.1
gcaattttctatattcttcttcccaccggtcatcatcttttggctgtggctgtggctgttgcaggttcttctccgaagcttcaaagttaacagagaaagaccctaacaacctaatcctccctcgtcactcattctccaccttcacttaacggctcggagtttcgattcggagatcggttgtggggaaagaaggtcgaatccgggactctgctgaagttctcattgggcaagggaagttgtggtttggtagttctaagttttttcattctgtgcagagctcatattttgtggaactgcagcttctagttcggcccggcattgccttagcttcgagctctgagttagctggcaaaaggagaacattgtctgtagttgacacactatctcgaacgttttcggttccatctgtgtcggggccttcgtttcaagtctgtggataccacat

SEQ ID NO: 92979 - DNA, 808 bp, Glycine max
  unsure (1)..(808): unsure at all n locations
  Clone ID: PAT_MRT3847_54975C.1
cggctcgaaggcaattttctatgatggaaattccacgggtcctgaaattatggcaattttctatattcttcttcccaccggtcatcatcttttggctgtggctgtggctgttgcaggttcttctccgaagcttcaaagttaacagagaaagaccctaacaacctaatcctccctcgtcactcattctccaccttcacttaacggtctcaaataattgaagatttatcgaagggatttgtttttgtttgtgtgctgtgttgaaagtgaaattaagcattaatgtgttgggagctatgagattgtattgtttagcttgtggtgagccttaattactgcgttggttagatataaaatgccatctaattacttttcaaggctcggagtttcgattcggagatcggttgtggggaaagaaggtcgaatccgggactctgctgaagttctcattgggcaagggaagttgtggtttggtagttctaagttttttcattctgtgcagagctcatattttgtggaactgcagcttctagttcggcccggcattgccttagcttcgagctctgagttagctggcaaaaggagaacattgtctgtagttgacacactatctcgaacgttttcggttccatctgtgtcggggccttcgtttcaggtctgtggataccacattggttctgcccttgctggacctgatcagttntcaagtgggaccaaatttagataagacaatggctgctcacttgcccagaatagtggttggcgaatcctgtttagataacccgactttgaaaggtagttgccgttccct

SEQ ID NO: 92980 - DNA, 220 bp, Glycine max
  Clone ID: PAT_MRT3847_54976C.1
tttttgtctaacattcgattcaaattcaaccgtaaacaacctgataagggcgggagaaatatcacattcacaccacaaacaaatagtaatacaactttaatattatatgaactttcaagcatcgccaagctaagctaattatcaaactacattatggtacaaggtacaaatttttgatcaataaacaatatgctcttatcttattgatcaatttaggtag

SEQ ID NO: 92981 - DNA, 510 bp, Glycine max
  Clone ID: PAT_MRT3847_54977C.1
aaattaatgacatttatatggtcagaaggctctttttgaagcaatacatagctctgctcacggccctaattattcagcccgctatatggtttgctatgaccgcatcaggaaaataataccagcccgttgagactaactccgtcatatgtagatactgtcttttcttcctggttttgattatcctggaatatgaggctatattgctattattcttggttaagaacattatataaaatgtgttgttagggcttgattggcacaagaaagaagctgccttccaccttcaagttcagaaacttacagaggtatctctcttgtgcattactgtttactatagacgatacaattgcaaaccatttgttggtaaatctgtggttttcaaaatttagaaccttttttccttttagagccaattttggtacccgataatttaatcagaaatagatgacagagtcgtgtcgtgtatgccaacattgttgcatcctttatccatagtccgtagcccctgct

SEQ ID NO: 92982 - DNA, 573 bp, Glycine max
  unsure (1)..(573): unsure at all n locations
  Clone ID: PAT_MRT3847_54978C.1
tacagacccttctgcttctgccctagcctcttcccacatgcccatgtggtcgcttcttctccaacaaccttcatttccagcgacccggaaactcaagtgaccagcccactccggcaatcccacctgagattaggttttcttttctttttcagtttttgagcttatacatacatatatatatatatattgaaagagttacactctaaccacatgaaccaaattgacaaaaaaaatgtctctttggtcctgggacctagggcaaacccaatggccaatacccatcaaaaacgccgaaaaatgatttttcatggagaaacaacaatagaacagtgtcaaaagatgtggagccaattctgagccacacatgacatgcatatctgggaaaaatgcttatttacttggacagcaacactcattagttcaaacgtgattgaatttaattaatataacatatgtggtatactattataagatatttttaatttaatagtaatagtatggcacacattcttactatgtgtaatgtgttgtgnctttagttaactggcaaagtacnaatgaagtttgttcctt

SEQ ID NO: 92983 - DNA, 992 bp, Glycine max
  Clone ID: PAT_MRT3847_54979C.1
ctccccacgcccaacaaaaaaccaagctttcaacaagaaagcatgagaaggagccttgtgtttcaacagcaatactatgctgatgatggcatgtggatggagactcaggctcagcagcatggctatgccttccacgaagagtcgtcttggagctctgataagcgattcccagccatgcacatgaacaatcttgctgcttttgctgtggactctgacctttcaacgtcaaaacagcatgccaagttaggagccatgcacatgaacaagctaggtgcttttggtacggactttcatatcttgatgtcaaaacagcatgtcaagtttggaggaagctccggcaatatgtttcaacaaggcatgcacagtgaccatggctttgggcgtggttacgcgcatcatgggagcggcaaaaggtccccttttggtgctaataaggcctctcaccatttttcaaagggtggtggtggtggtggcaagttcaattctggtgagcaccatgagtatttctcggaggaaaccgagtacgaggaggcttatgcagaggagcatgttggtgcaatcacagctaaggtggaagaaatgagatatcagcatcataactgggctggggatacttgttatgtcaatccctatgacaggaacaagaactggtagttggtgcaatcacagctaaggtggaagaaatgagatatcagcaccataacttgggtggggatccttgctatgtcaatccctatgacaggaataacaagaactggtggacagcaaaggggatctaattaatatacacgacctacttcctctgcatttgcttcttgctatatgatcgatacaaactgtaataaaatgtgtgtttctgtggttttcttatggggaataagattcccctgattgtatttggacctttgtcatgcttgatgaagttacttgtaatatctacttttaacttatgaagttgtaatatatttggacccttgtctttgattgaaaaa

SEQ ID NO: 92984 - DNA, 677 bp, Glycine max
  Clone ID: PAT_MRT3847_5497C.1
gtctagttgtcttctctattttaacaaggcaacaagttacaatcactgtttcaagcatgcaatgttaaaaaatacaaggttaagatcaaggaaacatgagagagattgattacacaaatgatacttttgtccttcacgagagaatggactacaccttaatgtgtcagtgcaccataatttgagagaaattcaagcctaacaaggctaatatcaaagatcgggtacatgtttaagacttgtaaaataaactgcaccttcttcatgactaaggcgaagcactgatatttgaacaaggagcttgtataactcatcaaggacgtcatttggtattttgtatagacagtaaaatatgttacccacttttattagcacaatccatagtagcaatctaggatcttatgccagttaggaccaaatgataaatgggttaaaaatgtcctttgtcaaggacaagtttacccaatgaatgaacaatcttctggatgaggaagtatattttcacattataccggtaagataaaactgtatccctaaaagccaggataggtcaagataattcttcatcatctagccacttgagtgttggcaaaactttgacaagaaatgacctgaagttctcatcagctactgcattccctgttatgtttaactctggcaatgtcaagcttccaaatatc

SEQ ID NO: 92985 - DNA, 369 bp, Glycine max
  Clone ID: PAT_MRT3847_54980C.1
ttggggggggggggggggggggggggggggggggggggggggggggggggggggggtgggggggggggggggtgggacgggggaaagttcccaaaaaccaattttgcattcagggaaaataaatgggttccctagaaaacgggggtttttggtaaatacatgggaaggccggttgcgtaaaagtaattttcatttaaaaagcatttttgaggggttaacctaaactataaacccggggatttaaggtttaaatttattggccaaaaaatccaaggaattcctattggtaaccccaggctttcaattttaactgcgcaataaaggccctacttcagggcaaaaaaaagcattttctcgggaaaagaggaa

SEQ ID NO: 92986 - DNA, 640 bp, Glycine max
  Clone ID: PAT_MRT3847_54981C.1
cattctcagtttctccgtcttcctttccccgtttttcttctctctctcaatctctttcatgtgagggtagaaccacaacaaaacacaaaccacacactctcctaactcgaggttatttttttctttccccaaagaggcatgagttgcaacgggtgccgcgtccttcgaaagggttgcagcgagtcttgtattctgcggccgtgtctacagtggatcgatacgcccgaagcacaaggccatgccactgtcttcgttgccaaattcttcggtcgtgccgacctcatgtccttcatttctaacgtccccgaaccccaaaggcccgctctgtttcaatctctgttgttcgaagcgtgtggaagaacagtgaaccctgtcaacggtgctgtgggacttttgtggaccggaaactggcacgtgtgccaggcggcggttgagacggtgctccgtggcggcaccgtcaggcccatgccggagcttttcggcctagacgctcccactcccaccaccgatgatgcctccgaaggagaagttacctgtaccgacaagtggagagtccgagatccgaacccgaattttggttcgattattgctttacttggcaactatgaacctcacctcagtgccatcactctttcgttgg

SEQ ID NO: 92987 - DNA, 656 bp, Glycine max
  Clone ID: PAT_MRT3847_54982C.1
cccacgcgtccgcccacgcgtccgcttgcatagagtctgcaaaaactttgtcaagatcatctagtgtgaattcaatgagaacattaacaaagactcctagtttcaagccttgtaaagcttgttcaagagaattcacatcagcagttctgtttgaagatgtgaatgcaccagagagagctacctgctcttcaactttgaaagactgcaagtttcctgagtacctcatgcttgaccctgggggaactgagtctgagggagtttcacttatgaaggtttgcccatatacatattgttctcttaatggccatggtcatggtcattctcctttgcctccattgaagagcttcatgtcagcaaggaggcatcttttggagactcagaagaatataaaggcggaagttgcgagccctcaaagatggaaggtgcccccctgtgatacaaaaaaagactcttatagtgagcaaatggtctttcatggaaaacctgcatgtgatgaagctgatacaggtaatccaacaatcactcccttggcacaagaaattgctatggatttcttttttgaaatctatgctaaggaaagggaaggagctgacgaaatgggaaaattcaactctttcaaagaccttgagaaacaagaggatatcaattttgcaaat

SEQ ID NO: 92988 - DNA, 394 bp, Glycine max
  Clone ID: PAT_MRT3847_54983C.1
ggctcgagcattaacatagttttcaagaggattaaactaaaccccatttattgaccgcactcttaggagactattactcgttaatggtccttttacagtcactattacccccatcccgtgtcctctacttaacctgtctatggcacacataatcgggcttctcacaacccatgctcaggattattgtatccccgcaatacaacctagttaacgaggcggttgccatgtcgattgaaaagagatcggaaatgttgcgagatttcatcattctctgtatcatactgaccatggtgtacacatatcctggatttaaatgctactaaactgtcttgaaacacttgagtgacgaaaacgaacatatgaagtagtgtcaaaactggatcatggtatcact

SEQ ID NO: 92989 - DNA, 379 bp, Glycine max
  Clone ID: PAT_MRT3847_54984C.1
gttctcgcgtctcaatggctgcttccaagtacgatttcaagatcgagccccaagtcgacgcccaatttccagccgaaaaaggtcgttaccatctttacgtggcttattcatgtccattttcctgtcgtgcactcgcagcccgcaacctcctgggccttgaagacgtcatcagtctgtcggtggcacaccccatttttcagaagaccaagccgaatgacgccagtaacgaccacaagggatgggcctttgtagacccctcgacgtcatccactatgacgggtgccaatggcaagacgtactccacggaccactgtatcccggacacagtgaaccacgtgacgttcgtgcgagacttgtacgaaaaggtggaccctgctcc

SEQ ID NO: 92990 - DNA, 263 bp, Glycine max
  unsure (1)..(263): unsure at all n locations
  Clone ID: PAT_MRT3847_54985C.1
cccccccccctttccctantaantaattaaggagaggccagngngngggagaaaagagagacatggntaagnggngnatgntggtgttggttgttggtgtggntgtgggtacaagtggcagagatgttgccaatgggaaggatggtggggtgaatgaccagaagaacttgatgaggtatggtggaggggggggntattctttttttttaaggagtggactaccttttggaggtgttggaataggtggtggtattggtggtggt

SEQ ID NO: 92991 - DNA, 884 bp, Glycine max
  Clone ID: PAT_MRT3847_54986C.1
cttctcctttcaactccttgctgagagagagagaaagaactgacatgatggggcagaatcgttttccagaagaaaggaaaagagattggcttggtgcccttttgaagtgcggctttggatgttgtgaagaacacaaagacattaggtttaatgagaagaatgtgttctgcatagattgcgtagctggcttgtgtaggcactgcaaggaagctcattctctccatagaaggtttcagatatacaaatattcctatcaggatgttgtgcgccattatgatcttcagaagtattttgattgctcaaatattcagacttatgtgtccaacaatgaaaagattgtgcatctcagaccccggacttcaaccaaagaattcaagctaacaagaaaatccaagtttgataatctttgctctgagtctaatgccaaagaagtcaaagtagcaacacctccaaagtggggtggtacttgtgaagaatgtggaaagcatttacaagatgagcgcaatcgattctgctccattacatgcaagatctcagtgcttcctcaccatgcacaaaggattccagaggagggtgttgaccaacatgataaccaaaactccgaaactgagtcatctatatctgtagctgagccatatgaatgttttgaagtagtgactttaagaaagcgcccaaggaaagccaaccctcagaaaacatgttattttgtcttcccttgttgaaaatttgtccttagttttgcttacagttctatttttgctttacatttttggagaataagaaattttggaacatttgaggaacctcaactcaacccctctgtatcccattttgtggttcaaagttgggaattcaggagctttggaacttgctgagattgtacg

SEQ ID NO: 92992 - DNA, 286 bp, Glycine max
  Clone ID: PAT_MRT3847_54987C.1
gcacgagaaccttagcttgtaagaggctttggttgttggtgaggcaaatgatcaactgatcaagtacggcacgataatatatatatatatatatatatatatatataagtcaaactaaatgacgtttaactagctagtttgatggctttcataaaaatggtgttggctatttggaagtaaacattaaaatatactctgaaccttaaaaattttggttctccaaacatgtacttatccagtaagatttttattcactggctgcagtgtctttgtcacgttagtgatg

SEQ ID NO: 92993 - DNA, 644 bp, Glycine max
  Clone ID: PAT_MRT3847_54988C.1
ccacgcgtccgggtatatctaagctaagctttgcagatagtaccgttggcagtgttttgcccccttattcttttcccaatggtgtgggagctgttgcgggagaacatccattatggagagcatccttctcgaacattatttgttcggaatattaacagtaatgtggaggattcagagctgagagccctttttgagcaatatggtgatattagaaccctatacactgcatgcaaacatcggggatttgtaatgatatcctattatgatatccgtgctgctcgaacagctatgcgttcattacagaacaaacctctacggcgcaggaaactagacattcatttctcaataccaaaggacaatccatcagacaaggatatcaaccagggaacattggtagttttcaatttggatccatctgtttcaaatgaagacctgcgtcaaatatttggggcttatggagaggtcaaagagataagggaaactcctcacaagatgcatcacaagtttattgaattctatgatgtcagagcagccgaagcagcacttaaatcattaaacaggagtgacatagctggtaaacgcataaagcttgaacctagtcgacctggaggagctcgtagaaatttgatgctgcaattaaatca

SEQ ID NO: 92994 - DNA, 106 bp, Glycine max
  Clone ID: PAT_MRT3847_54989C.1
actcgatactcacaaatttcattgcttgggtcagattataaatttctgttacagagccaaagggaatgagggtttcagttctgaacactgccttaactataccata

SEQ ID NO: 92995 - DNA, 297 bp, Glycine max
  Clone ID: PAT_MRT3847_5498C.1
aaaaccctaaaataaataacacaaccggcgctcttcataactctgaccggtacacgacttgcatttacacccctaaatgcttcaaaccctgaattccaataacaacacacattcactcctactaataattcttaatatagacattgccatcttccaactcatgtcccttccattatcatacatttaacgtaaacaccacattaactgctacaaacaattaatcattgcgccacattttaactccccataatgctcaattaattaatcatctctgtgaccattctagttgtaattatt

SEQ ID NO: 92996 - DNA, 426 bp, Glycine max
  unsure (1)..(426): unsure at all n locations
  Clone ID: PAT_MRT3847_54990C.1
agtgcctaggccatcgttnnnnnntacaaaagaaagagnnggatgcagttggtaaattgccactccctcaataggtntgatnnntaatccaacacgattgcagcaggtttttactctacaatctactaacagaaaccataaatacaccacagtacacacgcatcccccaaaccatgaatcacgacaccccttcaaaataaaaacaaaatatacctacctggattgattttccacaagagcacttccaatagccttgaaacttcactacgccttttaacacacataccaccgttgcctaatctatttgttttatttaaaataataattagaaagcaaaacaagnnaaaggggaagaagccaaaatagggtttttattnnnttgcttcaataaatcaagattttatattccctttctccaattccatt

SEQ ID NO: 92997 - DNA, 400 bp, Glycine max
  unsure (1)..(400): unsure at all n locations
  Clone ID: PAT_MRT3847_54991C.1
cctccgttccgcttncttcnaaggagctccagngcggtggcggccgctctaaaactagtggatcccccgggctgcnggaattcggcncganctcgtgcctctagggttatcntatctccatttccatttcctctctctcagtttccaagaatcttangctatgggaaagtcttacccaaccntgaccgctgattatcataaggccgttganaacgcgantantantctcacaggcttcntcnccgagaaganatgcgctcctctnttnctccntttggcatggnattctnctggnacttacgacctgagcnccaagtaccggtggtccctttngaaccatnnngcntccctccgaattctcccncggcncctacactttggtctttgacntctctgtcta

SEQ ID NO: 92998 - DNA, 605 bp, Glycine max
  unsure (1)..(605): unsure at all n locations
  Clone ID: PAT_MRT3847_54992C.1
gcagcctcatccattttcctaaatggctcaaagacatcaattaaaaaaccccccatgtggggatcaaccaaagtcggtccaactcatttctttggatatgtgtgtgtgatagaccatcctgatcgaccacatattaatctcgtactcaaagtcctaatgccaaacaacacccgactaatgacttcatgtcgcctcgctggcataactcatgttgtctttaagctctttcatcttcatgaacgtcgtccacacaacatcctcgtgaatgtcatgggcaattactacctcggatgctgcgatgctgccttctcctataagaggatagaccacgaatgtatgtagatggaagacacatcctattcaccatactcacccaaaacaagcactgtatctctttttagatactctacccaccattgaaaaaggaggtcggaaggttggatatagactactcgcagacctagacttaacaaaatctgatgataacattatctattagaataattgttacatttgagtgaatgagagaaaaagtgtttgaaaaataaatttataaactaacgggccgttcggttttttttnnngggaaaaaaaagggttatgga

SEQ ID NO: 92999 - DNA, 417 bp, Glycine max
  Clone ID: PAT_MRT3847_54993C.1
ggctcgagctcttgcggagtggggcgattctcgattctgttttctgcaactatgcctagccctaaggcattctttgacatgaccatcggcggccaagctgccggccgcatcgtgagggagctatgcgccgacgtgactgcgagcaccgccgagagcttccgagcgctatgaaccggcgagaagggcgcccgacggagcggcaagcccttccagtacaaaggcttgtacttccagcgggtgatccctaacttcatgtgccatggcggggactctaccggcggagacgggaccagaggcgaggtgatctacggtgctcaagctcaccgccagaacttcgtgaagaggcacactggtccctgcatcctctacatggcgaacgcacggcccggaaccagcggatctcagttacatatctgc

SEQ ID NO: 93000 - DNA, 156 bp, Glycine max
  Clone ID: PAT_MRT3847_54994C.1
ggccaacatatttcttaaatcatttgcttttgtatccatagtttggttccccctcagaattttaagtctgactgtggaaccatttatatggatctcttttgtactatgagtacctctggtacttctttttatatataatacttatctttgccgatt

SEQ ID NO: 93001 - DNA, 413 bp, Glycine max
  Clone ID: PAT_MRT3847_54995C.1
ccacccaaatttcaatttaccaaattgaccccaaccagggcccccccaaaagggcccaaaattcccatttttacttaaaatttttatttatttaaaacatttttacaaccccattttacacaaaaaaaaaaattttttttaaaaagctttttttttttacaactttgaaaaaaaaggttaaccttttttttccaaaacccgcctttttcagggggaattccccaaacaaaaccaaaatttttaaaatgtctcatcccttgttggaattgtttttaaaaacccatcccaacccttattaaaacccttttcaaaaatttgcccaattgttttgattttcccaggggctttaacggaggaaataaaccccaactttgtaatttttttttgcacctttctttgctttagaaaaattt

SEQ ID NO: 93002 - DNA, 334 bp, Glycine max
  Clone ID: PAT_MRT3847_54996C.1
aaaagtcaaacccaaagttaaaagtcgattctcccttgaagtagaagctacccagaatcgattatgtgaaacacaataatgtttacttgaacatccaaacatgctagtcaaccttttttttcaagtttgaccaatggaaatgcacgtttgagggtgttggacgaataaccaaacacttgtcgagcccaaaactgacgtttcagaatactattttggattgtaagaaagaaactgctcacaacttttctctaaagtttgccaaacaacaaggcgaaatgatgcagctcattttttagctagaacagtcatctcttatgacagtccacacatacat

SEQ ID NO: 93003 - DNA, 137 bp, Glycine max
  Clone ID: PAT_MRT3847_54997C.1
atttgttcaatcttaatattctcatgtggctgccagatttcttgatcccagccccacagagttcagttcagtgaggatatctatttcttaacggctaatataccggatccggatattgatgatgattatcgggagct

SEQ ID NO: 93004 - DNA, 1538 bp, Glycine max
  Clone ID: PAT_MRT3847_54998C.1
ggctcgaggcttctcttattcccttttctctctccttctactctccccctctttctcattttccggtgacatggagtccaagtggggtggcgcccccgccagcatcatggcggcgaatttcgacgacttcaagtggatcgcctccatgttcgatcccggaaacgacgacgtcaagcccttctccgacgcagctttccaaaaccaggatgcagtaactgcattttcaacttgtggtggagtaacagatgatacccttgttcgttcccaaaacctcactcccattcaatccaccatttctgcaactattgattctcagtcttccttttgtggtaccgttgggagcccagtgtctgctaacaaaccaaacgtgagagataatcaagtaaaaggggtcgccaccactacaagtggttcctcacgtgagccatctgatgaggatgatgaagcaggtccttgtgaacaaagcacaaacgctattgatatgaagcgccttagaaggaaggtttctaatagagagtctgcaaggaggtccaggagaagaaaacaagcccatttggctgacctggagtggcaagttgaacggctgagactggaaaatgcaaacctatttaagcagcttacagatgccagccaacaatttcgtgacgctgatacgaataaccgagtcctaaaatcagatgtcgaagctttgagagctaaggtgaaattagctgaggatatggtcactcgtggcacactcacccctatcaacaaccagattcttcaaaatcagagttcactaaacaccccacctcaactcaacacaaataatctacaccgcatgacacatgtttcgccaaccatcaccgtccgtgggaatgatgatgcttcatatggaggtggaattacagttagtggacaaaattcacctcttggtgggcttggaaacttggataatattccttgcagcgatttcaatagtggaatcaatagtaataatgctgtgagctctatgactagcatgtggccttaacgttattcttattgcaccacatgacttgtgttgtagtagtactgtccggttagatccaactttatgcatgtcttggttttattagatttgtggttatattgtggaaaatattatataggtaacaaaaatgtggtatctacgtgtaagaatccatctagaatatttagcatggtgtgtgttaaatggtttcttttttcttcttcacagtctttgcaaccttctccatgaactcaaccatctcctcgtaacgctcggcctgctccgccaatttcgccatgtaaacgttctcctcccgagaagaatccgccatttctcagattcgcaaatctcaccgcttaaccctgaaggaaaagaaagcgtagcccccttctgtcgtcttctcgcagccgtacccttctgtcgtcttctcgcagccgtacccttctgtcgtcttctcgcagccgtacccttctgtcgtctcctcgcaaccgtacccttctgtcgtcttctcgcagccgtatccttctgtcgtcttcgcagccgacga

SEQ ID NO: 93005 - DNA, 617 bp, Glycine max
  Clone ID: PAT_MRT3847_54999C.1
tgctctccacccccacctcggcattcaactcgagttcaactcggctgctgctctattgcacttctcctatatcattgatggatattaatttaatgatcttgtgatggtcaccatggtcctaaggtatggaatgcaggccaagttatctcaaatggctttccttttgtccttgatttgacgaatcagataatttcaagttatctcaaagtacctttactgttctaggctagccaggtttctcagacctagaagattgcagagaaggtccattcatgttcttgatgctcgctctatgggtgaagttagcaggaaacaatccaacttgtgtagcatcatcttggatggcctagacatgtacagggaaagtcatggaagacactagtaaagaaaactagattgcatggttttcatcttggtgaaaaggagcacagggagatcaagaagtacttgagcaaaagtcgttaaaggaggttaagggagatctcatggtaaataatattcctaaagctttagttcttaaccaagttgaacggcatcaagtcatatgatctatgtagccgactacgcttaatggaacaagactctgctgatgctattgtcttaataattactccatg

SEQ ID NO: 93006 - DNA, 393 bp, Glycine max
  Clone ID: PAT_MRT3847_5499C.1
acatggggttgagaactgaatcgcttttcaaaatgatggagcgcggggggtaatactccggttataacacttgtggctgttgaggccggcacaaagcgtctggaaaggattatttctttaagcgatgcgttcacaatcttggtacgctcgaaccgatatattgtgcggcttctatgatggaaataactagggatgtcattggaaggaactcgtgtgatctatctgcactgctgttgtgagctatccccaaccttccttggtgcggctgccctcgtatactgtgttaggatagaaactggagagaaaaatctgttacttgaggatcgcctttctccgactaacatcttaacgaaagggttttctccttgtgtgccggcacatcttcaatacatg

SEQ ID NO: 93007 - DNA, 1597 bp, Glycine max
  unsure (1)..(1597): unsure at all n locations
  Clone ID: PAT_MRT3847_549C.1
ggcttctctggatgcgatacggaagaagattgtcaaaggagagatacaaactaaagttgccgaagtaaaggagccttctgtttctgaaacaaagaccatccctgatgaacttgtacagattcaagcttttatacgatgggaaaaagctgggaagcctaactactctcgggaacaacaacttatggaatttgaggaagcaagaaaagaattgttacgtccgcttgagaagggggcttctctggatgagatacggaagaagattgtcaaaggagagatacaaactaaagttgccaagcaattgaaaaccaaaaaatactttcgtgctgaaagaatacagaggaaaaagagagatttggtgcagcttatcaaccgaaatgtcgctgaaaatatagttgaacaagttatagatgctccaaaagccttgacagtaattgaacattatgccaacgcaagggaagaatatgaaagtggtcctgttttgaataagacaatatacaagcttggtgataatgatcttctggtcctcgttaccaaggatgctggtaagattaaggttcacctagctacagactcgaaaaaaccttttacacttcactgggccttatctagaacatctgaagagtggttggtaccacctgcaactgctctgccccctggatctgttactatgaatgaggccgctgaaacacctttcaaagctggctcttcgtctcatccttcttatgaggtccagtccttggatatagaggttgatgatgatacttttaaaggaataccttttgtcattttgtcggatggagaatggataaagaacaatggatcaaatttttatattgaatttggtgggaagaagcagatacaaaaggtgtggggctctaagtggaatgaaagagcatacttcagcacaagaaaagtgaaactcgaccacgaatatctttccatggcagtccttgttcaagaagtgataaatgctgactatgcttttgtcatccacacaactaaccctgcctctggagattcatcggaaatatatgctgaggtggtaaagggacttggagaaacactggttggagcttatccaggtcgtgctttgagttttatctgcaagaaacgtgatttgaactctcctcaggtacttttgtaatatgtatttgtttttatagtattttctatgcttagtgccttcgctatcattcatttattgattatctcaaatataagatcataaaattacctttaccagtactgcatgcgttctaagaatttttccatattctgctaattgttttgggcttgtttaggtcttaggttatcctagcaaacctgtcggcctatttataagacggtcaattatttttcgatctgattccaatggtgaagatctagaaggttatgctggtgcaggtctttatgacaagtgtgcccaatggatgaagccgagaagggtnnngtgcttgattattcttcagaacaaactgatccttgatgggcagttttcgccagtcaatcttgtccagcattgcccgtgcaggaaatgaaattgaagagttgtatggcactcctcnagacttgaaggtgtcatcaagatgggaaagtc

SEQ ID NO: 93008 - DNA, 301 bp, Glycine max
  Clone ID: PAT_MRT3847_54C.1
cgaccgacgcgtgcgcttggtgatcccaacacttttcggttacagtgtatcacaggatgctgaagcttggagtgagcgttgattaatatgctggtcaaggatatgctgacatgcctccttttgatgactctgatgcatatgctgacggtagcaagatggaataagttcgttaaatctgacttaatcgcctgttacgcttttacaaacactgattggagaaacagtctttctactatgttgtatgtcttttgaattttcgaacttttggaacgttgcctagttaggtgccgcatgtattagg

SEQ ID NO: 93009 - DNA, 220 bp, Glycine max
  Clone ID: PAT_MRT3847_55000C.1
catcaggcaagtttttgtttcctaataaacttttttgttgacaatttttgttgtgaaaataaaaaaacaatatgaacagtttgtcttgtctgtttaggtagttttcctgacttgtatgacactagtcacatgaggacgatcttaagaattgatagattaaatcagtgcttttcctctcaattttcttttacaaagaatggaagaatttagacagcattac

SEQ ID NO: 93010 - DNA, 194 bp, Glycine max
  unsure (1)..(194): unsure at all n locations
  Clone ID: PAT_MRT3847_55001C.1
caggcgtccgcccacgcgnccggtgagctcaactttaattcactggaggatggactgggaaatggggtgtgttcannatatatttgatgtcccaccatactattcattaaaatataggtctcttacagtatctagaaggtcaagcactgtatgttgattcaaattttattgactagctgtattatctcaaattt

SEQ ID NO: 93011 - DNA, 657 bp, Glycine max
  Clone ID: PAT_MRT3847_55002C.1
tttttttttttttacattcgcactttgttttgcatttctttttctaccaatatgaagtagtaacactaacacaaataacattgtttccaaagttaaaaactaaagtgaggttgagtagcctacgagtagacaacatggaaaaacttagagctgctttagctctgtataaacaaaaagaagagagaagctgaaacaacgaaaacataatagttataagaaaacattatgattcatctccaaggtcttctgttggctccggtgggccatcctccatcgccttccaaacaacactcggtagataaactggtatataaaagatgtctatctccccagcacaaacaagctttaactgaatagttctccctgaaggatccgatgtgcacctaggttcattcataagctcccaggccatgattgttgggtcatctttgtaatgcatgccagtaaatctgttatatctgttgagaacagtctgtggaagatgcacataaatcagaacctgaaattatgtttcccagacgccaaaaatgtactcttctcatcttactaacataacacttgtattattcaattatgagcagaacatatgcaaaaatgattataaataaaagattattggcttgggtattttgattagatggtaatggtagaaggaac

SEQ ID NO: 93012 - DNA, 451 bp, Glycine max
  Clone ID: PAT_MRT3847_55003C.1
cttgggttttttttttttttttttttttttttttttttggggtttttttttttttttttttttttttgggaaacagaagttggcttcatctattttggtggatcctcaaaattatttcatgccggggtggtgcaatgaagcttggccgttcataaggggggggggggggccctcataaaaaaattacagggccggattctatttacacagggcatgacagcaaaatagatttggtggtggccaaaggagggcgtgatttctgggcaagggccagggattttaattaggagacttggacattccattgctctgcctttttcaattgccttttgggctcaatccaatcaataccattttttgcggccaatgaaaccattttgtgatttatacccttttccattccctttaggccacacatatagacaaaagggggatttttttttaggaattc

SEQ ID NO: 93013 - DNA, 605 bp, Glycine max
  unsure (1)..(605): unsure at all n locations
  Clone ID: PAT_MRT3847_55004C.1
ggctcgagaaaaaaagtacaattatgcagaattataataagatggtgataagcgtggaactatgaagggatgtgtgtgcctaacatcattcttagaacagccaccatcaattaatttgtcatagaggttatttaactaattcctctactcatcaagatatagaaattgagttgtagacataagaagaatcttgtcaatataagtaatatagacaaatccaattagcactatctacattattaactctaaatataaaacaaagagtgtcagcgcaacgctttttttttttaatatattttcttaacttatttcaataaattttatagcaattaagtttattaatgggcccttcattgaaagtattagcccaaacgtggacggtgcctagacaagtcggaagcaaaaaaagaagcccacttagaaggactctntaaatatatttatattcaacgtataaaacctttgctgctgttctgccaaaccccaaaccctagttttgtcagtagcacactttacccatggcagtagcagcagctcgccctatcgtctccgtcccaccctagagggcgatgcaacccccacgttcctctttcgacgtatgaaag

SEQ ID NO: 93014 - DNA, 246 bp, Glycine max
  Clone ID: PAT_MRT3847_55005C.1
ggggggaaaaagaggaagatcttccggcaagttttcatgtgctaaatggggtcccctgtcaacctgcagggcacaattcttttgatatgggcaactccttgacagcataagatgcaacttcacgctccatgacgttaacttctatccatttaatgcaagcgttgctaagttcctcaattcaaattttcaagtcacgctcagctcgcttaattcgattgagcgcatccgtatttacgataatttcct

SEQ ID NO: 93015 - DNA, 191 bp, Glycine max
  Clone ID: PAT_MRT3847_55006C.1
gctataccaagcactaatcacaaattcttttcttgctctctactacccattaccgggcttcttttatatggccctaccaaaaacaactactctttaacaatcttgcccaaaaacccccaaaaagtcatattcaaccaagcttccacgtaagtatcaactatcaactgtttcagataatcaatcctgatcac

SEQ ID NO: 93016 - DNA, 1935 bp, Glycine max
  unsure (1)..(1935): unsure at all n locations
  Clone ID: PAT_MRT3847_55007C.1
gctacaagatggtacagagccccagaactatgtggctccttcttttcaaagggaggactattgatctctcctggaagttgattttatctgtccttcagtacacaccagcaattgatgtatggagcattggatgcatttttgcagaggtgttgacaggaaaaccactgtttcctggtaaaagtgtcgtgcatcaattagatttgattactgatcttctcgggacaccatcacctgaaactattgcaggagttcgaaatgacaaggcaaggaagtacttgatggaaatgcggaagaaatctcctgtgccatttgaacagaaatttcagaatgcagatccattggcacttcgcctattacaaaggcttttagcatttgatccaaaggatcgaccaactgctcaagaggcactggctgatcccttctttaagggtttgttcaaagttgagagagaaccttcttgtcagccaatttcaaaattagaatttgagtttgagaggagacgagtgacaaaagatgatgttagggaactaatatatcgggaaatactggaatatcatccccagttgcttaaagattacatgaatggaactgaaggcactcacttcctttaccctagtgcagtagatcaattcagaaagcactttgcttatcttgaggaaaatcatggtaaaagtggcccagtgattcctccagaaaggaagcatgtctcccttccaaggtccattgttcactctagtacaattcctcctagttcacaaccatcttttacttcatacgagaacaagcaaatggcattagaggcatcaaaggtttcgagatcagtagaatcaaattccagaagtcaattaaggagctcgtgacctccgccaagagtgccagcagccaaagcaggtcgaatcacagggccagttttgcactatgacaatgggagaaccataaaagacgcttatgaccaaagggtcgcttcctcaattcgtctctccacattgtttccatagagtgcagcaacccactaacataaaaactacctcagaaacatataagggtatttcacaacaagacatacatccactcccatcccagcagtgtagcatgcaggggaagagcgatcacttaaatgatcctgttgcttccattgatgcgaaactgctgcaggcacaatctcaatttggtgctgtcgatgctgctgcagtagctgttgctgctcacaggcattcaggggcctttcagtatggattgtcataggttgtgaggttttagagagatgcatacaataaatatgcatgctttatgtaattgcctggggttggaaggaaggaaggaaggaagttgatcaaatttaagacgggtttaggtctggtaaggcttttccacttttgcattcagattaccatccttgtaattatatgtacatcatttaattgattaataaaaaaatgattgtttctctcctttttggtgcaaatattttctgaggaaaaaaaatagaaattgtaaataaagttctatcttgacaatgtttggtcaataaaatttgacaacggagttttaataagttattgccttctgcacaatcttgtgctgtaaacgagataacatgacaaattgtcaatgcataccagaaattgtaaaaccatgacaagttataaagcaactgatttttcaaacgcatgttgtttcgtaatggtaccctcccgaaaatcttgttgtagcatctgatcccatatcgagcataagccatgaatatttagatgtcttcatcaacacatggcggaagactcagctttctttacccacttcattgtctaaaacaagtcacaaaataataagaggtgtcgttcatgtgagcaactactattgcagcatcaacattgaagtcttatgaccaataaaatcttcccctcatgatcactcttgccttntgactcgcgtccg

SEQ ID NO: 93017 - DNA, 2362 bp, Glycine max
  Clone ID: PAT_MRT3847_55008C.1
tttccgtctcacgcgtccgcccacgcgtccggtccttctctgcgtctttggatctctctctctgcgtctcctctgagctcagatcctctgctgtggagcctttctgcctccgctacacccccaatttcttctccttctcgcttagggttttcatctccatttccgaaaccggttaaccggttcaattttttctgttttcgtgctgaattttgaagtcgcagctcgatcttcgatctggggtttcgggtgaagtgaccgacacggtaggtagccggtgacgttgctttgtgttggatctgttcccagaaaaaaaaggaaggagcaaagaaagaaaggaagaaagaagaagatgcagcaagatcagctcaagaaggatattaatgaggtagagtttttcactgagtacggggatgccaacagatacaagattcttgaagtggttgggaaggaagaagattcatgagtttgttcaacatatgtctgatgccattgagatcctcagggaagaaaagttgctaagactttctaagacaccctgatattgttgtgattaatcggatcatgtcgcggttgccgccttcaaagagggagtttaaagatatttatgtagtctttgagcttatggagcgtgatctccttaactcagtcaaagctaatgaagacttgacccgcgaacaccatcagttttttctttatcagatgctctgtgcaatgaaatatatatatacagctaatgtatatcactgagaccttaatgttatgaatataatgtcaaatgtaaactcccaactctaaatttgtgattttggattggctgaagtggcagtcagtggtggacgaagctcaacgttgttggatgatttcgctgctacaagagaatacagagccccagaaagatatggctccttcttttcaaagtatacaccagcaattgatatatggagcattggatgcatttttgcagaggtgttgacaggaaagccacttgtttcctggtaaaagtgtcgtgcatcaattagatttgattactgatcttcttgggacaccaccacctgaaactattgcaggagttcgaaatgacaaggcaaggaagtacttgatggaaatgcggaagaaatctcctgtgccatttgaacagaaatttccgaatgcggatccattggcacttcgcctattgcaaagacttttagcatttgatccaaaggatcgaccaactgctcaagaggcactagctgatcccttctttaagggtttggccaaagttgagagagaaccttcttgtcagccaatttcaagattagaatttgagtttgagaggagacgagtgacaaaagatgatgttagggagctaatatatcgggaaatattggaataccatccccagttgcttaaagattacatgaatggaactgaaggcactcacttcctttaccctagtgcaatagatcaattcagaaagcactttgcttatcttgaggaaaatcatggtaaaagtggcccagtgatacctccagaaaggaagcatgtctcccttccaaggtccactgttcactctagtacaattcctcctagtacacaaccatcttttacttcatacgagaacaagcatatggcagaagaggcatcaaaggttacgagatcagtagaatcaaattccggaagtcaattaaggagttcgcgacctccgccaagagtgccagcagccaaaccaggtcgaatcgtagggccagttttgcactatgacaatgggagaaccttaaaagacacttatgaccaaaggatcttctaccgaaacacgcttcctcaagccgtctctccacactgtttccatagggtgcagcaacctactatcacaaaaactacttcagaaacatacaagaatatcccccaaggcaaacatcaactcccatcccaacagtgtagcatgccagctagaccaactattgatctaaataccaacccatactaccaacagggaaagagtgatcacttaaatgatcctgttgcttccattgatgcaaaactactgcaggcacaatctcaatttggtggagttggtgctgcagcagtagctgttgctgctcacaggcattcagggagctttcagtatggattgtcataggttgttaggtttaaaagagatgcatacaataactagtatgctttatctaatgcctggggttgggaggaaggaaggaacttgatcaaattttagacgggtttaggtctggtaagattttccacttttgctttcagattgccatccttgtaattacatgtacatcatttaattgattaataaaaaaattgattgtttctctcccgaaaaaaaaaaaaaaggacgacggccgaccactgagca

SEQ ID NO: 93018 - DNA, 321 bp, Glycine max
  Clone ID: PAT_MRT3847_55009C.1
actatagtcacactcacatatgagcggtcattttatatatatcaaaaaacccctcatcattaatcatttctacctgatttatctctttttttttcatttccatctcacaattttacattattatcatacacatctttttcttcttccacaattaatatcaaatctatcatctcctctgaaccattctagaactcaacctcaataaacaaatccagaaaaacaacggcatatgcctttccctatcatatcttcataaggatccttaaaaaacagcttcttaactgaactcccaccttgtttcacaactattgccacatactc

SEQ ID NO: 93019 - DNA, 1096 bp, Glycine max
  Clone ID: PAT_MRT3847_5500C.1
cactcggcccccgggctccaacaaaaccaccaccttcccccgagagcacaatccgccaccaacccatcaccggaaccatgctccgcctcctaaagccgcaaccttttccctccgggcaccacctcatccaacgctgcgccgtgagcggcaccgcaaagggcaaagcgaagatcaaagcaggccaagcgctaaaacgctcccgcatcaccacgaagaaacccggatccgcgaccgcaggcccacccatgtcgcgtgagcgccaagaacgtgagcgcctctacgaacaatgccttcaagccccaacccctctccgccacctcacccaaaaggagcgcgaacgcgaagcggagcgcgagaaattgggcctcatcagcaaggatcggcagcgagaaatcgacatgatgaagcgaaaagacgacaaatttaaggtttcggagaagcccacgattattgggacacctgggttggattacgtgagtttaggtttggtggatgtggacaagttgccgaagtatgatttgacggtggaagatgggaggaggttggcgaaggagtatagtagggttttgatgaggaagcatagggcgagacaggctgcggagtccaatcttttgaggatgaagaaggaggctattgaggctttgcctgaggggttgagagaggctgctttggttcctgatttggctccttttccggttaaccggtttatggcgactcttacgccgcctattgagggttacattgagcaggttagggaggcggcgaataggatcagtggaaaggagaagattaggtgattttgtgtttatgaattttgttcactgttgaatggaatggattggaataacaaatgtcattggtttgttgttggactgattggaatgggatgcaatgtgatcaaaatgaaatatatttagttttgatgcttttattgttgttcttgttgttttgagagtttgtggaatggaactatgggatgaaactaacttactatttgtttagaggttggggatgaaatgaaatgctgtaagctgcttcgcattgtttgagattggatgaaataaaatgcgatgtgatgatggttttgttttcaaaa

SEQ ID NO: 93020 - DNA, 130 bp, Glycine max
  Clone ID: PAT_MRT3847_55010C.1
tcttgtgcttccttttgttcttggaggctttgtttgtcccaagcggggtgattctgttgaaagagcactgcttttgccgctaggcaaaaacgaagaaattgctgtcattccctaccatatgccacatgtc

SEQ ID NO: 93021 - DNA, 185 bp, Glycine max
  Clone ID: PAT_MRT3847_55011C.1
gggtgatcaaatgctacatttcacatattatttatcggtcaacccgctctgtattccatttccctccccctgccccagcagttttcactttcaggggttgtcctactcagcgtgttaaggcaatgattaaacgaaaacgcctaccgcaaattcacagacctcttatcccaattaaaaaactcgga

SEQ ID NO: 93022 - DNA, 188 bp, Glycine max
  Clone ID: PAT_MRT3847_55012C.1
gacctacaattatatgaggtcttgtcaaggcatgctttcgaagacccgggccttgaagaaacagaccgaggtgtattttggactgttgaccaacagccatcctatgtcttaaagaggttctgtaaggaatggccctaaaatgaaccccttctcctctctttggacaaagctgagacactggggtaccc

SEQ ID NO: 93023 - DNA, 498 bp, Glycine max
  Clone ID: PAT_MRT3847_55013C.1
ttcacaggacaaagggttaaattttttggcattcttgagccttcttcgacataaatttgtcaccgagagcaaatagtgttcggcatttgaaggacatgtttgtgatgtatttcatttctccttttgatttatgggttctttcagtataaaagattaaatttttttttgtgttcctcagtcttatttgaccgtggttaacccactcttttttctttgcaagacaaaagccatagatcatagtatgttggatagattacaggttcgttttccctcctcgtcttcttctgtgttttctttttacccttttttgtatttgtatgcattttttttatttttttattttttcactgcatggtcattgtttctcttaaagctacgatttttttctccaaaaaactttgatttttaggttttgtcggtacaaatattgagtagtgcttcattttctttttctttgcaggggaaagcttcatttttttctttactcagatgaacata

SEQ ID NO: 93024 - DNA, 648 bp, Glycine max
  unsure (1)..(648): unsure at all n locations
  Clone ID: PAT_MRT3847_55014C.1
cttgctgagattgcatgtgatccaaatttacctgttgcaaaatttgttaatcttgctgaattagtatcaagcttccctagagcatctcatgatggcctttatcgtgccattgacatgtatttaaaggagcatcctggaatcagcaagagcgaaaggaaaagaatatgtaggttgatgaactgcaggagcttatctgcagaggcttgcatgcatgctgtgcagaatgagcggcttcccatgcgtgttgttgtgcaggttctattctttgaacaactgagaactacaacatcttcagggggcaacagcacaccagatcatcctgggtctctcaggtcatttcttcctggtggatctcatgggagctctaggtctactataacaaacacagaagaagaatgggatgctgtgggaacaatggaagacataaaatctctgaaaggggaagttgatgcactaaaattatcaggtggaaccggtagggccagcagcggaaaagacaataacagtggtaaaggcaatgccgacaatattgctgccagtaaaatgaaaggtttcatgtcaaagaagatactctctaagatttggtctagcanagaanaaagtggtgatataagtagctctgatacgtcagagagccctgcttctact

SEQ ID NO: 93025 - DNA, 373 bp, Glycine max
  Clone ID: PAT_MRT3847_55015C.1
tatccctctaatcactctagctgttgcaaattgcctaccacttttcaatggcttgtgcagatgcctagttccgctgttttgtcgctgtctttgcattgacaaccgccaggcaatgcttccaaaaatcaatttgatccttttgagacaccgattattttgtgcttcatttattagcgtttttctgtatagacctgtgaacggggatcggtggggggctttgctcccatttattacgttggattcgattttgacctttagggatttatataccctttttataagttgggttgacactgttgcttttttctccattcagatcgttttattccagtgctccgcggcgcacgtgtggtgcggtgtgctttcagatgac

SEQ ID NO: 93026 - DNA, 395 bp, Glycine max
  Clone ID: PAT_MRT3847_55016C.1
cgcgctgtatacagagtctcttgttgacacacagggggggcagatagtgtcatccatggcggtcaccagagcaatagctatagacagtaactacacatgctctctgatcgccaagagacacgctgtgggtggcactgttctgtgactgaacaacctcaatttctagacgcactaggaggtcttacaccgtgttagccatgtacagtccccaggatgagaccaaggaagaaggcacatccgcgaaccctagatatagagctgttcactgtggacgaatctggcatgcaaggtctctccctggcctgatattccctggcgagtgggtgatcacagctataactgcatgggtgacactcctgaaaaacactgtgcatatactgttggccgcactgata

SEQ ID NO: 93027 - DNA, 251 bp, Glycine max
  Clone ID: PAT_MRT3847_55017C.1
ctcctttatagcggccacttttttttatcttattctttttcttttttcgccaaaagaaaatatcctctgctcaattacatttcttcacttttacatggtaagaccatttcatccaacatttaactttgctaaaaggtaaaataaaacaaaacgttcactttttttacactcgttaatcaaaccgaaattcctatttttatccacccttgagccatcctaattcaacatcttcatgttgacttaccaagagt

SEQ ID NO: 93028 - DNA, 441 bp, Glycine max
  Clone ID: PAT_MRT3847_55018C.1
tcgtgacacctggggtgcgactgagttggccgccaattactcgggcatcacttacacgcgtgtctctcgacccgccaccccagtgctctacacaagtgacgagaagttcgagctgggcaagtgcaaggtggctcgcgagaaccccgcggacaccgttttgttggttggcgccggcgtgactttgtacgagtgtttaactgcgcacgatttgctcagtgcccaaggcattcatgtggcggtcattgaccttttctcagtgaaagcgaagcgtgtcggcggcaaagtgctcacggtggaggaccattacgaggcgggaggcgtcggctcggcggtgtgcgttgcgcttgcggacgttgcgaatgtgcgcgtgcgctccctttgcgtgcgagaattgccaagttccggcccgccccaggcgctgatggaattgtacggcatttt

SEQ ID NO: 93029 - DNA, 310 bp, Glycine max
  Clone ID: PAT_MRT3847_55019C.1
gctgatcgtggggaggccagtgatgtgcgaaatgaaggagatgcagcataatagctatagtggttacaaaaggcaacagataacagacgagaacggaaaatatagggtttggtgatttaccctggatataggatgaagagagagcgccagcaactgggctacaacgcaggaaccttaagctgttgctatttaagcggagatatcgatctttgggaagaagatgatgcatgcacgagcttcttgtagaggcgggttacacagcgatgtcattggacatggcggaagcggcgcataaacttgagcgtcctag

SEQ ID NO: 93030 - DNA, 284 bp, Glycine max
  Clone ID: PAT_MRT3847_5501C.1
ggaacagaacatttccctggatacacccatcatgctattcgctcacaacgggaatagcaaacgaaccctgggctccatgacaatccccttatgccatatcattcatcacaaacggacccgtggttcctcctgctaatgctggaccgtgcccttccagcctaccatcttccagtatggagggtagcttcaaagcttggcaacttattggctatatttagttcctgtgtgaaatctaactccagttactgtcacgcacatctttccacccggttgcatatgttgct

SEQ ID NO: 93031 - DNA, 306 bp, Glycine max
  Clone ID: PAT_MRT3847_55020C.1
gcatttgagatgtaaggacatgaaagaaaagaggggatatgtttatgcgtttgtgtgggagatagagagatagagagagagaaagagttgttgataaaaacataattattttttcttcttggtctttggagggtcatgtagatgtagtagctatagattttaggcttatttgttgataccctttttgttctttatcttatttgagatttcgaagatctaaagcgttttaaaatcgggttaggctgtgagtgaatttcttgagttgaagtttttatctttctttctatctttgcaccgatgaggatc

SEQ ID NO: 93032 - DNA, 377 bp, Glycine max
  Clone ID: PAT_MRT3847_55021C.1
gataattctcatctggttgttttctctgtgcacccaaacgctaactgccgaccctgtttccctgtcgtgattcgtcatgaaaggaggaaagtccaagacctaatctagtagagtcgatcccacacttgctgtgagtaaaaagggagacgccacctaggttaggaaacccgccggccaggggaaggccgggaaagaccctaacatgccaaagatgcctccaggtgctttgttcgcttgcatggaggagttcacgaaggtgttcatcaaagaacatcctgaagacaatgcagagactgctgtgggcatagctgctgcggcaaaatggaagaccatgtctgaagctgaataagcacctgttgtggtggattctgatgcca

SEQ ID NO: 93033 - DNA, 639 bp, Glycine max
  Clone ID: PAT_MRT3847_55022C.1
gaaattaaacagcatgcccctttttttttgaggaaaaaactttccaaacaagtcataccaatgtctatttcttccttgccatgtgcccgttccaagttactctacgataacacactcagactcaacgaagcttataataatacttaggacatgtgatttcaagaacggattgctatgtcttcatcaacataactatacatagagagagtcgctcaacgtattccaacgcctaaacaataagagagatcgcgagaggaacatactaagaactcagttcagctcaccacacacccactctgatttaattctataaagctgataatctacatccggcctgtggcagcgtccccaaaaaacaagctcaactcgctcagctcaggagaagccctttccaaccttactgaattgcagggcacatttttctgcttgacccagcaacactaatccccatatccttcgagatcctctacagtcaacatgggcaaaacctcatcctccacctcatgcactcaaaacaccggggcattacgccctagccccaattcattaaaccaaaccctagccacatcttcaacaactcgtaccctcacaccaccattatcattgcttgtatccgcacacttccaatccctaacatga

SEQ ID NO: 93034 - DNA, 463 bp, Glycine max
  Clone ID: PAT_MRT3847_55023C.1
gaaaaagtagcagacccccttgtgggggcaaacctttctttaaaaaaaaaaaggggggagaggggggggcccaaggatccaaaaaaaaaaccccccaaagggggggggaaaaaaccggaaaaaaaattgggtttggaacaaatgggggaacccatgtttttaattaaaagccaaaagcccccccccggggcggggtgattaatggggaggggggaaacccaccccccaagggggggggggtctctaattttaaaaagggggccaaaaaaaacccccccgggtgtaaaaaaaaaaagggggggaaaaaaaaccccccggggaaaggccccgaagggaaaaactttttagaatgcccggccaggggttcccccaaaaaacctcgggggcgcccttccccaagaaaaaagggtctccaaaagacttttttgggggaccaaaaaaggattggggggcaaaaacaccc

SEQ ID NO: 93035 - DNA, 395 bp, Glycine max
  Clone ID: PAT_MRT3847_55024C.1
gggggaacccaaaataattttatttagggtacttgcaaaaactattgaaaaccggggggaaaatttggagctaaactaacttgcataaaaaattaccgcataaaagcctaaacaagggcttaacaggttccccccccataaaattttaccacagggaaattatttacatacaccctatactggggcccctaccctggttaggcatccctccctaaatttaaagggtaaaaacaagttttggcgctcccgttgaaaccattggggcccccccaaaaacattgggacccctggaaaaattggaaaaacctttttttgcccaagatttcccccaagaattttttaagaaccaaaaagggttttccttaaaaccaaatggggcataaggcccaaatcca

SEQ ID NO: 93036 - DNA, 1653 bp, Glycine max
  Clone ID: PAT_MRT3847_55025C.1
gccatcccaaccccccacaaaccgcatttcatttcaaggcttaaaattgcgtgcaggtgtaatttcaagcaccatcatcatttatatcataatcagaatcagaatcccagtgtgatcttttgggtgtttcaatttcaaccccttgggttgatactgataacatgatgatgattcgatttccattggtggttcttgtgttgatgatttgtgccatgagatgccgtccccccccccacccaaacgcattgcatttcccgcctttcccccactaagttttgtgtcccaatttattaaccccttctcttctttcatttcatttatgtaataaatttatatagtcccttctttataaaccacaaaatagtctctattcaaaagccatcccaaccccccacaaaccgcatttcatttcaaggcttaaaattgcgtgcagcttaatttcaagaatggccaaagcagcagaacaaagtcctgattctgggaatgtgtacacgctagcttctgtgagagaggatttggttaggcaagaggataccatcatttatggtctcattgagagagccaagttccctagcaattctcacacctatgatgaaaagtatgctcaaatccagggtttttgtggctcattggtagaatttgttgttaagaatacagaggccattcaagctaaggctggaagatacaaaaaccctgaagaaaacgccttcttcccagaaaatttaccaccatcaattgtgccatcttactccttcaaacagtttttgcatcctggagctgcttcaattaacattaacaagtccatctggaaaatgtatttccaagagttacttccattgcttgctacttcgggtgatgatggaaactatgcacaaactgcagctaatgatctttcattattgcaggccatctctagaaggattcactatggaaagtttgtagctgaggtgaaattcagggatgctcctcaagactacgagcctttaattcgagctaaggataaagaaggattgatgaaattgttgacatttacaagcgttgaagagacggtgaggaagagggttgaaaagaaggctgtggtgtttgggcaggaagtgaatcttgacaatgaggacgatgataatgaaaaccgtaaatttgatccatcagtggcttctagcttgtacaaaaattgggtgataccccttaccaaggaggttcaggttgagtacctattgcggcgtctagactgaaggcattataatgcagttagaatttacaagaatggaagatgaatatgatgttgttgttcaaatgattaagctcttaagtgatcctttattgccaacttcatggagctgttgattcagaaatattatttgtagctttagattgttacctttattttcatcggctttattagaagaaaaaaaaaggattagatcatgaacttcaatatgtgtcgtgagaaaacacattttcgaactagaatctcagcccttttcctggcctagtttatcaagggattagattcctttcccatgatgggaaacatgccttgttctcccatgctagccaaatcctcaaatctaagcctttgatagtggtttcacttggtgtcttcttaataaaaaaattatccctaactattggttaatatcaccaccattatat

SEQ ID NO: 93037 - DNA, 236 bp, Glycine max
  Clone ID: PAT_MRT3847_55026C.1
gagacacgattcaagttatcacatgtctcatccccacactagtacagacactagattaccaggtcagcagtccataccttcattttcacacaaccgggaaagatacatacacacatagaatgtgacagtgagagaggtacggggaatcacaggtttaagttatcaggtgtgaatccgtatgcctggttttactacactgaagtacatggctacgggaacattttcaagggagctgg

SEQ ID NO: 93038 - DNA, 508 bp, Glycine max
  Clone ID: PAT_MRT3847_55027C.1
ccataaaaaggaaaattccattaaaatattcaaaacagaggggggcttgcccccccttaagggccatagggggggcataaaacaaaaaaataggtaattcccccggaaaaagcttttcctttaaaagcccaacgaagggggagggaaaggccccccgggaaaaaaaacccacaaatcccctaaaaaaaaagttataaacaagcagggcctaaaaccccaactttaaaaacaggcatgggaaaaggcggttttttcacaacaaatttgacaaaaaaaaaaaaaaaacagggccacggaaaaaaaaacccaaagcggatggtcctttttaacctggcttaaggaaacctcccatttcggaaacccccaaaccaccaaatccccagtttttccaagcttaaaaccatggccccccacaaataaaagggagggcctaaggcaaagtaggggaaccataaccaacaattttgttatgcccctaaaaaaagtcccaaacaaaagggagggaccc

SEQ ID NO: 93039 - DNA, 1634 bp, Glycine max
  Clone ID: PAT_MRT3847_55028C.1
ccacgcgtccggaagacttcatcaccaatggaacaacaggcagcaaatatgtacactaagaagatttttgcaaaatttcaggaggaactggtggaaacttttgcttatactgcaaataatgttgaggatgatggtgtgatcagtaaatacagggttgcaaaatatgaatatgatcacaaggcatacatggtcacattgaatatctctgaaatgaaggcaaattgcagctgccagatgtttgaatactcaggcattctttgtcgacatatattgactgtcttcactgttacaaatgttcttacccttccatcgcactacattttgaagcgatggacaacgaatgcaaaatctgatattagaacttatgaaaaaataacagatccacttgacattgaaaatcttactgtacgttttaatagtttatgtcgagaagccattaagcttgctgaagaaggagcagtttctgtagagacttataatgcaacaatgaatgctttaagagagggggctaaaagggtaggtattatgaaaaaaaatgttgcaaaagtcacacctccaaacactcagggtaatggaagctgcctgaaagaccatagcaagaatagcccttcatcaatttctgatgtcatcccatcattatggccttggcaagattcagtgtctcatcacttcaatcttaatgacctggggcttcctgttactgatttgaatacccctagtatggctcctgtttctattcaccgggatggtggccctccagataacactattgatttgaatcacccttgtaattattagtttatttggttcagatatactggtcattgctttaattgactatcatttatcgatgcaggttgtccttacttgtttcaagtctatgacttggatcatctcaaataagaattcaagctcatccagtaaaattgcagtcatcaacatgaagttggaagagatcagtctatgtccagatatccgtttgacattcatgttctctgctgaaaatattaacaatcaagcttcaagattatggtaagggccctttaggagagacagaagtgcaatttagggtgacaagggtcactttggagcctatgttgaggtctatgacttacatcaatcaacagctaaatgcaccagtcaatagagttgcaatcatcaatctgaggaggatacaaagacaactactgggcaaacagaggtgaaattccaagtttctagagatacgctgggttccatgctgagatctatggcctatatccaggagcagctataagagttttcctataatatggatggctagacagcgatggaagtgccctagtgcagtatagtctaacatccatatcctgaagtacttattgttctgtgaaggtttgccattttttatgtacctagtgaccctttatttaatatttcatggtgtaagtagcccaggaatctctagtatttgattcatcaacaatgttaatagtagaattggatagtttttttttttttttttttgcattctttctttaccctctttacctcagattatacaccatttccattatggaaatttatttagtacatgtatttctgaagatcaagaatatcacttgggagcattgcggatgtctaatttgttttta

SEQ ID NO: 93040 - DNA, 334 bp, Glycine max
  Clone ID: PAT_MRT3847_55029C.1
tgggaaaacactctgaatggccaattgaacgccccctgtaaagatgcatttttcgccggcggggtggttgttaaacaggccgtgaccgatccacttgccaaacacttacccccccgttaatggcgattggtaccctccctttatcggcacattaaccgggtattccgggcaggctataaacagggggatcccttcacgggccagagttatagcttcaggtcatttcgatccctaaaatctttttttgggcgatggctcacgttttgccccataagctctaaagaggggtcttccttctgggaccctggagattgcttttcgaaaagtggaccct

SEQ ID NO: 93041 - DNA, 387 bp, Glycine max
  Clone ID: PAT_MRT3847_5502C.1
ctctcgctcgcaaacgcaaataataaaaaacaaggttttagccatggcatcgaagcggatcttgaaggaactcaaggatctccaaaaggatcctcctacctcatgcagcgccggatcatgcctctgttacgcgctaccttgcttgtgcgtttcataagcaaacttgcaataaagaatttcgaattaccgcctttttttttgattagtgttgcatttgtacatgttgttctaatgttgttaccatcttagtgtgatccaacaatctctgtgatcattaatgtccggcactattataactcttatttctcatttggatctctgcttgtgctgttctgtaactttattggagggcgattgaaactaatttctctccgaagtcaaaaaaaa

SEQ ID NO: 93042 - DNA, 283 bp, Glycine max
  Clone ID: PAT_MRT3847_55030C.1
ccacgcgtccgggtcaagattgggtgggttgcttgttacttatccatcactgagaaaatatcataggtgggtattttcacattcgaggacgaaatcacctccactgtggctcctgctactctttacaaagctctagttacagatgccgacaacatcatcccaaaggctcttgattccttcaagagtgttgaaaacgttgaaggaaatggtggccctggaacaatcaataagataactttcgttgaggatagataaacctagtatgtactgcacaatataaaat

SEQ ID NO: 93043 - DNA, 240 bp, Glycine max
  Clone ID: PAT_MRT3847_55031C.1
gggagacccacgcgtgacccacacgcgtccgcgcgagaaaaagaacgcttgatgatgtttctattgccctaggaacgggggccactggttgcatctgccaacaaaacttttaatgaataaattattcctaaaactataaatattccttctgtggagaatttgtcagtctatgatgttgcagagaaatacaacgatgaacggcatgatatgactatcttgcctagtgctgaggatgtgagc

SEQ ID NO: 93044 - DNA, 181 bp, Glycine max
  Clone ID: PAT_MRT3847_55032C.1
acggatgacggcagaaacaggaaggagacatggtgtccaagtattatgctctctagtatgtgcacgtgttcatgactgtgacgaacccaccatcgtatgccaatcttcatcgcagggtcaagacgctcgacgcatccgacgggagccgctcatcacgactcgatagaggacggggacatct

SEQ ID NO: 93045 - DNA, 587 bp, Glycine max
  Clone ID: PAT_MRT3847_55033C.1
ccctcttttccgcggacgcgtgggacagaatcctaacctgaagcctcaggagagccatgtaacaggaggccgatcgtccaatgggtctcgtcaaaatattggggatagggaatcagccgcaacttcgaaatgccttgatattacgtcttctgaagcagcatatagtggtggtagtttccaattcaccgagaatgtcaacatgtcccaccagtccgactcgcagaaggatgcccagacaaatatgagtagtgaggcagattttggttgtcaaccctgcctcattaccaatggagggaagagtggtgaggagttctcgtgtgaaagcgaaacattcccaagctttgaccttggattttaacagtgggaagaaacccactgacgtatcacgtaacaattaacaacctctatagaaagagatccgagatacatccgccaacagcggcaaagaaataaaatcaggtacataaaaaattctgccatagctatctaaagacgacccaaacaatgcggcatttgttgatattggttcgtgttggccatatatatatatcacttacataataatcattaaaaaaaaaaaataaaaa

SEQ ID NO: 93046 - DNA, 297 bp, Glycine max
  Clone ID: PAT_MRT3847_55034C.1
caagagaagacaacattcacctcacagggggtttctacatcacgggggtaacattctcactccccttataaaaaaatctcatttgcaatgcattctgaaatctcacttgctgccttttaaaagtcacaaaaacaacatatcattccatattgggtctataataacaacgcaaacctaaagattaacataattttgaagcaccacacaaatgatttatgacctccaaataatacacaaacctcaccaccaaaaatgctggcaactgcagagaagaatacaccgtttacctttgaaaaa

SEQ ID NO: 93047 - DNA, 808 bp, Glycine max
  Clone ID: PAT_MRT3847_55035C.1
cataatcctgctcttgggtggcaatatgtcattgttggtctatcatcaggaccttcttatcctccattatatttttatagtggaggagtcaaagaattccttgctacaataaagcaacatgttcttcttgtgagatctgaagaagatgccaacgtattccttgtgaatgattttcagaatacactgcagaggactttgtcttccttggagatgcccagggctgttccccttgcatgtggaccttcaaatacatcaggtgatgaatccattttgattgagaaccaagaaagagctgataatggtgccaatgatggaagattcagtgttaatcaattccatgggagacattacataaaagatttatcctgaaaattttcagatgcttgctaattattattggggttaaacatctgcagtggattaccttcatggattctgaaggacgagtcacagattcagaagctttgagaaaaagagtattttatggtggacttgaccacaaattacgaaatgaggtatggggtttgcttttgggatattatccatatgaatcgacatatgctgagagagaattcctgaagtcagttaagaagtcagaatatgtgaacataaagaaccagtggcagagtatatcctcagcacaggctaaaagattcacaaaattcaaggaaaggaaagggcttattgagaaagatgtggcgatgataatccaaatgtaaatgttctgcgagatatcctgttgacatattcattctacaactttgatcttggttattgccagggaatgagtgatctgctatcttcaata

SEQ ID NO: 93048 - DNA, 354 bp, Glycine max
  Clone ID: PAT_MRT3847_55036C.1
cacgcctacaatagctcatactttcgctcaattccaattcctctattatcaagaaataatgaagcaaaaatagtcatatattaatagtaaggataccctttcttattatgcctatcctgaaaccaaacgaaatgacatcgcaattcctcatagaattccaattccacattttcaacaaatatcgaggcaaaaatgttcatatatcaattggaattatttgttctcttattatgcctatcctgaagccaaatgaaatgacatcgtaattcctcgccgaattccaattccacattttcaatatataatgaatcaaacatgttcatatattaattctaattatcatgtatcttatta

SEQ ID NO: 93049 - DNA, 494 bp, Glycine max
  Clone ID: PAT_MRT3847_55037C.1
tcgcccacgcgtccgggcaagggtcacatcctcattgttgagttgtttgtggtgcacaccctctcgatactctggctcgcgacgggaggaattacagagtatgctatccctcgcgactgctggtattactactactacgacaactacaactgcgatatctaccccatcgtcatacgagtcttctgttgggtctcagctggccaccttctcatctggtccacctggctttctcttctcgcagttggcgcaacccggcgcggtaatcgcgaggtctggatctctaatatcgggaccacaaacttcctccgggttgtacatacgtcgccggagccctctgtggtggtcacgaacttgaacctcagacgtttgagcgatccggaaacaggaatgccacccccataccctcgcggaagtcaggagccgaggacggaggatagggagatgcgctatgttgatctggtgaagactccgctcaacgaacgtgcaatcgccag

SEQ ID NO: 93050 - DNA, 483 bp, Glycine max
  Clone ID: PAT_MRT3847_55038C.1
tcgcttacgcgtccgcccacgcgtccgcccacgcgtccgcgatgacgccgattacgccgcgtcgcagcaacaaggatctgctagcgtgatgttgcggagtgacagtgccaaacagagttcccctcggaacggtgctgaaattgtattttcgaaggacaatgttgcaattcatccgactcaatttgcgtctgaaagaatcagtggaagactgaaattgattaagcaaagctcgtccttgtttatgacttggataccttacaaagcgcatagctcagaggccaggctgtctgataaagacagaaacctttataccataagggcggtgcccttcactgacatcaggtccatccggaggcataatcctgctcttgggtggcaatatgtcattgttgctctatcatcagatctgaagaagatgccaacgtattccttgtgaatgattttcagaatacactgcagaggactttgtcttccttggagatg

SEQ ID NO: 93051 - DNA, 274 bp, Glycine max
  Clone ID: PAT_MRT3847_55039C.1
gttacatttccgaataccattgtgcaaatggaacccaacattgattcaaagtttcaacttttggagtccacttcccattgggattttggtcaaagggaaaaacttgcaatgggttaaggttatttaacatttgcctcttgtggctttgcattaaagttcccttccacttcatttgttggattttggtttgcaaaaaaccaaagggttatttgtgggtttttttgaaaggatgtttaacgttgttattaacgttaatcagccccaaaagaaaaat

SEQ ID NO: 93052 - DNA, 265 bp, Glycine max
  Clone ID: PAT_MRT3847_5503C.1
gttttcaacaatagaaggacatatgaaaatggcctatttccatagtacctgctttctggtttttatgcttatcgcatcactgttggtccccggcagaggcggtgactacggtcccgaagaagaaaaacttctatcaaaaactataggcattcaaggcattgtctattgcaaatctgcctctaaactcaccccacttgaaggggccttgacaaggatagcatgcgaggctgttgatgaatatgggtttgaaacgacaccgttttct

SEQ ID NO: 93053 - DNA, 3490 bp, Glycine max
  unsure (1)..(3490): unsure at all n locations
  Clone ID: PAT_MRT3847_55040C.1
gaccacgcgtcagcaagaattcaggaattaagaacgctgggccggtggaccccaaaggaaacacaaagtattgctaggaaaagaaatccatatatcgcagccgtttatttcgggtgcttcaaccatccaacggtgcagattctgagaagcgaatttcgtaaccgcgtcgaagacaaacgagtaacaaacgtcacgtttctctccctgtactcctgtcatccgttcaaaagacggaatttgtgtatctttagtatcagagccgtatgcctccccccctcgggctcagagaattccaaaattcagggaaaggaaagggcttattgagcaagaagtgcggctagctgataattctgttccttttcccgcaacagggattttttccttcgctacgaagatatccctctttctttctcatagttttctgcgaaatcgccgatgctagaatcggagctccacgatttatccgacgacgccgattacgccgcgtctcaacaacaaggatctgctagcgtgatgctgcgtagtgacagtgccaaacagagctcccctcgggaaggtgctgaaattgtatttttgaaggacaatgtcgcaattcatccgactcagtttgcgtctgaaagaatcagtggaagactgaaattgattaagcaaagctcgtccttgtctatgacttggataccttacaaagtgcatagttcagaggccaggctgtctgataaagacagaaacctttatatcataagggcggtgcccttcacagacatcaggttcatccggaggcataatcctgcttttggttggcaatatgtcattgtaaaactatcatcaagactagctcattcgccatcatattttaatttattaatgagctaagtggtcacatcaaccttgatgcaaccctcagagatgcagaggctctatgcatatgtgctggtgagaacggtgctgatcgcatacataccggaaccccaccatcgttttctgttgaagatggttcttttttcccccatccagaacaacattcaatattgtaaataaatttgcaggtctttcttatcctccattatatttttaatatggaggcctaaaagagtaccttgctacaataaagcaacatgttcttctaagacgttctgaagaagatgccaacgtattccttgtgaatgattttcagaatacactggagtggactttgtcttccttggagatgcccagggctgttccccttgcatgtggaccttcaaatacatcagttgatgaatccattttgattgagaaccaagaaagagctgataatggtgccaatgatggaagatttagtgttaatcagttccatgggagaccaagacataaagtagatcctgctcgagacctctctattcaagttctagagaagttttctcttgtcacaagagttgcccgtgaaacaacttcacaactttttggagaaaaccagagtaatggatttagtcccattgacaggaggacccatatccagactaaccttgatcatcctaagtcttccaatgttgaggaaaatacctctgttgaaagtcctgttgtcttggattctcaggagttcgataatttatcgttagtatggggaaaaccaaggcaaccccctttgggttctgaagagtggaatgccttcttggattctgaaggacgagtcacagattcagaagctttgagaaagagagtattttatggtggacttgaccacgaattacaaaatgaggtatggggtttgcttttgggatattatccatatgaatcaacatatgctgagagagaattcctgaagtcagttaagaagttagaatacgagaacataaagaaccagtggcagagtatatcctcagcacaggctaaaagattcacaaaattcagggaaaggaaagggcttattgagaaagatgtggtgagaactgatagatcactcgctttctatgaaggcgatgataatccaaatgtaaatgttctgcgagatatcctgttgacatattcattctacaactttgatcttggttattgccagggaatgagtgatcttctatctccaatattgtttgtgatggataatgaatcagaggcattttggtgttttgttgctctaatggaacgtctcggacccaattttaatcgtgatcaaaacggcatgcactctcaactttttgcgctatctaagttggtggagctgctggatagtccattgcataactattttaagcagcgtgactgcttgaattatttcttctgtttccgctggattttgattcaatttaaaagggagtttgagtacgagaaaacaatgcgcttgtgggaagttttatggacacattatccgtctgagcatttgcacctgtatgtatgtgtggcaatcttgaaacgatatcgtggtaaaataattggagagcaaatggacttcgacacccttttgaagtttattaatgagttaagtggtcacatcgatcttgatgcaaccctcagagatgcagaggctctatgtatatgtgccggtgagaacggtgctgctcgtataccccctggaaccccaccgtcgttgcctcatgaagatggttctttttacgcccaacaagaacaagatgaaatattgtaaataaattcatatttatcataaattttttggtgatacttgaatatatcaacctaattttgtatttcctgattgattcacagtttaaatacgttgttagcatatttaatgcatttctttaatcatatttgttgtaccaatgattctaagcgaaacaaatgtcgattcatttatctctctcttcttgtgaggttagcccnagattgcatgcccttacaatttttattttttttcatttaataatgcaataaccaatcttttgtagctagttgttgccactgcttttgtttctgtggatttataaatggtgtttttgttacactgtgttctgtgtatgaaattgatgaacctacaattgggcattatttgattgtcagcaaaatgatttttatgacatcaccatgtattatgtgcaagacttgaccattcttagttttgagcaagttatcaggtgtgtgtcacattcatgacttccttataagcacagtgtttttgaaatgatggagaatcatcatcatgcctatgttttatgcatgcagagtgagactatttacagatatacactagtcttttcctcttttatgtgcatcaagatcactctttattgctggcatgattccaatagaacatttacacttcgagattcttgatcatgtttattgcatcaagaataataatattatatttgcagcacatttctatcatttttttcttgtaaatttgttattataatcttatttgcatgctgaatatatacatattttaaattctaaatatctctctttcatttcatgttgtgctgcattttagatctgaagaagatgccaacgtattccttgtaagtattttcagaatacactgcaggcatgcaag

SEQ ID NO: 93054 - DNA, 403 bp, Glycine max
  Clone ID: PAT_MRT3847_55041C.1
ttttgttgcatgagggaaaaggtgtgactgggcctaactgttacgcgtgtgaataacatgcagctccaatacccatcatggtgcaggatgtaagtgtgcattatagggcccacattcttaggactggatctttgaagtagaggagcgaggctccaactacggctatgcatgggggagctctgagagggctaatcgatcgtcatggcagttgagactgcttcttgacagtcgcaatgagtctacaggatactgtttacacttgggattaacttacgattcggaaaatgctgtgagtactcttaagacaggtttttctgattcacagggtgtcgtcagatcttacgaatgtgcagattgctccgcacgagatggaatgggtgtagcctttgagttgctcttccgt

SEQ ID NO: 93055 - DNA, 647 bp, Glycine max
  Clone ID: PAT_MRT3847_55042C.1
cttggtgtaaaggaaggggacacggtaattgttggagagatgaagatgatatggcatgactcctctgacaatcctggtgcatctaggatgaagaaaatatccacagattcatttaaatgggctgaatggaagtaatgccactcatttttggtgtttctagattcatgtgtactgcaattatgccatagctgttcatgtaggaagcaaattcaatcataatgaggtgatactactatagaagagaaagtcatggaaagctgcatcaaaaagcataaggtaatgcaaaccattacatggttgtcctgtgatgggatgatgctcatattcgacttgaagccgaggtcttcatctgctcataagtcaggtacaagcagtcgttgcggtgcacatataacattgtttgctaaaattggtttaaatcagataacaaacaaacagaagaacgtggttactcatgtaattgtataatgatgtattatatattattttgtataggatgtaaaatgcttaatatgattacatccttattcttgacagactgctctcatgtgggttggatatttcgatgaaattaaagtgaacagtcaaatttcaagttgtcttaagtcatcaataaaaacgatcgatactttcaaaaaatgttcaaa

SEQ ID NO: 93056 - DNA, 1109 bp, Glycine max
  Clone ID: PAT_MRT3847_55043C.1
gggatggtgctgtttaaccctgccgaagagaaagacaatggtagtgatgattctctcacaatctcaagttgttcgcaatcacaaccccttgatgagaatctcttctctgacctcacgcttgtggtagatcccctccaaaacctagaagtagctgaggccgagcgcgatctccaatcgagacagggtcatgcccccgccagaaggagaaaacgatctggcttgaggataggatatggtagagacgccttttcttccaacgatccgcctcacactccttctccgctcccccaacctatttctgatagtgacagcgtatgcgatgctgatgctgttcgtgtccgggacacggacacggacacggaaacccttccctccatcaccactgccactgccactgatgatcctgttactgtcactcttactcaaccatctaatgaatcagagaatcagaatcggaaacaccaacaatcatctactgaatcttcctcaagatcagagaatgagatttctgacgcagcacatgattcatctactgaatcttcctcggcagagtttcggcaacttaagtccagcatacatgacaagcttaaccatgccactcaactggtcaaatctgcttcttctgcccgaaaggattccatcaggaacagaagaaaaaccgttgagaacgctaatcttgcttccctcaaacacatggaactcgaaaagcaattggaagaagcctgtgaagctgaagatttcgaaagggctgaaaaggttagcgacgacctttctgctgccgagaaggagaaacaagctttcgccaattcattgagagaagccgatgcctttgtcgatgctttagatctgaaattgcagcatgccctcgactcgcagttagctattgaggaacaatgcgcaatcttactcgaccattatgcaacggttagtcaagtaaaacatacctgcagttgcactacttttatatttcttccattacatagtttataagttcaggcgccatgttgaccaagcgttagtgaaatgtggtcgtctagtttccaggttttgcatttcccttgtaacttcacataaattcattaatgaagtgaaatgttacataaaccaac

SEQ ID NO: 93057 - DNA, 141 bp, Glycine max
  Clone ID: PAT_MRT3847_55044C.1
tgggccaaaaccacaaaattaggttcattcctttccaaccaaggacactttttaaaaaaaccccctttaactgggtcctccttgtcaacccaggggatttcaagaaaattacctttaaaactttatattaagccccccttt

SEQ ID NO: 93058 - DNA, 1562 bp, Glycine max
  Clone ID: PAT_MRT3847_55045C.1
aatcacttaggcccagttcccccttaaaccctattcgccgcaataaaaccttctaggtcgaagcaataaaacgccggagacagaggtagtttccacgacggtgcaggtcgcgacacgaaggggcttcttgcggcgtgagatcgtgcgattataccgatcctaacagagtgagatttcagggttacataatgaccaagaagaagaaacaaaatggggttgttgttggagagggtgatggtgttggtggtgttgtagatttggagtctgtcatacacaaccacgctctttttttcgacaagttgattgaattgattcccgccaagttctatctgccaactgatgacaaggagaagccatggtttcagggtctaaacaaggctgcaaaagctaaggcaaagaaagagaccaaggagaatatcaagaagtctcggagggaccgtttagaccctgacaaaccttctgcaactacccttgaccttctcaaggaaagctttggaaaagagaaggcggatgacagtgatgaagagcagggtgcggtggcgcttgctaagcctgttgtttctgggatgaaaagagatgatgggtctgtgacttatgaagagcttcagcaaaggcttcgtcgcaggctcgaagagtttcgtgcaagtcgtaatactgggaattcggataggaagagggatgaaaggaatgctaggagaggatataaggacaacaaacgcaagagggatggtgaaactgaggaaggcaaccctgtgcgtggtgaattggcggcggcagaggagaaagtgaagaaggatgctgcagaggcctccaaggatcttgtgtttggacatgtcaaacttcagaatgaggaagggaaaaagaagaggaaggtttcaaagcatcaggaactagaaagggctaagaaattggaagaagtgaagaagaaagatcctgagaaggctgaagcttttgctaaaaagcaatcatggaaagcagcaatggatagagcttcaggggttaaggaacatgatgatccaaaactgttgcataaaagcattcataaagttgacgcgagagagctgaagaatacggagaagtggaaggattgagttcaaactagggaccagttgaaggcaaaggcccagaaggaaggaatctcttatacggcctggcttcagagttcgcaaaaaaggtttaatgtatcatggtggttccagctaaaatgggtgttgaagtttgtagatttttcttatcattgttagaatcttgctgttgactgaaaagtagtgttagagaatttattttcaagggttaaaaaatgcacctattcatttctctatgcttcactatattttttaaactgagtataaactttctcaggctctgtttccaatttatgatttcaacaatctcaatcttaatatataaatttcaatttcctcaggctccgtttccaatttttgatttcaacaatctcaatcttaatatatagcttttgatttcaaaaaaaaaaaaaaaaaaaaaaaaaaaaaaaaaaaaaaaaaaaaaaaaaaaaaaaaaaaaaaaaaaaaaaaaaaaaa

SEQ ID NO: 93059 - DNA, 186 bp, Glycine max
  Clone ID: PAT_MRT3847_55046C.1
ctccaattgcattcgactttgcattattgcattcatatgaatcgttaaactattgagttcgatgtcttaagttccttgtcaatgtcatgcttagtgtcatgcatattgtttgagttttttataataaaaaaacactggtgagtaacatcattaagcgtgtggtttggtaacatcggcaaattgatt

SEQ ID NO: 93060 - DNA, 262 bp, Glycine max
  unsure (1)..(262): unsure at all n locations
  Clone ID: PAT_MRT3847_55047C.1
ggggaaagcgcgnnnaacaaannanagncncaancaaaannnaaaagatgcgctgcctagaggcaacacagctgaaatagattntcaagntacgtgctcacacaatttaacaactaaatacgctggaaaatacaagncagattttaccccccttctaaaaagggttggggnanaccnncaaaaaacggggggaacaaaaccgcccaaccaagagggaaccgagcaaccaaaaaaaggaaaaacacgggaaaacggggacgac

SEQ ID NO: 93061 - DNA, 137 bp, Glycine max
  unsure (1)..(137): unsure at all n locations
  Clone ID: PAT_MRT3847_55048C.1
acagtnggcgtangcgtncncnagnctnngattcggctcganccnagagcgggnccgtggancataccntaancngctcnaaatnntagnnacancagcantnnnaacncatanngcnnncgcnacnanaacagacc

SEQ ID NO: 93062 - DNA, 140 bp, Glycine max
  Clone ID: PAT_MRT3847_55049C.1
aagcacaaaatacttcgataactttatattattttacatgcatgaataggatatatagcctgctctcaaattagtcaacatgaacaaaaatagagtagatcctacgatctttaaatttcacatttgtcataattattata

SEQ ID NO: 93063 - DNA, 786 bp, Glycine max
  Clone ID: PAT_MRT3847_5504C.1
ggaatcattggatgattctgatttctcttcagatgagagcattgattttgactcacctgaaaagccaccactaatgtcaaggtttctatgcaaaggaaaccagagctcacctaggttgtctatcaggattgaaggagaaactgaaccttcacccttgatcaagacaaagaagttccatgtaagcattaacccatggaaactcataaagttgaccagagaaaaagcccaactagcagctgagaaggccagggaaaagattatgagagaaaagccaatgggggagcataattcattaaaacctcttccattggaaacaaaatgcggaccattgatgagtccagataaaaatatggacactaaggattttggctcaacatcttttatagcaaaaggcagacttaccgaatcaccaggaggaaggttttcaagcccaagaaggagattttctgctggttcaccaacggtgttctctagcagcatgatggcatctccgcatcacaaatacagaagcagcttcgacttgaaattaactggtgtgtccagggagctcgaaacacatatttcaaggcagggtttatgttcagtgatcagccaagatgatagcgaaccatccccaagataagcaatgttgtattttagaagttgagattctcaaccttagagaaagagttgttgatatgtgcattttctatatatcattgattccttgtaatttatacatgggatggttaatcattatgtaacatggatttctgtttaatttttatacatgtaatttatgttcca

SEQ ID NO: 93064 - DNA, 529 bp, Glycine max
  Clone ID: PAT_MRT3847_55050C.1
cttttattgttctattctcattgtttattcttcattctttattttatttcatatttacttgtgtttctttcttctattttgactttgttttttattgtcttttttgtcaaagactgcctatcgatcttcgaatacgtgttttgaaagaagactgccacccaaccccagaaggcttacaaatcctttagagatcgccaatatcatgcgcagctatgaatcatgaaatgatgcaaacggactggacgcattggagggactttggaatcataccatacaaaagagccatttgttgacaggaagaatgggaatcaacaactaaaggtctttcccaccaagtttatcaagaacagaaaaatgtacatacttcacggctttttttaacagatcagggggcgcagaatatattgtaattacacgggcccgactaaattccatgcctgagaggcggcatatttgaactaacagttggcataacccgcgagcagtactttcttggatacttggggagaaattaaacaagcccagtatc

SEQ ID NO: 93065 - DNA, 335 bp, Glycine max
  Clone ID: PAT_MRT3847_55051C.1
cccggggaaaaactccccgggggtttttttgaattcgccttctatttttcaaaaacaagcaaaccataacaaacccaaattagtattacccggaaaaaccaaaaagaattattattattaaaagagcatgaaactcgaaagaaagaaattaaagaaagaagattgattaacaagtcattaagaagctgctgctgctgctgctgcaagttgtagtagtatgagtgtttccaaaatggaatgaaagaagaagagactcacaaaaggtccacttcttccctttcctctgttaattattattatcacaaacactggtcaaaaaaaccttttttttttcc

SEQ ID NO: 93066 - DNA, 425 bp, Glycine max
  Clone ID: PAT_MRT3847_55052C.1
ttctctttgcgtccgaaaaaaaaaaaaaaaaagagaaaataaactaaataatgaaggaaaaaagggtcggccggaaatgtgtagttttgcgtgggcaaatcaaactgaatggcatgtgagttaacttcctgacaagccacaacaggaaacagtttttgattttgcctggggaatctctcacgattttgaaattgctggtaatactcttatgccagctttttctgttccacaggctactgccagatcttttgaaaatgcggaatcctctgcatgaactggaattggggcttttgtttcgcttggtcgcttgtttaacccaataaaggaaattaggcttgaccctcttgttgagtatgctctgcctatctaaaaatttccccaccttttttaattgccgtaacgattggtgaagtgagtgctttttt

SEQ ID NO: 93067 - DNA, 418 bp, Glycine max
  Clone ID: PAT_MRT3847_55053C.1
acgcgcgggtatcttatatgatggcaaaggaggtgaaaagaagttctgccattgaccctgtcacgatggccgtgctgcgtagagtactgcaagtagcagaacgcagcagcattgccttgaatgtgagccggtcaggagcccttgatccaaagtagatgactttttttacattgtggcatcatcctttatatgctactgctattgggacgagaccctgatagccgattcaaccaatgttgaaacatcatatagggtgttaggagcaaatgagttgtggcattagcaggtgggacactaggcttgatccaaacaatacttgtggttgatattattagatcgaaatggcaattcttctatcatcaggaaagaaaacaaatattcatggtgctttgacattgatgccaatggtattttgaac

SEQ ID NO: 93068 - DNA, 252 bp, Glycine max
  Clone ID: PAT_MRT3847_55054C.1
gtttctccctcgtatgagtgcgtgtgtgagctatcttcttgactcttcacttatgttgactggcatggctctatgagaatccgttgctgggtaccactcgaacgttcctgcttatgcgagtttgacgtccaccaaaccaagtcctaccacgcttgactctgtgctcccaatagccattgaaaacataatcactaagatcgtagcatctcaagtgtagcccctctggagacattacatcagatcacgcggatc

SEQ ID NO: 93069 - DNA, 197 bp, Glycine max
  Clone ID: PAT_MRT3847_55055C.1
catcattttgaagaaggcacggtcacttcacctaatgtccgggataataatatatcagggccctagttctcttctcaaccacatgccacactgtgccctttggcgcccacgccgcacattcaagcgcttaggcagatactagacttcacagcgcaggccaatctgacgatctgaaaaaaaggtcacggcgtccaacc

SEQ ID NO: 93070 - DNA, 266 bp, Glycine max
  Clone ID: PAT_MRT3847_55056C.1
cttctcgtccgtaagttgagctcctagactcgaggtcctcccaattgtgctccttcaatttctgtggtcactaaatttgatgatggtacacctgcacctcgtgctctgatgttgctagaagccatatggggcttaacctgccaagactactaatggtggcagccatcatcagatgatgcaactatctagttagatgaagtggttgattgactttctagatcctccaaggatctaggtcggggaatttgtatcccaaattctgaaca

SEQ ID NO: 93071 - DNA, 486 bp, Glycine max
  Clone ID: PAT_MRT3847_55057C.1
attctcttaatctgcctcccagatacgagcctacagctgagatagcataggtgttggatgcgaccttgcttgatggtctgacaaaggaccatcctcagcttcctccatgcctattggagcaccaacacaccccacagcttgtttgctgcccgaataaacacatgccaccttattctgtccatggtgccagggaggaaccgacctccattcctccaaagaagggaccagaaagggccccggactgctaagtgagtgcaatgtatccgattgcgcctgcctcagaaggtgtaacttagactcgatctctaccgccacaacatcacgatatgttgttacaaccacaatcgcaccgggagaccgtgggctggctaaaactatgataatataaagctttaatggcctctgctacctgagcgtctatgagtaaataaaaggaaaggagtttgaacccatgtgataccatgttgggaggttctccctctttgt

SEQ ID NO: 93072 - DNA, 432 bp, Glycine max
  Clone ID: PAT_MRT3847_55058C.1
ggtccttgtgtctccggtgctcatagcactatagttacagcaagggctggaaaggatctagttgccagtctcgtatcaggattgcttacaattggtcctcgatttggtggagcaatcgatgatgctgctcgatacttcaaggacgcacatgacaggggtctatctccttatgagtttgtggaaggtatgaaaaagaaaggaattcgagtaccagggattggacacaggatcaaaagccgagacaaccgagacaagagagtgcagttgctgcaacaatatgctcatgctcacttccctgcggtaaaatacatggaatatgctgttcaagttgagacctatactctcacaaaggcaaacaacctggttctaaatgttgatggtgcgattgggtctcttttcttggatctccttgcgggcagcggaatgttcaac

SEQ ID NO: 93073 - DNA, 485 bp, Glycine max
  Clone ID: PAT_MRT3847_55059C.1
ccgggcccaaaaggtttccccattttattttttgggggccaacagggccaggaaaatggcctttaaaggcccccatcggggaaaaaaaaaaaacctttttggcaagggaagggaaactaaaaccggttggacctattaggaaaacccagcattccccccccgaaaattccccccacaccaccccaaaaaaaaaggttaaaatctttcccctggaaccccaaccagaggccatagggcccaaaaaaaagcaaaaggcttaagtttttttttccctggaagggggaaccttggacctaggagttggagttaaaaaattgggtgaaaaaatgtcgggaaaaggggaccttccttggggcccaccctttggaccaaccccatcttttggcaggggaacattacaaaggggtggaaaataaccctttgtgcccagaaatggttgtggaccaaaaagggtccccagggccctgaaatgggggggcgggaaa

SEQ ID NO: 93074 - DNA, 315 bp, Glycine max
  Clone ID: PAT_MRT3847_5505C.1
ccacccgttctactactacaaaatttttacttaagggggaatcacttccctgtgccgcttttttttttgctgcaccacctaacaacttcccctgtaaatctcgtttcctttgtacaacattttaaaatatgtctaatcccccgcacattaaaactcttatatttataatggaacttcaattatcaaagctactttttcacctgattatactcatactcccttgttccctaacattattaaaagaccactccatactccttatacaaaatattattggtcacaacgatctcttacattatttaccaatcccaatca

SEQ ID NO: 93075 - DNA, 251 bp, Glycine max
  unsure (1)..(251): unsure at all n locations
  Clone ID: PAT_MRT3847_55060C.1
gcaaaaggncatataatttntttnaaaaatgaaataatgtcagggatcatccacaagattgaggagaccctccatgtgggagggcacaaganagaggngcacaaaggngaacaccatggtgagcacaaaggtgnacacaaaggaganncccatgncgagcgccaaggtgancacaaaggagaccaaacaccatggggagcacaaggagnnacttnnnnnncagntnnnngnccggatccatggtgatggcc

SEQ ID NO: 93076 - DNA, 256 bp, Glycine max
  Clone ID: PAT_MRT3847_55061C.1
atcacctaccactgataactccatcccttccttcctctttatcatcactgacattttcccttcatgtccctctaactcgaccacctttgtgtatgttcttcttcttcttcttcagatagctccaccccatcttagattcacactcacattttccacacatgggaatattgtgttacttatatagacacttgcttttgctgacacccccaagattcgggggtctcaaagatctggccttttgggtttgttcccttgt

SEQ ID NO: 93077 - DNA, 986 bp, Glycine max
  Clone ID: PAT_MRT3847_55062C.1
acgagtggagaacattgatacaaagcaaattatatctgtctggggcattgatgggtttccttttagaacctctgatcacactagacttactcaacaatggaattggttctggtctgaaatgacgaagcttaaccctagaataggggacttgatcgaggaggatcgttatctcttcatctatggaggcacagacataatgtggatccaagaattcacaacagccgtggagaaattgaagaggaatgttgactcaatcagtttgcacgtagataagaagacgacagaataccaactaggaagggaagacactaaggttgtgccacgcttttggatcgctattgatagcttgcttgcaagtaggaagcaacaaatgatgaagggtggtgatcaaggggtgcaagactttgcaacaagagagataaagaggctgctcttcctcaaacaagaccctaagggatgggtcattcttagcaaagggtacaatgtaaagctccttggtcaaggtgaggccatgtgtcgctcggttagagattttggtatatggtatgggaagttgcatgaagaagtgagctttgatgttgccttcaaagagtactatgaaagcatcaaggttaaggattgtcctaaaaaatgtgaacatagtgaaatttctaactacccaacggatatattggcccacataccgtgcccaaatatggaatgtgggcgttcaatggaggtaacttctgttaattacaggtgttgtcatggtcttgaaccatagacaatgttttgctctgcctgggaagcatatgggactttacctttggcttaaatttgtgcatgtgtgtttgttatatatttatcttttttcagtgtatctcatagtacaaggtatgtagctacttgcttgccaagtactagataataatgattttcatgtagtcttgtttgtatgttttttaatgcattggtttgaataaaatatgaattttcgtatttgattc

SEQ ID NO: 93078 - DNA, 954 bp, Glycine max
  Clone ID: PAT_MRT3847_55063C.1
cccggggtcgcacccacgccgtccgtacggtctgctgaaaaaacgacagaaggggtacggaagacagaaggggaacgtaatgtatatcagaaacctgctgtagtgcgcgtagtaattcaaaatttgtggtaaagcaaatggcgaaagttttctgtgattttcggttccttctcttggttgccgctggcgtcttcatctatatccagatgaggcttttcgcaactcaatcagaatatgctgatcgcctagctgcagctattgaagctgaaaaccattgtacaagtcaaacgcgatcactgattgatcagattagcttgcaacaaggacgaattgtggccctagaagaagagcggaaacgccgagaccaagaatgtggacaaatgaagtctcctgtacaagatcttgaaagaaaagacctacagaggctgattgataaaatgcaggttccggtggctgctgttgtgatcatggcatgtaatcgtgctgattacctagagaggactattaattctgtattaaaataccaaaggcccatttcttcaagatatcctttatttgtatctcaggatggatcaaatccaaatgttaaaagtaaggctttgagctgtgatcagttatcttatatgcagcacttggattttgaaccagttcaaactgaacggcctggagagttaactgcttactacaaaattgcacgtcattacaagtgggctctagatcaactgttctacaagcataacttcagccgtgtgatcattcttgaagatgacatggaaatagcacctgatttctttgattattttgaagctgcagcgactctccttgacaaggataaatccattatggctgtttcctcatggaatgacaatggacaaaagcagtttgtacatgatccatatgaactttatcgctcagacttctttcctggattaggatggatgctggccagatcta

SEQ ID NO: 93079 - DNA, 295 bp, Glycine max
  Clone ID: PAT_MRT3847_55064C.1
gggaccgacgctggggaattgacacaatcatgccggtaccattttatgccgtaacatcacaacaatgcattgacacgcactttgaaccttacctggaatgactgtggctgacgaacgcgaggatctcaacgaagctacagattcatgttacaccgctccaatgttttagacaaaaccctgttgaaaacgagccactttgtttcctgcccttaagaagactgggaatcagccgtaaaggggtcatattgcccatttaaagggggtcatattgcctttaagaggccctttcataggc

SEQ ID NO: 93080 - DNA, 2293 bp, Glycine max
  Clone ID: PAT_MRT3847_55065C.1
gctgctgctcctgctggtgccgccccgccattcccgcctcgtcccacccctccgcctttttggtttctcgtctgacaattgagttgactggaggagttacatgtagctgagcgcaaggcatagaaattgctcttaacgtaatgtatatcagaaacctgctgtagtgcgcgtagtaattcaaaatttgtggtaaagcaaatggcgaaagttttctgtgattttcggttccttctcttggttgccgctggcgtcttcatctatatccagatgaggcttttcgcaactcaatcagaatatgctgatcgcctagctgcagctattgaagctgaaaaccattgtacaagtcaaacgcgatcactgattgatcagattagcttgcaacaaggacgaattgtggccctagaagaagagcggaaacgccgagaccaagaatgtggacaaatgaagtctcttgtacaagatcttgaaagaaaagacctacagaggctgattgataaaatgcaggttccggtggctgctgttgtgatcatggcatggaatcgtgctgattacctagagaggactattaattctgtactaaaataccagatggaagattaaattggtcgttgtcttgaattctttcagaagagcagaaacgtcgagaccaagaatgtggacaaacaaagtctcttgtacaagatcttgaaagaaaagacctgcagaggctgattgataaagtgcaggttccggtggctgctgttgtgatcatggcatgtaatcgtgctgattacctggagaggactattaattctgtcataacttcagccgtgtaatcatccttgaagatgacattgaaatagcaacggatttcttcaattatttgtaagctgcagcgagtcttcttgagatggataaatccatttatggctgttttcttatggaatgccacttggattttgaaactgaacggcctggagagttaactgcttactacaaaattgcacgtcattacaagtgggctctagatcaactgttctacaagcataacttcagccgtgtaatcattcttgaagatgacatggaaatagcacctgatttctttgattattttgaagctgcagcgactctccttgagaaggataaatccattatggctgtttcctcatggaatgacaatggacaaaagcagtttgtacatgatccatatgaactttatcgctctgacttctttcctggattaggatggatgctggccagatctacatgggatgagctatcaccaaaatggccaaaagcttactgggatgactggttgagacttaaagagaatcacaaaggacgacagtttatccggcccgaagtatgcagaacatataattttggtgagcatggttctagtttgggacagttttttaagcaatttcttgagccaatcaagctgaatgatgtcaaggttgattggaaattaatggatctgagctatttactggaggataaatattctatgcactttgcgaacgttgttaagaaagctacacctgtctatggagctgacatggttctaaaggcatctaatatagatggcgatgtgcgcatcaaatataaagatcagtcagactttgaaaacattgctcaccaatttggtatatttcaagagtggaaggatggtgtgcccaggacagcatataaaggagtagtcgttttcagatatcaaacctcacgacgtatattccttgttggtccagaatctttgaagctacttcagatcgaagagtcttaatgctggatgaggaagaaaaatattcacaatgtaagagtagttgttttcagatatcaacggaagtgttgcggagttattgatattgagcttaaaagtgacgtacgatagggatatttctcattttcaaatccactgcctaaaagaggctatgatctgcgctttagctaaaaaatgcacaccagaatgcgctggaacaaaattatggccaccatcccgagtattttttgagtggaaattttgtcttgtgatgccaatgggaatctcatatatccctattcttcattcatgtgatagaaagctttacttttaaaggctttgtagatttgcacttgttcgtcattccacgtgcatttcataaccattccggatcataattatatatcctcgtgatttaattttataataaagggcatgtgtgactacctaggatgaaaatgagctaggctggacttggctttattggtgacctattgtcttatttggcctaaaaaaaaaaaaaaaaaaaaaaaaaaaagcggccgctctagagga

SEQ ID NO: 93081 - DNA, 684 bp, Glycine max
  unsure (1)..(684): unsure at all n locations
  Clone ID: PAT_MRT3847_55066C.1
aagaacagcagaaagaaagaacacaactttggccagaagacttggtgggggcacttttcttttcagccaagtaggggaccgagtaagaatgccaaaccagctatggtttgcactgccaatgactttacaaggatggaaagatttcccaaagggacttagagttcttctgcttgaaggagatagtagttctgctgctgagataagagaaacaacttgaggccatggactataaggtttccactttctacgacgagaatgaagccttgtcagcactctcaagtagtcctaaaggcttccatgttgccatagtggaggtgagtacaagctgtagccttggaggtttcaaatttcttgagaatgcaaaggacttgcctaccattatgacttcaaaggaccagtgtctgaacaccatgatgaagtgcattgcgcttggtgcagttgagtttctcagtaaaccactctctgaggacaagctcaagaatatttggcagcatgttgttcacaaggtagactggacacctgagctgcataaaaaatttgtaaaggctgtcgaacaactaggntattgatcaagccattccttctagaatattggagataatgaaagtggnaaaggtttgacaaggcacaatgtggcaagccatcttcagaaatattagatacacaagagacaaagtgcaccca

SEQ ID NO: 93082 - DNA, 1414 bp, Glycine max
  unsure (1)..(1414): unsure at all n locations
  Clone ID: PAT_MRT3847_55067C.1
tacatatgttgatttgcttatttttcatcaatctgaacttaatttttaaaaaactttatcaaatgcacaacaaaaatttgcatttacaaattaaaacctacttttaattttgaaaaatttaaaaacctaaaaccaaaaccaaaaccaaaacccaaccaattaggcaataggaacatggtttctcgtcagaaaattgagttgaccggaggagttacaggtaggtagctgagcgcaaggcatagaaattgctcttaattaacgtaatgtatatcagaaacctgctgtagtgtgctgtgcgtagtaattcaaaatttgtggtaaagcaaatggcgaaagttttctgtgattttcggtttcttctcttgattgcagctggcgtcttcatctatatccagatgaggcttttcgcaacacaatcagaatatgctgatcgcctcgctgcagctatcgaagctgaaaaccattgtacaagtcaaacgcgatcgctgattgatcagattagcttgcaacaaggacgaattgtggccctggaagagaaacgtagagcagaaacgtcgagaccaagaatgtggacaaacaaagtctcttgtacaagatcttgaaagaaaagacctgcagaggctgattgataaagtgcaggttccggtggctgctgttgtgatcatggcatgtaatcgtgctgattacctggagaggactattaattctgtattaaaataccaaaggcccatttcttcaagatatcctttatttgtatctcaggatggatcaaatccgaaactggagataaactgagggaccaaatttgcaattttgcctaaagaatattcaattgattccgttatcaggtcattacaagtgggctctagatcaactgttctacaagcataacttcagccgtgtaatcatccttgaagatgacatggaaatagcacctgatttctttgattattttgaagctgcagcgagtctccttgagaaggataaatccattatggctgtttcctcatggaatgacaatggacaaaagcagtttgtacatgatccatatgaactttatcgctctgacttctttcctggattaggatggatgctggccagatctacatggaatgagctatcaccaaaatggcctaaagcttactgggatgactggttgagacttaaagagaatcataaaggacgacagtttatccggcccgaagtatgcagaacatataattttggtgagcatggttctagtttgggacagttttttaagcaatatcttgagccaatcaagctgaatgatgtcaaggttgattggaaattaatggatctgagctatttactggaggataaatattctatgcactntgcgaatgttattaagaaagctacacctgtctatggagctgacatggttctaaaggca

SEQ ID NO: 93083 - DNA, 509 bp, Glycine max
  unsure (1)..(509): unsure at all n locations
  Clone ID: PAT_MRT3847_55068C.1
cnttgcgagtggagtgctaccttactttgttgttgatttttttgatctttattgattttcttttttttttttcctttggggaagggaaatttgcccccccttacccaattttttttttattggcgtgtttcccaagggacttttgattgatttagggcacattattgaaaggaaaaacttccttctggaatttggggggccccttgaaagccaaataggaaattttgggggggggggaacccttttttggaaaaactttttccgcagccttcttttaattctttgtttgggaaaaaaatttttttccttggatagcctccgtgagggacttgatttggggggttttttcctggtttcttcaccaaacaattttttttaagagagggcccaaaaccccccttgatccccggggggattattaagggggggggcgttttgttggacaacaaagaggaccgtttaaaaggggccccctttaccacccttctccaataaaagcgccaccccga

SEQ ID NO: 93084 - DNA, 683 bp, Glycine max
  unsure (1)..(683): unsure at all n locations
  Clone ID: PAT_MRT3847_55069C.1
tcctaactcactctagttgctttgttgagtcttcaatgagaatatagaacagcaggaaagaaagaacacaactttggccagaagacttggtgggggcacttttcttttcatccaataaaggattcggtgttgatgatcaatattgatctgttgctgcattaagggaccgagtaagaatgccaaaccagctatggtttgcactgccaatgatttacaaggatggaaagatttcccaaagggacttatatttcttctgcttgaaagatatagtagttctgctgctgagataagataacaacttgaggccatggactataaagtttccactttctacgacgagaatgaagccttgtcagcactctcaagtagtcctaaaggcttccatgttgccatagtggagtgacttcaaaggaccagtgtctgaacaccatgatgaattgcattgcgttgagtttctcagtaaaccactctctgaagacaagctcaagaatatttggcagcatgttgttcacaaagcatttaattctggggaaaatgtcctttctgaatcactaaaacctgtcaaagaatctgtagaatccatgctgcagctccaaacagacattggacaagataaaagtaggatctcaattgatttaaaaaatgtgtcgaagtttagtgataatgaccatgancagtctgct

SEQ ID NO: 93085 - DNA, 346 bp, Glycine max
  Clone ID: PAT_MRT3847_5506C.1
aacctggaagctgttgaatacccgaataatattcgggtttcaaattcagggaggtagatggtgtagggtggtttacgtacaacatatgaaagctcgattgacgatattagtatagaacggtgacatacgtgatggggggggtcggttaattggaggaacatggtgccctaataaagatacgtccgtaagcgtgtcgcagtcgagttttatgtcggcgtagattaacacatacctggtataaacggtggaggtaagcttaacggttcgttggcgtagtaaaaagatggcagtgctgagtctttataaacgtcgccacattatagtagtggcacgcgaattaacaagg

SEQ ID NO: 93086 - DNA, 164 bp, Glycine max
  Clone ID: PAT_MRT3847_55070C.1
accgcatatcgtcatttacccatagctcaaatagctcttcaagcaaagtaccatcaaaatggccggagcacaagtcatcgtcgcataccctcgcaaggagggcttcaagttcaacaaggagtactatctgtcaacgcacatgccacttgccgcaaagcactgga

SEQ ID NO: 93087 - DNA, 2038 bp, Glycine max
  Clone ID: PAT_MRT3847_55071C.1
ccacgcgtccgtagaaaatgtgtcgaggtttcgtgctatagatgcttagcagtctgctgtatgtgatagatatccggctcggtcgaacacaactttggccagaagacttggtgggggcattttcttttcagccaagaagggattcggtgttgatgagcaatattgatctgttgctgcagtaggggaccgagtaagtatgccaaaccagctatggttttttctgccaatgaagttcaaatatagaaagagtacccaaaaagactcagaattcttatgagtgaaggaggtggggcattttcttttgagataagataacagcttggaaacaagaaaaaaaagtgaattagtgaaaagaaccgcctttcctactacatccctgattctaccttgattcatgtatgcatgttttggagacaaagctatccggtttaggtttaaagtagactggactcctgagctacataaaaaatttgtgaaggctgtcgaacaactagggatcgatcaagccattccttctagaatattggagataatgaaagtggaaggcttgacaaggcacaatgtggcaagccatcttcagaaatatagaatacacaagagacaaagtgcacccagggaagaagatcggaaatggcataatcaaagggatgcaatgcaaaggaactattatatgcaaagaccaatcatggcataccctccatatcattcaaatcacaccctttctccagctcctatatatcctatgtggggacaacctggtagtcaaacagctggtgtacagatttggggccatcctggttataacatatggcatcctacagaaagttgtcactggaagccttatcagggggtgcatgtggatgcttggggatgcccattgttgccagcccctcaagctccttgttttccttacaatcaaaatatacctggattgcacaatcctaaagcagtggactatagattcggcatgccacaaagttcctttgagcatcatccggcagaggaggtggtagacaaggttgtgaaggaagcaataagcaagccatggctaccattgcccttaggactcaaacctccttccatggatagtgtgttggctgagctctccaaacaaggcatttccggcatccctcttggcaacaagcgttcttctactcctaaactccgctgacatgtatgaccgaccccaccactgggtcccacagagtagtggttttgatgatggggccagccagttacatatcaacgccctgttgactcttgtaattattttgtttctcaaatttccctcccaggttgcaactagtggtagatttggctggaagttgggaccatttactttgccttgccatccccgcctccacaccaaccactcaagatgtctctccttaagctgctgagcaatgatggttgatatgatatgatatgatatcaggtcaggtcatacaccaccatgatgcatcacaaatgggcaatacattgatcctattccatggccacttgccaaaacaaaacgctaaaaataacattaaaaaaaaaggttaagctatgcagcagcattcagcagtttcaatgcagtgcatggcatcatttgttgaaactaaggactggccacgcatttgttgaagctttatacaaaatattgtggctgaaagaaagataacaatgtggactttttgatggttgtggtggtgaggggtttttggttgtaagtgaccagcttcggggtccatgtaaaaatagcatgacagggactggaggtgtcttggttctgttggtgttgttggggagggggtctagttgaggtctaataatggaaaaaaaggatagttaggatagtgttgtgaataaaaaatgagtccaggctttggtttatgctaacttgttcttttcccaattcaatttgttcactcagctattttagcttaagttcagcattgagaacaacactttgtgcatgttcagttgtttttgctcactttatctttttaacgttttgaaaataattctaagctatgatcattactttcttttaaaa

SEQ ID NO: 93088 - DNA, 247 bp, Glycine max
  Clone ID: PAT_MRT3847_55072C.1
cccccccgggggaacacaagggaattttaaaaagagactcgcacatctctccagagggaaaagatgggtggcttgactagcgtgcttagagaattgcagtataaaagcagaaacatgcgcgaaccaggttactacttcatcacagtacagcgagcaaaatatgtacatacatactatgctggtgaccataccacgtctaggcattcaaacataaatttaagtgacagaaacatagtgtgcagccaca

SEQ ID NO: 93089 - DNA, 2159 bp, Glycine max
  unsure (1)..(2159): unsure at all n locations
  Clone ID: PAT_MRT3847_55073C.1
ccacgcgtccgggaaacacatgtaatttttttttatagaaaaaaatggtaagaaatgagggtagatttggaaaatgaaccatgattgaccatagtgagagactctttttctgcatattatgtggttcgtcaggagcgatggcaactgttcagtagtcacagacacccttcaacgaccgtagttaaacctcctaactcacttccccttccctcactctatttgctttgtcgagcttcaatggaataagagcagaaagaaaagaacacaactttgggcagagtagttggtggggcattttcttttcagccaaggtaatagctaggaaacaataaaaaaaaaggcttggaaaagaaccactttccgtgtgcatgctgattctaccttgattcatgtgttcagttttggagaaaagggatccagtgttgatcagcaatattgatctgttacttaactaggggaccgagtaagaatgccaaaccagctatggtttgcactgccaatgatttacaagaatggaaagatttcccaaagggacttagagttcttctgcttgaaggagatagtagttctgctgctgagataagagaacaacttgaggccgtggactataatgtttccactttctacgatgagaatgaagccttgtcagcactctcgagtagtcctgaaggcttccatgttgctatagtggaggtgagtacaagctgtagccttggaggtttcaaatttcttgagaattcaaaggacttgcctaccattatgacttcaaaggaccagtgcctgaacaccatgatgaagtgcattgcgcttggtgcagttgagtttctcagtaaaccactctctgaggacaagctcaaaaatatttggcagcatgttgttcacaaggcatttaatgctggggcaaatgtcctgtctgaatcactaaaacctgtcaaagaatctgtagaatccatgctgcagctccaaacagacattggacaagataaaagtaggatttcaattgatttagagaatgtgtcgaggtttagtgataatgaccatgagcagtctgctgtatgtgataaatatccggctccgtcaacccctcaattaaagcaggggacaaggttactggatgatggagattgccatgagcagactaattgctcaacagaaaaagaaagtggggaacatgatagggaatgtaaatctgtcgaaacttcatgtgggaatttgaatgccgaaagttctcctcagccaagggaacctgataagactctgattagggaggaagatgattttgccaatgtttccaagggtgagagcgctgtttcactgaatccacataataaaaagtttctcagcaatgccgatggtaatacatctccaaataaaacgggtgtacttaatgattcatgtgagattaaagctaatcggaagaaggtgaaagtagactggacacctgagctgcataaaaaatttgtaaaggctgtcgaacaactaggtattgatcaagccattccttctagaatattggagataatgaaagtggaaggtttgacaaggcacaatgtggcaagccatcttcagaaatatagaatacacaagagncaaagaattcggctcgaggaagatcggaaatggcataatcaaggggatgcaatgcaaaggaactattatatgcaaagaccaatcatggcataccctccatatcattcacatcacaccctttctccagctcctatatatcctatgtggggacaacctggcagtcaaacagccggtgtacagatttggggccatcctggttatcccatgtggcatcctacagaaagttggcactggaagccttatccgggggtgcatgtggatgcttggggatgcccgttggtgccacctcctcaagctccttgttttccctacaatcaaaatacacctggattgcacaatcctaaagcagttgactatagattcagcatgccacgaagttcctttgagcatcatccggtaaggcagtactttcctttcagttccttctaccatgtcatgaatttttttctctagttgaaaaataataagaattgtatatcgagcaaggtatgtagatgggaaaatatctcaaatattttgtatcaagcatgtatcttaaaatgacagcagtcgtataaagccatttatct

SEQ ID NO: 93090 - DNA, 694 bp, Glycine max
  unsure (1)..(694): unsure at all n locations
  Clone ID: PAT_MRT3847_55074C.1
atatctcactagtcacttccaagttacaccctcttgcttctaccttaatttctctcaagagcgtccgcaggtctactactagatttagttggtgttcttcttacattggtttcatagagtgataatcaagaaggatgaagggttttgctgtgaaggttgaggaaggaagagaaggtacaaatggtgagctatctataggtcctgtatatcgcaacctcctctccaaaaatgaatttcctccactagatcctgatttaagtaccgcttgggatattttcagcatggctgttaaaaagtaccggaaaaatcgtatgttgggatggcgtgaatttgttgatggaaagataggaccatatgtctggaagacatatgaggaagtttatgatgaagttttgcatattggttctgctttacgagcatctggtgctgaacctggttctagaataggaatttatggagctaactgtcctcaatgggatcgtggcaatggaggcttgttgcgcgcacaacttgatnttgtgttcctctatatgacacccttgggccaggtgctgtaaactttattatagatcatggagaactggatttntgtgttttgtccaagataagaaggttatacatctttttgatcctgattgtaaatctgcccaacgactaaagcgatgggtgtccttcacttcattaacagaggaag

SEQ ID NO: 93091 - DNA, 589 bp, Glycine max
  Clone ID: PAT_MRT3847_55075C.1
caaactcctggttgaaaggaataatatcaccttggtattggatatacaacatttcctgtacactgaagacaaccaaaactattcacactggtcttcagtcaaaatgtatatctatatatttactatagtaatccttgctgcaaaatttgtacttaagctaagcctttggctattgcaatcttctaggcatcacaggatgactgcaggataggctctgttgtaatactttagccaaagcgttggaagttgaaaggatgtgtatgtacaaatagcaagttgctcttcctatagagggatccagcccttgattagtcccgtctcagtaccacaaaaaattatgtcattggctgcgaggatgcttgttatcttgcttccagctgatattctccccaactttttcggtgcctccctcaaccatatctgaatgttgttcggtgaagagctggagattaggtacaagaagtcttctaccacttccatgtccaccacattatctcctttgtccgtaagaattgaaacttttggtctcttagttcttttccattccttgaatgttgtgccttcaacatgcttatttgcactatagagc

SEQ ID NO: 93092 - DNA, 1794 bp, Glycine max
  unsure (1)..(1794): unsure at all n locations
  Clone ID: PAT_MRT3847_55076C.1
acttgttgaggggtatgaaaggtgagagtgtggggaagaggtgttgagtttgagggttttggagagaaatgagtttgctgatgtaaagggtaagagggttatggtggatnaagtactagtgttgagtaatgatcttgttgtggtggcaggtntcagagagaaagaggagatggttctcaaagcaacggttgatgaggatgatgccatcattattccctttctcactcagcacattctaaacagtagcaccatcaccaataataatggcatcatcctcatcaaccgttgctttgagaaccatctcctctttctctctgaaacctgccaccacaacaagatcattactcaacactagtacttcatccaccataaccctcttaccctttacatcagcaaactcatttctctccaaaaccctcaaactcaacacctcttccccacactctcacctttcactacccctcaacaagtctttcacttgtagaagccaggctgaaccatcttctgactcagccaaagtccaagaactgagtgtgtatgagatcaatgagagagatcgtggaagccctgcttatcttagattgagccagaaaactgtcaattcccttggtgacctagtccccttcagcaacaagttgtactctggatgtttgcaaaagagggtagggataacagctggaatttgtgtgttgatccaaaacaaatcagagaagaagggagatatgtatgaggcaatctacagcttctactttggggactatggtcacatttcagtgcagggttcatacctgacctatgaagacacttatcttgctgtgactggtggatctggcatctttgaaggggcttatggtcaagtcaagctgcatcaaattgtgttcccctttaaattattctacacattttatcttaagggcatcaaggacttgcctcaggagcttctttccaagcctgttgagcccagcccatctgttgagcctagcccatctgccaaggcctgtgagccacatgctgttattgctggcttcactgactaaacaacaatgactcaatgaggatccacattttttttgtttcttttttaaggaaaaaattcggttacagtttcttaggtgttgttctctagtcagaattggagttttatttcgacaatttacgtaataaaagttttcattaaaggtttatacagattgtcgaagtgaggcttaattttcatagaagaacagcacaaattaaaaactgtttaagttttctccttaatttttattttttttaattctcttcattgttggcttggtttggagacacttgcaacaagttcacaatttaaccacctgttacttgtattgaaatttattaatgtagtaattgtgggtcaagatgtcaggtagtagtagtagagttttttatgttgttgaataatgaaagtgacaagtgaggttgggttttgcagtgatggagatgggaatttatagaagccattactgtattctcaggggtgttaggtcatatattattcaagaaagtgttgcactagcaattattgttgatctactgaatcacgtggtttgattttatcaaagatcttgtgaattttttagtttgtctttgcctcgttggacttgttttttatgacacgatgaatgccgagtggtttggtggtttggtatgtgagaatattgtcattagttaattaatatctagatgtatgctaatgtgtaaaatgtgactatatatattatattgtagcgtggcggcacttgagttggaactaagctgtccatctttttatat

SEQ ID NO: 93093 - DNA, 252 bp, Glycine max
  unsure (1)..(252): unsure at all n locations
  Clone ID: PAT_MRT3847_55077C.1
aaaaattcaagctaccngaacctgttctgtggcattggaggtgtantgctagttgagcngttgggtaganttcaanaacaaganatngatgnattattctacntatgcatctcccatgttcaagccattggacgatgcaatttcgccagaatttgacgtcagaattcatcatccgtcnggaantgtaccttgnaatncngnnctcnaatagattgttatgtgtnttcttcaacatnatcacagngangtgac

SEQ ID NO: 93094 - DNA, 321 bp, Glycine max
  Clone ID: PAT_MRT3847_55078C.1
gaagaagatgccgatcagaaacaccgccgccggaaggcctgaagaggcgactcaccccgccacgtagaaggcggcaaaaggctgagttcatctcacccttaatatatcgggggcgacggctcacgctccgggatcgcctacaaaagaaaaccgacacggcgctgccacccctgccggtcttattttcggctgcatcgcccacgcatttgaacttttcggcggcggatccgtcggggccaacatcttcggtggacacgtcaaccccgccgccaccttgggcgccttcgggggagggaacctcacccttctccgagggatggg

SEQ ID NO: 93095 - DNA, 389 bp, Glycine max
  Clone ID: PAT_MRT3847_55079C.1
acgagattagaaagagcaaaatatggtaaaatgtgttttaggttccttaaattttggtcaaaattgggtagttcctacatttttataatggtgattttggtccttgtattttcttaaatgtggtgaatttggtctcttcttaggtaaaaaatgaaacataggattagggacgaaatccatgatatatattttagaaacgtgaggactgaagccactatttttaaaatgtgggcactagggccaattatgatcaaatctagagagactaaacacatttaacccaatcaaaaggcaattataattgcgtactttttttttggtttttttacatcaaagtgtataagaagtactacatgtgctgattaggaaactataattgggcttgctgt

SEQ ID NO: 93096 - DNA, 429 bp, Glycine max
  unsure (1)..(429): unsure at all n locations
  Clone ID: PAT_MRT3847_5507C.1
tggttttaggatatgcattacttttgagggaatttggatctggaagagcttttagtgcatgaagattcttttctctctctcactctctcttcaattcatataattacttggggaccaacttccttgaatcgggcactggtagcttagctcgtgtaaatgtgtctctggcgctggaaattcatgagtaaaattaatttgtgagatcgagagctttgagttgcgaagatggtggctaattaattgactttgaagtcaacttgcaaggtcatgaagtggagctgccgtgagctacatgtagcagcaagatgattgaacaattcatcaatttcgttattcggcctcccagggcagagtataaccctgatcagtacctgtgggaaaaggaattcacccttgcaggtcgaacataccaaagcangatttggagct

SEQ ID NO: 93097 - DNA, 625 bp, Glycine max
  Clone ID: PAT_MRT3847_55080C.1
aaaaaataatagagtttttttaataaaaaaaaatcgattaagttagagttaaattgggaatatagacacccatccagtgttttgcatataatactttcacatatgtatagcttaatttatatctctaataatcatgaccagctagaaaagcatataaatgctaatcaaaattgccaaggttttccacctttttgcaggtcaaatccttgaaatgattttagatttgattcctgattctcggattctttgtagccactcactattagtagcagcttttatcctcccattatcggatgccgaaaattacatttctaggcctcacaggcttccttccttagatcaccaggggaaacaatatgaagctaataagatgatgtagcatcatgggacatccaattgttcaaaccaattaaagcaccaactgcggaatacaagcaaaccagatttggccatatgggatttgtcatgactatgcaaacacatatatgttattatgccttgtagctttgttcccaccaattaaagcactaagctattgtgaccattagcggaataaaaggctgccagaaatggctgtagaatgctgcagaacaaaaacgggcatttgcattgaagaatatgtaaa

SEQ ID NO: 93098 - DNA, 258 bp, Glycine max
  Clone ID: PAT_MRT3847_55081C.1
ggctcgagggaaaaggcatggtgctctgctcctctgtctaattctctctgatgatttgcttccgggtactgggactggtgcaagggctgtttccagattccctgtcccaaaccacgatgttgacacattccacataaccctcttggcttcctctattctgtattgaaaagggttcttctgcttacagggcggagagagcagctagtgttcatgggataggaccaagcactatgggacacctactctatacaccatact

SEQ ID NO: 93099 - DNA, 972 bp, Glycine max
  Clone ID: PAT_MRT3847_55082C.1
attatagtaattttaaaaatgaattttaatttttttagttaacattttatttgtttttaaataatatttttgtattaataaaaaacttaaaataaatttagttaacattgtaattttttagttttgtcattttgatgtttgaatcgttattgttagttcagttatttttgttttattatatttcttttattatgttttaatttcatttaactatcttaaaaatcgggtgtagtttggaaattagttttgaaacaagtgtattttaaggattttggagagagaaagcgtgtagtatggagaaaaagaaaacctaatatgggcaattgtaatgatatacttagatggcagatgctctactttatgttgtctttcaaggagatatgcattgtttttaagaaaattattacttatccaaattattgattattatgacaatattttttctattaaaaaaatcttattgaaagagttgaaatatagttgccaattaagtatttagagaacatattaataaggttattagttggtgatccaaaaaaataaggttatatattttattgtaagatggtgtgtatgctttcgaataagagaagagaaaaacattaagaatattatacataaaaaaaattaagaatatttaattcacaaagtaaagagaagaaaattccacttttcaaattatatattttaatttataatataaaaataaatttatataaatttatttattataagttctaattataatataatatatattattaattttaattacataaaattgtgtgtttgttttacaggattttttttatatatttttaggaatttgacatgataatatcatttttagatatattaaacattttaatatgcatgagaataatttttaaattttaaaataatttaaataaaaaatagtattttttataacaaaatttaaagtaattaaaataaaaaagaaagtcacttgtg

SEQ ID NO: 93100 - DNA, 388 bp, Glycine max
  Clone ID: PAT_MRT3847_55083C.1
taatggggcgcgcatgagtgagcagatcgagggcacttgggacagagtaacggggatggagggacttggttgctgatttgctacaagaaggggatgacgacacatccatctgtacgatatataccctctacaaagcaacaatggttgtcatgcccgtatttgcctagagcgacgcgcttatgtcacgatacatgtttaatcacacaacatctgtactttagtaaccgttgctgatcaatgcgttgaagcaacgaatccatacgtgcatgacaaccttgatcaagatgactctacagctattaattaactacttgacttgaatcgcatatactatgaactgaatactaaggactaattgcacaacagtgtatacctgaaagtatgttgt

SEQ ID NO: 93101 - DNA, 355 bp, Glycine max
  Clone ID: PAT_MRT3847_55084C.1
gaggctgcgtatcggttgggctggtgtggcacaaagatcttcccgtcgcaccgcgccggatccgactctcgacgtgtgggccctggtgtagagatgcgcgctgatcctgtggagcgaaggcggaggaatggccaggaattggacatgtacacgtctcttgagtagaagccgcaagcaaggttgaggttcctggaacgcatgtgtacatacaagtgcgattcatggcataggatttatacgcataacgagtacggtctcgacacatctaagagtgcgaataccgacatggcaagtctgatctggcacgcatttgcatatgcaatatttgtacaaaatctgactatgcgtactgccc

SEQ ID NO: 93102 - DNA, 406 bp, Glycine max
  unsure (1)..(406): unsure at all n locations
  Clone ID: PAT_MRT3847_55085C.1
gctgagcatacacaatcctagtccttaaaatgcttggagctgtagcagcttccacatcgctatacttttcaccatccacaaactccaccagaattgttgttcttaaaagaatctcaaattcaacacttccattcagcaatgaccactctttctcactcttatcagccacccctatgcatttctcttcacacaagagcagtagaaggcaaccccatttccttgcacaagctgcttcatcttctggaaatgcagttggcactttcttggaaaatgaacaatgcagactggggaataaactttaagggcagtgctgcatttgtgaagattaatatataccctngaatgttagaatgatgtttctgtgtagaaaaagnnntttttctttcttttttcttttttaatttaa

SEQ ID NO: 93103 - DNA, 699 bp, Glycine max
  unsure (1)..(699): unsure at all n locations
  Clone ID: PAT_MRT3847_55086C.1
tatatatatatatttcaaccactatgcaactgtcactattagcccacgaagttgtccaatagggcccatttgtttaaaattatttctaagaaaaaaaaatttgaataaaaataagcagttttctggttgtttgaagtgtttgtttaaattgctttttctttaaaaaaaaaaaacagttttctacttttttttaataagcaaatcctatctgctttttaaaaagcacttttataaaaaaggacttttttatataaaaaataaaataaagtttaaacaaaccgaccctatatattggattttggcttaccatgatccactattgacaacactggaaagaagagagattcaatggaactgatagatatttgagggaatgaatatttaactgaaatattgtatttctgaaaaatgagaattaattgttacaatgatgaaggactatagctatttatagctcccttaggtcaccatcaacttattcgaaaattgtaagaaattgaagatatgaaacataatattgcaatatacaaagagggtgaataaagcaactcactgcatctagcgtttgataaatagggcaaattattttctcaaggaattttgcagaaccatcatcagttatgcagctgactgcaggtgcagcttctccatgatccaaaatagcatccaactctttnnncatatggtggaatatatagc

SEQ ID NO: 93104 - DNA, 185 bp, Glycine max
  Clone ID: PAT_MRT3847_55087C.1
tacgcctgttaggtcatggcgtgaaatttcttcatgtacttgtcttgcacattttgtttacatacctgacgtgccccaccctgaagtattatgctggttgggcagacctaacgtttttgtgccagttgatcttacttgccttcacggccctgattaatgatgttcaggatttgatgattgggctg

SEQ ID NO: 93105 - DNA, 440 bp, Glycine max
  Clone ID: PAT_MRT3847_55088C.1
ttaaaagaacacgacagttggttctgtaattgaaagtttttcacaaactacagtggaatcgatttgatatgaacagaacacattctatactataagttaaagacacccttggttgttgcactacgttaccttttttcctatgccaaaacttgtatgggatgatccttgcctactaggcttagatgccacaagccccaagactaatgagaggggagaaagaaaaagactaacctgagagatatttttctgtcatctaaggaaatggacgaacagaatatatactggacgtgacgacctgtactatacaggcatcgattggacgcactaaggtttacgggctaaagacttggtctttaaagccaaggagtgagagaagccaagcaccgggaaactaagatattaatgatggtggctcctacgcataaccatgttagttaacg

SEQ ID NO: 93106 - DNA, 302 bp, Glycine max
  Clone ID: PAT_MRT3847_55089C.1
gagaaagtgagaaaagacttgcattacccaattctagtgttgattctcgtcgaacaggtaggagattggtcaggcctaaactactagagaaaagtgagaaaagacctgaggagcttcaaggtggtgacacagaaatgtctgatgctgaaggacctgggggcaagcctgggcagtctagtgacacagatactagtaatgttgttcaatcatctcaacaattggctcgtaagcgtgttgctcctacctccacttctgaattacgtgaagaatcaattgcacctggtgagaagagctctgatgtc

SEQ ID NO: 93107 - DNA, 1099 bp, Glycine max
  Clone ID: PAT_MRT3847_5508C.1
gtttctgtgaagagaattcagaaatgatacttgtctatgagtatgtcgaaaagggtccactgaagaagcatttatatggttcatcactacaaacacctctctcttggaagcagcgtcttgagatatgcattggtgcggctagaggccttcactatcttcacactggttttgctcaaggaatcatccaccgtgacatcaagtcaaccaacatattacttgatgaaaactatgttgccaaggttgctgactttggtctttcaaggtcagggccatgcatcaatgaaacacatgtgagtactaatgtgaaaggtagctttggctatcttgatcccgagtattaccggaggcagcagcttacggataagtcagatgtttattcatttggggttgtgcttttaattcgtctctgtggaagacctgctgttgatccacaacttgcaagagaacaagtgaatttggcagaatggggacttgaatggctgcaaaagggcatggtggagcaaattgttgatcctcatcttgttggacagatccaacaaaactccttgaaaaaattttgtgagactgcagagaaatgtttggctgaatatggtgttgacaggcctgcaatgggtgatgtgttgtggaatttggaatatgcacttcagctccaagaaagtggtcaacaaagggagccacatgccaatagacatgctagtgaagaatttgtgagtgtgacaaatgcaattattcctggaaatccttctaccaacagaaggacagagagggatcattataactgttcttcagatgtaagtactagccaagtgttttcccagctaatgaacaatgaaggcagatagagataggtttatgccgcaaatataagcaagaaattaaagcagtacctaagctttcatacttcttttttttcctaccaagttttttttttgaagaaaattgcatcaaaaccgtattagcaagatttactcacggaaggctccatatagcactagttcattggtagcaagatttttgtagtataatttattcatttattttatacagcaattctgtacttattattctggagcttaatcagtcaaatttgtgatgagct

SEQ ID NO: 93108 - DNA, 151 bp, Glycine max
  Clone ID: PAT_MRT3847_55090C.1
cccacccactgaggaggctaggacagaggctattttgttgatgggggtggaaaacaatttgtgcactccaaaaaatggcgagattctggttgcttctactcaagactttttaacctcttcctttctcataaccaggaaagatactttttta

SEQ ID NO: 93109 - DNA, 477 bp, Glycine max
  unsure (1)..(477): unsure at all n locations
  Clone ID: PAT_MRT3847_55091C.1
ccaattanggagagcagcgtcgatatatgtatcctaattcnntaatacttacntnncactanntgaggcgcaatntgtggccctcttcgnagcggcccaagnaaattnnncaagcnncaggaatncnntgagnttnggcactactctncntnngatatnnaagacncnnatctggntnnttgtgtgtggtatanncatgtgataacnttatatacaggggccctgcaataagggttgcgcnttggtattcatgaaaattgtagacgaacctntnngaggaacntcatagganncctttgntgtggtttaactagcganntggatgatcgttaancntttagtgggttttctgcccctgttncnnttgttcggttttattttcatggccnatgtcnactctctttctcgatctatgnngcttggannttgtttcttttacagttatttcacccgtaaccccattgacttttttgacca

SEQ ID NO: 93110 - DNA, 492 bp, Glycine max
  Clone ID: PAT_MRT3847_55092C.1
acacaacgtaccaaaggaggttgaggagtggtcgcagttgcatagcagagcctcagaattgtgctctttgcttacccttcttttacttcctctcttctcttcactctgtacagagacagacactgcacacatttatggccagcgtcggtgatagaaaggaatcagaatggatggataggataatatcagaaggagccatcccacttcttgaaccagataattgttcaaatggttgggctacccctcctggtgatgcattcatggttagaggccctgagtattgcacaacaagggttccggcatcggtgatagattatatgcagaatggatagataggataatatcagaaggagccatcccaattcttgaaccagataattgttcaaatggttggagttaggatcctggtgatgcacgcatggtcagaggccctgagtattttacaacaagggttaaggttccagctggtgattatatgctcaaacctctcgg

SEQ ID NO: 93111 - DNA, 370 bp, Glycine max
  Clone ID: PAT_MRT3847_55093C.1
agcgaattaaatgactaataaaataaagtatctttattttttttatttggccatctattaactaatgtcctagtggaaatatacagcattgcgtgagggtgtcacagtaaccataagaagcataaatcttaacttctgatcatttgtcctcttcaatgcaaacatacacatcgtcaacatattctatcacttcaatttattctaacacatcaacaatattaacgttgtctaaaaactctagaatgtctaaacaaaaagttacgactttgaatactatcatgactcttacatctatttcttgaatagtcctaacagtagctaacgtaaatataagtatattgctagcctatgtattaagcaaaacgctcat

SEQ ID NO: 93112 - DNA, 682 bp, Glycine max
  Clone ID: PAT_MRT3847_55094C.1
ccacgctctccggctttctctcactcacatcacacaacacaaaacacattattacatactactaccactactcttgcagtcttgctttggtgtttaatggcgtctcagatctaacataacagtgcaagtggttcggcgttgttgtgagtttgtttttaaacgacggcgtttggttttgttagtatgcagaaaatggcgtacacgttttcgtttccggaggaggtgctggagcacgtgttctcgttcatatggagcgagagggacaggaacgcgatctcgctggtgtgcaagtcgtggtacgagatcgagaggtggtgcaggaggaaggttttcgtggggaactgctacgcggtgagccctttgatggtgatcaagcgcttcccggagctgagatccattgcgctcaaagggaagccgcacttcgcggacttcaatttggtccccgagggttggggaggttacgttttgcccctggatcgccgccatggcccgggccttcccctgcctcgaagagatcaggctcaagaggatggtcatcaccgacgagagcttggagctcatcgctaagtccttcaagactttcaagtctttggttctcacttctgtgggagggtttttactgccgatggacttgccggcattgcttccaactgcaggaatctaagggaattggacttgcagg

SEQ ID NO: 93113 - DNA, 118 bp, Glycine max
  Clone ID: PAT_MRT3847_55095C.1
agaaaacaacacaaaggtactttttcgagaacacgacatatggtttcggcggggatattactacagaggggtacgtcttctacaacactacttaagggttctgcttccaaaacactac

SEQ ID NO: 93114 - DNA, 239 bp, Glycine max
  unsure (1)..(239): unsure at all n locations
  Clone ID: PAT_MRT3847_55096C.1
cttgcaacctccattcgccgtggagacttgtcccagaatactctccttgagaaggaaatctcttagtctatttcttttccagttggatttaatttgattattctatatatgatatcagaggcgattagcgagtcctaaaagacgagaaccgtgttctgagccannacttctataaccatatacatccaagggaagccaatgatttgcctgcaacctacaaaaagcttttcctcgttgat

SEQ ID NO: 93115 - DNA, 1320 bp, Glycine max
  Clone ID: PAT_MRT3847_55097C.1
cccacgcgtccgcccacgcgtccgcccacgcgtccgcccacgcgtccgcccacgcgtccgcccacgcgtccgcccacgcgtccggcagaacctaaccctcacgaaagcccttttcgattccgataactctcgttgttccgaaaccctaaccctaaccgggttttttcgtttgtttggattgaattggcatcggagggaggcgatcgattggaaattggtagtagtagtttagcgttgaagaacgatgtctgctgctgtgtgcggaagcaagagatctttcttcgaagagcttcctccttctccgccactctccaagaggctccgttgttcctcttcgccgattcgattccctcctccttcttccatcgaccaacttcgccctctctttccccacatggacgacttggttcttgagagagctctccaagaatgtggcaatgatatagatgctgccatcaagaggttgaatgagctttgcttgggaactgccgatggaaatggaattgctgaagaatcggaggttgtcattaatctgggtgcaggtaaattggaaggtgatggaaatgcttctgtttctgaggagcagcctgctttgaacaatcaccttcctgcagatggagcagaatggattgacttttttgtcagggaaatgatggttgctactagtgttgacgatgctagagcccgtgctgccaggatgctggaggttctagagaaatcaatcagtgaaagagcaaaggctgaggcaactgatgcacttcagaaggaaaatttgatgcttaaagagcaaattgaagcgttaattaaggagaaaaattctttcaaaaatgcttttagaatccagcatgagcgatttgctgattatgaggttaagaaccaagagttacagcatttgaagcaattggtgtctcaataccaggagcagattagaaccctcgaggtgaataactatgctttggcaatgcatttgaagcaggctcaacagagcaacccctttcctgggcgcttcccacctgatgtcttctaatggggtgaatgtttagaatgtaataataaaggcagcaaatagctgcatcaggttgattaattatgtcgtgttatttttctctctttcttacaaaggtcaagcgttgttgtagttcaggacttcaggttattctatcctacagtatccgaatatactgtcactcagttcaattaccccgtttggaattttatgatttcgagttgtagtctagcgagattgcgacgatgttcaaggttagcctttatccgtcgcaattgatattttagatgaagtttgataatctctttttggct

SEQ ID NO: 93116 - DNA, 2879 bp, Glycine max
  Clone ID: PAT_MRT3847_55098C.1
cgctttccaacgagggtttttcatttttttttctctcactctcaccaacgcactcgaagagataacattcattccatattcacaaaagcgcacacaaactttttttttttttttttgtctaactatggctcctgtgctgagcagaaccatggccacggcctctctggcctcgcttcctccttcttccccttttgcgaggacttcccttctcagaagcgcttttctgccgccgcaaatagggctcggcaggaactgcttctcccccgccgcggggctgcggtggacgcagcagcggcaggggaggaggggagggctaaccgtgcggtgtgaggccgcggtggcggagaaggacgaggccaccggggagaagtttgagtaccaggccgaggtgagtcgattgttggatttgattgttcacagtctgtatagccacaaggaagttttccttcgtgaacttgtcagtaatgctagtgatgctttggacaagttgagattcttaagtgtgactgagccttctttgcttggagatgctggagatctagagatacatatcaagtctgatccagacaatggaactattactataacagatactggtattggaatgactaaagaagagctcattgattgtcttggaactattgctcagagtggtacctcaaaatttttgaaggcacttaaggaaaacaaggatctagggagcagataatggtctgattggtcaatttggttgttggattctactctgcttttcttgttgctgtgagggtctgtcgtgtctacaaagagcccaagatcagataagcagtatatgtgggaagcagaagctgacagtagctcttatgtgataaaagaagaaactgatcctgaaaagtttctgcgtcgtggtacacagattacactctatttaagagaggatgacaagtatgaattctcagagccaagcaggattcagggtttggtgaagaattactctcagttcgtttccttccccatctacacatggcaagaaaagtcaagaactgtggaggtggaagaggaggaagaacccaaagaaggggaagaaccaaaagaagagggtgagaaaaagaaggtgaaaaagactaaaactgagaagtactgggactgggaattggccaatgaaacaaagccaatatggatgcgcaacccaaaggaagttgaaaaggaggagtacaatgaattttataagaagacatttagtgaattcttagaaccacttgcacatactcacttcactactgagggtgaggttgagttcagaagtattctgtatgttccgggaatgggacctcttaacaatgaagaagtagtgaaccctaaaacaaagaacatacgcttgtatgttaagcgtgtattcatttcagatgattttgatggggagctgtttccacgttacctgagctttgtgaggggtgtggttgattcagatgaccttcctctcaatgtttctcgggagatccttcaagaaagcagaattgtaagaataatgagaaagagacttgtaaggaaggcatttgatatgattcaagaccttgctgaaagtgaaaataaagaggactacaaaaaattctgggagaactttggtaggttcataaaattaggttgcattgaagacactggaaatcataagcgcattacaccactattgaggttttacacttccaaaagtgaggaggagcttaaaagcctagatgattatgttgaaaacatgggtgaaaaccaaaaggctatcttttatctagcaactgacagcttgaagagtgcaaagactgctccatttttggagaaattggttcaaaaagatattgaggttctttatttggttgaacctattgatgaggttgccattcagaacctacagacatacaaagaaaagaaatttgttgatatcagcaaggaggatttggaattaggttgatgatgaggatgaggtcaaagagagggaaaacaagcaagaatacaacctactctgtgattggataaaacaacaacttggtgacaaggtggccaaagttcaaatctcaaatcgcttgagttcatctccctgtgtgcttgtatcagggaagtttggttggtctgcaaacatggagagactaatgaaggcgcaagcccttggggacactgcaagtttggagtttatgagggggaggagaatattggagattaatgcagatcacccaattatcaaagacttaagtgctgcctgcaagaatgcacctgacagcagcgaagctaagcgagcagttgacctcttatacgacacggctctaatttctagtggattttctcctgacagccctgctgagttaggaaataagatttacgaaatgatggccttggccttgggaggaagatggggtagatcagaagaagaggagggagatgcttctgttgaagctgctgattcaagcacaagtgaagaaagttcagagccagaagtttatgaaccttctgaagtcattgcagagagcgatccttggacaactgattaggcatactatgttctcatagaataagttaaatttttttgtcattataggggattatgcataccaaaaaggtgagaaaggaaagggagactcttttttccaataatttcatggcgttgaagcaaaatttctaatatcaatatagaactgggaatgaatgtcctaaggggcaaatcctatggatcctttccaaatgaaattgagatctattgttcgtaggtgggcaatttttttgatacttcaaggtcttgtggcattttatctgttaactcgttggtaagtatatcaaataaagtatttgaaagtttgagtgtcgaaaaaaaaaaaaaaaaaaaaaaaaaaaaataaaaagatttttccttgttccgg

SEQ ID NO: 93117 - DNA, 565 bp, Glycine max
  Clone ID: PAT_MRT3847_55099C.1
agctcggtattcggctcgaggttttttagggagagaatttcctgcagaagaagaatcgttggtaaccaacgcgctggggaagcacgtggaatacagtttcggttcgtcacctctgtggcacagcactataaataatcctcaagtttctacactttacctctcccaggaggaacagcgcagaacctaaccctcacgaaagcccttttcgattccgataactctcgttgttccgaaaccctaaccctaaccgggttttttcgtttgtttggattgaattggcatcggagggaggcgatcgattggaaattggtagtagtagtttagcgttgaagaacgatgtctgctgctgtgtgcggaagcaagagatctttcttcgaagagcttcctccttctccgccactctccaagaggctccgttgttcctcttcgccgattcgattccctcctccttctttcatcgaccaacttcgccctctctttccccacatggacgacttggttcttgagagagctcttcaagaatgtggcaatgatatagatgctgtcatcaagaggttgaatgagc

SEQ ID NO: 93118 - DNA, 2011 bp, Glycine max
  Clone ID: PAT_MRT3847_5509C.1
gctccggattacttgaagggaggtgcaactacagatattgcacctgaaaatgtttacatgacagctcagcagatgaatagggaaaactcaagtttggctgaaggttaacataacctggaacttccctgtgtctcctggtggtgttccacacttggttaggttgcatttttgtgatattgttagtcctgctctcaacttgctctactttgatgtgtacatcaaaggaaacattgcatacaaggatcttgatttgtcagcccttgcaatccacacacttgcatcacctgtctatgtggattttgttacgaattcggatgacacaggttttgttcaagtgagtgttggtccttctgagctgagcagttccataaggatgaatgccatattgaatggtgcagagataatgaagatggtcaatgatgtcggtactaatgttgtgcataggaggaagaatctgtgggtgttggtgggttcaattgctggaggaattgttgtcttgtttttagttgtaactgcttttctacttggtaccaaatgcaggaacaagaaaccgaaacaaaggacagtagaaagtgttggatggacacctttgagtatgtttggagggagctcccttagtagaagctctgagcctggttctcatggacttcttggcatgaagatcccttttgctgaaatacaatcagcaacaaacaactttgatagaaatctgattatagggtctggtggatttggtatggtctacaagggagtgctgagagacaacgtgaaagttgctgtcaagagaggcatgccagggtccagacaaggccttccagagttccagactgagataacagttctgtccaaaattcgccatcgccacctagtttcactagttggtttctgtgaagagaattcagaaatgatacttgtctatgagtatgtcgaaaagggtccactgaagaagcatttatatggttcatcactacaaacacctctctcttggaagcagcgtcttgagatatgcattggtgcggctagaggccttcactatcttcacactggttttgctcaaggaatcatccaccgtgacatcaagtcaaccaacatattacttgatgaaaactatgtggccaaggttgctgactttggtctttcaaggtcagggccatgcatcaatgaaacacatgtgagtactaatgtgaaaggtagctttggttatcttgatcccgagtattaccggaggcagcagcttacagataagtcagatgtttactcatttggggttgtgctttttgaggttctttgtggaagacctgctgttgatccacaacttgcaagagaacaggtgaatttggcagaatgggcacttgaatggctgcaaaagggtatgctggagcaaattgttgaccctcatcttgttggacagattcaacaaagctccttaaagaaattttgtgaaactgcagagaaatgtttggccgaatacggtgttgacaggccagccatgggtgatgtgttgtggaatttggaatatgcacttcagctccaagaaagtgagccacatgccaatagcagtgctagggaatctgtgagtgtgacaaatgctgttattcctggaaatccttctaccaacagaaggacagagagggattattataactgttcttcagatgtaagtactagccaagtgttttcccagttaatgaacaatgaaggcagatagagataggtgtataccgcaaatataagcaagaggtattaaagcagtaccaaagctttcatgctttttttttcctatcaagttttcttttgaagaaaattgcatgaaaaccataactcgcaagatttacctacggaaggctccttatagtactagttcattggtagcttcttacaaatgtttgaatatcttcttgtctgatattggagaggcttacaatttttgtagtataatttattcatttattttatacagcaattctgtacttattattctagagctaaatcagtcaaatttgtcatgagc

SEQ ID NO: 93119 - DNA, 1530 bp, Glycine max
  Clone ID: PAT_MRT3847_550C.1
aaaaagacaaaaattttgcaataaaaaataacttgactttcttcaaatccaatacaatcagagtttgtttttcagatgacaattttttccgttaaatataatttcaggaagaatacaggacacctaaaaaaactgcagaattaaatacccatgcattgaaaatgaaaagggagaaataatggaaacttgataccataggtacaagcctggacacctacatgcatgtacataaactaaaagcttatacctctaagattacaggaacgtattcaaattttgaaattcgcaattgttccaaagctatccaattgaagcgtaagtaatctttcgtattttatgtctgtaaacgtagtaagtatgtttcttctaccaaccgggagtttgccatttcaaccatctcaaagcccatcttttggtacaatatctgtgcaggcctattatttctgtctacatgcacatacacctgtgtcaaacctgcattagattttgcagcttcaatagcaaaagacatcatgttacttgcaattccctgtcgcctagctgatttgataacgcataagtttgcaatgtagccatatctgcttggtggtgttctgttgatgctgcaaaaaagaggggcctttacccgttccccgggataagtctccccttgcagcaaatatcggatattcaaatcaagggttcctacaacactttttaatattgagtgctttgcatttttctgctccttcctcaccgtgatgatgcatgcgcagctatcaccattttgcaccttgcaccgcctttttaatgcattaaattcctgctccgcaaatttccttttgtagttatcaacatatctttcgaatggtcgatcctcccagtgactttctgcccttaaccatgctgctgtccaatacttcgcacagttttgacaaattgcccaaactcttttgactcgacccaattcttgatccgatggctgcaatcgatcaaattggaggtcattggagtttaaagtttcaactttggaaatgggtggggttgaaatctgcacagagagttcttcatccttcttcttcttcagattataatcattatcactattattcttgatggttgaagaaaatttcgaatccatggccatgatccatgaggcagtaattctggggcatttataagggcttggagacccattgaagaataaggtacaaaattcaggtctgtgaattggaatcgtggacatgggaggcatgtttttcttctagaatcaagggcttcttattattgaaaccttccaaagaaatgaaaatgaaaaatcttttttttttatagcctaaggggttgaatttaattgtgcaggaacaaaccccttttggcacggatgcaacaacatgtaagaaaatagaaaaatgaagggaaagaggggagaaaggtgaagaatttgggagggaaagcatgcgttgaaagggggcccttatggtatggtttgtagcgaagaaggtggaaaattaccctctattttgttgttcttcataagattgagaattg

SEQ ID NO: 93120 - DNA, 1153 bp, Glycine max
  Clone ID: PAT_MRT3847_55100C.1
aagatattgaggttctttatttggtcgaacctattgatgaggttgccattcagaacctacagacatacaaagaaaataaatttgttgatatcagcaaggaggatttggaattaggtttgtacagttttctatcttactttcatttgctcaaatactattttgtttcctgaaaatcgggatttgaatgtggtgctcaacatttatttaattaggtgatgaggacgaggtcaaagagagggaaaacaagcaagaatacaacctactctgtgattggataaaacaacaacttggtgacaaggtggccaaagttcaaatctcaaagcgcttgagttcatctccctgtgtgcttgtatcagggaagtttggttggtctgcaaacatggagagactaatgaaggcgcaagcccttggggacactgcaagtttggagtttatgagggggaggagaatattggaaattaatacagatcaccctattatcaaagacttgagtgctgcctgcaagaatgcacctgacagcagcgaagctaagcgagcagttgacctcttatatgacacagcactaatttctagtggattttctcctgacagccctgctgagttgggaaataagatttatgaaatgatggccttggccttgggaggaagatggggtagatcagaagaagaggagggagatgcacctgttgaagctgctgattcaagcacaagtgaagaaagttcagagccagaagtttatgaaccttctgaagtcattgcagagagtgatccatggacaactgattaggcatactatgccctcatagaataagttacaaatttttggcattatataatgcataccaaaaaggtgagaaaggaaagggagagactgatttttccaatgatttcatggtgctgaaggaagtttctaatatcattatagaactgtgagtgaatgtcctaaggggcaaatcctatggggcctttgcgaatggaattgagtttagtgttcgtaggtgggcaaattttttatacttcatggtcttgtggcattgtgtcattcttttgggtttaagattttcacgtgtttgagtacaaatttgaaagctgaaatgacaagatttttccttgttcaaatctttccagttatggatgatatcacacgcagttt

SEQ ID NO: 93121 - DNA, 1557 bp, Glycine max
  Clone ID: PAT_MRT3847_55101C.1
tgttttttagggagagaatttcctgcagaagaagaatcgttggtaaccaacgcgctggggaagcacgtggaatacagtttcggttcgtcacctctgtggcacagcactataaataatcctcaagtttctacactttacctctcccaggaggagaggcagctgatgcactttgaaggggacatttgccgcctgaagaggaaacgggggcgcccacgtttcctctgtcacgaggaacagcgcagaacctaaccctcacgaaaacccctttcgattccgataactctcgttgtgccgaaaccctaaccttaaccgggttttctcgttggttgggattgaattggcatcggagggaggcgatcgattggaaaattggtagtagtagtttagcgttgaagaacgatgtctgctgctgtgtgcggaagcaagagatctttcttcgaagagcttcctccttctccgccactctccaagaggctccgttgttcctcttcgccgattcgattccctcctccctctcccgtcgaccaacttcgccctctctttccccacatggacgacttggttcttgagagagctctccaagaatgtggcaatgatatagatgctgccatcaagaggcttaatgagctttgcttgggaactgccgatggaaatggaattgctgaagaattggaggttgtcattaatctggatgcaggtaatttggaaggtgatggaaatgcttctgtttctgaggagcagcctgctttgaacaaccaccttccggcagatggagcagaatggattgatttttttgtcagggaaatgatggttgctactagtgttgaagatgctagagcacgtgctgccagaatgctggaggttctagagaaatcaatcagtgaaagagcaaaggctgaggcaactgatgtgcttcagaaggaaaatttgatgctgaaagagcaaattgaagcgttgattaaggagaaaaattctttcaaaaatgcttttagaatccagcatgaacgatctgctgattatgaggttaagaaccaagagttgcagcatttgaagcaattggtgtctcaataccaggagcagattaaaactcttgaggtgaataactatgctttggcaatgcatttgaagcaggctcaacagagcaacccctttcctgggcgcttcccacctgatgtcttctaatggggtgaatgtgtagaatgtaataataaaggcagcaaacagctggattaattatgtcgtgttgtttttctttcttacaaaggtcaagcgttgttgtagtttgcttttatagcttctgttggtcagagcatggtttctgcttttatagttcaggacttcaggttatatattctatcctatcaacacagtatagtatccgacagtatcagaatatatcgtcactcaattcaattacccgtttggaattttatgatttcgagttatagtcccttgtagtctagcgagattgcgacgatgttcaaggttagcctttatccgtcgcaattgatattttagatgaagtttgataatctctttttggctaaaaaacaaaaa

SEQ ID NO: 93122 - DNA, 515 bp, Glycine max
  Clone ID: PAT_MRT3847_55102C.1
gcagcattagttgtatcggtgatgcaattagttcctcctctgatcggccaaacttatacgtgtgttttatatctgttcgatttgtggagttattccttccttggtatttctgagtattgattcaaatatggctcgtcaattgttagaacaccagtcccacaactgcttctgccataattctcaagacttcaggagactttgttttacagaattgtcctgtattttcaagaataccaagaggtagcacgggccacgctaaattagcatggccggttgaggacaacataatcgtgctcaaatgtgtgacattgattctgatttttggctttggaacaacatgggtcatgctattgtcagtagcacaaccatgctcaaatgtgtgactatgatgaggaattttctagaaaaaaaaaaaacagcatggcttgtaggtacaacacagaatgtgctgcaatcaacacgagccacgtgctccttgaagatgctcaagacttgttcttttctactctttttta

SEQ ID NO: 93123 - DNA, 879 bp, Glycine max
  unsure (1)..(879): unsure at all n locations
  Clone ID: PAT_MRT3847_55103C.1
ccacgcgtccgaaatttacacggtgacagatttgtgtgtcattatcattcaaaaattgttcataagacttgcaaatcattataatattctttgtcgagcaccccctttaaaatccctggtccaaggaaaaggaactcatcctcctcccactcccacgacatattttttgactttccagactcaaatctaaagcaagaaaaaacagaaggtgaggtaaacatttgcctccatcaaaaagcactgctctttcattacatggtgccttcccctgccgctttttttctttagcatccaaccggaaaataaaaatagtactctcacttcccccctttgtctatggcacaagatggtgtcttaaaaactgtgtgatcctatttgcacctgaaaaaagttgcaaccttttttgtgagtttttctctgactcagcaacatgggtcataggccaccagaacagccaccatattttctctcagagccaaacccaccattcccacccactactactgttcgatctgatagtttcagtttgaacgatagggccttgaaggttagtccaagcatccttctgatcatcataattctggctattgttttcttcatttctggtttgctgcaccttcttgttagattcctgtgggagaccccaaactagagagcctgatgaattcgatcaatgtcaccgctctccacggccaattgcagcaactctttcacctccgggtggccgggcctgccctgtccccctccctctctccccctgcgtgcccctcctaggcctccagaaggcccccgttgtccccgccggtcggtgccgtgtgtttgtgcgggggtcagcctgaggacaagctaaggttgctaccanaatgtagccacgctttt

SEQ ID NO: 93124 - DNA, 949 bp, Glycine max
  Clone ID: PAT_MRT3847_55104C.1
ggttgatgtggttatgaaccaaaaaggtttagtgttagccaagggggttggtctagtggtcaccaaactagtctgcaggataagaatgtgtataggagtggagtataaggttggcttggtggtaaagggtgagaaaggtagggataggtcgtgggttcaaattctcacattaacaaaaactaacaactagcatttgctgatcagaaaataaaaaaagattgtgtatatgaatatcctcaagtgggaggtctttggttcgaatcatgagaaaatacaatccttgggaagggggtgaattggtacaaaccccctccggaatatttccaaaggaggcgacctgtggattatacataaaaagaaaggttaagtctcggtctttgagattgatcgaggtgggagctaactgtgcaattgccataggttttttgaggttattagttcttgttcgaggtctacattctatagcctaccgtagaatttggtgaaaactttgaacaaggttgagactgatctggttttaagaagtaaaataattaaataaataaaattgatttattggcaactaagttttggcactattttctttgggtaggttgaaccacttaagaattgatatcattttggtttgagtgtgaatttggaaattcaaaactcaggttctttattatttttttcttctgtgtgtgagttttgctttgtagttcattttacaatgaatctgtctgattctgctattttgttttggtttactagtgaaagagaaaagatgggtgatatttaagggagaggaggatcctacctctattccaggtatatattttatattggccatcattcaactgctaaattagtatgcctattattataggatgaatccaattattttatatgttgaatttattcagaaaaaaatctatattttttatcctatttcccacccacgcgtccg

SEQ ID NO: 93125 - DNA, 205 bp, Glycine max
  Clone ID: PAT_MRT3847_55105C.1
ctcttccgtttcgcgtccgagaaaagagatcacatactgaatggttttactcaatggttgttggccaccatgctttaccacccctgacagatcccctatacaacgcataacaggttgggccaaagctaaccagctcgggagatcagaacagaagctatgaccatgttgattgtacaacaagtcaaaagcttgctatctctaaccg

SEQ ID NO: 93126 - DNA, 810 bp, Glycine max
  Clone ID: PAT_MRT3847_55106C.1
ccacgcgtccgcagatttgtgtgtcattatcattcaaaaattgttcatcaagacttgcaagttgcaaatcactataatattcttcgttgagcaccccctttaaaatccctgctccaaggaaggaactcatcgtcccactcccacctcatcttttttgacttccagactcaaatctaaagccaaaaaaaacaaaacaaacatttgtctccatcaaaaagcactgcccttacgtggtgccttcccctgccactttttttctttagcatccaaccggaaaaaaaaaatagtactctcacagtctcacctcacttgcccccttttgtctatggcacaagatggtgtcttaaaactgtgtgatcctatttgcacttgaaaaaagttgcaacctttttgttgtgagttttctctgactcagcaacatgggttttaggagtgatgtttttgtgtctccaccagaacagccaccatattttctctcagagcctaccccacctttcccaccaactgttcgatctgatagtttcagtttcaacgatagggccttgaaggttagtccaagcatccttctgatcatcataattctggccattgttttcttcatttctggtttgctgcaccttctggttagattcctgtggagaccccaaactagagagcctgatgaattggacaatgtcactgctctccaaagccaattgcagcaactcttccacctccatgatgctggggttgaccagtccttcattgacaccctccctgtgttcctctacaaggccatcataggactcaagaagtacccctttgactgtg

SEQ ID NO: 93127 - DNA, 189 bp, Glycine max
  unsure (1)..(189): unsure at all n locations
  Clone ID: PAT_MRT3847_55107C.1
cacaagccaaagatgctacggtaggatcantgggngaaanntanaaaggatgctaaaggnagagaaaaagcaggaaccaaaggtcaaacaaagangggtggtggtgggaacaaggannaagaagagaaganacaggagangaaaaacaatccagcctggaggngatttctaagcacagagctgaagctc

SEQ ID NO: 93128 - DNA, 332 bp, Glycine max
  Clone ID: PAT_MRT3847_55108C.1
ccctctcatcgccaaccataaaacttcggataaatggcctgcacaggataaaccaaagtctttgctcgctggagtaacctggatgtgcaacatgcacacactgttactctgttttcaaccgccctttgttgcccaaggtgacaagtgctagaattacaatcgaattcaataacatttaaacttgggagctcatggagcatatcattctgaggcggaggagggaattgcgaggacgctctatacttgcgaaccgaagctggatggaaactaccattggggaaggagcttgacccatttattccatcaccttttgctccattaacctcccctag

SEQ ID NO: 93129 - DNA, 1410 bp, Glycine max
  Clone ID: PAT_MRT3847_55109C.1
gatccattccttcctggtccttgggccttccatggtgggattctgatgccaacgctcttcctgtcgtgcccagtccctgctccgcctccgtcgctctacgcatgcgtcctcgtttgcggaggggtccgctccctccggggcctccccctcgcggtgcttgcgtcctcgttcgtggcgggtcgtgcccccactggttccccccctccgggcatcgggctgctgcatgcgtggccgatcttcccttcctctgctcccacattcccggctccggttccgtcggcgcctctgctgcctgcccttcctcctcggcttcccgttctcctcctgctccctccgctccccgctcccctactttgatagaggacccatgcattgagtgaaggatgcccagcagagattggacacttcagaaaatgtgtttgcatttggattccttcactcaatgcatgggtccttgatagaggagggttgagcaccaacaggttgcaccccattgaggaactagcttcttcatacttggctgatctttccatcaatagaactcagaatccagtcatcggtttggtggatgagttttcaaacttcccttcctcttctgctacatatactgctccagttccttctgctccactgttgccagataatgctccttggtataccgatgtcattgtacaatctactatgtctgctccattattgcaagaaaacccatcaccaataaatggttattcagcttggccttctacttatggaccccttggatatgatactagttttctattttattccaatggatacgcgccgccacctggtagaataacttcttcagaatggctgcgttggtacagagagaatcccccacctgagagggtcaacaacaatatgcagcctactcatttgaatgttcatggaaatcatgaaaacttcctccatcttgacacctacaggttcaaccaatttgatcaatggggtaatcctttgtctcctaaccagtacacatatgtgaagccaccaggtcccccaccattgctgccaggttattatccctatgcttttggtgctggtgaacacataaccaatcacttccacaattttcaaaggccaagcccttatgggtgtggttctgtgacagaacagagaaatgagccactgcctctgctagagtaccttaaggaaagggaatggagactccagcaggaccctagcctcagagggcctacattcacgggaaattaaaactcccctgatctgaaaatttagtttcatcattacaaaattgtacgccttacttgcactttgattccttacaatacaagtatcaaatatgtatatatttatataatgtgtagtgttttaaccattccatgaaaggctaatttcaaagaaagtggatgaaatatcttccattct

SEQ ID NO: 93130 - DNA, 414 bp, Glycine max
  Clone ID: PAT_MRT3847_5510C.1
ctcgagccgtttcggctcgaggtgtacaatacacacttgtctctcaattggttgtaaccttttcttgggtacatttctctttgtatacattcaagcattaatgaaaatgaggaaactcattcctaaaatagtattataatttattctagatctattattaggttagttatcatattgtctacctaccaagcctaattattttttacatgaaggaatatattgagaaaagttcaaattacacatgattatgcgtaatacgtgaaaaaaaaattattacaaatttaatgtatatgttatcttagaaatcgattttacaggaagagttgcgcctaaaatttaactgatactaaaatttatcttagatttattaactatttttcataatatttgagaagaagaaaaatttaaatttca

SEQ ID NO: 93131 - DNA, 485 bp, Glycine max
  Clone ID: PAT_MRT3847_55110C.1
agagagctgagagagatcggagcgagcgatgagacggcagagagagggtgaggatgacgacgatgaggatgtgatgtcggtggaggtaagagatgtagaaacggaaacctcctacaaattcataaacccaaagaataaacctgcgaaaatagttagaaccttaaaatgactaaagtaacgtagctatttgggttgttgttaacaggacacgctggtttgcggccggggcttaagacagtgccccatgtggccaagccacagttccacaactcacgtgttggttacaaggtgccgcgtaccaagttagacccgggtagtaactacctaaaacgacttggaatcaacggcttaacccgtgaccaccatttttgccaccaacccaaaatagtagtaagattactaaatcctactattggtggcccaatctgacttcgtataagtatccaattttgacctctcccaattagctgaatccgaatccattt

SEQ ID NO: 93132 - DNA, 114 bp, Glycine max
  unsure (1)..(114): unsure at all n locations
  Clone ID: PAT_MRT3847_55111C.1
agcaaagcnnagaatcatggaattccantatttgncanttggaaacaaaatgcaggttcttcccacagaggaaggcaantnggggatgacacttagcctgctgcaggctttgat

SEQ ID NO: 93133 - DNA, 230 bp, Glycine max
  Clone ID: PAT_MRT3847_55112C.1
taactgagaagttagtttttctttattttttttaagccatgagctggggactaatcaccattcaaaatttaaaattttggcatattggaattggggggggcatgggatcttacaaaccatcccaggccttttgcttgtaattaggccaaaagaaccccacaaagggggatttggagaaccttacccgattttttaagaaccaaatgaacccgtgaattttccaaattttc

SEQ ID NO: 93134 - DNA, 578 bp, Glycine max
  Clone ID: PAT_MRT3847_55113C.1
gtttttttaaggatcgacccttttaaaccctcatccagaaatattcgtctgcttactgaatgcccggatagggttttagtttgtcacatctacattgcaactcaagtttcgtacagagaaaatggtggtactggtgcgagcagccctgtcattgagggcaagtctaaatgtctatgcttctaataaggtttcgctattaacgaacagagctggaagtctcaggggcttaaggatttcttcacattcatttcaagggttccgcaatgggcgctttctcggagggatatcaattccgcaacctgttaaactaccggctccgagacgctatgcaacaatacccactacatcgtcggtgaacgatccgtcgccgaactggagcaatcgtcctccgaaggaaaccattctactcgatggctgtgattacgagcattggcttattgtcatggagccccctgagggtagccctaccagagatgagattattgatagctacatcaagacgcttgcacaggtcgtgggaagcgaagatgaagccaggatgaaaatttactcagtttcaacaaagcattattttgctt

SEQ ID NO: 93135 - DNA, 434 bp, Glycine max
  Clone ID: PAT_MRT3847_55114C.1
ctcttgcgtgcgctgacacgtgggcggacgcgcgggtatctgttatatgatgtccagactacactgtacaatggaatatctggccataaagctcgtgaaattgcggatggcgattgccagtcaaagagttattatgcgcaagacagtcatgccctgacgcagatgacaggagagtgaatataatgtggagatagcaggcttaagtgagaacaacaatgtggaagtcggacagagtgaccagcgctgggtgtgtaatcaccatagactgctcaagttaagataactaataccggacaacacaaagagaagtttgtggacaaacgctaacctacataatgacattttttctcactggggaaatgtaagatatgccaaatctgaggcacaatcagacatacggcttattctacaacgtgtgattcaaactgtggact

SEQ ID NO: 93136 - DNA, 311 bp, Glycine max
  Clone ID: PAT_MRT3847_55115C.1
ggaaagggaaaaatttttgcattgtaataatctgggggttcattccaaacaattaaagtgtttattaaaaaatcttaatgcgattaatttttgcaactgtttttttgactttccaagggcgattcccaaagttttatttattaacccttttttgaaaaaggttcaaaaatttttttaattttacaaattaaaattaataacacttttgttgtttggaataaggcccagaatccatttttttataatatgggcctttatcccaatattccatctcccagaaaaaaaaaaatttttttatttttttttttttc

SEQ ID NO: 93137 - DNA, 298 bp, Glycine max
  Clone ID: PAT_MRT3847_55116C.1
ggggggagggaaaaaaggatttactttcacacatcacacaacatttattaacggttagagatgagcattacttaaaatttgaaggtggtgacaaactagcttaaatagatctacaatggttcctatgggatgagaaaaacacctgccctctgaaatcaataaggggcatttagctcaaaccattggtatattaaccgctttcctatttcctcccttttcttttttctttttggttataccacagggggggcaaggttttctttagcggggagcactaagaacaaagatgggttagaaa

SEQ ID NO: 93138 - DNA, 221 bp, Glycine max
  Clone ID: PAT_MRT3847_55117C.1
ctacaacagtggagaatcgggacatctttctagggattgcagaggaggcggaggtggggacaggtacggaggaggtggtggtggtggcacatatggaagccgccgaggcgggaggtacagtggtggaagaagcagccgctgccgcagaagaaactgctacagacgtggagagactgggcattttgccagagattgcccatcaagtgctcgcagaatttact

SEQ ID NO: 93139 - DNA, 336 bp, Glycine max
  Clone ID: PAT_MRT3847_55118C.1
aagtacccaagcttataaatacaatggctatggataaatttggttgtgtgaagacaaaagaatatagagaaaagagaaaaaaaatatctgaatctaggtagagagaaaataatgtggaatccacactatattttgaaaatttccccttaaatggtaacttctctcccacaactacccctatgagtgaatgcggtgggggcagagaagatcacgcaaaagaggagttgagttgagagggaagagagaaaacaaatatgaaggagagtgttttgagagtcatcaagtttctgggaagagaagcagcttcggtggagctgttgtagtatttgtgctatg

SEQ ID NO: 93140 - DNA, 156 bp, Glycine max
  Clone ID: PAT_MRT3847_55119C.1
gagagagagagaggtgccattatttgacttatttcattgggataggaagtaacagctaacaagtatcagcacccaccaatcagcgcgtgactctggtgaatatcacaaaagagagacagcacacagaaccagaaaacaaccttcaacaaagacaaa

SEQ ID NO: 93141 - DNA, 726 bp, Glycine max
  Clone ID: PAT_MRT3847_5511C.1
ccacgcgtccgcaatctgttgctgattcagaatcggactcggttggtgaaatagcttcaaagcatcgtctgcttttggaatcagtggtgagcttgcttcctgctgagaaaggtgctgtttcttgtggctttcttttgaagctcttgaaggcatccaatattcttaatgcttcttcatcttcaaagatggaattggccagggcggtagggcttcaattggaggaagccacagtgaatgatcttttgataccctccctgtcttacacaaatgatacagtgtatgatgttgagttggtgaggaccatattggagcagtttatgtcacaaggccagagtcccccaactagtcctgcaagatctaggtttgcctttgaaagaagaaggtctcgttcagctgagaatattaacttggagttccaagagagtaggaggtcctcttcagcatctcacagttcaaaattgaaagtggcaaagcttgtggataggtatcttcaagaagttgctagggatgtgaattttcagttgtcaaaattcattgctcttgctgagattataccagatttcgcaagacacgatcatgatgatctctacagggctattgacatttatctcaaggctcatccagaactcaacatgagtgaaaggaaaagattgtgtcgaattcttgactggcaaaaactttctatggaagcatgcatgcatgcagcacagaatgaactacttcccc

SEQ ID NO: 93142 - DNA, 253 bp, Glycine max
  Clone ID: PAT_MRT3847_55120C.1
agtggtggatgtagcacttcttcttatggcagaagtggggcccatggctgaggctgagacatgcaccccaacatagttgattccatgtcttacaacaatcacttcctgtgctaaaccttccaatgcttgatgcacgaatctgaagcagcaaaaaccatgcttatgtggctacctcaaaaactctaccttgaagcaatatgttaactctcctaatgcccgaaaaaccgatacttcttatgggattccctttcca

SEQ ID NO: 93143 - DNA, 174 bp, Glycine max
  unsure (1)..(174): unsure at all n locations
  Clone ID: PAT_MRT3847_55121C.1
tttaaacaagagagaatctattctactaagctagatagacactacaaccggggaaagcnnnnnnnnngangcactaacccnagacttatggcttatttagtaacatagtatatgacacgggggatcggatggcatgacttgagatgatataggctttattcacgctacactgac

SEQ ID NO: 93144 - DNA, 508 bp, Glycine max
  unsure (1)..(508): unsure at all n locations
  Clone ID: PAT_MRT3847_55122C.1
tttttatttgaggcattaagtccgaaagaaaaaagaaactcaccaaacgtacctaaatgtgccagagaacaactacttgttgaggaatgatctcatcttctctacttcatcctggtntaagttgaatcacgcctcctctattttcttcactggttgagacctaatgtgggcttgcctctttttgggggggttgctcctttttttcccaatcttccttagggggttttcatgcagcttcaactttaaccaaaatggggggaggggctgtaacaaaaagacaccccctcatcacntttttttncatatgggtattcccctttttttttgggttccatattgcatttcaacttactgaaaggattggcatttttggaaaaaaaggtatcctcttcaccatctgctacataagaaaggggtttttttgaaaattgccgaaagcagctgatatctcgctcccttgggggtttttcacacaaancatgccgtattataatnnggtgaattaagg

SEQ ID NO: 93145 - DNA, 391 bp, Glycine max
  Clone ID: PAT_MRT3847_55123C.1
ggtacgcggccaaactcaaatccctgagtcgttttgaaaaaattcaactaccttcgattggaaaaaagcaaaatttcttaagctacaacaaaaagctaaatccttctggcgaaattatacaactacttcttagtgctttttgaaactcaaacctaggctgtaacaggattcggtgttccatctccatgatagagtcttgggtgtggctaaacgtaaaaaatcggttatctactttttgtcctttgactagcttgacatatactgagtatatgcggccccctgcggccattcatttgctgaagcatcagttgtcctagtcccaactgcaacttttggcgccctctttgattgattagataggtgctggattagaccatgaatccatagcccc

SEQ ID NO: 93146 - DNA, 159 bp, Glycine max
  Clone ID: PAT_MRT3847_55124C.1
ttgaagagtaacattcgatgcataggatgatgaatgctcctgagtgaaatgattatattgattgactgctgagcattgatatgatgggttcacagggagcaagtgaagcttctccaagcaaaattgtttttgatgataagcttgcgttgcctaacacac

SEQ ID NO: 93147 - DNA, 361 bp, Glycine max
  Clone ID: PAT_MRT3847_55125C.1
tgataatcaatggcaggatggtaaatgggatcatggtcctaccggaacattatctgatgcgactaccctggttccctgtgtaacgagaaaactcatgcccggcggaataaaacatactctaaattctaaactcatgcctactattgactggatactccacccgccaaacccctttgttttgaacactgctcatgctctacttgtgaacaccacacccgctcttatggtacccttcgtacctctccctgtgctcacaatgatacatctcgccgattacaagaagaaaaatgttccaaatcattttaatgaaaatgaactagatcatgttcttgaagataatgacttttacgtgcttaatcat

SEQ ID NO: 93148 - DNA, 368 bp, Glycine max
  Clone ID: PAT_MRT3847_55126C.1
ctttagcctttcgagcctcgaggaagttttcaatgaccagggcgattttctacgttgtaatgcaatgcttgggtgctatttgtggcgctagcctggtgaagggtttcgaggggaaaacaaaatactgtacagtgaatggtggtgccaactttgttgcccctggctacaccaagggtgatggtcttggtgctgagattgttggcactttaagccttcgtgagaccgatctatgccacatctacgccaacacctacaacaccagatccaacgtcttgattacggcgattgtcggctattgcttctgcgccggctaagatcacttggcaaccattcctatcaccggcgctctgatgaaaccagctactaca

SEQ ID NO: 93149 - DNA, 791 bp, Glycine max
  unsure (1)..(791): unsure at all n locations
  Clone ID: PAT_MRT3847_55127C.1
tgttttaagatttgaattaattacaaatttacattactgcatttctttgaaaaacagatggctatagatntgtgacttctgatttaaactgtgtcaaggcttgtttaacattacaagtattttaatgtgatcactatgttagcttcaatttacttatttgagtgcttgccttcccaaatatagcaaaagggcagtgaagaagaaatcacacgaagatcgttgacacatacttcctgggatatttccaactccagggaacatgagcgccggggatggcatccagtgacttacaagtactcagatgctacacctatgcttctaaaatttgtcaaggtttgacctctactgccactgcaaaatcacccttttcaatcaacttccattccatgatcactttcatgcatccaaaaaggggtaatatgttaggttatttactatttgactttaaacagtgattgccttagcatctgaagacactctcaatgtttaatttcatctctataaatacaaatttgttggaaagatattgtgggttgtaatcatagggaaccccctaatagagcctaaaaatgaattcaaactaagtcacctactacatatcagcatatacacaaacttagaaagaataagatgggaaaatttgtttttgaaaataaagcaaagtaattttgtgatccttgcccttatcaaacctcaatcttattctgatttcaaatcggccaactaattaagccaatacactcttaagagcaatcagtttttcatgtgtgccagtcaacngcaggcatgca

SEQ ID NO: 93150 - DNA, 365 bp, Glycine max
  Clone ID: PAT_MRT3847_55128C.1
acctccacgcgtccggagctttgtagtttgagggtgatgggaggatgtctcagtgtgtgttgctcggcccgaggctgtgctacggatgaaatatgggcgatgaaagaatataaagtggactcgtcctggactaagtccattgttatccctaacaatgggttttccccaatatgcatcaccaaagatggtggaattattggatcaaaggaagtggaagattagagaaacttaatgacaaaggagagctgcttgagcatttcatatatggtggaggtgaatggttgtactctgtcaatctacaagtctgctatgtatagagagagtctcctgtcactctctagtgtcattcgggaaacaccatatga

SEQ ID NO: 93151 - DNA, 474 bp, Glycine max
  Clone ID: PAT_MRT3847_55129C.1
actcaccaagatattcctcaacgtaatccaatattcctatctaatagctaccaagctattattctgtcataagaaaaagaaacacacaaaagagaaacaagttgttagccacagcaaaagtcgatgcttactagtcttagttaggcctcagcgtcagttcatgaaaacttttgcttttataggaattttgctcagggaggattcttgttgtattgttgctgatagcctagaggtggaagttttagtctttggttggaactagttgttggctttgtttagtcacaacaatggcactggcttctgttccaaaagtggtgtttggtttaattgcatttgcaatcttttgggtgctagcagttttcccagctattccatttctacctattgggagaactgcagggtcccttcttggtgccatgcttatggtcatattccaagttattactccagatgaagcttatgacacaattgatc

SEQ ID NO: 93152 - DNA, 366 bp, Glycine max
  Clone ID: PAT_MRT3847_5512C.1
ccacgcgtccgcccacgcgtccgtacagctgcgagaagacgacagatggggttgcgtgtaagtgtgaacagaggagaatggtagtatgattgaatgctcctcatccatttctgtcaccagtttgcgagactgcaccttacccactggtatctatattctccgtcgagtacctacactttagccacctagtgcggcgcacaggcaaccaatcatcatcgtcttggggttcatatttctcctgtttcaagtaactcagctctttaacacacatttttagaatgtacaatatgtggtgacaataatgcttttttctcaaggtggtgtactatcttcaactgtcaaccggtgatttgtcttccttatggt

SEQ ID NO: 93153 - DNA, 346 bp, Glycine max
  Clone ID: PAT_MRT3847_55130C.1
taggcggttcccaatttcctacacatatatgattcagccgtggttattgtgcaatcaatactgaagacatttaatgttttgctaaattcccgttatctaaaaaagggaagatttgaaaaagtaatgcctgataaaaagttttttttatcatgaatgatgaaggttaaaaaggtgatgactctcctgtaaaaaatgtggttatttttacctttgtggtaaatattgtttttggaaactatttttttcagccccctgccctccaataaataaatatcaaagaggtgttagttttaagtctagctagtcaaccaggaataacaatcataacatatctgttttgtgggct

SEQ ID NO: 93154 - DNA, 407 bp, Glycine max
  Clone ID: PAT_MRT3847_55131C.1
actcaccaagatattcctcaacgtaatccaatattcctatctaatagctaccaagctattattctgtcataagaaaaagaaacacacaaaagagaaacaagttgttagccacagcaaaagtcgatgcttactagtcttagttaggcctcagcgtcagttcatgaaaacttttgcttttataggtaagatttttcttaaaggaggggtggctgaattgtccactcttgttgttttatctgaaaccttacaaatcaggtttctttctcaactttgaccttgattttgtgctattggaattttgctcagggaggattcttgttggattgttgctgatagcctagagggggaagttttagtctttggttggaactagttggtggctttgtttagtcacaacaatggcactg

SEQ ID NO: 93155 - DNA, 222 bp, Glycine max
  unsure (1)..(222): unsure at all n locations
  Clone ID: PAT_MRT3847_55133C.1
nactngtangtaagntacggaattnggacnaggangttannngnangnnacaaangatnaanggggtaanggannncannagtaggaaggaaatnaananngggtctngggctgctngngaacncatttctnaanctgangttnnggangantttntgagtctnagatcagaagnngtagncaatggaagacgttcnagaagataaangtcgnnaaanncaa

SEQ ID NO: 93156 - DNA, 445 bp, Glycine max
  unsure (1)..(445): unsure at all n locations
  Clone ID: PAT_MRT3847_55134C.1
nncgcaacattgttacanctcttttcnnttcttctcgtttgttgcnnttcgctgnnttgaatcatgcgatcgagaaggggtcgactttcagcgctctcccagttccattgggaacccannctatctatcggccgttaccttaccaacggcgggtgtctgttcttcggagcccgacttctcgaacctagcacctggagtggtatgttgcccaaccgagcatncggaccaaaatcacttcanngctcactgataactgtataccgctgtgtcgcttctgcgatcgnngctgctgcattctcaagattggtctctgattactgtgccgtnntacttcctcnncatcaacacnnacaatacaactttggaccaacctgcannacagttaaagtttgcttgcaaaaaccttgtcccgactttctcttcatatnnaacaataagaattttc

SEQ ID NO: 93157 - DNA, 163 bp, Glycine max
  Clone ID: PAT_MRT3847_55135C.1
tccttctcgtccggaaattccgataacccaggtggacgagccatcgtgcgttgagacctattgcaaaatcttttgacagtgggcaattacagagcatgtgttgatttgcagcgcactgatccgataaaggagtgataagaaaaggagtcacagtgcgggccac

SEQ ID NO: 93158 - DNA, 152 bp, Glycine max
  unsure (1)..(152): unsure at all n locations
  Clone ID: PAT_MRT3847_55136C.1
cttctcgcagacgatagagcctngatacaccaaaaaagcctaacctacccaccgcgtaacttgcactaattactatattctgagcctgcgtttctgcagagaaccccacagagcgagacatctcgaatccgctataggactgcaccacccaa

SEQ ID NO: 93159 - DNA, 335 bp, Glycine max
  Clone ID: PAT_MRT3847_55137C.1
ccaaaagaaccagagcttttatttaccaaaacgaaaaccatgatgaaaaagcaaagacgcggggcgcgcacacacgcagttcaaaaagaagacaccaccagcatagcccaaagaacaccagctaccgcccctcaaaaaccagcccaacctacccctacagcaccagctgcagcgcctaaaccagcggagcccacaacgccacaagcaccaagggaaacaaccccagacagaacaccagacgttgacaaagacggaaacccgaggcaggcaaaggcattcaacaaaccaagccgccgcaagaaaaccacccaagtgaacaaccaacacaaagcaca

SEQ ID NO: 93160 - DNA, 347 bp, Glycine max
  Clone ID: PAT_MRT3847_55138C.1
taagctcgaatcgctcgagttggagagttgaatgggaatccctctggattggcggtcacagtatttgcaggagcatttttaatgagatgctcattagatatagctatgaaaaattactgcgccaggctaaagctcaagtatgtttttgcaatccttcaaaaatttgtttctttggtgtgtatgggatgataactaattagtgtcatgaattgcaagccttactttagggtctaattgaaaagctttctagctagtcataacatcaccatactgatggtattgcaaaactaggcactttgcaatttagaaagtagcagattggattttctcaagagaaacttaagcag

SEQ ID NO: 93161 - DNA, 720 bp, Glycine max
  Clone ID: PAT_MRT3847_55139C.1
gaattggccttcttattgcaaaagccacgcccgaacattcccaccactcattactataagaaaatccatgcccacgttgtggtgttgggttttcaccaacatgaaccttctgagtgatgcacagaagctgttcgatgttatgtctcataggaacctagttacttggtcttccatggtttctatgtacactcaacatggttacaatgtggaagcattggtgttgttctgccggttcatgagaagttgcagtgaggaatcaaatgaatacattttagccagtgtcgttagagcttgtacacaattgggtagtctcagtcatgctctccaggtgcatgcttttgttgttaagggtgggtttgttcaagatgcgtatgtgggtacatctttgattaatttttacaccaagcatggttatgttgatgaagcaaggttcatttttgatggcctagaagttaaaaccagtcacatggaccacaattatagcagggtatgcaaaacttggaagaagtgaagtatccttgaagttgttagaccaaatgagagggggcgatgtctatccagacaggtatgtgatttctagtgttttgagtgcttgttcgatgcttgagtttcttgaaggggggaggcaaattcatggatatatcttaaggaggggctttgacatggatgtttcggtggtcaatggaattattgatttttatttgaaatgtcaaaaagtga

SEQ ID NO: 93162 - DNA, 192 bp, Glycine max
  Clone ID: PAT_MRT3847_5513C.1
aaagagacctcaggttctactcatttctcgttctgtactgtttttctcttttttttttttataatgatgggtattatttaatcatttctcaatttacattggtttgatacaatctccattttccaaaaaactaattttctatttttactttgataagaactgtaccgtcatgcgtttatgtgctcccactct

SEQ ID NO: 93163 - DNA, 343 bp, Glycine max
  Clone ID: PAT_MRT3847_55140C.1
gaggaaaagggaaaaaaaaaacccctttttaaaaaaggtcaaaacactcccttggccaaagggggcaacaggaaccctacccgcttaaggggcttaataatcccccaaaagactaaagatccccgaaaggggccaaacagggagtacccggtttggaaggttttggcacccacaaaaacgggcctttgttaaaggccccccaaatcccctcccggaaaaaaaagcccaaaaacccttttggggcttttttttccaaaaaaaccaaacatttttaacccaaaacccttttttttacacccctcaaaaacattattcaaaaaaataggcctaccggggggacccc

SEQ ID NO: 93164 - DNA, 393 bp, Glycine max
  Clone ID: PAT_MRT3847_55141C.1
gcaagtggtgtgagagagagagagggggtgtttaggagagggtgagatgcctccgactaagcttgctcaaactggcctaatctatactctataggacaggcgtggaatacaaaaatatccgcacatctgcttatctacatttatacaacgcctgcccctttgattgattctctgtcactgatgctaagtttgacgcttgctattgtgaattacgaacctaggatgtgccatggttgtattcgcagaccacgcctgcctatacgcaaacgaggcttatgaatctgctcctctcgatactaccttggttaaattaaaaccccgaggatagaagacgaaacagagcaaagtaaaggttgggtcttttgaagtgggagtgaggaatcagacatctgg

SEQ ID NO: 93165 - DNA, 1633 bp, Glycine max
  Clone ID: PAT_MRT3847_55142C.1
aaaaccaaggttgatcatcaatgggtttcaattgaacggaaagatctcacttttcagttgctgttcatgcatgtatatttttggataaaattcaaaaattgaagatgtggatttagtgtcagaaaattaatgaattgtgtgctgttttcaatctgtggctaacattcccatttggtccatgttattgacaccggtctcactcacgagtctcacgcttttcacgatgggcttcattttcggagtggtggtcggaataattgtgggcctggccatcatagtgggcttcgtccgcggcgagaactcccgggccgcccaacgctcccagctcgccaccaccgttgccgccttcgctcggatgaccgtcgaagattccagaaagatcttgccgcctcagttctacccttcctgggtcgttttctcttccagccagaagttaacttggcttaactcgcatctcaccaagatctggccctatgttaacgaggctgcttctgagctcataaaagcgtcggtggaacctattctggaagaatatagacccgtggttttggcggctcttaaattttccaagtttactcttggtactgtagctccacagtttacaggcgtgtctataattgaggatggaggggatggtgttacaatggagttagaaatgcaatgggatgggaacccaagtattatacttgatattaaaactcttcttggtgttgcactaccggtgcaggtaaaaaatattggatttacgggtgtttttaggttgatcttcaagccgttagttgatgaatttcctggttttggagctgttagctattcattaaggcaaaagaaaaagttggattttactctaaaagtcattggtggcgacatatcagcaattcctggattatatgatgcaatagagggggcaattcgggatgctgttgaagattctattacatggcccgtgagaaaagttgtacccattttgcctggagattacagtgatttggagttgaagcccgaggggatattagaagtaaagcttgtgcaagcaaaggaattaacaaacaaggatatcattggaaaatcagatccatatgccgtgtatacatacgggctttacgcgaaagaatgaagaaagcaaacaatcaacaggtgtcaataacatggaccaaatgggaatgttagccacagattgaggtccatgttttgtaacaaaagcttgcagggaagtatcatttagcctaaccttgtaaaaggggcaaactaaattatggatctgatgaattggtgagcaagtgtaaggaaaaaatatatgcagtgagaacaataattgcatacgggacaaaacgcaccaagcatcattgtttacttctctagcattgaagtcattgatcaatgtgaaatgggattagaattcgatggcatcaatatggttaagtagctgtccgtgttcaagataactacgcttgcatgtcgcatgtattttccagctttcacatgatttcattcaaatatagttttaacatttacgagtctattatttttagtttttcaaatttgtaaaatgtttttcaagtctcttctgcaataaaagatcttcacaaaaacaatgtattcaagttagacttctgcaataaaagagcgtcac

SEQ ID NO: 93166 - DNA, 1049 bp, Glycine max
  Clone ID: PAT_MRT3847_55143C.1
tatccggttgcgatttcccggtcgacccacgcgtccgcgagaagacgacagaagggtatatgtcacatggagattattcagatcaatcttcatatgacaccttattaactctttttttagcttttaaaaaatcttgtaaattaaaaaatatgattatttatcacatggagattgattggatcatatggtttgaggaatcatgtaataatttctcatcaaattgggtataatctgctgattttaatgcaacatatgattgtttacagggcacttgaccaccaaaagttatgtctatagcttcggggtagtcctgctagaactgcttacaggaaggagagcaacagacaaaacaagaccaaagactgagcagaaccttgtggattggtcaaaaccttacttgagtagcagtaggaggttgaggtacattatggatccaaggcttgcaggccaatattctgtgaagggtgcaaaggagatggcacatttggcattgcaatgcataagtttgaatcctaaagacagaccaagaatgccaacaattgttgaaactcttgaaggcttgcaacagtacaaggacatggctgttaccagtggacactggccagtgtcatcaaaatctactaaaaatagagtctccaacaataataacgtgaatgtgaaagctagagccggtgtaaaccacaagcaaccttctccagttccgagcagaaaaacttgattgctatcttttacaagagtggttttaattaactaccacatgtggtataagactaattgtcaagccaccctttatatgtgtataattaaatgtataaaatatatatgctatatagataaactattgagtgtacattaatttaaaatctttctttgacaattgaaatcttctcaatccatgatcaaaatgaaaatcagctagatgggttgagccatctttttctaaaatatctgcatcctcatccatccttaagtctaattattattattaagatatcttccgagaaaaaaaaaaaaaaaaaaaaaaaaccaaaagcggccgctctagagga

SEQ ID NO: 93167 - DNA, 591 bp, Glycine max
  unsure (1)..(591): unsure at all n locations
  Clone ID: PAT_MRT3847_55144C.1
tggtcatttacataattacatgtacaacaaattataattctgcttcctacacatccaatatctgtgcaaggatagatttataacacatatatacatcatcttgcctaaaaagaattcatattgtctatatacaaacaacaacaaaaaataatatatactatgatttatcctttccttctaagaacagttttgccttgagcatcttcaagtaattgagccaacaattcatcaggaggatgtctccaaattctaggctggtccaagtgatggcccatttgagcaaatttatcagctgccctattcccttccctgtatatatgactcacaaagaagttgttaaactctggcagaatggtatttatatgatttatatgtctttgtacttccgtgcatctaacttttctccttttcactataatttcaaccagtgttttggcatctccttcaagccaaatatcattccaaccattttcaagcactaattcgaggcctttccgaagtgcagtaagttcagcgatggtgctattggcttgtccaatggattcagcatagnnnngcaaaaattctgcattgtgatttctaacaacccct

SEQ ID NO: 93168 - DNA, 147 bp, Glycine max
  Clone ID: PAT_MRT3847_55145C.1
attaattccgcgcgcgaacagctcactaggactgcggccgcgcctgcttttctagttctaacggtaatgagactaatttcatagggaggcctgatcaccaacctttacatttacattcctaatggctacagctttacgctcttaggt

SEQ ID NO: 93169 - DNA, 645 bp, Glycine max
  Clone ID: PAT_MRT3847_55146C.1
aagatcctccattagtatcgtctgagcgcttgtttcacccacctatgtttggtttgcttttactgcctgatatacggatgatcttatttgctcctaaacttagatgcaacacctgcatggtattagggacattactattccaaagcaccctcgcttctcactgtttgttttccatctctctgcttctctcctgctattacaagctacttgctatatccctcaaccattggcttgagccccaaggttttgtatgcaccaaatgtcagcatattgttagatagcctatggaagactcctatgatgctcagtgattgcataataatgatgaacttgaactgccatggacgcctctagcccgccgtaaaattgctgccatgtgcacttcacctataatatatgagctcatgttattttgattattgaacagctgctgcatgttgtcagcagtcacacatgctccgcaagacaaaatcgttgggtatacaagttctctgaccgtactcatgaaataatcggcccgaatgctcctgacgtgagtatgtcgatggacttgctgcatacggcgacttattgacgacacctacgaagaccgtaaatcgctcacatattcactgcaagaacgattactgacttggagatacgccg

SEQ ID NO: 93170 - DNA, 256 bp, Glycine max
  Clone ID: PAT_MRT3847_55147C.1
cttgtgcaccgtaagggttgtgaagcaggcagagaagagccatggtgcacgtttccttctaccgaaactgtaagtactctaaaccctctaactccttcctgctctctatatagtctatgcatttgtttatgtgaaatgtcatttaatctgattgtgatgtttctgatctgaggataaatcaatatttcctatgaaattgactaggggcgattattaatttgtttgtttggggttgaatagatgggaaaaccttcaa

SEQ ID NO: 93171 - DNA, 249 bp, Glycine max
  Clone ID: PAT_MRT3847_55148C.1
gccaagataatttagtgaaacccaattggccttcatagttcaattgtgatttgtcaggtcctttgcatttgcaatgtctaaaattttatcgttgttctgctaatcattgatcagccactaataaaaatataaggctgtattttctgttctaatctcaagtgtacttcttgattttgggcatgatgataccctataacaggaatatggaggaaggatgttcaaaaaatgtggcaagaaaccatcaaaatt

SEQ ID NO: 93172 - DNA, 228 bp, Glycine max
  Clone ID: PAT_MRT3847_55149C.1
gaaaacaacgcgcggcaacataatcccagaaaaacacaaagttctgattcttcattcttgtatttgtatttctactcgccaataaaaactttgtgatcattctccaacgtgaacccacccaacaacaacaaccatgatgacagacgaggaattgttgcagaaacttgaagacttaaccaaaaacgcccaacaccaccacttggagactctccgctcgatccttcttca

SEQ ID NO: 93173 - DNA, 312 bp, Glycine max
  Clone ID: PAT_MRT3847_5514C.1
aaaaaaactaactatttccatccaagagtagaaccccagggcccagccaaacaaaaccgacttatccttcagtcaaagcaccacttaattaagcaaatcaccatttactctatacaaacacagttacccaaaaccaaactttaaaaataaaacttggcttctgcgcacatcccataagccaattcacactagcgtaaggaaccttctaacgcccccaaaaaggaggagacttgttgtagctaccccccccaggtgaccaactggggtgcctaagggaccgtccacgaggactgaacctcctcatcccataac

SEQ ID NO: 93174 - DNA, 240 bp, Glycine max
  Clone ID: PAT_MRT3847_55150C.1
tacggctgggagaagacgacagaaagggcctatacttgtttctctttctctctcactcaaattgggaaccattgcaattcccaattccctctatctttctcttctcatccttatatattacactacactaggtaccctcttacccttattccctcacttctgttatctccccttctgttcgagaggacccctcctcacacatcctgtgcccacccttcaataaacccctgtttattaact

SEQ ID NO: 93175 - DNA, 1927 bp, Glycine max
  Clone ID: PAT_MRT3847_55151C.1
ggctcgagcaaaaaaagattatgaaattttctctccaatgaaagtcacgatcctctcgtccatattcattctctatctctctcttcacctcctgtgtttttttctctctccttccttctcccttttttcaatctttcaatcaccaattctaatcactcgtagatcctctctgtttctcattctggattaatttgcattggcaaatctctacattatggatgaaatggtggattcagaaatggatcaacagatagaagattatcaacattctgaacccgatatcctttcgagaggaaccactagcatctcgcagcctaataataaccatgcaatggtgggagaatctgagaacacaactaatgctgattctcactttctgccagatgcttatgacaatgctagggtgtatggggttccacaatataatggtattcagcctccacataatcttgatacgggtgtaccagttgcaactaacttatattattctagcattaatcctccttccagtactggtgtttttcatccgccttaaagtcatagagccattgaacaattgccgggttcaaacacatttgaagttgctggaggttcttcaaataattttggaagaagttctagtttcatgaatgatgctagaggtccacacaaaaggaaaattcctaaaggaataagaggaaattcacaagattttaatgcttcgtcgtctagctcttcaactgctccccctaatgcaagacatgccaatgatgttgctataatggataatacacaatttcatatccgttcacttgtggaggtaggaccacacggtagtgaatggagccggccaaatgagtctattatggtgcatgatcataatcatttgatccatggaaattatttagggcaacactttccgccaatagctcctccatggttgttccaacagttgaatagtaacaataatgatggccatgctacaccctggaatcaatctcttccaatgccttgtgtgcaagcacccgctataaacggaagttcattagagagtgtaagtatgggattgcagagatatcatgatccagttggaaatcgaaatggccttaggtttccttatcatgttcctgtcaaccaacaacaccatagttatcatcactcaacactgcccatgcaaggagtaagagatcatagtctcaacttcttccctacagtaactacaaattcatttagggttccaacaaatcctttgcgtaatgttgcaatcccaacacaagctagttttgagatgggtcctagacatgttggccctgcaccatcatctagcctccgaatttaccgacctcatagaggggttgtgcctgagacaactctcagacatcgaagtcttcctcccatgggcttccttcgagttaatgatgttgctttaattgatgaagtgggaaatttggttgacaatcacagagatatgcgcttggacatagaggatatgtcttatgaggatctcattgctttgggtgagagaattggcaatgtaaacactggtttatcggaggaaacaattacaactcaattgaagacaaaaacttatttaacgggtgctactagtattaatatggaggaggaagtttgtgatgatcagggaacattttcttgtataatatgtcaggatgaattcaagaaccaagagaagattggagttcttcaatgtgagcatgaatatcatgcagattgcttaagaacatggttggtggtaaaaaatgtttgccccatatgcaaatctgaagctttgaaatcaacttctgtgtctcctcctacctaatttatttatgaacaaaattcttatgaattttgtacatgtacttgcacatatatagacgtcatactacccaactcatttgttgttagcaccataacttgtatctataaacctgcattatgtttggtg

SEQ ID NO: 93176 - DNA, 713 bp, Glycine max
  unsure (1)..(713): unsure at all n locations
  Clone ID: PAT_MRT3847_55152C.1
agagcaagagaataaagtggtgaaatcataaataatctcaaagaaaaatgtgttgatgactacccaccggggaccggaagtcatactcaggaactttaaggcaggttgagagccaaggccaatctcagaaactacagatgctatgacagcactaggtatcaccatggaagtattatttgtaagtggtaaagatgcatctgcagatgatggccacaagacagactcgacagcgaaaaaacaaccagcaacggcagcattgaaaccggcagagaggccagcagcagatccagcagcgagaagggagagcattctgccggaactctttccattgtcaaagaaaggatgaagggctttggcaatggaagtaccaatgtcgacacttggaccctctggacccaaggaattgccggtgcctagagtaacaaaagctgccatggcctttaagaaagggcgggaagcagacttaggtaggcaaatggagtttggaggaaaggatcttcttcttggacagcagagtcaaaacgttaacgaaggaggtttatagcagagacgcaataacacctccaaaagtcggaactagtactacttgtgcccatattgtctcaataggcgcttctctcagccatgaagcgccttgattaggaatcccatcccagaacaaatcataaatttcatggaccttatttattacatgtccnaaaaaaagannnaag

SEQ ID NO: 93177 - DNA, 171 bp, Glycine max
  unsure (1)..(171): unsure at all n locations
  Clone ID: PAT_MRT3847_55153C.1
atggggggatatgtatacaccgnnnnnttttcattttagagaggatcttacgatctaagttacaatcctagagaggtgtgatctttttacgccccccgcccctccttccaatctcaagtttgacaacattgcctataccccaccaaatatgtttattgggccacctaacct

SEQ ID NO: 93178 - DNA, 123 bp, Glycine max
  Clone ID: PAT_MRT3847_55154C.1
gactcgacctgttcatcgatttccgttcacgctcagctccaacgctcctctctaatcttgcactatgctagtgatcctccattactaggacacactcatatacctatcatacaacactttgat

SEQ ID NO: 93179 - DNA, 351 bp, Glycine max
  Clone ID: PAT_MRT3847_55155C.1
atcaaattgttccaaacttgatcaccaaaaagcacaattcaccttacaaaaaacacaaattttggttaattgctatagaagagatggcgttggggtggaggagaaggaagggcaacaacaaaaaccgtcgcaaaggtggcaaatccatcgctgagttggtgactcccaatcacttcagatgtccaatttctcttgacttgatgaaggatcctgtgacattgccaacagggataacctacgatcgggcgagtgtggagatgcggcttgatgaagggaacatcacatggcctgtcacaaaccacgttgtgaggaactccgacatgattccaaaccatccccttaaggtaatga

SEQ ID NO: 93180 - DNA, 532 bp, Glycine max
  unsure (1)..(532): unsure at all n locations
  Clone ID: PAT_MRT3847_55156C.1
ggaattcggcacgaggctcctcctactctgcgctcccagcttatcctacgcaccatcatcatcacctccccttcccataccaacctcactctcttcacgcaccaggtggagggtcccaaggacagaacgaaacgacaccaggagggaacagttcaagtggcagggtgctgaggctgtttggggtgaacatggaatgccaacctgataatgataatgattcccaaaactccacacatgaatgctcctacacccacttataccaccatcaaacctcttcttatccttcttcaaaccctcaccatcacatgctacctcaacaaccataatagaaattagatatatatgcccccctctttattagattctcccccgttttttttttttcatttccagcttcagggttgaagtatgcccttaaattaattttagtcaatgaccgtgtcgttaacatgaacccgtgaaaggaacccttcttttattattagtatatttaggttgacgttgaannttatagaggatctttcttgtcttg

SEQ ID NO: 93181 - DNA, 287 bp, Glycine max
  unsure (1)..(287): unsure at all n locations
  Clone ID: PAT_MRT3847_55157C.1
agaggcggaaggcccattcgggtacntacatttccgaataacattgtgcatcattgaaccagcacatganttcaatgtttcagcttttgagtaaccactaaccaatggtgagtttncttcaaggaaaaagatctcgcgatggttanaagttaaatgtaagcatgtgctgctgttcggcttgacatnaagtaacattccaactccattgttgggnattctgggtttgccaaaangacagangggttaatngtggaatatttgggaaggatgtcctacggtggccccat

SEQ ID NO: 93182 - DNA, 173 bp, Glycine max
  Clone ID: PAT_MRT3847_55158C.1
ggtgcctccttcatctccccttccgggtggggggtctcctcggcggggtccaaaaccatctctttagtttcctctttcttggcgctcaagtaacccacgggcctttttgccttatccgaaggcgtgttctttatcttcccaaactttcccaactttcgatttttcccctcttt

SEQ ID NO: 93183 - DNA, 148 bp, Glycine max
  Clone ID: PAT_MRT3847_55159C.1
attcaaaactacagtgaattgaattaaaactggaaacagtcaaaatgcatacaaagacataccaccggctgtgaaaaccaaagagtgaagcacaaaaccaacaaaggtaaatgacaatgtctgtaagacatgcgtgagaccaaaacta

SEQ ID NO: 93184 - DNA, 465 bp, Glycine max
  unsure (1)..(465): unsure at all n locations
  Clone ID: PAT_MRT3847_5515C.1
ctcgagcgggcgcgcccttttttttttttttcgaatttttttttggggggcctttgaactttaacccatggggctttatttggaagaaacatttacatttcctgggaaaaaagaaaaacaatttcttataaccggttcttttatgggaaattaatccccgggcaggtgctctaataaggtaaaggcccagttaatttaaacgaggaaaaaaaaactagggctctagtctctatcaatggtaaattttctttgggaaaaagaaaaaaaaaggctcacgaagagtgtgaccgtgtacattactaaggttatcttacttgcgggtgggcacattatgctcgggagcagngcacataacataggaagaatccaatatttatgagggaaaattcttaacttaggtgaggtgaggaagaatttaagggagccatgggaatgttgccaaatacagttgggtaagagggtgcg

SEQ ID NO: 93185 - DNA, 1281 bp, Glycine max
  Clone ID: PAT_MRT3847_55160C.1
cttctcttcactctttttaaaaaaaatggttctcaccatttccaattagacacacataaaaccattcccaatagccgcctctgataattgattactatcaacccaacttcaagttgtgttcttttgtggtgtgtaaccgtattctgtatttgttttcatcaattggaaactgggttttctcgctttttgcagataaagatcatggagagaacggctaattggttcccagatattgaacggcatctttcaccaaacactgaggaataagctgtaattctggaccagaatgaagatcttaacatacagaagtcaataccacatacagatcacaatgaaacaatgaggtctcaggacaagaaaccaatggaatcagaaaccaacaatattgacagaataattgcaaatctcatgttcaagagcatggagttcaacatacatcattctccaattacaccagctccaaacctcattcaagcagttatagagagaagaaatgatgtgtgagcagtcatcatcacttgaggaattcatactgaaggatcttgagatggtaattggacagttcaccgagaggacccgtatttgcttccgagatgctctgtaccgtcttgctagaaacactgaagaacaacatgtaatgctggaccagaatgaagatcttaacatacagaaggcaataccacatacagatcacaatgaaacaatgaggtctcaggacaagaaaccaatggaatcagcaaccaacaatattgacagaataattgcaaatctcatgttcaagagcatggagttcaacatacatcattctccaattacatcatcgacaaactccattcaacaagttattgaaagtaataatggtctacatggaaacagctcaaaagccatgaatatggaagaaaagttttgctattcccatccccaaaaattactagtagatgccgaaattccaaggtttggactaagtaatcaaccaagggacacaggttcatatatcacatgagaagatcccatgaagacatctttcatgatagggtttggttaggtagtgtgattgtgagctttcttgtaggcattagcttaaccaaaatcaggaaaaaaaatatcaatttcttgtaattattcaatctatctgttaaggtttctttgaagtatctgaattattagtgttctgttatatttattcaaaggtttgttgtatacattcagctcaattttgcttggaatgtaagtgactgatttgttgtaaaaaaaaaaaaaaaaaaaaaaaaacaccaaaaa

SEQ ID NO: 93186 - DNA, 551 bp, Glycine max
  Clone ID: PAT_MRT3847_55161C.1
tgaaagtaataatggtctacatggaaacagctcaaaagccatgaatatggaagaaaagttttgctattcccatccccaaaaattactagtagatgccgaaattccaaggtttagactaagtaatcacccaagggacacaggttcaaacatcacatgtgaaggtcccataaagacatctttcatgatagggtttgattaggttgtctggttgtgagttttctagtaggcattagctaaaccataatcaggaaaaaaaaatcaatttcttgtaattattcaatctcgatgttaaggtttctttgaagcatctaatttatttgtgttctgttattttattcaaaggtttgttgtatacattcagctcaattttgcttggaatgtaagtgactgaattgctataatttgtcgggtctagattcttaagattttataggctcaattcagggtacttttgtactttagaattcaataaacaataccgtgaattcaaaaaaaaaaaaaaaaggcgcccgacagtagctgcgaccgggaattattcggacggactcagc

SEQ ID NO: 93187 - DNA, 1559 bp, Glycine max
  Clone ID: PAT_MRT3847_55162C.1
gcaatagaccactctaatctcccttgacatctagcaagaggaggtgctaatgctgctctacgtcaataaaatcttgccgtggccaagccatcctgaacaactttctctctctttagttgcttttcatgcattggtgacttcatgacttccaatttagcctttcaactgaagacattcttttcaagcaggactggctcacattgttagtctcaggatactgccattgagggtgtacagcattgtgaaatccgcagcaatagctcgtggggatgctgaggttttcatgaagtttgcaagggccggttagaaggagaaaatatgggatcatgctgcaagagttatcatcgtacactaacatggtgggatggtcaaggatgctagcaattgtcacctggatatatctaaaggcttttatgatagaaaatccttgatcgtggcataattgagtggttctggagccacactacatgcaaagatctgaactgttggtggctgtggttaaaactgtgcttgaatttctagctgaagcgcctcgatttggagttgaagaaccaaaatcaacccttggaacttcagaggttcttgaaatcattagtcgctgcaactcagttggagatccttctggaagattctgggcacttagtcctcttgatggagggtcttcatgtggtgatcaacatgttgtagctttatcactcatagaggaaggagaagttgtgcttggagttcttggctgtcctaactaccctatgagaaaggactggtttagttatcatcacagctatcttaggatgatatctaagttggctcctccaacctctcaaacttggaataaaggttgtgtaatttatgctaaaaggggtagtggcaaggcttggatccaaccactgctccatgtcaatgataagtttgtgtggccaaaccatgcaaaacaagtttctgtctcttccattgacaacctagaaatggccactttctgccaaccagttgagaaggccaatttaagccactcttttgctgaagggctggctcacagtgttggtttcagtaatcagccactgagagtatacaacacgatgaaatatacggcaatagcatgtggggatgctgaggttttcataaaatttgcaagagctggttacaaggagaaaatatgggatcatgcagccggtgctatcatcatacaagagactggaggaatggtaacagatgctaaggggcatccactagacttctcaaaaggtttatatttcgaaaggcttgatcgtggcatagttgcttgtgctggagccacattgcatgaaaagatcattgatgctgttgatgctagttgggcctcttcttgtctttgaaactgctagtaatttacatgtatatgggatatatactgtgattttatgtgaataatgtataatcttttctttgttgatgttgttaccaatttgctagggcgaaattatttttgtttaatatgttgtggataaaaggttgtggttgttactttgtattctaaatgacatttattagggtgatgctaaatacacccagcattttaaaaa

SEQ ID NO: 93188 - DNA, 238 bp, Glycine max
  Clone ID: PAT_MRT3847_55163C.1
ttccctggcatgctgaaataattgacgatctcgatgatgggcttacgcttcttcgggcccaaacggacgttacaacttacaacgacgtcgtaaaacgcgggggacttaaaaaatggaaaagaggagtaacatgcaatgcatcatcacatctgagggagaggagagcattttcatttttcaacttgagagaagaagagaaggggaaaaggaaaaaaaggcaaaatgggtaaggatctga

SEQ ID NO: 93189 - DNA, 534 bp, Glycine max
  Clone ID: PAT_MRT3847_55164C.1
ccacgcgtccggtttatagcaaacaaaaatggtgcttccttgaaacttggtgagagtgagtttcatttttcaaccattgattgatttttgtgttggaagcagctcgaattttgtgagtgatggacagctgttttggtttttgattgtttgaatcaccagggaaaaggagtgcgtgttgtatagtttgtacaaaacctgaaggtcagtctgttcaagttgtcttttgatctcagtaatgtgcagcaagaaaatatagcaaaaacttgatgtgttagagattctgtagaaattcggaaaaggtgtagcctgtccaagtttaactatttaattttgggaattggcaatttgaaaatacataaaaatttcaatggctgctccaagttccctattgaaggtggaggaaatacaaggaagagggaggggaatggttgcatctcagcctcttaaagctggtcaaagtgtcctcagagactctcccattctgcagtattcggctttgcccttgatcaggcagggcttggcatgctgctgatg

SEQ ID NO: 93190 - DNA, 853 bp, Glycine max
  Clone ID: PAT_MRT3847_55165C.1
ggatctcacaagcttgaaagagcttaagcaatggcactatttgcaagttgcgacacacgaaagcatgaggctttttccaccgattcagtttgactcagagttttgcttgacaatcgttctgtacggctgcgagaagacgacagaagggggaactagggttacttaccacccctacgcgatggggaggttggaggagatatggggttgtgattgtttggagtttcggccacaaaggtggctgaaggatggggtgtttcaacccatgaatccgttcgagtacccggtttttcaagcggggttgagggtgtgtgtagggaaggaagtggctctgatggagatgaagagtgtggcagtttcgttgctgaggaagttccacatcgagttgctggcacccttgtcttttgggaaccctcgcttctctccggggctcactgccacttttagttttggccttcccgtgatggttcgtgaaagaggaactacaacaaccaccaaaccatcaaaaggagtctaattccattgattgataaaaaagtgtgagtgtgtaaatctcataatactctaccttattcctagctatagattcaagggcatggaattaaacagagtcttgaatggactaaacataactgataattgtgtcgatatacctttgagagtcttacaatttctggaacatagatatttacatatttgggatttaggtatttattatttaaatatggaccagatatatatagcagtagattgtcgtgtatgtaatgtaagatccttgcaaattaattactatagaaataaagagagaaggcatttgtttgtgcataaaaaaaaaaaaaaaaaaaaaaaccccaaa

SEQ ID NO: 93191 - DNA, 337 bp, Glycine max
  Clone ID: PAT_MRT3847_55166C.1
gggaaaaaaaaactgaagattcactaaactttcttttagtttccgggctttgaaacagcttaaagttaaattccctaatcaataactaacaacccaatgggaaaatccttaagactgggttgttaaaattttagttgcatgcccaccaggcctgatgtgccttgcaaattttttttttttgatacaaaccagcggacgatccagtgtttttggtttttttcacaggctggtttgggttcaatgctgctccaacaaaagatccagtgcctttggttttatttacaggctggtttggtttcaaagctgctcaagcttttgtgaaaggcttggaaggcaa

SEQ ID NO: 93192 - DNA, 265 bp, Glycine max
  Clone ID: PAT_MRT3847_55167C.1
gggtaagggaacggggagtttcagtaaaagaaggaacaagacccacaccctctgtgtgaagtgtggccaccacaatttccacctccaaaaaagtcattacaccacatacactttccccactacgcacaccgaaaaatataactaaagcataaaagccattagaagaaaaaccaccaaaactaaaaagataaagtacttacataacataccccataaatttaagagtaacttcaaaaacaataccaaagctacacccaagaagaaa

SEQ ID NO: 93193 - DNA, 498 bp, Glycine max
  Clone ID: PAT_MRT3847_55168C.1
cggctcgagcggctcgagctcgagccgaatcggctcgagtacggctgcgagaagacgacagaagggctattaggagtagaaataggactggtcaaatcacccaacaagggtgtatggcctatagactatattaggtcaggctaaatacttttttttttaaaataaatcagtcattgaccttaagtaaataatgattttaattcacattgcttatattttgttttacataaaatatgtctctattggcctattagttcataagcctatttttaaatatctcatacttaatttaccatgaaatagacctttaaataggctaacaagtgaagacaaacttaaaaggctagataaggtctgaaaaaagtctataacagacctagttgggtcttgagtttaataggccagaattatttaagcaaaaccttgttcgatccagcttattttcatcactaatatctatataaacacatcatatatttgattctataaaatttaata

SEQ ID NO: 93194 - DNA, 423 bp, Glycine max
  Clone ID: PAT_MRT3847_55169C.1
gccttacctaatttatttatttttatttacatcctccaaaatttaaaattattattttttatttttaactttcattttaaggtagataaatagtatttattttggagatctagaaagataacagagttatgacatactcacatgatattacatacaccagtgggtgccacttaaaagatgggcacttgacttttcattaaaggcacaaatatttaatattataaggaccaaaaataaagatttcaccttcttaggaaataaaaaacaaagcaaatattttataaaaactaaaatcaaaattcgttattgtttttacatgaactaaaaatatactttttatcagaaacattctgtctcctatgtatctctttccttgtaaagtgatttgatacttttagtggagtgtaaagggatgcaaggcat

SEQ ID NO: 93195 - DNA, 176 bp, Glycine max
  Clone ID: PAT_MRT3847_5516C.1
gaaacacaaattttaggtggtttaataagagcaaaatgcacacatggccccaaacaaaacaagccttattgaacccaaattggttgggtgtggcagaaaccaacggggtgccggcttggtgcttactggggccgcccgctggggcaaagggggtgcggaagtaaagagggggtgcg

SEQ ID NO: 93196 - DNA, 620 bp, Glycine max
  Clone ID: PAT_MRT3847_55170C.1
agcaaatcggtaataggacaggaccgtacgagagtgcgatgcgatgcgaatgtgagtgactgagggagtaggattgtttttgcttcttccattttgagcctcagcgtttccactttcctctcacatggagtaccatagagatcgggtgtagaaatcttgcttctccgtggtcttattctcaatggaacctattggtaaagaagaaaaaattgcttgtgtgattggtgaccgatcaactagtgatgttgatgtgaggctacgcacacaggaaggtcgagatgattggctatactgccactcagagattcttgtgaagaattgcaagtattttgccgatcggttgtctgagaactggccaacatatagttcagttgatgatttgtggcatggtgttaggaattcccttggcattctccaggtcgcagttgagcttggatgcccacaaattgtaactgcctgtgtgaattacttagaagcggtgacatgggaagaggctgaggaggatgagatattgaaaattgtacctcgaatgggattacaggcagagcctatcctagctagacttcaaccagttaaccagtctgctattgtaaacatctttgtctctgcccttcggtttg

SEQ ID NO: 93197 - DNA, 825 bp, Glycine max
  Clone ID: PAT_MRT3847_55171C.1
gaagaagcaaatcggtaataggacaggaccgtacgagagtgcgatgcgatgcgaatgtgagtgactgagggagtaggattgtttttgcttcttccattttgagcctcagggtttccactttcctctcacatggagtaccatagagatcgggtgtagaaatctcgtttctcagtcgtcttattctcaatggaatctattggtaaagaagaaaaaattgcttgtgtgatcggtgaccgatcaactagtgatgttgttgtgaggctacgcacacaggaaggtcgagatgattggctatactgccattcagagattcttgtgaagaactgcaagtattttgctgatcggttgtctgagaactggccaacatgtcagatccttgattcccgcaactgtgttgatgtctattgccaggagttgaattttgattaccatgaatgcccttggcattctgcaggtcgctgttgagcttggatgcccacaaattataaatgcctgtgtgaattacttagaagcggtgacatgggaagaggctgaggaggatgagatattgaaaattgtacctcgaatgggattacaggcagagcctatcctagctagacttcaaccagttaaccagtctgctattgtaaacatctttgtctctgccctccgctttgctacatcatctccacctccacaactgaatgatcttaagtcttcggcacaagagcaacttgagtacatgctaactgaagatgatgatgcccctttgttgacagctgatggacacataaaacttgagggtaaaggatgttgtaacagactacttttcccggttttaacgac

SEQ ID NO: 93198 - DNA, 247 bp, Glycine max
  Clone ID: PAT_MRT3847_55172C.1
cgacccaagcgtcagtggaggcgtgggcgaaaagacgacaggagggggtctgaaatagaagaagataacaaagatgagcgactgaggaaaacgacaaggtggaagaacgttgccgtcgccgccaagaggccctccgcctcatcccccctctcatccctcgcctcgaacccgtcgatcgctgacagacatgttcgttattgcttcgagtgtacactacgatttggacttcatatcctatggaacactt

SEQ ID NO: 93199 - DNA, 1702 bp, Glycine max
  Clone ID: PAT_MRT3847_55173C.1
ggctcgacgcgaatgtgagtcttcttcccttgtcagcctcagactcagggtttccactttccgctcacatggaaaatcaaagagatccggtgtagaaatctcgtttctcagtcatcttaatctcaatggaatctattggtaaagaagaaaaaattgcttgtgtgatcggtgaccgatcaactagtgatgttgttgtgaggctacgcacacaggaaggtcgagatgattggctgtactgccattcagagattcttgtgaagaactgcaagtattttgctgatcggttgtctgagaactggccaacatgtcagatccttgattcccgcaactgtgttgatgtctattgccaggagttgaattttgattaccatgtaaatcttatacgccttctctacattgtcatagatggttcagttgatgatttgtggcatggtgttaggaatgcccttggcattctgcaggtcgctgttgagcttggatgcccacaaattataaatgcctgtgtgaattacttagaagcggtgacatgggaagaggctgaggaggatgagatattgaaaattgtacctcgaatgggattacaggcagagcctatcctagctagacttcaaccagttaaccagtctgctattgtaaacatctttgtctctgccctccgctttgctacatcatctccacctccacaactgaatgatcttaagtcttcggcacaagagcaacttgagtacatgctaactgaagatgatgatgcccctttgttgacagctgatgacaacataaaacttgaggttaaagaatgtgtaaacagactactttcccggtttaacgactcattaacagctttgttctgtggttccacagaatcactctctgaggctggaaatattcagttgtttaaatcctatttgactgatttgtcatgggcttgtcagatattgagtaagttggaaattatgagggagtttgttgagtattggtttgatgcatcggataagattgtcaaggtgcttgaacaaggaagttctacaactgaagtaattgagataaaattaagagctattgaggtgacatcaaaggttttagaggcaattgggtatggcactgttatattgccaactgcaaaacgccttcaggtcttgaaagtgtggcttccatttgtgagggttacaaaaccattgattgattctgtcacgatgaattgtgagaatgccatgcttcttaaattagatggcgaaatgtggcaatccttagaatccacgtttgtgtctatcattcttgcattgccttcaggggatcaagcagaggttttaactgagtggctggataatgagtacatgcagtatccagacttaactgaggcatttgaagtgtggtgttataggtccaaggtttctaagagaagactatcattgctagaggatgagcatgccatgactaactcattttgatgctttcacaaattctgtttctttatattagactactaatccaagatttctaccttgtcaaggcatttgaagagatcatctcttttttgcacatgaatggaaatttttgtaggaggcatttaaaatctccatttctcatcaattcaatgtaaattatggtgaagagtttgtaaaatgttgtagtttctaactatgaactgtaaaggatgtatttttgaaataattgattacatagtaagcaaaatcacgatact

SEQ ID NO: 93200 - DNA, 810 bp, Glycine max
  Clone ID: PAT_MRT3847_55174C.1
cgcaaataagctgttgtttctcttcattttttctcagccgacaaaaccataaaacagtgataaggtgccagaaggaaggggagaagtggaagtaaggctatgaaaaatgggaagcacaatccctttcaaagacaacttggtttccttcacaaagagaattgttccctccactttctacgctctgcttcccattgctctgtggctacatacttccaccttctctccctcactccacattccacaaccaccacctaccacccttctctttcttttcctcctgctccaccttcatcatcttcttctttatccacagaaaaggacaaaacttaccaaaacccatgtgactactctaatggtgattgggtacgtgacagaagaagccctttatacaatgtaactacttgtggtacaatcaaagagagtgagaaatgcatatccaatggaaggcctgattcaggctatctatattggagatggaaacccaatgagtgcaatcttccaaggtttgaacctctcacttttctccaactcgttcagaacaaacacattgcatttgttggtgactctttggctaggaaccaattagagtctcttctttgcatgttatccactgtttcaagtccaaaccttgtctaccaaagtgccaatgacaacaaattccgtcgctggcacttcccttctcacaatgcaaacttctccttgtattggtcaccttttcttgtgcaaggtgtcgaaaggtcaaatgaagggccatattacaatacaatgtacttggatcatgttaatgagaggtgggcaagggatttggat

SEQ ID NO: 93201 - DNA, 511 bp, Glycine max
  Clone ID: PAT_MRT3847_55175C.1
cccccacgtaagctcggaatacggctcgcggcaaacttttgcaaagtgtttatcgcagcagtcctcaacgattcaccgccttggaacaattaaactgcgaaacggggcaatacctcatgctcatccacctggcgcaaatgcggctacccggcacgtcctcatctcatatacccttgacgctgcagggctcaacgaagtaagctagcctctcacctatttaaagagtactttctccagggaatttatcacgaaccatcttgcactctggaaggcttaaagggcgctccaatacacctagcactgcaccaaccctttgggatccatacttccaaacttatatgggaatgtagaaactgaacctacattaacatgctgacatggaggcgtccaggaggtcttaccgcgaaccatcgatagtacttgaagcaacatgccaccttgtgaataccacgctcaattgcaatataaaaaatgggggtattatattacaagcatggcagttctgacttga

SEQ ID NO: 93202 - DNA, 330 bp, Glycine max
  Clone ID: PAT_MRT3847_55176C.1
cataaagattttaaattcatggcggtgtaagtgtaatggcgggtcgggcgcttcgtctacacggtccggcgtcgggtagtatgaagaacgcgacgctaatttgactccgcatgatggtcgattcaggggagaagatgaagatcgatgggtacataacgaaagccccttgggctgcccttgtggaaattcaaacggatatttgctacctatgaaccctatgcaaatctcaaagacttagttgaaaaacgttatttaccctgggcgtgcactatcgggccagactataccggagaacggtctaatgggacaaaggcttgacggggaagctca

SEQ ID NO: 93203 - DNA, 1393 bp, Glycine max
  Clone ID: PAT_MRT3847_55177C.1
ttctctctccctccacgcgtccgttctctccctcaccacttcacgcgccgctccctcctcctgctctccaccaccacaaccaccctctctgtcccatctacaccccctcccactcccatttccacccccaccactcccacagtcactgaccgcgtcttcatggacttcagcctctgccccaacaacttcctccccgaccgcgccgactccctctcccctctctgctccgacaccactctcttgggccgcgtcgtattgggcctctacggcaacctcgtccccctcaccgtctccaatttcaagtccatgtgtcttggcctgaattccacctcatcctcgtacaagaacacgctcgtccacaaggtgttccccggccagtacttcctcgccggccgccagggccgccccgacaagggcgaggtccgcccgccgcacgacctgccgcgcaacaccgacacggtcgccgccaaggcgttcgccctcacgcactcccgccccggcgtcgtttcactctcgctctccgaaaacgacgacgatgacgagattaagctcgatcctgggtacaggaatgtggagttcttaatcaccactggccccgggccttgcccccagctcgataacaagaacattgtcttcggaacggtgcttgaaggattagatgtcatcacagctatagcttccattcccacatacctaccatttgagcgaattcgccagtttaatgacttggctcaattttttggagatgaaagggctcagaatgcacgtaacatatggaacaggcctcttaagagcgtttatattagtgattgtggggagctgaaagtgacaaagccttccctcacgccttctttgccataatttatttccatgtatgtatatattatccgaggggatttcatgttactggtctatgtaaaatcacactcacatattctttgaaaataaatgatgatgaataaaaccacaagcaagcaacatgaatgacttttgaagttgaaaattaaaaggttttattttagttcattcatttcaaagctgtgaaggacacagtacatacatgcagtgaagttaaacattgatatggtatgccagagtttcttgtaagttagtaatacaacattattattgtgcaaatatccttttctatctgcttcaaataatttcaaagatttacatatttcaaggtgggcttttcttcttttgaagataatctcacgacaggttacttaaattgtcatggcttcaagcacagacagtttcaagggaaaagaaaaggaaaatgaagtctgggatgttacttttgtgtatctcctgacgcttccaactcttctgcaggtcgactctagaggatccccgggcaaaagcaacgaattttcaactcgtgtagctc

SEQ ID NO: 93204 - DNA, 259 bp, Glycine max
  Clone ID: PAT_MRT3847_55178C.1
gtcgcccttttttttttttttttattttgggaaaatttattgagacccatttgtggaattggaacgtaaaaatcaactatttgaaacaaattgaaaaatatccctctcccagattttcaaacaaaggggggttttaaacaacgcgttttcccaccttgcccggtaaaacacccagggaaaggaaaattacaccccaaaaagggggggcatggacccgaggcaattcatttcggcgagccaccatcatttccccacccgg

SEQ ID NO: 93205 - DNA, 186 bp, Glycine max
  Clone ID: PAT_MRT3847_55179C.1
actgttactgtacgcttaatccctgaacgagtgaaatgctacttgagaattcataactatcgcaggaactcatcaagtgcatcaaaactatatgcagcacttggtttactagactctccatacggcctagatatagctcacgtatgtagatcgaaagcaaccctaaaggagcacccttagcggtca

SEQ ID NO: 93206 - DNA, 338 bp, Glycine max
  Clone ID: PAT_MRT3847_5517C.1
tctagaaattaatagtacataaaaatggagtgccttaaccaaacccaaaccataattcattttggggtccactaaaaacacgcttcgcaacataaaaatgaaatacaatgtgttgtggatgggtcaaaatcatgaccaaaacttcggagctacggggcgcagcttctacaataatactgcctgaaaatgagaaatgaccaacagggacacatgtgcacaaattcccaaccttttgcaggctcttttccaataacaatgatgtggaccaccaaacaaatttttgtattggagaagagaatcaggtatgtgctgttttcattacactttcagcgtttgac

SEQ ID NO: 93207 - DNA, 561 bp, Glycine max
  unsure (1)..(561): unsure at all n locations
  Clone ID: PAT_MRT3847_55180C.1
cccacgcgtccgcccacgcgtccgcaaaactcgctcgtggattgccccgttacgaaccaggctttgacgtggttagcgtctcaggtttcgattctttacggtgcggctaacggaaaggcttttgttcttaatttcgtgaaaaaatgcattctggttggtgcttcggttctgttgttgtttcctttaggggacaatgctgcttcaaagcaagagtcccaaaatttaggtacagagagtggagaccccaaagaagcgaaacctggtgctcagtgtggagaaaagaaaaattggatactgaatagaaagatttctgtgtcccaagttgcagcggcggttgcggcactgcacgaacgatctttgctttagcaaaaaattaagggattttgggtttctcagcagccaagtaactatcagcttcttgccgcgtattcttatttgtctgaaaaagcaaatgaagagcggacaaagcgtnctgattatagacctctaattgatcatgatagcattcatcttccgcaatcatccaaccaggaaacatcaagagaaaagacacgagaggag

SEQ ID NO: 93208 - DNA, 373 bp, Glycine max
  Clone ID: PAT_MRT3847_55181C.1
cagatccggcttgccaaccctgatttgatcccttgacaattaatgttatagctcaggggtccttaagggcccactgcgcttccccaagttaaagaaaagggcccttcttacaagctgtatttagaacgaaaatataatgggaacatgtttcatctgggaaacattggactggatatgatcgccatataaaatctttatctgattcaacattatataacgctgaatgcgaatacagtttcctcgactattctctgtcttgtacggagtgcatcctcataattatgctctgtctcggctgtttaaagatgcttatgaactttggaggatctcccctctttcatcgactctgggagtacaccccaagaaatttccc

SEQ ID NO: 93209 - DNA, 426 bp, Glycine max
  Clone ID: PAT_MRT3847_55182C.1
aattcggctcgagggttagcgtggttgatgagcttggaatccctgtaaaatttgtgggtgttggtgaaggtgttgaagaccttcaaccttttgatgcggaagcctttgtcaatgccatttttatgtaaaccaatattgtgggtttggtatgtacatcatgacttgtctttacattcctttcaaatttgagtttgaattcctttcaaacataattgaagttaaatgtcacccataaaatcctcccccaccactattttaattgtacaaatttggtccatttaacttaacagtctatatttaataaaaatgctgtcatggcagtgcaatagagtgtcacatccgcatttatgctaaatattagatgttaagttaacaaatggactaaaattgcacacttagagggattaaatttgtaaaatgaaaatg

SEQ ID NO: 93210 - DNA, 334 bp, Glycine max
  Clone ID: PAT_MRT3847_55183C.1
ctaagggaaaggaaaagtcaagtccttgcatttcattggatttaacatccagctcttaccacctagggcccattgcctgaattttacaacgggttatctgaaaatgagacactttgcccaaaaaaagtcagagcttccgtctagaaaaaaaggtttacacgtttaaatcccaatcagggtccgatggggagctcacctctatggggaaggcccccatcgtttaagtaaagactttcttcagccatgaactttgcccatggaattgcaaacaattttttttttcctacggcctttcccccagggaatacataattgcctttgtacctgctaacaa

SEQ ID NO: 93211 - DNA, 751 bp, Glycine max
  Clone ID: PAT_MRT3847_55184C.1
ggctcgaggtcgagtgtagctgatattgaatttaacactgtggatggttttcaaggtagagaggtggatataatactactttctactgtaagagcagctcattcaggcattactgcttctgaaataaactcaaactctattggatttgttgctgatgtaagacgaatgaatgttgccttgacaagggccaggttatcactttggattttgggtaactctagaactttacagactaaccagaactgggctgctcttgtgaaggatgctaaagaaagaaacttgatcatgaaggctaagatgccataccattcaatgttcaaaacagataaaaataagtcttatgctgaaaattctgataatcatgcaagacgattgaagcacaagaaggttaaggatactggtcagagtgtaacaaaaattttggttcacggcaaggatattgttgagaggaaaacgaaatgtgttgcctctgaagttagggacaggaagggtaatgtggatgagaatacttcttcagctttgggaaaatatactccatgtaaagaaaggaaatctgaagatgagcatatttccattacgaaggatatgggatatgaagttgaaaaatatgaaagcagaagctcctgcggtgacatgtttacaatgtcaggtcaacaggtttgtaatgggggaagagaaggcaaggataagttgaagatcagcatgggaaagacagcattgggtaaaagacaactaaaattcgaacattcaa

SEQ ID NO: 93212 - DNA, 299 bp, Glycine max
  Clone ID: PAT_MRT3847_55185C.1
ggtggtttagaggttggtttcgttaaattttaagtcgcacgcaaaacgatgatttttaactaattaattaagaattaacccataacctcccagttatggatttctctcccttaattagtccaacccgtttattttgcccccactattcctatttctaccaagaacatatctatacatatacactgaataatacatatatatatatatatatatatatatatattcattcaaaatacatcgtttccaaaaattccggatagaaatttccaggatgttacaatactcccacccttttagga

SEQ ID NO: 93213 - DNA, 482 bp, Glycine max
  Clone ID: PAT_MRT3847_55186C.1
ggcgaggattgcgagtggtagctctcagattgcttgcgacgcatgccaagtgccgcaatggtgccttatgggaacctgcatcacaatcactgctccaaatttctgccctccagactatgctctatctactgacaatgagagtggtggtactactactaaaccactctatgccatgtataatgctgactttgagaccatactcaaatacatggctggaattgtgccaactatctacataaaggggagattgcagaaaaactggaggcatcagatgaagactccatagggagagactattgtgacactagcgctgtatgcgcagcgcgtgaggagcaggcgctatttctagagtgtgaatctcacggtccaatgagtgcaactgggaacctacgtcaagaaagtggggatctaactggcagaacccaaactctgtcaatgatgacagcttgtgcttgaaaatactcctcaataatgggaggttt

SEQ ID NO: 93214 - DNA, 411 bp, Glycine max
  Clone ID: PAT_MRT3847_55187C.1
aattcggctcgagtacggctgcgagaagacgacagaagggcccacagcagcttcctccgccgccgtcaaagccgtttgagaagcgatgtcccttcttctcatgtgggcgcctggtattctattccatatctaaaacaaaaaggctttttttttttattgtgtccatttgctcgtttttggtggcaaatttaggacctaaaaggtggggaaactggtttttgattgaatggaaatggtaatttacctcatccattggggaccgaaatgtttccttcatcattgtgaaggtataattacttatattcgtaaaaagggattagtattggatcaatgggtggaaattgaaaatattgctctttttggtggggtgggtgggtgaaaaccataaaccattagcctcaaccaaccaaa

SEQ ID NO: 93215 - DNA, 384 bp, Glycine max
  unsure (1)..(384): unsure at all n locations
  Clone ID: PAT_MRT3847_55188C.1
aattctttttctcccattcttatattaagataagaaaaattccatgatgtggagctcattacctgcantatacatgggttaacccacccctatctataccttcaatacttactttgctcctcatttatccaacctcctccatgtctaaaacctaatctgagcctatgtatgaagaagctcgaacccttcactaaccttgataacatttaactaacattattcacgtaaaaaataagcacttaaaagagatagaagtgcgtttcccaccccctgccaactttcactattcttttctctaacacgaacaccacctcattcaaacttattatgaagagatacagaaaatacagtttactgccagggatcactttccaagatttttac

SEQ ID NO: 93216 - DNA, 511 bp, Glycine max
  Clone ID: PAT_MRT3847_55189C.1
tttgtttttttttttttttttctttttttttttttggtttttttttttttttttttttttttttttttttggggccccaaactttttattttttccccatttgggggcccccccttggattaaaaaaaaaaaaactttggggtggccaaaattatttggttaaaccaaaaaagaaccctttcccctttttaaaattccccgggggaggccctttgaacttccacaaatggcaaaagggcccttttgcttcaagacccatgggtttcattaaggattaactcgggtaaaaagcaacccccttttgtttttccttttttgaaacgagcattttttttggtgggggggtgcttcccccccccgggggcttttccaggttttgacttaaccaatgggctggcccctgggaaaaactaaactttttttttaaaaagggccctaccttttttttttcctcaggggatttttcccgggccccagggggcccgggggtttgttttttttttttttccac

SEQ ID NO: 93217 - DNA, 1089 bp, Glycine max
  unsure (1)..(1089): unsure at all n locations
  Clone ID: PAT_MRT3847_5518C.1
gaatgaaggcgggaaactgtggtgtgtaggccctgcggcagccgaaatgtctggttatggagtagtcacgaattcttttgaagagttggagccagcatatgcaacgggctacaagaagatcagaggcgataaattgtggtgtataggccctgtgtctcttattaacaaggatcatttagataaggctcaaagaggtacggcctcaatagatgtgtcgcaacacataaaatggcttgattgtcagaagccaggaactgtaatctatgcatgtcttggaagcctatgcaatttaacaacaccccagttgaaagagcttggtttagccttggaagcatcaaaaagacccttcatttgggttatcagggaaggaggtcattccgaagaattagaaaagtggattaaggaatatggatttgaggaaaggaccaatgctagaagccttctcattcggggatgggcgcctcaaatattaatattatctcaccctgctattggagggtttataacacactgtggttggaactctaccttagaagcaatatgtgccggggtgccaatgcttacgtggccactatttgcggatcagtttttgaatgaaagcctagtggtgcatgtactaaaagttggagtgaaggttggggtggaaattccgcttacatggggtaaggaagtggaaattggtgtgcaagtgaagaagaaagatgttgaaagggcaatagcaaagttgatggatgagacaagcgaaagtgaaaaaagaagaaaaagggtgagagagcttgctgagatggctaacagagccgtagagaaagggggatcctcttattctaatgtgaccttgcttatccaggatatcatgcagaaaaacaagagagatgtgtgataatctcatttgtcataaaccaatttgaagtaaaaggcaactcatttgtcataagtgtagtagattcgtgtgaatgttggggcagaagttccaatgaattggggagaggaagagaaaactggtgtgttggtgaagaaagaggacattaagagggcaatatgcatgctgatggatgatgatggagaanaaatcanagagagaagagaagg

SEQ ID NO: 93218 - DNA, 579 bp, Glycine max
  Clone ID: PAT_MRT3847_55190C.1
ccacgcgtccgtatgttgtgtgctgaaggccgccgcccaatggaagccattggagaattataattataacaaagaggagataaacaaggttgtatgcaactcaaagtcctcatttgttgctgcagcagacgataatggtgaagttaagataattgacattcgccagcaatgcctgtataaaacactacgagctggtcatacaagtgtatccttgctttttagctctgcttcactacatggatactaattgtgtaatcagaacttttatctcaacccactaatatttttatttccaccccttgccacccaattttttctcattattttgttctacaattagtaagtaatttgattttttgatagttgttcagcttatcttaatgttgtagatatgtagcactgtggaattccttccttggagatcttgggagggtacttaaatatagtcttgcttatttttcacatacgaatctctctgtctctcctccttgcagcgcaattcatggttttcaatgagaataagatatgattgttttgtctagagtagatatgtgtgagttgttagaatacccattgtct

SEQ ID NO: 93219 - DNA, 200 bp, Glycine max
  unsure (1)..(200): unsure at all n locations
  Clone ID: PAT_MRT3847_55191C.1
agcgtcgcccacgcgtccgtacggctgcgagaagacgacagaagggttctttcaattcaattgggtatatgagtttcagtttgtgtaaagcatttttaacaatgttcttaatgaattcggcctcgctcctagtataaaaatggtaagaacattaaaggaaagaatgtatcaccnaccagacccattgccataaccctccg

SEQ ID NO: 93220 - DNA, 382 bp, Glycine max
  Clone ID: PAT_MRT3847_55192C.1
ggagaaagaaccattaaaacactctttgggggtttaaaagattattacaaacccaatttgcttagttattctaacgcaatattcaaagtgatgacttcacccaaaagaaaatatctaaaactcaatctaactatgatctttactctcatttcaactttctttggttcctaatagccccttccttaaaatcctaatcctcatcaaaatcacaaggcaattcataatttttattttcacactttgagtttcactcttcaagctcatccaaatgaccatcaagttctttcctttagtaagaagcttctttttgtctccgaaaagtccacatatttgacttaaactttgattttcttttattatccaaaacttcctttgctttaaa

SEQ ID NO: 93221 - DNA, 869 bp, Glycine max
  Clone ID: PAT_MRT3847_55193C.1
gagtccactctagtaatatatctatatatcttcacgcaattctagtatggagtgccgcagcactcacgcaaaaataggtctttgtccaaaagattaggattggcatgtgcattttgaagatttaatttgtagtgttcctctactattctttctctggtttcttcctaccaagttgaagctagacatggagaaggaaatggaggctgctttagttcatgtggagacgacccagcaacacatgaatccacatgtactaaggcgcaagggtggcttcattaccatgcctttcattatagcaaatgaggcactagctaagctggctagtgttggacttatgccaaacatggtattgtatttgataggggattacaggctccgagtactgaaagcaaccaaaattatgttctattggtttgccgctaccaattttgctcctgtgattggtgcttttgtggctgatgcttatttgggtcgcttccttgccattggtttaggttcaattctcagtttcctgctttggatcttgattgtactaatcacgtgagtcaaatatgaccacccaaacaggaacgatgcgtggcacaacacttgacagtatttttatttaagttcaattatactttatctatcttcttttggtgctatgcataatcaattgtgcttttaatatttaggaaataatgttatccgttcaattcctcatttcctggtaccttcctttctccttagtccttaatttaactattcatatcctaatccttgtgattaattttttttattattaactcttgatcagtgttgacacatcgattctttgttaaaaaaggattctaaactagtaatatttacagctttggatcttgattgta

SEQ ID NO: 93222 - DNA, 372 bp, Glycine max
  Clone ID: PAT_MRT3847_55194C.1
ctaaaaagaaacgtgtatcgtttaatctggaatgttgaaataaaaaaacttaatatttttatagagaaatttttggggggcagaagggtaactcgaaaaaaacaaaacgcccacacaaaaaaacacgggggggggtatgaaaaaaaaaaaaagggccacattgtggccccaaaactctaggcccccggaaataaccaaggaaaaaacgaaacctgttgtgtgtacagactaaacaaaccttagaaaaaaaaaagggggggcgaaaactaaatacaaccgggcacccgggccaaaaacaacaccaggggaggtggagaaaaaaaaaaagcggggtgaaccgaaaggcgacccaaccccccggggggagaggga

SEQ ID NO: 93223 - DNA, 214 bp, Glycine max
  Clone ID: PAT_MRT3847_55195C.1
atttcagatctggagcatgagaatagtgttggcattgtttgcttttgcttggggggggcaattttcttatttataagcacatcgtccccctttatatagcgaaggaaacacagggtgtaaagacaaaagttttagctccccaaaattttaaaccgcctaggggagaccactggggggagaaaaatcctaatttttaaccccaaaagcccctttc

SEQ ID NO: 93224 - DNA, 1372 bp, Glycine max
  Clone ID: PAT_MRT3847_55196C.1
ttttaaccacatatatgggattacacatgctccactgtgctaactatgcagtggatagatggaattaagcttacagatgaaacaggtttgaataaagcttctttgaaccgaagggaactcattgaccagggattatactgctctttgaggcaaatgcttgaggttggttatttccatgccgatcctcatccaggaaaccttgttgcaataaatgatggatctcttgcatattttgactttggaatgatgggggatattccaaggcattaccggattgggcttattcaaatgattgtgcactttgttaatcgtgattctctgagcttggcaaatgactatctttctttgggatttattcctgaagggattgacacacattcagtttctgatgcgctgcaagcatcatttgctgatcggaccactgaatctcaagattttcagggaattatgaaccaactatatgatgtcatgtatgaatttaacttctcccttcctccagactatgctcttgtgataagagcattgggatcactagaaggcacagctaaagctctggatcctgattttaaagtcattcagagtgcatatccttttgtcattgggagacttattgcagacccaagccctgatatgagaagaattctgagggaacttctcattcgtaacaatggatccataaggtggaatcgtctagaacgcttggtagcagcaatctctgaacaagcttctgagataactggagaccctagttttgaaaagttttcaaggtcttctgtttggaaattatttgacatgcatgcaggtgttgattccactgaagatctttttttattcatattatcagccaagggtcttagagtgcgtcttttccttcttcgggatatagtagaagcagctgatgtgtttctgcaagatgaagtgattgattgcgcattaaatgagaatcctcaaggccagaggacattactatttgaggagcgtgctatccttggtagaattggaaaaggctttgaatacttttgtgaagtggtgaagttggctccaggggagtggacagcaatgcttattcggatggcagtgaagcccgaggttcataaatttgctttagacattatatcagctttagctttgcattctagtcccaaattacaggtagcttcttggctctatttgtcgagacttcttcacaaattgaaattgaggtagaaatatagccgttgacactagtgaattagatatgggttaatggtttcctctacatattcttatcatgaagattccattttttacatctcgaattttacatctttcagactttttcaaaggttcatgaagaaattttgatgttaaaaaaaaaaaaaaaaaacccccc

SEQ ID NO: 93225 - DNA, 124 bp, Glycine max
  Clone ID: PAT_MRT3847_55197C.1
gattattggattaacaaaaaaacctgacttgaatgattctgtattaagagctaaattggctaagggactgggtcattattattatggacaacctgcctggccaaactgatctttcatatattta

SEQ ID NO: 93226 - DNA, 1148 bp, Glycine max
  Clone ID: PAT_MRT3847_55198C.1
caaaaaaaaggttccaataacgccgtggtcgcttatactctgcttctaaaagaacaccgaagaaacccccaaattcgtagattgttcgttcgaacattctcaaaaccctaattccacccctgaaatcctcttccctccaatcagatctcaatctcatcatggctaataaagagttcaaagtcccgccggtggctttcccctccgccggcaaccccgcctcggcgggtccaaacctccagcagcggcgcatgcccacgccgccgttccagccgaactccggtatccccttcatgtccttcgacataggctccgccgcggcgtccacctcctcggggccgatctacaccggccccgccgtgggccccggcggctccgccaacttcgacgacgaggagcccctcctcgacgagctcgggatccaccccgaccaaatctggagcaaaatcagatccgttctgaaccctttccgcgtcaaccacactgtccacaaagattcggatctctcgggcccaattcttctctacatgtccttctgcctcttccaattactcgccgggaagatccaattcggcgtcatcttgggctggatcgtggtctcctccatcttcttatacgtcgtcttcaacatgctagccggtcgaaccggtaacctcgatctccacacctgcaccagcgtcgtcggttactgcctcttgccggtcgtcattttctctgccctctcgctcttcttaccggtcgatggggtcattcgcctctcggtcgcctcggttttcgtcttgtgggccaccagggcctccgccggactcgtcgtttcgctcgccgatggcggtgacgaacaccgtggactcattgcatacgcatctttcttgatttacactctgttttcgttgcttgtcatattctagggtttgtcgttggttctgggatttttggattggatcgctgttcttatggttttacttcttttccttcattttgaaccttgttatttttttggtgcaattatggtatagaaaatggagttattagtttgattcaatgtttctgtcaaaaaagttattccttgaaaaaatttttgttctgatattgaaaggtttttgtaaatcttctagcaattaacgtgtttttatgtgactgtgtggtgctag

SEQ ID NO: 93227 - DNA, 364 bp, Glycine max
  Clone ID: PAT_MRT3847_55199C.1
aagcaacgcatagtacgttcgccttgacgaagacaaaggacctaaggtgaagtggcctgcttgtggtcacgttcattggaggagtaatagatctaggacacagacaaatctaaaccgatagtattatggccaggctagagctttaaagcacgtactacaacataatggtcatgcatatgcgcaagctttttgagagtactgtaccgacaccgaacacatacttgacctactgtctgagttagctcatgcgctggtgctactataaagagagtaggtgttatagaatgagatccccattctggacacctaaaggtgaaaggccattccacaggtgcaatcgtttggctggcatattgaatgatga

SEQ ID NO: 93228 - DNA, 390 bp, Glycine max
  Clone ID: PAT_MRT3847_5519C.1
gggttgacgccctcactcgtcggcggggcgtcctgctcgagagattctaaactataaagtaattatcatttatggatacctaaagaaacacagggcacaggcatcacaaagtcatggcaccctgccaataaaccataacccgtaaattccagagggagctgcttgatcagtaggatacaggactaccagaatttctcaggtcaccacgaggtaagcacggtgttgtggaagctcatgctgtgctcgacaggtaggcgtacactacagaatacaccgccggacttacgcatcatgccgccaatatgcataaagctcaccaaagaatgggacagggctggagcgacgtggctgaagaacgtgggatgccaattggcagtcgtgatccacaca

SEQ ID NO: 93229 - DNA, 450 bp, Glycine max
  unsure (1)..(450): unsure at all n locations
  Clone ID: PAT_MRT3847_551C.1
aattcggcaccaggaagaagggaatatgctatcaaacaatatcaagaaattcctaataatcaaatcctagagatacttaaagtaagctttgatgcattggaagaagaagaaaaaagtgtttttcttgacattgcttgttgcttcaaaggatatgcattcatagaggttaaagatatacttgtgctcatcatggtgataacatngaaatatcatgttggcatgttagttgagaaatctctcataaaagttaagactgttacattgcatgacttgactgaggacatgggtaaaaaatttgtcactcaaggatcagcaagagagctgggaagcaaaggaagcttataantccaaagtttttggaagnaaacccaaaacacccgatgagaggaattggtgaacttgaaatcatatgtctttgattttctccataattttaccaaaaagaaatta

SEQ ID NO: 93230 - DNA, 974 bp, Glycine max
  unsure (1)..(974): unsure at all n locations
  Clone ID: PAT_MRT3847_55200C.1
cggtccggattcccgggtcgaccacgcgtccgcggacgcgtgggttttattattattattacattaccacctcgtaactcttccttgattagctccgagaaacacttttcaacaagaatggcttttcactttgttagatgtgcattgtttgcttcacttagccaaacaaattaagtagagtgttgtttgtcgtttgtccaatggagagaagttttgtgggttgacattgctataggacttgttgttttcagcaactgggtcgatgggttcgtaggatatgaacatcacttcaatgaaacagagttgtctttattagaggctcatgaagcttccttgtcctacgccgggaccgagaggaataatcttctgctggtaggactcacccttattcaaaatgctgctgctaaaggagcagtctgcttggacggaacattaacctggttatcatttgcatcggggatatggatcaggagcaaatagctggcttattaaggttgcagggtggtggatggtgtaataatattagaacatgtgtttatcgcaagaaaacccggcgtggatcatcagatttcatggaaaaggagataccttttactggaatattaagtaataaggctgaagaaaatccagattttttcaattggaatagagtaaagcttcgttattgtgatggcgcctcatttactggggatagtgaagatgagactgcagaactgcaattcagaggacagcgtatttgggcagctgcaatggaagatttgatgtcaaaaggaatgcgttttgccaatcaggttatagacatatataatgctatttcagtaatctttcatctcatgctatgtacatctcattttgcttcaggctcttttttcgggatgctctgcgggtggcctggctactattattcattgtgatgaatttcgtggnctctttccnnggaccaccanagtgaantgtcttantgatgctgggtt

SEQ ID NO: 93231 - DNA, 1103 bp, Glycine max
  Clone ID: PAT_MRT3847_55201C.1
ctgatctagggtttgtgactgtacatgctataaatataaattattgagcatcgaaggagtgtctctctttttcactcactctgcacccaccattactcagcactgccattcttcaatcacactaatggctgtcaccttctcagatcttcacaccgaagagggcatcaaatccctcgatcaattcctttctgggaaaacctatatctctggggatcaattgacaaaggatgatatcaaagtgtatgcagctgttgtggaaaagccaggagactcttttcctaatgctgctaagtggtacgatgccgtctcttctcaacttgctccaagcttccctgggcacgctcaaggggtaagattcagtggcgctgctgctccagctgaagctgcacctgccaaagcggctgccactgctgaagaagatgatgatgatcttgatctctttggtgatgagacagaggaggataagaaggcagcagaggaaagggaggctgctaaaaagcctgccaagaaaaaagagagtggcaagtcttctgtccttctcgatgttaagccttgggacgatgagaccgacatgaagaagctggaagaggctgtccgtagtattgagatgcctggtttattgtggggagcatccaaactagttccccgtgggatatggtatcaagaagttgcagatcatgatgactattgttgatgaccttgtatcagtggacactcttgttgaggaacgcttgacagttgagccatgcaacgagtatatccagagctgtgacattgttgcattcaacaaaatctaagttttcttgttgacttttgagtttggccattttcaagcggctgatcagtctgttactcttcctttaatcgttcatgtttggtctgtttcaatggtggttttcttgcaagaattgtgagaagtaaaaagagatattatagatatatcaagtatccatgttatggtggttttcttgaattagatatatgggattaaaataactgaacgatgtgcttccatttaaattttgataagtttctctaaacctctaaatttcattgaatgagcttcaggctatatagaaaaaaaccagtttggtttttgcctt

SEQ ID NO: 93232 - DNA, 331 bp, Glycine max
  unsure (1)..(331): unsure at all n locations
  Clone ID: PAT_MRT3847_55202C.1
caaactccttcctaattactcatttctaagcttacaccaaaacaaaaaaaaccgcgaacatcgtcttgttctnattactactatactcattcaaactgcaaatactggtaataccccaagacgacgcaatatcaaaatcctaaagtgaaccctaaggttatcatccccatcgagaaacactaacaatcatcatagatcgagaaggctcacctactccttctccctctccccctacatattgcccaccttcttcaccaaaaccactataggaagaagaatctctcctctcccgtctctataagagtaggagttcggtaacctatatatattc

SEQ ID NO: 93233 - DNA, 272 bp, Glycine max
  Clone ID: PAT_MRT3847_55203C.1
ggtgcctgtagggagcctgccgtcgctgccgcgtgcgtggctcggggttcggctcgggagtcgttcttctgatttgtgccgtgtttcccctgtgctctcgtcttccttgggcgcgtcgtcgccggcttcggagggctctcgtggcgtgacgttttccgacgaggaggtgcggctggcggtggggccccgtggaggcgggctggtcgggggagttccgggggcgcggcgccggtgtgccggggtggtgggggggggctggggtgggtgggtgt

SEQ ID NO: 93234 - DNA, 265 bp, Glycine max
  Clone ID: PAT_MRT3847_55204C.1
gtggtcgtccttttttttttttttttatttttgattttcttgagatcttttttatttgttgggcacaaacaaaccctttattgccattggagaaaattcgagtgcattccttttttttgggcaacatggaggtgggatattaccaatatattaccatttttgataacgaaaccatttgggtccaaattgctcagatggggtggtttaatttgctccatcgcgatggtcttgctaagggcaaccctcacaacttgtagatggggaa

SEQ ID NO: 93235 - DNA, 198 bp, Glycine max
  unsure (1)..(198): unsure at all n locations
  Clone ID: PAT_MRT3847_55205C.1
ctctatcgccctacaatccctctcttgttccatcacttctcagagagtgtaaaagagtgagcttttttttttttngnagttttnccttttngggatatatangccaangggggtntgaaaancacanngcnaaaaggtccagcttcnggntcattgctnaacccaattgagtnccaagggggctnggaaatcanaanc

SEQ ID NO: 93236 - DNA, 301 bp, Glycine max
  unsure (1)..(301): unsure at all n locations
  Clone ID: PAT_MRT3847_55206C.1
ttagcatgccatatttttctctgctaattgtaactgttacaccaataatattagtcattagacaatcaatcagacataantcagaccttgccgtctaatgtctaatattattggtgcaacagtcacaattagcatgccatatttttctctgcttaactttatcgtcacgcttcaatctgtgttatttgctaaattgtatattctaattgcagcagttaacaagaaagggttgagtttgaaggccaaactgggtataggtttaggtattggaatcccaagcatgttggcaattgggttgctg

SEQ ID NO: 93237 - DNA, 388 bp, Glycine max
  unsure (1)..(388): unsure at all n locations
  Clone ID: PAT_MRT3847_55207C.1
gtcataacggcggccgccctcctttttntttttggggggattttttgatatctttgcggtctttatacattacaaaaatacaggatagacaactcaaataccagaacagagccccccacccccccaaaaaaaatctattaaatatgaaacaagatcaggtccccccatctggaccagataaataaaagcacttatgtataatacagatatcatataaaaactgtcagagatttttcttatcctgccacaagttaaattatatatttgtttataggaaagcccattttctgtggaagagaaacggaatgagagatcttgaggtatgccatgattgccgtgcctactgcaaccttgttccaatcatcttgagctcaaatactcttgatta

SEQ ID NO: 93238 - DNA, 317 bp, Glycine max
  Clone ID: PAT_MRT3847_55208C.1
gatatcgagcaccaatatcgcttaggcaacgattacagatccagcgtcaaaaaaaaacaccagcaccaacaacttgaggctcgatgattgggttttgtgccgcacttacaacaagaaagggaagattgtgatagccaatggtgtttgggtggcggattcaaaaattgcccacgtatcagaagaaggggttcagtgtcaagacgagaccgagcctcagatcaagatgttcggccacgatgatttcaggtacctgcaattgttcatggacacatacgattcggggcccatgtttcacacagactccaactgctccgagc

SEQ ID NO: 93239 - DNA, 361 bp, Glycine max
  Clone ID: PAT_MRT3847_55209C.1
ttttcggttgatagccgcggcacggaagaaaggccgccttagggataaaattgcgaggcctgcgaacgcagcagacaaaaggagggatcgggcctcattgggacaagtgtttctaacaaacagcaacaggacacagcattctgatgcatgatagtggacaaaatcggaaccacattcccgggaattgaccgttccaataaaggtatgtgggcctaataataggaaagaaacgcggtgacacgtgcgggcaacccaaacttgaaggcacccgaaagtgcttatcgaccaatccaaacagtctacagccaccgatattatacaggcaattgcatcaagacaagcaaattgctggtgatactca

SEQ ID NO: 93240 - DNA, 673 bp, Glycine max
  Clone ID: PAT_MRT3847_5520C.1
ccacgcgtccgcgccctcagccgtcactctctctctccctcgtctgttccttcctcctcagtcttggtattgtgtctgcaacttacgagacagccctttttgtgattcgaatctcttttaagctttaacctcttcaattgttaccgttccatcacaaccccgtgcttaataagccatttcacccaaatccggatcttattagatcaataaattcagatctgtttcttttaatgtgaaaaaagccccaatccttttcattatttttggatatatttcttttttactttgtctattaaggcggttgtaagttgtaacagaatttggacgctgaaataagagttcccacaaatacaagaacacttcttcactgaacatattaaaaataaaaaaagaaacaccaacaccaaggcttttccttttatctctttttatttgttgttgttttctgtaagggaacaatgtcgaacgcgctgtcgtttacgctcccggctctcaacaaccctcagctaaacgctttgaatagccctaacaaggcgcgtctgcgccacggcctgagaaatccggttgttgcgtcgtgcatagagaggaaagaggttcttgggaccccggtgcggccaagtgggtcggacaggatctggttgctgcagtcgggtcgggtgccgaagctgagggt

SEQ ID NO: 93241 - DNA, 389 bp, Glycine max
  Clone ID: PAT_MRT3847_55210C.1
ctttagtttttttatgttatatttttttttttttttttttttttttttttttttttttttagggtttggttttttaacagggttgcaaccccccaatggaggcccaataaaaagcactatgccattttttatttgccttccaaggggggaaggaacccttataagccttagcccccccatggagataaatgggattgcctacatgggttttccatggattaattacataagcgtaccatgccttaacaggctgaaaaggatgtttagtcacaacccccccattttcttgattgtgcgatcccacaaaagagggttactcataagcaaatttttttgaaaaagttaaactgaattttatcagaatcggatgccgattttaattttgggtc

SEQ ID NO: 93242 - DNA, 168 bp, Glycine max
  Clone ID: PAT_MRT3847_55211C.1
gtgcgactccacgcctccgcgctacttgtgtctttgattagctgaggatcggaggatggaaaaaccagtcagcccctttcatggtagggcgcccagagccgcaactgagaaaaggttggacgatctctccttagaaggagatagcccagtagattggttcccatggca

SEQ ID NO: 93243 - DNA, 1449 bp, Glycine max
  Clone ID: PAT_MRT3847_55212C.1
agctggaattcacgcgaccggctcgaggttgggctgtgtccctatcatttgccttcttctcttcttcttcttcctccctccgcgcattctctttcttccttttaatctttcaatttcttttcccctttttctcttttctgactaactcaatcaatttagtgtggcttccgggaacaattcaggaatcatggctagggttttagctcagtctactggtatgcctggcctactgagtgggcgaaggcatgggccgcataaaggatcaggaaaaacgaaaagatctgttaaaatgatgagtaccttacgaattcctgctttaagaatgtcgagtttctctggattacggacacttaatcctttggattctgtgtcgagaccacgacacacttttccgttgactacaacttctaggcgcgagagggctaaaagatgtgtacctaaagctatgtttgagcgtttcacagagaaggcaatcaaagtaattatgctagcccaggaggaagcaagacgactggggcacaattttgttggaacagagcaaattctattgggtcttatcggcgaaggaactggtattgctgctaaggtgctaaagtcaatggggatcaacctcaaagatgcacgagtggaagtagaaaaaataattggaaggggtagtggatttgtggctgttgaaattccgtttactccccgggcaaagcgtgttttagaactttcactggaggaagctcgccaacttgaagaggaagaacaaaggatggagtggaggattgaataacctaccctattattatcacactgcatgttacagaaaagggagaataaatcatgacccataatgatgcggccagagttcttgaataggttggatgaaatgattgttttcaggcaactccaaaattggaggttaaggagatagcagccataatgctgaaggaggtgttccagagactgaaagctaaagagattgatctttcagtgacagaaagatttagggagagggtggttgacgaaggatataatcctagttatggggctaggcctttaagaagagccataatgcaacttttggaggatagcatggctgagaaaatgcttgctagagagattaaggagggtgactcagttatagttgattctgattctgagggtaatgtgattgtgctcaacggtagtagtggtgccccagattcactagaaaatgtcttagttagttgagttgtacttttttttttttcttcttcttttatttgtttaaaaaaacatagccatagtttgtttttagttgtcaatggacatcagtcaagcttttaactgaatgctggtggtctcagccccccataacataatgaacacagctgggtttgggtggaatgaaaaaatgacgttatttctgtgggtcctacccttaatatgctgcattatgaacaattttgattttctggaagc

SEQ ID NO: 93244 - DNA, 402 bp, Glycine max
  Clone ID: PAT_MRT3847_55213C.1
gagcgaaatcgatataatgggagaacactctgacataatactcctatctcctccattctatcagatgctcaagacagacacttttgaatgttctctgttctcttacatgtcgacgaatagttaccacacatttcatcacttcagggccgattatctcagtactctactctaaagtcactatcacattgttagtgttgataggatgatgccacagcgtgtactgatcataattactgaggctgtgtttctatcaccagctgtaacgtatattaagccacatcttggaaattctgtggatgtcatcgaacgcacaaaactcatcaattgctagtgaaaatgttagagatataggacatctccactcagagacgtgaactatgatacactaagctctactagctg

SEQ ID NO: 93245 - DNA, 297 bp, Glycine max
  Clone ID: PAT_MRT3847_55214C.1
aaaccaaaggggatctcagatgccaataacaaacaaaattgaaattggcaagccttttaacaacgggtccaaagtgggtttggtgcaaaacatgttgggtcctttaaacatgcctcctaaacaaaatttaatttcccagccaaaacattattgcttaaccctttttagagaccccaacagtttttcccctgggggcagttattttggggtgctgcccacggcccccaaggccccagttgtgccttaaaccacggggggttcgggccttctttaggctccctaaggcaccccggggct

SEQ ID NO: 93246 - DNA, 791 bp, Glycine max
  unsure (1)..(791): unsure at all n locations
  Clone ID: PAT_MRT3847_55215C.1
aattcggctcgagcgcacactcaccaacacatcatcgtgtcaaataccaacgaaagcaactactcacgcagtttcttcttcttcttcttctcctgcgcttcgtctcaatctcaagcgtcaattctccatcgccaatcctctctttctgctgatttcggactcgtcacttacttgtatcctctccttttccttgcttttcagctcaactattcgatactgtgtcgtttttaatttttattttctgtatctaatttatcgcgtcttccccttcttgttaattcggttgatgcttgatgattgtctcgaattgaattcgttgaaattccgcatgagatttatctcttacgcttctctatcaatctctgttttctaagtttcaaactaatcgcgtcttattctgattgttttacttggtgctttcttttgtatttaaaattgttaattggtcttcatgaattggattgtttttcggatagtcaggtattattactctctttcggcgaggtagagtaatcaccacgcacgcacgcacgatcgtgaatttgcgataactgaatgaattcttcactctcgtgcgtgtgtagcttgagtgtaaaattatggttttatattaattacttatctgaagggattttacatgtatatgctgatgaaggctaaatgatgcaaccattgtgtgtgtgtggcttaagtttaaattatgggcttatattaattaattatctgaaggggttttgcatgtatatgctgatgaaggtgaaatgatgctctcagcnngcataattactttt

SEQ ID NO: 93247 - DNA, 459 bp, Glycine max
  unsure (1)..(459): unsure at all n locations
  Clone ID: PAT_MRT3847_55216C.1
gattctaaagtatcaaagacaattgctatcttataattgatattttaagcgggagcatgggaccataccctccgttgctaagatctcttaatataaaaccccccttattttctgggatacacacgggggcggggggaaatccctccgggggggcgggaacaccaaaacagggngtttcatcgggccaacccacccaggagcgatggcaggagacactttcacttacccaaaatcatgaaaaaccaacactggcatcatcaaaaccccctaaactatggggcatgacaaggaggcacccaccaaaggaccataattgggtgcaatggatgcctcaaatggaggccacgcacaatttaggacgcctcccatgaccaacgcgaattccatcttgaagtacccagggacacgccaccttactccccaagaaaaatttatgagccggggtgggacaccattttc

SEQ ID NO: 93248 - DNA, 192 bp, Glycine max
  Clone ID: PAT_MRT3847_55217C.1
gtcctttttttttgaagcattattgaacagagcttaaacagttggtggaaggccatgtttgagatacaaaacagctctttttttatatacataatcatgtgccttttactataagaccaaaacctatgcatgatcatgactaccaagagaagaaccttttcaactagttaccaaagaagaaactaggtttag

SEQ ID NO: 93249 - DNA, 754 bp, Glycine max
  unsure (1)..(754): unsure at all n locations
  Clone ID: PAT_MRT3847_55218C.1
ctcccagggtacagaagagaaactccaagccttggaccttatagcccgtgtgtgctctgtacctgtaatgggcacagtgagacctgtgacccggagacaggtgtctgtgactgcagagacaatacagccggcccccactgtgagaaatgtagcgatgggtactatggggactcaaccctgggcacctcctctgactgccagccttgtccctgccccggtggctcaagttgtgccattgtcccaaagacaaaggaagtggtgtgcacgcactgtccgactggcactgccggcaagagatgtgaactctgtgatgacggctactttggagaccctctgggcagcaatgggcccgtgagactgtgccgcccgtgccagtgtaacgacaacatagaccccaacgcggttggcaactgcaaccgcctgacgggcgagtgcctgaagtgcatctataacacggctggtttctactgcgaccggtgcaaggaagggtttttcggaaatcccctggctcccaatccagccgacaaatgcaaagcctgcgcctgcaatccctacgggacagtgcagcaacagagcagctgtaacccggtgaccggacaatgccagtgtctgcctcatgtgtctggccgcgactgcggtacttgtgaccctggctactacaacctgcagagcgggcaaggctgcgagaggtgtgactgccatgctntgggttccaccaatgggcagtgtgacatccgcaccgggcagtgtgagt

SEQ ID NO: 93250 - DNA, 531 bp, Glycine max
  unsure (1)..(531): unsure at all n locations
  Clone ID: PAT_MRT3847_55219C.1
tttttcacagatagcgctggttctaatatgtttgaagtatcttcgaggaatatctatctttgggcgccacttatttcgaatttatgctgttcccttgagtttgactataatttggatctatgcgtcctttttaacagctggtggagcatataattacaaaggatgcaatccagatataccaagttcaaacattttgttggatgcatgtagaaaacatgcatataccatgaagcattgcaggactgatgtttccaatgcattgtctactgctgcatgggtcagaatgccataccctttacaggggggtatccctattttccattttaggacttccataatcatggtcatagtgtcactggttgcctctgtggattcagttggaacttatcgtgctacatctctgcaagttaattcgaggcctccaactnccggagttgtgagccgaggaattgctcttgagggtttctgtagtatattggctgggctttggggttcttggactggggcaacaaccttgacagaaacatgcca

SEQ ID NO: 93251 - DNA, 268 bp, Glycine max
  Clone ID: PAT_MRT3847_5521C.1
ctcgagccgaatcggctcgaggctaatcgcgacgtgagagatggggatggggtgtacgtgtatgagaacgacaagaagccctgcgggcggaaggttgttcttggtaacgaaaagcacgatcccggtgtggtaaaacactcttgtactttatacattcacacgtcatatccggcttgcaatgcttttgtctctagcctgtacttcctcttttcatcgcttggtgcaatggggaaaatagtggtctatagaaagacatgggtttctttgt

SEQ ID NO: 93252 - DNA, 292 bp, Glycine max
  Clone ID: PAT_MRT3847_55220C.1
cccacgcgtgcgctgtcacccgacctggtgcactgcatgctactttcatgaatatgcaccacggtgtcaaatctatgtaactatatctctctggaaaccgcgtctctgtacgttatacgatgaacattgctgacatctaaggagcagtcggtctctcaaggaaaaaagggaagagacatgaccacacccaccgttgtggcgaccatcctcgcaagaccttgcagattggaaggagtccggaaaattgagatttgtgatgctcgcatgacgttaccttatcacacatggcatg

SEQ ID NO: 93253 - DNA, 436 bp, Glycine max
  Clone ID: PAT_MRT3847_55221C.1
ggaattagtttttcacattctatatagttagtcttgttgaacttagtaaatagataagtaaaattagactcttaatgtaaatattatttcattttatgatggtcttataattgattggaatactacttaattatactccatagtaaaattctttatttttataaaagaaataaaaactatggatttccataaatttgatttcatatagtcttaagtcataacatgtataggtttgctttgatcaagttatttaagtaataataaaaattaacaaaatgaatcgaatctgatttgactaagaaccggatatttaacctgttatggtttaatctcatgattacattcactataagatcactttgaatcaattaaaagcaatcaaaattcggttggacagatattcgttgaaccaattcattattaatttgcaaaaaaa

SEQ ID NO: 93254 - DNA, 457 bp, Glycine max
  Clone ID: PAT_MRT3847_55222C.1
aaaccggggagggcccttaaaccccaaaaggctactttagaaaaaaccgttttttttgggggggagggtaattttcccgggggggggggaagcccgccaaaagggccacaaccaattaaggaacaattaattattcggggcacaaccccccaaacccccttctttaaaaggactttcaggaaggtcaagagtgggaaaacaataaaagcaaggaaggttgtggtttgggacaagcaaaaaataaacgttggtgggccaaaaagggtcctggggcaggttacttacagtacgccggaaaaaatttaaaaatccccgggaaagacttttttgggggcacaaatgatacagaagaacataaaaaggcgtacccccgcgaaaaaggggaacaaaatttgaagaaaccgcaccgcaaaaagcctagaaaagacccaggggccaaaatcctcaaaggccgggg

SEQ ID NO: 93255 - DNA, 728 bp, Glycine max
  unsure (1)..(728): unsure at all n locations
  Clone ID: PAT_MRT3847_55223C.1
gagaccgttgagttgagtttgagtcccttcgcattcaattattcattcacagtttttcatcttccgaaacctaaaatgccaaagcgtgggggaaccaagaaaaccgcgaaagcaaccgaatcagtaaccgaacctcaatctcaaacgcccacgcgtccggtccaattgaacttcggtgcagcgatgcagcgacaaatcgacgcgatcagggcggttcgcgacgtcgagatcgagcacctgctcacggagctgcggttcctgcgctcgcggttcgacggcgaggagctccggaagcccgtgctgcatgttttcgaagaaaccctaccgaatctcgccgtcgtcgtgaacggcgagtgcaacaagaatctggaagtgaaatggagagagacggaagggtgtaacgatggtgtgaatttgcacgcttctttgctccaaaggctgtccatcgcttccatccctcgcttccctgggtttgaatattctaccaatgaaggtagtttttgttgcaaaatgtgaagtgtgtttgtttataattgacagttgccaataggtgcttctttgatggcagggagaatgagctttattggtgctgatgacctgcatttcaaggacattgtatgtttgttgtcttttcagttttcagtttttattagttattagttatatcttagntattctcatacacctagggtctttcgaatgatgaggcactgctgaaaatgttacgc

SEQ ID NO: 93256 - DNA, 298 bp, Glycine max
  Clone ID: PAT_MRT3847_55224C.1
gattttactgatatcctgagcttctattgagctcactcaactcgtacaacgaaaccctcttcaacttgtactatcagtgacgagcatcattgtctcaacagcaatgttagtggtggctatgtgtgtgcttccggcgatgggtgtggacagtcgcctagcatggaaccctttttgcgttaatggtcatatctactgtgacacttgccgtgctggttttgagaccacatctaccagctacattgctggtgctgagattattttgcaatgcaagaacagggttagcaactaagttgtgtac

SEQ ID NO: 93257 - DNA, 365 bp, Glycine max
  unsure (1)..(365): unsure at all n locations
  Clone ID: PAT_MRT3847_55225C.1
gaaggtgcaagagtttgttgtgagctataagctaggggatcgtgaggagaatatgaaggtgcttgatttctttggtgctgcagtagttttggtagcatgggcatgccatggcgcaagcttccaaagggttccttttcgaatgaaaactggctattgggaaccgtcttcggagggtaaatgcgccaggtttaagcttggctgggaaacacacaacattcgagcctttaaaaccatttcttgagagtgcgttgaccaaccaaagactacatttatgggcgacaatntagatcagactctaaaacagttaccaacaagctttcttttatgctagtgaacgcgaagttcattacaacgacatatttata

SEQ ID NO: 93258 - DNA, 578 bp, Glycine max
  unsure (1)..(578): unsure at all n locations
  Clone ID: PAT_MRT3847_55226C.1
atttgcttaattattaaataaaaagattttgaagtttttattctgatctttcctagtgaaaatagttcatcctcagactcaaacttcttgatttcacatgaaattcggttttaacttttcctttgtctttaatagtagtatacttattttatatcgtttgtggattttcattaaattacaaaatttcagtttatgaactagtaggagaccggacctgagaagatgtaccatagttaagcaaaagaccactaaacgacaaagaaaaaaacaaaaggactaaactctataggttcactttagtgtttgattgttatttttctttcaatttattcgttcaatttggggtatataggttaaaaaggtgatgctaaggacaacatcaattcttcccacaacgtggattcctccttcgcgtgaaccacatcgcaatctatctaacgtgtgcttaaccttttaccatcaccatcatcataagtccctaggtctatattacaaaacctccttaacaatttttatgatgtaataatatgtaccttagtaaaatttgggtttcttngntgtgtattttgtagtttacg

SEQ ID NO: 93259 - DNA, 136 bp, Glycine max
  Clone ID: PAT_MRT3847_55227C.1
gatccaaagaaacacggttaatttattaggagtgggtgggatgaatcatttcgcttcatacccaaccaaagaggaatcacaaacacttgtgtctgctcgcgttataggtcattgtacagctggtcactctcctctt

SEQ ID NO: 93260 - DNA, 514 bp, Glycine max
  Clone ID: PAT_MRT3847_55228C.1
ttccaggaaggtttcccgtcatcactgtatgacgtcctccttctttggggggggggggggggggggggggggggggggggggggggggaaagaaaagccaaccaccataaatatgtttgtaaggctgttgggaggggggagggagttaaaagaaaagtgttataataaatacctttagcgcaaaggcagtgtagagcaggcctatagcgtccgtagccatgggatattaatcctacaaaccgcgatgacaacctacgagcaacctacgaatgttaggtggaaaattgaaacccttgtagtggcagtaaagggtcaccttagccccccacgaggtaaggtaagcctagatcagtttatataagttacccgttacccctaaacctaaaattggtgtaaatggaagccccccccgtttaggccctggggaagaagccaaattgattccgagagagtattagaaaggaggaaggataataatccccgaaagagcgaaaggataacagtgagtgaagtg

SEQ ID NO: 93261 - DNA, 353 bp, Glycine max
  Clone ID: PAT_MRT3847_55229C.1
tcggtcacgctctccgatcttatcctgactgtaaactactcgaacatatagagcctgctggaccttacatgccatactgtatccaccatgatcaatgggaaaactcccgtggaaatatctatgacctataacatatagaactgacttcacccttgaggacagcacatgaattttcccgacgaaaatcactgttctttctaatgattgaagtgatctcataagatatgagtcaagcatctgccatgtggatttatgctatgcttgatggcttatcaaagatgttacttgaagatcagcctattctatatactcgcttgttttatatccaagactatatctgatagcgaaaacaa

SEQ ID NO: 93262 - DNA, 252 bp, Glycine max
  unsure (1)..(252): unsure at all n locations
  Clone ID: PAT_MRT3847_5522C.1
ttcattaaaacgcttgggctttaggntcctgcgctgataatatatgtaccaggtctcactttgaatttccatccgtagacctctgctaagagctggaaagccttcactgtgatacaatcggaggaggaaacagaggagctggatgaaaatatagaggaactggaaatggttaaacaacgaagtaatatacgacccaaagataccccagcgaacgaagaagagaattcaggggggcaataatggagcaagcaa

SEQ ID NO: 93263 - DNA, 1041 bp, Glycine max
  Clone ID: PAT_MRT3847_55230C.1
ttttggaaaaactttcattgaatcatttacactcatgctaaattattttttggcatggataacaaatcacactgggacatcagacacagtacaagaactctcatgtaatacactaattcccagacaacaaatcctaaatttgaccttgctccctattccaaacccaataaacaatatacataagcaccacccaaaactataatacaagcatataactttttctctcactatgaatatacaacatattattacaacatttctggcctagaaaaagaacttgccgatttgaccaattaattcgtgtgatatgtataagtatgaagtatcatatatataaattcaccatctttcatctcctatccagttatttttctcttttggccctgtaggaccttcctcaccatacagctctaccggaagctttttaatcaagctaccaaatgaattgcgaagcccgccaggaagagcatttattatcttatcaagctcagttttagaatcataaacaatttttggaccccactctctcataaactgcaaccattgaggctctctgacaacatctcctagatactcggctgcaacaagctcgtattgaacgctagaatccacatacaaattactacgagtagcatcattcctaatgccaatcccaagttttgaagatccttggagatatgttccagggtgggggtaacttgcatgtccattttttgatgagtagacaacagctttattgccatcaatatactccaattcataggcatccacccattttccaccactgtgctgtgagaaatatatactccacaattctccggagaagttgcatatacgaagtgtaaaatgctcccagtcaccaacatgctctccaaccttactaaaagccctacttgtaattccaattttcagagtggagggtccattgaaagggcaaaacacccacatagcaacatcagtaaaagcggctcgagctcgagccggcttcacatgaacataaagcttagcactcttcaagtccccagcttgaattcaagcgct

SEQ ID NO: 93264 - DNA, 319 bp, Glycine max
  unsure (1)..(319): unsure at all n locations
  Clone ID: PAT_MRT3847_55231C.1
tacggctgcgagaagacgacagaagggggcgcaggtacatagagcgagagaacaagaacatacgggaaccacagcggcggttgcagaagatcaagccgagaatgggtagagtgagatctaagacggtgatgaaatgctattagtaggtgataaagcttcactactagagcatgaccatggacttgcacacgatcaagatgcttctggaggaagtggtgatgatcccgatcaagaggctatggaacaagatcgtgaagttcttgacgcacgtgattaagcgcatgctgtaggtccctgtgcgcganatctacctcaagct

SEQ ID NO: 93265 - DNA, 527 bp, Glycine max
  Clone ID: PAT_MRT3847_55232C.1
tgaagctatcgccttggttcagacttgttgtggacaatttcttgttcaaatggtgggaccatcttgagcgaggagctcttggggaggtcactgacatgaagaccattcacaagttgacataaaactcagaggaccttcctgcatccatgtaatgaagaagggtagctgtattccgacccaataagaacgaaactgaacctattttgagaagaattttcggagcagtagccccataggatattgttgatctttttgttatttgatgatagctagaacaataaacgtatggctgtttaaattagaagaattttttgttgaaaatttcggattctgggatgcaggcaagtttatcagaataagatgttagagatttgaatcaataaaatcaaaaaagcgatgtttgttagtggatttttatttagtactaaagaaaaaataattagggatcgtttgtctccaaaacataggatcatcgtatcccgtgatcacgtgtgaaggtacagaaatatagatcctcttttcccagc

SEQ ID NO: 93266 - DNA, 472 bp, Glycine max
  Clone ID: PAT_MRT3847_55233C.1
ctacacatcttcttttttttttgtttacttccccagccttttcggcgatccatcactggcaaatatcttacacactccaataacgtacgtgtcgcgccgacggatactctgcataacaccaccttccaagggtgccatctttaataactcataaccctagttataaatatgcccttaatagaagtggtggaacgggtaaataaggacacagaccatgaagtgagtaatggatcattatggtaagaggctgagcacagtttcatgagagcacataatgaagatgaatggagtcagtatcacctgcgatcatgagctatgatcttggacgtgatgaacaaggtatatctatctagcgatgtgatcgaacgctagagtgggttctatctttgcaggggatggctatggcgaacgtgtcacagaggaggaagctggtgacgaaaatgaatggacgcaatctgatgatgtgagatga

SEQ ID NO: 93267 - DNA, 315 bp, Glycine max
  Clone ID: PAT_MRT3847_55234C.1
atgactcctgggcggacgctggggaactctatcatggatatatgcacaccgagcttgctgccctgctttctctctatcgcgcacccaagaagataaagaatgaaaatcccccttatgtgagagatggtttcatttgttttgcacacccttcctgaaatatagagacaagtcgcaaaagttaatacatacccaaaattcctctctctgaaatatcttgaggggcttatgctggctctggcgattgtgctagtaccctttgatacttcaccttcatagccagaagatatgtacaaagcatatatgactgtatataaa

SEQ ID NO: 93268 - DNA, 867 bp, Glycine max
  unsure (1)..(867): unsure at all n locations
  Clone ID: PAT_MRT3847_55235C.1
nttgcataaagcgtgggagttcttccttcccctagactgccctgaccacaaccacttcctcaactctttatcccttctccttcaccaagcttgccgctccaccttccatctttctctcatccatgatcaccaccttgattttgaattcttgcctactgaatccccttcccaggcctcctggattgcacacatgatggaggcccagtcccaacacattaaaggcgtgtgcttgtccttggaagaagaacccaaagaggagttcaaagtcaccacaacccactactgcaactgggacagtactgccaccagtacttatcaggcacatgaccaggtcgtgtttggggaagaatctcacactcacacatttggtgggaagcgtggcagaaaaccaggcgagaagagacgaaccaaggccgagaagactatcagcttgccagttctaagacagtactttgcaggaagcctaaaagatgcggcaaagagcattggcgtgtgtcccacgactctgaaaaggatatgcagacagcacggcataacgaggtggccttcaaggaaaatcaagaaggtgggccactctttgaagaaacttcaacttgtaatcgattcagtgcagggtgccgagggtgccatacagatcggctccttctaaacagttttccggagttgagttctcaatcatccaagtccaacaacaacaacaactcatcctctcctacagcagcagcagcagcagcacaaagccctcaacaaccccttgagagtgaaagctactttttgcggatgaaaaaatccgttttagcttgccacccacattgggggttcacagaattgcagctggaaatccccaggcgcttccacctaaacgat

SEQ ID NO: 93269 - DNA, 212 bp, Glycine max
  Clone ID: PAT_MRT3847_55236C.1
aattcggcaccaggatccactttcccccacaaaagtgttgctaaacttcctttgttcgatagcattttacaagtaataatgcatagttattgataataacaattcacttttattatattttgaggcacatttaagagttaaatttaataaatctaaaaaagtaatagcaattctcagagatatagtgagcaatgagagtaaaaaaaaaaaaa

SEQ ID NO: 93270 - DNA, 108 bp, Glycine max
  Clone ID: PAT_MRT3847_55237C.1
ttggaatcaaaccaatcttcattggaatggcctggtttggccaataaattactgagtaagggcaccgattttttgggttgcaatattcctagtttggagggttggata

SEQ ID NO: 93271 - DNA, 242 bp, Glycine max
  Clone ID: PAT_MRT3847_55238C.1
tgaaaaacaatggatggcttgtgttatatttatgatgatgagtagtattatataataatttatgggagcagaaagacaagacaaaacaagagagaatgagtggcggaggaggaggagaagaggaagcaactctggagttcactcacgacgtggaattgtggtacgccgtttgcacagtcatcgtcgccatatctctcggagctgagcgccaccttcagtatggcggacagtttctaaagcca

SEQ ID NO: 93272 - DNA, 325 bp, Glycine max
  Clone ID: PAT_MRT3847_55239C.1
ggttggggttcacttcaaactctatgaccctagaagcagattaatttctattagactattctgttcatttaaataaagccccaacctcacgcacagtctcttagttctctctaggagcatttgaattggttcctagatggtgtttaccttgtttctgtcttggccatactgacaacatgggtcgttaggcttataacctggctttcaaagcaaggagtggtaggagtggcagtcgacagattggaaggaggctgagggtgagcagagactatgcggtgcaagacattaaatttggtgtggaggctccggctttgatgcttaaggg

SEQ ID NO: 93273 - DNA, 297 bp, Glycine max
  Clone ID: PAT_MRT3847_5523C.1
cggacgcgtgggttttcatcagggcacaggctcttactggctgtttaagcgaccataattctctctctttcttggagcctccttgccagaagatccttcggcccacgatgctttgctatgaccatcggcatcagtgtacgaggggcaccctggcttgctttgagaccagatcatgcttgctaacctaaaggcaggctcgcagcatgaccctagaacccatgttagatgataaacctgaaccatgaccaacgtggcgttggtcttcggtggacccacgatcaaggactgcgtgaacta

SEQ ID NO: 93274 - DNA, 310 bp, Glycine max
  unsure (1)..(310): unsure at all n locations
  Clone ID: PAT_MRT3847_55240C.1
nnnnnnnanannaanaaaatatcttttttttattttttttttttttttttttttttttttttgggtttttaccaggggggaaggggtttccaatataccaagaaaaaacgttttttttcctccatacataaatcccccatggggccttttttgcccccaaccacaaataaaagcttatttttgaaatacaatgaacagttttaacccaaaatacaattcctttttttacatttttccccttaaaaaactttttttttttatacacctttttaatcaaatttttgggactattttaaaaccacaaaacctt

SEQ ID NO: 93275 - DNA, 431 bp, Glycine max
  Clone ID: PAT_MRT3847_55241C.1
accagcataagagctgtttattgcacccaactattatcatcatcggaaacaactgtaaacttgaatatatggcacacaatatgacaggaacggtataataatacggctcctatgtactaccgtggagcaacatcatgcatagctgtctatcacatctaaagagttgatacatgggttccatccctaaaatgggtccatgaattgccaacacatggcatttataaatcagtgatggcattacaggcgaacaaatcatatttggagccaaagagacaggttgaaactcaggtatgacagcactttgctcaagcagaatggaatgttctacatggaagacatctgctaagactgcagaagacatcaatgatcttttctatgaaatagcaaatagactagctagagctctaccaccaaagcctactgggatgaat

SEQ ID NO: 93276 - DNA, 251 bp, Glycine max
  Clone ID: PAT_MRT3847_55242C.1
gggctacatcaagagatgccctcgcataatatgcttaggagctgacgatatgaaggcaattctgaacaatggaccaattgacgtacatgtatagtgagtatgtttagaggttgaggaatacattgtaatatttaagacttgtgcgaaataagtataaggtacacaattccgtacaacgtacggattcaaagcgtacagtggataccatcatttacgtaacttgttaccacactgtcgtgtattctgttgag

SEQ ID NO: 93277 - DNA, 368 bp, Glycine max
  Clone ID: PAT_MRT3847_55243C.1
ggctcgagcgagcactccactttaaaccactacctttttttaacccacctcgcccccgaaattaactggtaattttccatcagcgggggcacttacaacaacaccgacatgtctacaccttctatcgaagcacccctgcatctacaccgtcaagaacctcctttcgctgcacgtactcctgcactactgcggacccaagaagcttcaccagatcatcaacggtaccaacatcaccatcacaatgtaccaagccacccacaccacccccggatccgccggctgggtgaacatcaccgaccttcactagtggaaaagtgccatttggccctgaaaacaaccacggtacactctacctaacgttcgctaaa

SEQ ID NO: 93278 - DNA, 487 bp, Glycine max
  Clone ID: PAT_MRT3847_55244C.1
ggtttttgttttatgaagactatctccatacactctatcacaacctgttttagccgcaccatgcgaaagggccaactacaggcaagggctctgccatacgaggccattttgaactgtgcgcactctatacgtgatactgccaatgccgtaaatactcacccacggatgcctggctatctctctcagggtctaacatactataaacacccatttggacgtatgtcaaattggacgactaatcatacattttataggcgaggcatatcagcatgccaaagaagacagcctatagagatctcaccaaaggacaagacattaggacatgagggaatcttgcataccctggctcaactgcacttcataaggattttctagacaaaaaagaatcaatatagaggaagctacgccttcactgaatgctcatttaggtcgggttaaaagacacaaatgctccctttgcacaagcgctgaagatggcgataatgac

SEQ ID NO: 93279 - DNA, 311 bp, Glycine max
  Clone ID: PAT_MRT3847_55245C.1
cgcatgcggccgaccacgcgtactgttttgataaggctggaggataggtgagtggacgttaaaactcggaacaaaagcactggttacttgagtcgaaggatgcctcgacgtctttctactttacagtgaacgaaaaacggaggggaagactatgaatttgtgcgttggtcagaggccacgaggagaagaacatgaacgatcttgaggatatacgctgctcagtctagtagtgggcctccgactccccggacgatgtaaacttccgaggtctgttttttagttcgctgcctaagtctaagactcagctgtgt

SEQ ID NO: 93280 - DNA, 1132 bp, Glycine max
  Clone ID: PAT_MRT3847_55246C.1
cccagtcctatggaagtctatagctaaaccagctttgaggatatcacaagctgaagaaccattgaattttaactaaccaaactaataagcaaaaatgttggcggtgtttgcaaaagccattggaaaaccaccggaggaactgaggcttccggcaatggggtccaataattcaaagaccccagaagaaattgtacagaaatttcaatctttgtggccagattctgcagtttacaaccttccacatgggaattttatggctctgtctcatgaagatgaaagtccaatacaccccaggtgtattgttgttttggatgatatcttctgcatttttatgggagctctagcaaacatagctgagcttagacatcattatgggctcccaagacaagcaacagaagccatgattgtgattgaagcctataaggccctaagagatcgcgctccctacccacctgaccaagttgctaaacatcttgatggaaaatttgcattcatcatctttgatgccaagacatatactctttttatagccagggatcgtgaaggaagtgtgaaatttcaatggggaatggcaagagatggatccttagtctgttctgatgaccctacaatcatcagagagggatgtggacaagcttgtgcagcttttcctccggggtgcattttcatcaatggaagtgggttgacaagctttgatcatccactgcacaaggttcaagctgttgcgcatgaagatgacagtggaaacatcttgagtgtatattttcaggtggatttgtacacaaagattcccagcattcctcgcactggaagtgctgctaattgggctgatgcagttgctgaagtcaagggagaataattgatcactactaaaaaagtatgatcaaattcaaacttggtgtaaaaataactaaaaatgtcctagtaattctgtttgtagatgcatgtctaatgaagggaagaagtgagcactccccatttcatccccaagtaataaggttcagagttcaggcactgcaaaaaccttgtacttgaagttgtttggtagaaatgtatgttacttctatgttaaaaaggactttttcagcagaatcattcttgttgtaactttataagcaatactcgtttcttt

SEQ ID NO: 93281 - DNA, 419 bp, Glycine max
  Clone ID: PAT_MRT3847_55247C.1
agtcagttcaaattcattacaaaaccaaagatgaaaaaaaaaaaagggccctttttgtaaaaaaaaaaaaaaacttggggggttttacctcagttttcaacttttgggatgggagttttagcccccagtcttttaaaattaaatctgaatctgaattttatgattgcccagttttattttggttgatacaagccggggccttaaactccgggcatttgcatgttgttggaccctcaatggggatcaccctttcaggggatggctccattggaaacaaagggttgttcccaacagcttgattgcccccagggttcattttagtcaatggggcacttttagctttacacctttctttggcagggccctatttttggaggggcaaatgcttaagggcaacttctttagcttcacccttcctt

SEQ ID NO: 93282 - DNA, 462 bp, Glycine max
  Clone ID: PAT_MRT3847_55248C.1
ggaaaacatatattttaatggaaagagagatactgacgaagacggtgagaaatagagatgcttctttctcatcctatctcagaccagataacaaggcaacaccaattactactgctgcacctattgaagatgccactactgagcttagcatattcgatgctcgcaaatacttcaatgatgatgacagcagcaacaacaacaacaacaatgctaacaatattcaaaaggttagcatcagcagagtctctcccatggagagaattccagagaggggtgatgccatcatcacagaagccaccagatactcctctgcttcatcttctgtggacagctatgcccacattagaaactacagagggcgttccttccacacggtaaccccaacggcttcctcagaagccagctggaacagccaaacagggttgctatctcaccctccaggggcaatccctgtctcaatgc

SEQ ID NO: 93283 - DNA, 286 bp, Glycine max
  Clone ID: PAT_MRT3847_55249C.1
gggtcacgagctactgtcggtggcgccttctcctttttttttttttgttttccaaaggatccattgcaccgagatgagggcttggcgcttcttgcacccaccttcaaaactgtgtctttgaactccacaatctattgttattataaccctgtacatcttaatcactcttgaactttttacagtgattctgtttaccaaacaaccacattggagccctggaacaactcagttttgctctaacatgaaaattctagctgttttgaggacaactcccttatattttaaa

SEQ ID NO: 93284 - DNA, 552 bp, Glycine max
  Clone ID: PAT_MRT3847_5524C.1
cgaagctcggaattcggctcttgtggcggtattaacattgatggcatttccactaagccttcttggaggaacttcagttacgctgaccttgccgttgccacggacgatttcagccctgagaacttgcttggaaaaggtggtcatgctgaagtctacaaaggatacttagcagatggtcaagttgtagcagtaaagaggataatgaggaatgaaaaagaagccgaggacagagctggtgatttcttgacagaacttggaatcattgctcacattaaccaccccaatgcaacacgcttgattgggtttgggatcgacaatggtctctactttgttctacaattggccccacatggcagcctttcctctttgctctttggttctgaatgtttggagtggaagataaggtttaaagtagctgttggggttgcaaaaggattgcagtatctccaccacgattgcccaagaagaatcattcacagagacatcaaagcctcaaacattttactcaacgaaaataatgaagctgagatttcagattttggtttggcaaag

SEQ ID NO: 93285 - DNA, 882 bp, Glycine max
  Clone ID: PAT_MRT3847_55250C.1
gcagtcttgccattctttatgttgcagcgcatccggtacgtgcaacgaaggaagagattatccagttgagtgctgtgtatattagtcccctaaaggtattggggaaagtttgtttccagcagaatgtgtattaactattatgaatttgagttctctcatttcagctgatgacatgatcaggtagacacaatgtcctatattagaagtcacatttattgcacaaggtcccaaacctattgtgtataactgtatctctttaaatgacaaggtcatggaggctagaatgagaatatatccaaatccgtgtatattgttggtgctgtaattttagtatagaaaatataagtgccatgttcgataaatctcacagaaaacagaatcagcagctttgagtcactttatgtggtgaataatgaataaattgggttttaactgttgcaaagtagcaccagattgacctcttctgtttttagtgctgtgtatatttgatatgaacccatcaatattcctcccctaaccataatgggaacagtttgtttccagcagaatgtgtattaactattgagaatttgagacctcatttcagttgatgacatgaccaggtagacacaatgtcctatattaggagtcacatttattgcacaatgtctcagacctattgtgcataaatgtatctctttaaatgacaaggccatggaggctagaatgagaatattcaaatctgtgtatattgttggttctgtaatttcggtattgcaaaatataagtgcctcgctgaatagatctcactgaaaacagaataggcagctttaaggcacttcatatgtggtgaatgaataaacacaattggaagtagaataacataattgacccttgggggtt

SEQ ID NO: 93286 - DNA, 237 bp, Glycine max
  unsure (1)..(237): unsure at all n locations
  Clone ID: PAT_MRT3847_55251C.1
tggattggtctcacggaaattactttcaaggactgccttgttgctgccacctaacggacggtacaaacgtaaggtnggattacgcatgaatgtatcaatcgtttgccaaccacgatcagtaaatacaatgtgcttcggtatatacaccttcgcacctgtacctttctcttgccagaagatcgtatcagaatgctgacctgctacagtcaatcgccactcatgtacttgaccaatcca

SEQ ID NO: 93287 - DNA, 291 bp, Glycine max
  Clone ID: PAT_MRT3847_55252C.1
cttaaatctagctgtacatacttaaaattttcatactcttaaaccaacaacagcaaactgtcaaaataaaaccatataaagaccaatacacaaaaaaccaaccaaataacaccctcttcaccaccaaagcatcgtccaactccaagcctcaacatcaattcatctttcaaggacaaggcagtttcctcactcacatcaccttttctgacaacatctatcacccttacagaattcgctcatgctgctatatctgagatctaccctttcctaaagaactttctactcagcatc

SEQ ID NO: 93288 - DNA, 284 bp, Glycine max
  Clone ID: PAT_MRT3847_55253C.1
acgcacacgcgtaagaacggctgtaagaggactacatatgggggttaagaacagtgcacaagcctcgtggttgtgttgttcctctgactagacttcaacatcgtgtccttctcggagccttatatcaccaaaacctattcactactctttcatctttttcctattctattgatactccctgcgatcacaaatctgtacgatgttcttcgttagctaggccgccaaatcgcacgagaagaacccacttcttaaaaccaaaacaacaagctgtgaactgcactgca

SEQ ID NO: 93289 - DNA, 469 bp, Glycine max
  Clone ID: PAT_MRT3847_55254C.1
atctaactatgcaatagattacacgataataatacaatgatcccatttgaaatgaactgatctaaagccgaacttgctactcattaacttacattaacccgatcgaaaccttagcgaggccatctcacaattggccctccatgatgcaacccttgcgctgctattgctactgctatcagacaatgaaacaagcgctttctgcaacacccctgatggagattcagcttatgtactggcggctggcaacgatgtgtaggaggtcgctccattgatggatgtgacgacagtgaccgtgcttgaccatagaacttgagctggggcacccccaacatgatgaatccaccgaaggcactgcgttttgccaactggagagagcatttttagtcccaaggtgcattctctgattaagctccattacgcccaaacccatatcagctttacgcagatcttgattcacagcggcgtgccc

SEQ ID NO: 93290 - DNA, 102 bp, Glycine max
  Clone ID: PAT_MRT3847_55255C.1
tattccttcaacggcacagctgatatctagcttattctgttcaacagtcaatttactgtcatagatgtcatcgatgtgtgtctaaaactaaggcgccactgc

SEQ ID NO: 93291 - DNA, 1848 bp, Glycine max
  Clone ID: PAT_MRT3847_55256C.1
tgaaagaaggaaaacactactagtgtagtgttgttttttttaaataaaaaaaaaacaataaggacaactaaatttgaacttgcaatttacttaaactctgcccactaagccgatctattagtgactcaatgcatgcaaaattttgtttgagctgaaatagtatcagacatgattcgcaggttgtaatttgtaagcaaaagaagatggtgaagatatgtggaattggagcagggtatgtagggggtccaacaatggctgtgattgccctcaaatgcccctcaattgaagtggctgtggttgacatctcacactctcgcatatcagcttggaacagcaacaagctccccatttacgagcccggcctagaacaagtggtgaatcagtgcagaggaaagaacctcctcttcagcaccaatgttgaaaaacacgtgcatgaagcagacataatctttgtctcagtgaacaccccaacaaaaatcagaggacttggagccggcaaggctgcggacttgacctattgggagagtgcagctaggatgatagctgatgtttccaggtgtaacaaagttgttgttgagaaatccactgtcccagttagaacagctgaggcaattgagaaaattctatgccataatactaatagcaagggcatcaagtatcaaattttgtcaaatcctgagtttctctctgagggaacagctattcaagaccttctaaaccctgatagggttctcattggagggaaccaatgccctgaaggtttacaagcaatccaaaaactgaaggctatatatgctcattgggtgcctgaagacagaatcataacaaccaatttgtggtctgcagaactgtccaagttagctgataatgcctttttggcacaaaggatttcatctattaatgctatgtctgccttatgtgaggccactggggctgaagtttcacaagtttctcatgctctaagcaaaaacaccaaaattggacccaagttcctcaatgctagtgttggttttggtggctcttgctttcaaaaggacatactcaacttggtgtacatatgtgagagcaatggcctcactgaagtggctaattactggaaacaagtgatcaaggtgaatgactaccaaaagagtcggtctgtgaggcgggtcgtgacatcgatgttcaacacggtctgcgggtaagaggattgcaattctggggtttgccttcaagaaagacactagtgatactaggaagacacctgcaattgatgtttgcaaaggactattgggggataacgcgtgcttgaccatctacgatccatgcgttactgaggagcagattcaaaaggatttgtcaatggatggtgttgaatgggaccagcagccaatgagttctactatggtgaaacaagttagtgttgttggagatgcctatgaggcaactaaagaagctcatgggatatgcattcttacagagtgggatgagttcaagaacattgattatcaaagggtgtatgacaacatgcacaaaccagcatttgtgtttgatggtagaaacatattgaatgttgacaagctgagagaaattggattcattgtgtactcaattgggaggccattagaacaatggctaaagaacatgccccaacaggcttgaagattatgaatattgagtaggaatatgttatcctttgtgacatttcaccacttgatatttttcacatcatttcaagcattagacgggctttagttgttgttagttgtttacctgttgctggctaatatataaaatattcaaataaaaatgcaactgccttgaggctgtactgtagtatttgggataattaaataagattttatcctc

SEQ ID NO: 93292 - DNA, 271 bp, Glycine max
  unsure (1)..(271): unsure at all n locations
  Clone ID: PAT_MRT3847_55257C.1
cgcatgagcgtggtgtcaagaggtttngttcccactgagtttanaagaaataccgtaagcttatgatnaaaaaggatacctgtcagctcggctggtgctccttttacttgatgatggcaatatccagatctcccacctgttacaaatgatgagaaccaggatgaaaggaactatggagctcctgctcgaactgagtttcaaagatntattagattgaaganaaacgagatggtgggtagcatggctactgctcaaagcacaccacgtagaa

SEQ ID NO: 93293 - DNA, 367 bp, Glycine max
  Clone ID: PAT_MRT3847_55258C.1
gcattaaccagattgtaattgggaattaaattgaattttattccttttatccacgggcgttcaatttcacacctaattgatcattcttccttcaaaaaatggaatggattaaccccaccccagtatgccaggtaatttttttggccatgccttttccggcctttattaaccctggtaccattggttacctaaaaaaaaattccaaaggccgggacctccgaaaccccttttgaaaaaccttaggggggccccttttcccttaatataagccgggggttggggtcctaacaaccaacggttaaacctacctatattttgagtcagcttccaaggcctaggtccttaaaaaggcgatggcttccctttt

SEQ ID NO: 93294 - DNA, 562 bp, Glycine max
  unsure (1)..(562): unsure at all n locations
  Clone ID: PAT_MRT3847_55259C.1
atcatgcttgatcatgtcagcagaatgatagctagaccaccttagccgattattaccaaaaagggatcaaattttcattcttcttcttagtttattccaccaacataaaattactttcaacataagacagccaaatatgtttcttctattcgttgctatacataatgcacactagtaactttttagcagcaaataatatcacagtcccacatatatatcagaaacattcttagatcaatctgctttacatgaataagctaatttcttatcctttaggttatcttataatgataaatctgaatgttttccacattctgtttcttgaaattgcttccctttctgtgaacaagaaacttgccccatttgtatggcctatattttgaaggattgtgttcatttgtcaactcctccaaaggcttgacttctatgtcatgtgcagggttgaagaaaaacggaatagaaaacctttctttttcagagttaaccatcactctgtgttccacactctcataggcatcattgcttcaaaccttcataaacaactncaatactcaagtctaag

SEQ ID NO: 93295 - DNA, 1850 bp, Glycine max
  Clone ID: PAT_MRT3847_5525C.1
cagattcataagacaagaacaagctcttgcttattaacatgctggtacccacgcgtccgcattcaaataatcagaactgctctcaaggatccctcgttttttccctttcttttctgcgtttaattttacgtcccatgctcgaagcttaaaccaattttattaattggtgtttgtttcagagatttccttagttagggttttattcatcgggttcattaattttctcaattattgcgattattattcgaaatttgaagttaagcatatatattcatggcttcgagttttgaccggtgggaaaaggatcctttctttaacgctgccgaagaagttcaggaatctgcagacaggatggaatctacatataggacatggttacatgcaacaaaagatgcatccagcatgtggaactctgatgaattgtgcagagatctacgcactgcacttagcactgccaaatggcagttagaggaatttgcacgggcggtgaggtcaagttatggcaaaagctcaagtgaggaagcgagaaataggcaccgagattttatcactgcaattgaggataatataatgaaagttgagcattcgttgagtgaatcagttgttcctggaggcaaggcgtctctgccttggttgcgtttagatgaaggagaacaggatgaacttgctttgtttctttcaggaatgccagcagctaacaacaggaacattgaagatccacggttaagtgaaaacgtttcagccagtgattgtttgaaggattttcatgtttcatctgtgtggggcgactcaaaggaggatatatcacatgggcatcgtcgggcagccagtgctagtgctgatattggtttttataaaatttcagttcatgatgatgcacagcagtggagttcctcaagtggttcttctggtccaatacacaaggtaccaagtttatcaggatttcttagatccatggaatccgtctctaagttgaagtggcctaggaatggttatagaaagctgaaagcagaggatcatcataaagaaactgatggtgaactacttccaacagctggattgaataggggcaacaatgcacgctgtgaaagaagtaagagtggccttgatagttgtgatgaatcctatgacaagcaactatatggatggcatggtgctatttggagacagcttcaaagatctcaataccaaatgcaatacagtcagcctgttcgaatagttgtttggattgttgttctcctttgtttcattgctttaattgcattccatgcaatgtagaaggaagatatagatacacgttttatcaatttgtagctggagagacatcacgaggtacatacaagcttttgatgcaagttcatatagtcccacattgtcacttgagcaggagagataggttggattttctggttctcacttaagctttggtactacagttagagtctacaataggcatttcatttttttctctattcaatctgtttctcgcctcccatttcaaaatagtccatgaagagctctctgttgtactatataattgtaagatgggaatgataaaaggggattagcctatttgatattgtaatttgtattacacgtcttcttgatgctagtttttttttttttttttaccaaagctgatagtctagcttgagcaaattcaatatgatgaattcattattcttcttttccatttgttatccacggaatattttaactaaaaaaaaaaaaaaaaaaaaaaaaaaaaaagcggccgctctagaggagagaactgtgttgtgtaccaaagattttagcttttgcatgtataaaataagtttattcataagataaaataaattaatttgtgg

SEQ ID NO: 93296 - DNA, 534 bp, Glycine max
  Clone ID: PAT_MRT3847_55260C.1
ctttgtttttttttttttttttggattttaaagtctatattttggtaatatcattaaagctctcattattttgaccattgggggtttttgaagcctatatcatgatgtcgtcactatagtatgcaaaaattcattcatggctttagtcgttatgaccactaatagaaataggctgaaaagacattattttgaacattctaggtgttattacagccgttacaactattgaaaggtacaccatttgaggttgaggttgagatgcgcgacgacttcgacaccttcgagatcggagtgaaggcaactagaggacccgcaacgagatctgagtttgtccagatctaaacgcgtgaggcaacggtgggaacagcggcggcggcggcggcagcggcggaggcagggccgcggaggaaggagaggaatccggtagcctgagaattctcctgatcgtcgaggaacagatcctccggcacgcggaacgcgccgtggaggcaaacgacggcgacaccgagcatcagagccgaaacgaggacagat

SEQ ID NO: 93297 - DNA, 828 bp, Glycine max
  Clone ID: PAT_MRT3847_55261C.1
cttaacataactcttcctcctgtttttttatttgtcttttacaatcatcttaccgttaattgggattctcacccttcacaattgaatgataacagcactatttcgtacccctccctcttgaacaacatgggggcaaaatgttcaacccgtgtaggaaatataattaactttacttgcaacaggaacaagagacatcagagccagcaccagtggctagcatataactctgttcccacacatctgcaggaactgcttcggcatgaggaacgtgacgaggatgtttttctttcttgtctcccctgagctgtttcagaccatgcttaagtgccggcaataaagcttccatacactcggcaacagcattagggtttccaggcatgttaatgatcaaggttgatcctctgattccagctgcagagcgtgaaagcattgcagatttggtcacctttaaactctcttgcatcattacatgcagaaggccaggtgtttctttctcaatcaatggttttgtagcttctggcgttaaatctcgagaggtaaagccagtccccccaagagtaattatgagatccatttggtcaatatcactccatcttcttagaatgtcctgaatttttgccacatcatctggaaccacagcagtggctacaactcttgctcctcctagtctttctgaagaagaattaataacagaaactgcccccaagactgaccaatctgggatttcacccatagcaactagagcaccttcgcaatcaatcctattttttactgttattaaattaccccccggaaaaaaaaatggggcatagcacgaacagctggttg

SEQ ID NO: 93298 - DNA, 1022 bp, Glycine max
  unsure (1)..(1022): unsure at all n locations
  Clone ID: PAT_MRT3847_55262C.1
tatatatctaaaaaccaagcgtgaaacccactcagttgaagaatcaatctctccctttcacctttcttcatagcctaccacttttctgctttcatctactctcacttctcttcacacactgagacacacagagagagaaaaataaagggtgtgatgggtgtcttactgagtgttttctttttataatgaacaaagaactgcacaccctcttcttcaccgaagaagaagatggcaattcagcaccacaatgaccaactagagcataatgaaaatgtctcatctgtccttgatgccctttactgtgacgaaggaaagtgggaagaggaagaggaggagaaagaagaagaagaagatgaaggtgaaaatgaaagtgaagtgacaacaaacactgcaacttgtcttttccctctgctcttgttggagcaagacttgttctgggaagatgaggaactaaactctatcttttccaaagagaaggttcaacatgaagaagcctatgactataacaatctgaacagtgatgataataatagcaatgataacaataataataacaataatgtgcttttggactcttgtctctctcagcctcgtcgtgaggcagtggaatggatactgaagtcaatgctcactatggattctctgctctcactgcaaccactggcccgttacttacctggtataggttccttctaagcttccattttcaaagggagaaaccatggatgatccagcttgtgactatcacttgcatctgtttggctgcaaaagtggaaaaaactcaagtacctcttctctgacaccttcaagtacaagacacagantatatatttaaaacaaatactattcagagaatgaaactgctagtactatgcaccctcaaaatgaaagatgcaccgccttgacccctagtctcctgtctatatcacatgataaagaaacttggattagagacacatgttcgctaacgagttctcagacagctgaagcatcttctttgatctgtagcttgagattcaaga

SEQ ID NO: 93299 - DNA, 363 bp, Glycine max
  Clone ID: PAT_MRT3847_55263C.1
tttttgttaaggcttttttattttttttggcaaaaattgaagaacgtaaagagacaacaactcattggaaaccaaaataagaatgaaaacccacagcatggcggtgcaaccacccaagcagaacatctaccatacaaccaagctaaatggccataacgtttttgtgccgggggggtacatacccatccacgcctatggagcaaacaaagacccaggacatgggggaggaaagtcctaaagggactctcaccttatctagaggaagggcagcctccacgctaagaacctgactaacatcatacgacctaagctgactaataagacctgaacggaaaaaagaaccttgaagcatgttccgacctt

SEQ ID NO: 93300 - DNA, 606 bp, Glycine max
  Clone ID: PAT_MRT3847_55264C.1
tttttttttttttttttttttttttttttttttttttttttttttttttttttttttttttttttttttttttttttttttttttttttttttttttttttttttttttttttttttttttttttttttttttttggaaccgggggggggcgcggggggtcccccgggaatttaggagcgggcccctgggggcaacacatttttccttaatgggagggtataaaagggggggggcaaaaaggggaaaatatctcccatgaaaaaaattgtaatccctgacaaattcccaacagaaaaccgggggagacaaaagaaaaaaagcagggggcgccacagggggagagcccccatattttttgggggccaagcagggccctttttataaaaggaaaacgcgggacgcccctttattataaaaaaacgccccccccgggggaaaggggtatgtatatatggggccccaagggggtttttttttatccctggggaaagggggaaaaagggggggttttaaccgggcgtggttttaagaagaatagagaaaagaggtacacaaagatttggggcccccaacagggaaaaaaaaaatattgtgtaaggggggag

SEQ ID NO: 93301 - DNA, 447 bp, Glycine max
  Clone ID: PAT_MRT3847_55265C.1
ggaacgggaaaaaaaaacctttttttaaaatcttaaagcccaagatttaaaaaaataccctcccccccccttttaaaaaagccttaatttgaatgcaaaccccccaaacgctttgaaaaaaaaaaaatcccccgcaggaaattttttaaacccctgtaaaaaaatcctatttccccccaattttttttgcaacaggcttaattttaccccggggaggcccccccccgggggggcccttccggggggaaaaggctcaaaaggccaccccccgggggggggttccggttttaacaggggggaaaggccccccaaagggccgctcaaccaaaagggcaagggtggttgaaccaaatggtcccccagtaacgggggggggggggggtacaggaaaaatttgcctctcaaaaaacggggagcctaattgggtttggggggaaaaccccctaa

SEQ ID NO: 93302 - DNA, 414 bp, Glycine max
  Clone ID: PAT_MRT3847_55266C.1
tttcactcttacaataaaaacatatgactttgcataaccgctctctgtgaatatgtggactaggtggacacatactttgggcgccaaatttatagagcatcacttattcacacgcatactctcattgctgaaccaatatatgcctgtaaacatgacccttaagacagagactctgctcatgaattgagactactagctgaacatctcaagcatctttaccaaaatcacttactgatacactaaggaatgtacttaccaagggcataaacaattcctaagacaatacaaaccctcatacctattggtcaagggtcgctttcagatttgtatcaacaacacacacttttcttgcaccataggcttggacttgaacagacaagcataccattgctaggtcactgcttcaattattaa

SEQ ID NO: 93303 - DNA, 296 bp, Glycine max
  Clone ID: PAT_MRT3847_55267C.1
ccacgcgtccgcccactcgtgcatacaatggagaacgatgatgacatctacactttggttttcatagccgacttgcgggctatcaagtatgagatcaaggctgcattcaagatgcagtctgatttttatactccgttagtgaacatctaaattaggtgagttcttatgtagtgacgcttttagtaattgttagatgtatattatatatgtaaagaccgatttgtcagctctgcaacgtattttacttcttaaactattatattttttttacctttgtttgtttgtttttttttatt

SEQ ID NO: 93304 - DNA, 456 bp, Glycine max
  Clone ID: PAT_MRT3847_55268C.1
cgaggggtgtagatattatattggttctctgctttgatagtatttttttttttctgaccacagttgagtacgttgttaattaatatttgtccgaatcataaggatacttatgttctgaatatttttttctaacaatttattttatattaaaaatttaatcataatttatttaacttttttgtattatatagttaatttaacttaatatcgggaaagtatgttacatttctctttctttacgttgcctttcttttttgatattgaaatatataatttaatctatttaacttaatagcaattaaaaacattctttataatatatttttattacaattatattaaaataattttaattcaagaagttactcttaacttactcaataccctaagtcactaacattactttttgtccacacatcaacttcgtttcttttcataaggggtttaatcaaaggg

SEQ ID NO: 93305 - DNA, 287 bp, Glycine max
  Clone ID: PAT_MRT3847_55269C.1
caccccacgcgtccgtgcgagaagacgacagaagggagtggattatatcatagtgaaaaattcatggggatctaagtggggagagaaaggatacataagaatgaggaggaacattggaaaacccgagggaatctgcggtatctataagatggcttcttatcccactaagaagaaataagattcattcccattcttttgtctgaatatctttcagcttttccttggaaacaatgtaacgttttccatataataatagattgattgactcttttcattattcccttgcc

SEQ ID NO: 93306 - DNA, 416 bp, Glycine max
  unsure (1)..(416): unsure at all n locations
  Clone ID: PAT_MRT3847_5526C.1
ggggtggcctcanttggtnttgcgtgtgcgagcggcgtgggttgatacgagacttttttctggtttttccgcgggtgtatccggaatttggggaaattggcgttctcccccgtgggctttggtttgttaggaggggggggggggttttctagttgtgnttgtcggccctgctgaccnngaggtacgccggtttatttcctaagggtgaggtgcggcgggtttgcccgggggcgaagtttnttgggattgtcgtattgattagggggggttgtgtgtgcgttccacactctgagatngggctggggccgnggggggggggggtgggataggggggaagtnggggggcgggggcgggggggatgcgggggcgcgccggtgggggggtgcggggtgtctggatacacctcgcggccggg

SEQ ID NO: 93307 - DNA, 166 bp, Glycine max
  Clone ID: PAT_MRT3847_55270C.1
cctgcataattccctggtcccacacgtcttcttacctctcctacgactacacaaacacggaggcatttttataaacacttttgtgtttcaaaaacaataacactacttttagaaacacctctccaagtaaaaataccttatttatttaaccaatcgttatctataa

SEQ ID NO: 93308 - DNA, 486 bp, Glycine max
  Clone ID: PAT_MRT3847_55271C.1
ggacgcgcgattatttcagaatcctacactgccaacgccaaactcacgtgaacacattcaccgttttttctatcttctctttttaaattccttccttttccttttgattctgcttttctaatcgtcgttccaatttcacagttttctatatctcccaaccaatccatcaatgcttcaagttattacaggaatacgtgccttcgccgtagcacatgcaactggaatgtgcttctgcttgacttgaaagagggaggtggaagaaaagaaaagtcaatagataacttcctaaaagcctggaagagtttgaaacattgcagttttcgcctaagaattttctccattgtccatatggattattagaatttaatggataagaacttgggaccatgattgtgaatgagcattctgatggtactgaactggcaatgaataatgctagtgtggaggaggaaatagatttctcttgtgacccatacatagggttag

SEQ ID NO: 93309 - DNA, 276 bp, Glycine max
  Clone ID: PAT_MRT3847_55272C.1
ccataaaatgacaaccccaccgtttaaacggtgtgcacaatttggggttgttaaaggagctggcggggcaaacaatgcaagattgccactcaaaagtgttcagaggaagacatactgtgtggcaatactagaaaattacacaattgattttatttacaaacataccttataagcttagcacaacaaatgaccttttcaatatcgtcatttttggaccaaaatggcttaacttatcacccatgaaaaatcatattctattaacattacttataccct

SEQ ID NO: 93310 - DNA, 521 bp, Glycine max
  Clone ID: PAT_MRT3847_55273C.1
ttccaggaaggtttcccgtcatcactgtatgacgtcctccttctttgggggggggggggggcaaaaagttatggtaagaggttaattaaaaagggtggtagaggcgattttaacattggaggtagtgcccggatagcacagtacagcgtttaggaaaatagaagggaactgtagaaggcgaggtgaccaagctacctagtaaggatagggacttaaagagctaggttagttggcaacatcagaggtatcagtgagtgtactacccggcgtgatgggcagcagcttatcgtttatcagcagcagcgtatgcgttttgagtagccagtatacaagagccacgcggagaggctgcgtttgaacgtagtcttattacggattagggcaatgttaccccgcgttgcaagcaaacaaccagggaggccgcgttttgcattagcacgtaccaggcatgcacagcaacttaaggataaacgtacaacgagttgactaagggggatgcgtacaacggcgagaagtgtttg

SEQ ID NO: 93311 - DNA, 307 bp, Glycine max
  Clone ID: PAT_MRT3847_55274C.1
ctctggctgacttgcaaccggaagaactgaaccgtgtccagcaccctttgggtagcatctcttacaactctataccttccttatgaccactctcttatgaccggtcgctttcttaactagagccctctccgatgagggcactgcacgcgggtagatcacagctctgatagctgcagaaacaaaaaagcttgaacgctttagctcttttgtgtgaaatatgctggaaagtggcgcgaaattcccaggactaatagatctcaacacccctaatgacggctactatgatccatgctaaggcttttaccat

SEQ ID NO: 93312 - DNA, 695 bp, Glycine max
  Clone ID: PAT_MRT3847_55275C.1
cccgcgtccgaacctctcaaaagcataagcatcactcgttgcttcagattggtgtgggtttcaatggagagctttgcactttcagcctcaacctccttctctcgcttttcccaactccatcatcgtcctcgccctgtcatctccagatcccaatctctcagatcacccatcaccatctcccaacgtttctccttcccctccaaaccatcctccaccttcaacttcaacttcaaattcaaccgtttctcaaaaccccattacccaattcaagcttctccttcatcatcatcatcaccaccaccaccaccaccaccaccaccaccaccacctctccagggtgcaaagcccatccctttcattatctccatatccatcggcctcattgttcgcttcttcgttcccaaacccgtcgaagtcacccccgaggcctggcagctcctctccattttcctctccactatcgcgggccttgttttgagcccgttgcccgtgggggcgtgggcctttctgggcctcacggcctccgtggtcaccaaaactctcacctttacagcggccttcagcgccttcacgaatgaagtgatttggcttattgtgatttcgttcttctttgctcgcggattcgtgaagactgggttgggggatagaattgcgacgtacttcgtgaagtggatggggaagagcactcttgggct

SEQ ID NO: 93313 - DNA, 381 bp, Glycine max
  Clone ID: PAT_MRT3847_55276C.1
actctatagatcccccgctgacgcaaccatacactttaaccttcatcctctcaccttctgtttcatctaaacaacggctattgcacagcttcggctattttctaaccggaatcagtcatagtgatagcgatgaacaatctacctacatcatatctgctattgaatactatcctaataaataccatgaaattgattataatctaaacattgatcaccgttccacttcaatcatgcatactcacatattgccagcaccttaaaacctcaatatcgaatcttattcgctatttgttcataacgcttagcacataaacaatgcacgtttcatgtgataaagttgaatacacaattctctatgaaatgcacatgctaaaacacaat

SEQ ID NO: 93314 - DNA, 259 bp, Glycine max
  Clone ID: PAT_MRT3847_55277C.1
gtcaactgctgctaggaagacgctcatgacatattgcaagaggcagatacaagacctgcctgcgagaattagcggggcacctcattataacaacttagggcgttggaacgctgtcgtatttcttcctgatgatactccatggaattgaggcacttgacaaaagactctcacatacactgaggattgttctaccaggccaccacctgtacgataagtctctagaatgtataatcccaacatttatgcggatggaagaata

SEQ ID NO: 93315 - DNA, 341 bp, Glycine max
  Clone ID: PAT_MRT3847_55278C.1
aatcagagctttaaaattaagaacaaaacatactaacacaacttagttttaactttaacttaaaagtaattttaaagtaaaaataaagttgggctaaatgaatcctaaaaataagaacaagagcttaatttttaacgagactagcatactgaagctcattccaagtatcaggaacaccagctaggcaccagtggctacaatccgggtccaaatgccctccagagccataaacagacgggtggccatctatccttagttgggatagggtagtaatgtccagcaaatacacaggcttttgcatggctcttaacactttctccaataccaactttggtgggagt

SEQ ID NO: 93316 - DNA, 400 bp, Glycine max
  Clone ID: PAT_MRT3847_55279C.1
aaagaaaaaaactccagcactaatcccttgataagccactactactgatcctatcctaccccgttggctactggaaaactctcaagacaactcttagttctacgaaaggctaacaccccgtagctaaacatgtggattgcaagctaccattgaagaactgccttgtttaaactacccacgttttggaaagacaaccaacataccgcggagccatggaaagtctttattggaagcatggaatatcttttataggaacagaccaaacaccctacaacagaacatcaaaagctgtagcacctacctaagtgcaagcataacatcatagtcaaagatgcactcaatttcttgccactgcctcaacacacattacctaaatcagtcacctcaggttcaaactttt

SEQ ID NO: 93317 - DNA, 577 bp, Glycine max
  Clone ID: PAT_MRT3847_5527C.1
ggtgctgaattgaacaactggcttagtgcggttatgacttaccaacaaacctgcattgatggtttccccaaagggaagatcaaggatgagttaagcaacatgtttaatgagtccaaggagcttgtgagcaactccctcgccgttgtttcgcagttctcttcgttcttttcgatcttccaaggcgccggggagcttcatcttccttgggagattaccagtgatgatgcacctgcacctactactgcttctgcttctgctgttggtgctggttttgggtctatatttggttctggttcttcttcttttggttctgcttctgctcctggtgttgctcctactactacaggtgttgcttctgctcctggtgtttctcctactactgcaggtgctgctcttgctcctggtgttgctcctggcccagttccttcttgggctgcaggctccattcctgcatgggctggtccagttcctgtttgggccggccctgctgagtttatcggatcaaatgagaaacccacacctaatgtcaccgtggcaaaagatggcagcggaaacttcaaaaccatctctgaagctt

SEQ ID NO: 93318 - DNA, 213 bp, Glycine max
  Clone ID: PAT_MRT3847_55280C.1
tgaaataatttctctctctctctgctctctaactcgctccaccgcgccgcctactcagaccgtcgtacacacaccgggcgagaacgttgaatcgccgtttcattggaaagaggacatctctcttctctcagtctacaaagtacaaaccaatccattccaccaaaaccgaaatccctagaaacaattaaaaagacactcatagaggagagttca

SEQ ID NO: 93319 - DNA, 117 bp, Glycine max
  Clone ID: PAT_MRT3847_55281C.1
caggatacctaagatctactcagtagatgggtaacatagccgtcattcctgtacaatccaaagtaactgaagaggtcactcactttgctcacaggattgtgggattgaaattggagc

SEQ ID NO: 93320 - DNA, 153 bp, Glycine max
  Clone ID: PAT_MRT3847_55282C.1
cgaacccgggggcggacgctgggttttacctggaaatttggaaccggaacctgaaggcgccccaggtccccccacggggggccgcccgaaaaattggaacaggacggtcaaagcggccccctgtgccaaatggggaggcgaaaaaaagcccgg

SEQ ID NO: 93321 - DNA, 198 bp, Glycine max
  Clone ID: PAT_MRT3847_55283C.1
tcttctttttaattacaatacacaagattatactaaatcgcattaaggggcagaacatagcgatctttttaggtgggtcattatcggattcgatggcaatcgaaaagggactcttcggtcttatgcattgtaactggtgaattctatatgatgtttgaacaacattattgcattgacagtgctttcagtggaacactt

SEQ ID NO: 93322 - DNA, 784 bp, Glycine max
  unsure (1)..(784): unsure at all n locations
  Clone ID: PAT_MRT3847_55284C.1
attcgagctcggtacccggggatcctcagagtcacctgcgtatttaagtacaagtagaaccaatgagacacaaaaacaacattgagaaggatcatagtccatacattgcagccaaataccagctctagaattccacattgtaggagctaaactattttggagcacttccaccaaagcatcacattcagaaatgtgtaacaagattcaaaggactaaacttcgatgcagttccataagtgttttcggtgttattttccaatcagaatgggagtttcacctcggtaatccacatagacattcactaagattactaaggtaaaagttcaattttgattggagaacaacacaaatggcccatatggaactgcttcaaatttttaccctttttcaaattaacttacataagtaaggaaccgaaaattgcttactttgtttccaaagggtttgaccaatacttgtagtgattatatttagggtcatccaaattgtcagcaatttcataagagaaatgagcactaccacgagccatcatctttggagcaacaaattgaaggagttctacgatagagcccagctgtgtaaacctttatgttcagcaactgctctcactccctcaaatcccatttcatggtattcagtccacacatcacgnacaggttggtatttgcaacactgcgacccttgatggcaccctnattacatgaaactcagtatagctattagagtataaacataagnggattcaaaaaaactgaataagatattttggtaaaagaggaacaag

SEQ ID NO: 93323 - DNA, 299 bp, Glycine max
  unsure (1)..(299): unsure at all n locations
  Clone ID: PAT_MRT3847_55285C.1
acccacntnaccttccactcgtcattttcactttttacgcgcctcaaaaccaccccgagtcgctttttatcacatatcgcacacatattntcccctctttaccttacatatgggtgctcacaaaacatagcttgttatctatttttaaatggccaaacagagctgtaccgtcaacgacaaaacctatgctagccgttctaaattattatcctttgaattgctgggatacaactataccatgattgggttcatccattacatttcttataagcacttcatacacaaaattataaagctat

SEQ ID NO: 93324 - DNA, 319 bp, Glycine max
  Clone ID: PAT_MRT3847_55286C.1
aaaaaaaaaaaagggtttttttttattttcccgggaaaaaccaacaaaacgggggggggcccaaagttccttacaacttatggccagggggcttattaaaagacattttaattccctcctaaaccaaggaacatgggacaagaagcccaaatttttttttggacccaaaaaccacccctttccttaattccccccaaaaaccaaaaggggggccccccccggggcccaaccggggtaaaacaggaggggggctacttctgggggacctttaaaaaaggcttccttggcccgggaacctttaacctaccaaaaaaacatc

SEQ ID NO: 93325 - DNA, 175 bp, Glycine max
  Clone ID: PAT_MRT3847_55287C.1
gtcgaaaaacatccattgccatttaaaaaaacattacaaatgtgtgaatgggaggttcttacggtaaacatgatgaaccacaattttgacttggagaatatagccaaacttcttcaaaacatgatttgttattaacctccttacggccatcataataggcgattctacaaaacta

SEQ ID NO: 93326 - DNA, 698 bp, Glycine max
  unsure (1)..(698): unsure at all n locations
  Clone ID: PAT_MRT3847_55288C.1
caaagtttgaatgtcatgcgatttctccnagctattaatgtaaggcacgatctcactgagggtctgaaggacttgcaatgtagaacacttatattgncaggtgagagtagtccattccatgctgaatctgtgtacatgagcacaaaaatgaaccacaaaatctgcgcacttgttgaggttcaggcttgtggctcactagtaacagaagagcacccaaattccatgatatcaccacttgagggtttcttaatgggttttggctaccacagacaaacacatgctgcttcctcatcaagcaattgttcaaatcccgcaagccccactagccattattcatgcatagcaccagaactgctctccccagagagtttaggaattaagctcaagcccatcagaacccgtgttgatgttcaattctaactttatccagcacaatacagccatggagcgagctaaatcattgcacataatataatatatagctagtgtaggatatattctttgattaatgattatgttggtggactagttatatttgcaaaaatggctgtttttcctactaatgtaaaacagttggaggtgtcttacagtttacaataggactattcttttcctaatgttgatttttgagatatctctcaccaaaaacaatctgttccggaactaagcttcaaccttaactttgtctttttttggtt

SEQ ID NO: 93327 - DNA, 690 bp, Glycine max
  Clone ID: PAT_MRT3847_55289C.1
atccaatgttctctttgctgcgcatactgtaggtttcttcatctattggggcatcacacaccaaatgaaagagacactagagtggagcaagacatatgtatcaaatgtagctggggtgattgcaattttaattgcattagtgatgtgggtgaccagctttccagggttcaggcgaaaaatgtatgaggttttcttctacactcaccatctctacactctctacatcttattttatgccatgcacgtcggcgttgaatggatgtgcatgatttctccggggattttcctttttctcattgatagacaccttagattcttacaatctcgccaatgtgctccgttgctatcagctcgccttttaccttgtggtgcacttgaactcaacttctccaagaatccaagtttatactataaccccacgagcatggtgtttataaatgtgcccaagatttccaagctgcagtggcactcttttacagtcatttcaagttgtaacatggaaacagatattctgagtgttgccgttaaaactgggggtagctggtcaaacaaactttatcaggaactttcctcatctgctttggatcatctcaacgtttctgttgaaggaccctatggaccaactacgacttcacaatttttaaggtacaagcagcttgggttggtgagtggtggaagtggcatcactcc

SEQ ID NO: 93328 - DNA, 422 bp, Glycine max
  Clone ID: PAT_MRT3847_5528C.1
tttcaaagatgcaagcgattagacatcagaggcattaccattgccccctcggaagcgcatgctacgcactaacagagacattccgttcatgaaagcaccgggaccaatccctgccgccgacaagccgtcttctgcaccccgttaataaggaagcctgctcagttagccaaaaaacaaaacagccgagggacaggggtgttgagattactgaaggtaataatgtagaggggtcccatatagcagtaatccccagaaggggaaggggaaaatcaatcagttctctgcctacctgaaggcacaagaggaaaatgcgtctaacattgctgggaacagcagaacatgatgggtgcgaaaaatcgcgatgatttggatagtactgccgtgcgtgactaaaaccaatggtggtgacaggagtgataatg

SEQ ID NO: 93329 - DNA, 650 bp, Glycine max
  Clone ID: PAT_MRT3847_55290C.1
ggaattaagaaaaagaagagggttggtcgtgaatatcagtattaagcggtgtgaggcatttgttgatgtatagagcggagacatgggcgagtcaagcgactctgtctccattgacattgatttgattcctttgggaggaaaggaatgcacggtgaaaacaagtaaaggctccgtgtctgtgcttgtttgtggggatcgagaaaaacccgctctaataacctacccagacgtggctctcaattatgtctcttgtttccagggtctgttgttctgcccagaggcagcttcttcgttgcttcataacttctgcatttatcacattgatgctccggggcatgagttgggggctgatgtcgtttcttcagatgaaccattgctctgcgtggatgaccttgctgaccagattgcagaagtgcttgatttctttgggctaagggaggttctgtgcttgggtgtaacagctggtgcttatgtcctcactctatttgctatgaaatacaaagaacgagtgcttggattgattcttgtttcacctatttgcaaatctccttcatggactgaatggctttacaacaaggtcttgatgaatttaatatacttctatggtatgtgcggtgtactgaaggaatgtcttctgcagcgttacttca

SEQ ID NO: 93330 - DNA, 1599 bp, Glycine max
  Clone ID: PAT_MRT3847_55291C.1
aggcgcttatattaaaacaattaagatttgtctcttaaccggctgcgagaagacgacagaaggggagaacgaataggaaggaagagtaagaaccaagaacaaagaagagaagagtttcttcgtgaatatcagtattaagcggtgtgagcatttgttgatgtatagagcggagacatgggcgagtcaagcgactctgtctccattgacattgatttgattcctttaggaggaaaggaatgcacggttaaaacaagtaaaggctccatgtctgtgcttgtttgtggggatcaagaaaaacccgctctaataacctacccagacctggctctcaattatgtctcttgtttccagggtctgttattctgcccagaggcagcttctttgttgcttcataacttctgcatttatcacattgatgctccgggacatgagttgggggctgatgtcatttcttcagatgaaccattgctctgcgtggatgaccttgctgacctgaatgcagaagtgcttgatttgtttgtgctgacgagattgcagaagtgcttgatttctttgggctaagggaggttctgtgcttgggtgtaacagctggtgcttatgtcctcactctattagctatgaaatacaaagaacgagtgcttggattgattcttgtttcacctatttgcaaatctccttcatggactgaatggctttacaacaaggtcttaatgaatttattatacttctatggtatgtgcggtgtactgaaggaatgtcttctgcagcgttacttcagcaaagaacttaggtgcagtgttcagggagcagaatcagatataatactaacttgccgaaggcttttggatgaaaggcaaggtttgaatgtcatgcgatttctccaagcaattaatgcacggcacgacctcactgagggtctgaaggacttgcaatgtaaaacacttatatttgcaggtgagagtagtccattccatgctgaatctgtgtacatgagctcaaaaatgaaccacaaaatctgcgcacttgttgaggttcaggcttgtggctcattagttacagaagagcacccaaattccatgataacaccacttgagcgtttcttaatgggttttggctaccacagacaaacacatgctgcttcctcatcaagcaacggttcaaatccagcaagccccactagccattcatgcatagcaccagaactcctctccccagagagtttaggaattaagctcaagcccatcagaacccgtgttgatgttcaaatctaactttatccagcaaaaaggttcagaaaccccaacaatacagcagtgaagtgagctaaatcattgcacataatataatatatagctagtgtaggatatattctttgattaatgattatgttggtggactaattatattgtttgcaaaaatgggtgtttttcctaccaatgtaaaaaagaaagaaagtaggggaggtatcttacagttcacaataggactattctttttcctaatgttgattttttgagataagatctctcaccaaaaaaaaaaagttctgaaaaaattcaggtttatacaaacctcaagcgataaggactgtttgctact

SEQ ID NO: 93331 - DNA, 917 bp, Glycine max
  unsure (1)..(917): unsure at all n locations
  Clone ID: PAT_MRT3847_55292C.1
ggatgtgttgttcctccagaatgcactctaccttgtgtgatatttattttaatatagcagttagccagttaggtattctattttctttgttttctctgcacaatgcacagtgccaaatctgggaacccattctgtaatataataatcacttgcattttatcatcttatgatcgcagtttaatttagatgagtacttgatctctataattcggctcgaagctgtttgaccgctctggaatgttgtatggagagctagctagatttgtgttgcggttgcttgggattagaacaaagtccaagaaggtttacccgccaggtccaaatggacagcctctgcttggacctggaccacacaatccttccggaaatgtaaactacattgaggcaccaaaggctgctccaagtggttcttgggacaacgtttggggaaatgacgccaatcaatgatacggtatgttattctgctaaaagagttcgtccaaatacattgaaaagaagaaacagctgcattcattatgaagatactgaaactgcagaagtcatgtatatcctgggattaaaattgagtttgctattttctctttgcttgcgttggctcttgattttactagaaaggggatcttaaataggataccatccctgcattataccttgtaagcgttttgtttgaatccttacatgtattatcttatccctagcgtaatattgcatacctgcattaagattttcgggcgacctttaattacgtttcttttcgtgtgctcgtaatgtgaatattcctcaagtttgctttacgcatggttctgccaaacatcggtgtgattatatgaagtcggcgttaagttttaggtttaattgcagtttaattccaatattatagataatgagtaattttgattctcgaattattaaannaa

SEQ ID NO: 93332 - DNA, 219 bp, Glycine max
  unsure (1)..(219): unsure at all n locations
  Clone ID: PAT_MRT3847_55293C.1
cacatcttacaacataatgggacaaaagcaactagaagctacacgtgtgtgcaatacacccaagggggggacatgatacgggtatgctctataattgcgtattgtgatttcaataaacaatcagagaaataacattaacaaaaactacaggcatttcaaacagatctaaaggggtganaatgagaggagggaatcggagagcttattaatctattccct

SEQ ID NO: 93333 - DNA, 1561 bp, Glycine max
  Clone ID: PAT_MRT3847_55294C.1
ccttttctgttcgagcggagaccgcggtaggatatagggtgattgtccacaattcttatgtttcctaagacacaaccccataaggcgaaggtgcttgtaaagccaccacaatcgcttaagcctaagcctgagacataccatagactatatggtgtttctccacaattcccatggagcctaagacacaaccccaagcgaatagtcctccaccaaaaccttgggaacaagcaggttcctcttcgggtccagcgcctttcaaacccccgtcagctggcaacacaagtgatgtagttgaggcttcagggactgcaaaacctggggaaattgtttctagttctgataggagtgcagctgtcaacaggaatactcttgggaggcctgttcccacaaggccatgggagcagaattatggaaacagcacctatggaggatatgggtctacaatgaattataattctgggtatggatctggaatgtatggatcttcttatggtggactaggaggaggaatgtatggatcatcttatggtggggggatgtatggtaacagtatgtacaggggaggatatggtggcatgtatgggtcatccgggatgtacgggggtggaatgtataacagtggcttagggggtccaatgggtggttatggcatgggtggtggtccttatggagaacaagaccccaacaatccgtatggtgcccctccatccccacctggattttggatttctgccctacgtgtgatgcaaggtgtggttaacttttttggtcgaatatcaatactcatagaccagaacacacaggctttccatttgttcatgactgcacttctccagctgtttgaccgctctggaatgttgtatggagagctagctagatttgtgttgcggttgcttgggattaaaacaaagtccaagaaggttcacccgccaggtccaaatggacaaccgttgcctggacctggacctggacctggaccacacaatccttccggaaatgtaaactacatcgaggcaccaaaggctgctcctagtggttcttgggacaacgtttggggaaatgacgcaaatcaatgatacagtatgttgttctgctaaaagagtttgtccaaatacattgaaaagaagaaaaaaacagctgcattcatcatgaagatactgaaactgcagaagtcatgtgtatcctgggtttaaaattcagtttgctattttctctttgcttgcgttggctcttgattttactagaaaggggatcttaaataagataccatccctgcattataccttgtaaacattttctttgaatctgcaggaagctgctattttctccttacatgtattatcttatccctagcgtaatattgcatacccccattaagattttcgggcgccctttaattacgtttcttttcgggtgctcgtaatgtgaatattcctcaagtttgctttacgcatggttctgccaaacatcggtatgattatagtatgaattctgcgttaagttttaggtttaattgcagtttaattccaatatcatagataatgcataattttgatttttt

SEQ ID NO: 93334 - DNA, 421 bp, Glycine max
  Clone ID: PAT_MRT3847_55295C.1
tctagctatctcgatcgaactgtccaaggtcctgtcactggtgtgtttgttggtaggggtagggatggtgtgccaccgagagaatgaggaggtgggggggggggggggaaatagaaaaaggcgggaaagtggggcttagcccaatttacaggggctccttgtaccatgggggtcgacaatcaagtagcgtgttggttctgcatggggttctctcaacacggttcgaatgatcgaaggaggaggattatataattagcgcttatggttacgtccgttcgacgttcggctttcatttcagaaacgaaatccggcggttctggtccaagcttctgcgccatcacattgtcactctcgcgggaccacattgagtcgcagcaggttaccgccgtcacactaagccggccacaacgcatcaggtgat

SEQ ID NO: 93335 - DNA, 288 bp, Glycine max
  unsure (1)..(288): unsure at all n locations
  Clone ID: PAT_MRT3847_55296C.1
atgggcgagccaagcgaaccgtcacgcctncttacagattacaaattacttctgaaagtgatcaacactttgagatcggtagataaaataccaaccatggcaaccatttttacttatcaaccaaaaagatccctactctattgaaacctccatttaaccacctatttaaccacctattataccaacagcatcattaacaacccttcttcacacccaacccgtaaattcataacttcttcaactattttcattacactcttaatcccttcttggtttacccctacaaac

SEQ ID NO: 93336 - DNA, 302 bp, Glycine max
  Clone ID: PAT_MRT3847_55297C.1
accactctttgtgctggccagagacttagtgaatcattttcttttccacgtcttggagaatttgctgaacactctcctatttgatataggactatgtgtcagagtaaaacttctcctgtctgtttctgagcatctgtgtttgaattgaagttcatgctgccgaaatgttgtattagagctcccactctcctatctgacataggacttcggggagagacataactattgtgatactttcttacactcttttcttctcactgatccgaattgccgctgaaaggggttttagctgaaaatcactt

SEQ ID NO: 93337 - DNA, 310 bp, Glycine max
  Clone ID: PAT_MRT3847_55298C.1
gataagccacgacccggtctactccaacaagctgggcacgctctttgagatcaccccagagaaaaacccccatcttagggacttggatatctacctcagtgttgtggatatgatacgagggagctcttcttctaccacacttcaattcaaaggcgatagtgatactggtgattaatgaatgagatgctagcgttgaaactttgttggcctaaaagaacatctacaggagctgcgacgggaagagctacctttggaggtgcggaaatttagagcctaattgtctgagcgagatatatttgtgtatcccagc

SEQ ID NO: 93338 - DNA, 558 bp, Glycine max
  Clone ID: PAT_MRT3847_55299C.1
tccggggtggccccgccttcggttgggaggggtggccaagcctcccattcctggccttacttttcttttccaaggggttatggaccaaagacttttttttcttttccaccaccgaaaatccaaggtggaaggttcaaccggaaccggtgcctttaggggttcccttgggcctctggggtcctttctgggcttgggggctccaaggggggggaacctcaaaggggaatgggcacttggcccggttaaacttaccccacttccaacccaccttaccggtttcttcggccgggttcccaacggcttcaccacaaacccccttttccttcaccttcttcacttaatttttaaaacccttaacggcgccggtttggttttccggttatggccaccccaaacccttcccaacgggaaacttcaaacccaaaggggacttggcttccttcttggcacccttggacggcccgttagggactgggacattttttttcgcggcgggcttcttcttggaaaccacccccgtttccgtttcggttccggttccttggaacccggaggcct

SEQ ID NO: 93339 - DNA, 256 bp, Glycine max
  Clone ID: PAT_MRT3847_5529C.1
tcaaaggtgactacgacgagcagtccatcatacacgacacaagcgcctgtgcagcccaggcaaaacaagtcgctcgtcgtttcggaagacccagaaaagttacttgtgagcgatgctgcaaaggatgctaaccaagtcatgcccaagatggctgaaagagcgccagaaaagaaaggcataactggtagcaagccagctgtaccactttccgcaaaggccgttttgaatgacaaaaacaatgatgcacatcgttgaa

SEQ ID NO: 93340 - DNA, 441 bp, Glycine max
  Clone ID: PAT_MRT3847_552C.1
ggagctcacaacacaggtcacggagcgggtttcttcttccaccctttattaatcgctctcttctcttctgtgaagctatcaggttttctatctatccatctctttcttgctgctatttatttctgcctcttttattgaccgttccacaaacagatcctaatatttaattccctgtcacggcgattgttgttatggaattggattatgcttctgattaatatggtataggcatctctagacattggttattgctctcatctcatcatatacctatactccatttgcattctattgaaggatgatttgttcgacaaccgtgggtataacgctaatgttggcactcatttctcgatgcccatgatcgcaagattcggattcctcgagtctaatgatttgctgcctgctcttattgcatgatgtgtgtgtctcgcttggagtaaa

SEQ ID NO: 93341 - DNA, 272 bp, Glycine max
  Clone ID: PAT_MRT3847_55300C.1
ggacaaaagaaacaggaactgggacatttttaaaagcgaaacgcggataaatacaacaaatagcagaaccaattggcgccactaggacctggaccttaaaatcggactcctgactgtttaaaacaaaaaccgaaggggtaagatcccttaatgcctttatctagcccgtgagaaaaaaaacttctaaaatggaactagcaggcgtgaaagcaactggcaaaaaatttacaagggaaatcaaggtgcatttggtttaaacagcttaccccctg

SEQ ID NO: 93342 - DNA, 469 bp, Glycine max
  unsure (1)..(469): unsure at all n locations
  Clone ID: PAT_MRT3847_55301C.1
ccacgcgtccgatttttaaacacaaattaacatccagaaaaataacaaatactttatcttatattatgatgaactaaaaaatcattttaaaattcatatctaagttattttaacaactgagaatctaatacactttatttgtcacgtaagtttcaaactgaaaatcgccgtggttgccgtgccagagatcatggcctccggcggcatcttgaccgtgagcagtaacttcttataaagcaagtgagaggatcgccgttgattaattaattgaattcttagctgctagtattcacaaaaggtttgaaattcgaaggttatttctattcacttaatgttattcaactgtatagatatatctatgtgtatagttcaactctgtgctgaattgatgaatgcttcggagttgctatattcgatgctcgatgcaggaagtgaatggttatcttgagatgattgganacctttcttg

SEQ ID NO: 93343 - DNA, 202 bp, Glycine max
  Clone ID: PAT_MRT3847_55302C.1
ctcgagccgattcggctcgagctcgagccgccctttttgttttttgttgattactcgcattgctttcagaacaagggcctaaaagccccaacctttcggaaaagagggaccactatagcgggggttagttgctccaagaaggagcccatcctgggagcgccaactaggggacctgcaggacccatagggggtgataaaaacc

SEQ ID NO: 93344 - DNA, 167 bp, Glycine max
  Clone ID: PAT_MRT3847_55303C.1
ctcaacccaattcggttcgaggggccggggccacctccattaagtgttgaaccgaaaaaaaaatttgcaaaaaaactgtcttgtttggggaacctttactttccccttcctttcaattccaccgtacttttcccttttaaacccagggcctttttccggaacctttt

SEQ ID NO: 93345 - DNA, 177 bp, Glycine max
  unsure (1)..(177): unsure at all n locations
  Clone ID: PAT_MRT3847_55304C.1
ctcaaagggggtctcatcatctcagaaacaaggtcttggggnaggtcgggcagggctgcccgaagtanaggggcngtntggggagagcatcaaananatantcantgaggantttggtnatggnntctgtcancaatagattnctactgnccggnngataaanttaanggantanat

SEQ ID NO: 93346 - DNA, 436 bp, Glycine max
  Clone ID: PAT_MRT3847_55305C.1
gcgtccgatccaagaggaagaagaggaagaagaagaaggttttgtggttcggaggaccagtgttcgtaacgtcgggggggtgaataagcttggggatgattctgacagggttgccctggacaacgatgagtcccatacagcgtgctcgatgagacgactcgtggtcagaaattggttaagactggtgaacttgcgaacaatacggtggttgaagtacctgaaaaatcatacaccacaggaaagaagagtgcaagctaatccgaacagagccctggggatagaacttgtttcagattggctgaacctgcgtccaatcaaacgtcttgtgaatagaattttgatctaattgcgcatttccttttcctttcattaatggccaattatccattctttgtatatttcaagaattacggtttgttcaacaattgggattttg

SEQ ID NO: 93347 - DNA, 339 bp, Glycine max
  Clone ID: PAT_MRT3847_55306C.1
caaatggcaacagtgataacacctttgcattttgattgtagcaatccaagctaaagtgagttatctatagaccttctcagtggaggaatcttagtggacaaaacatggacattggatcacacttatccaataattcttcaaatagccacttgttgagagtaactgcttggaagaaaagctgatcaatggtcaagatttgatgtctgggaatgcatcagtcataagagtgattgggcctcattggcgcacgtgttcttaacaaacagcaacaccccagaacattttgatgcctgtaacctgacaaacatacaaccacattctctgggaattgatcttacc

SEQ ID NO: 93348 - DNA, 381 bp, Glycine max
  Clone ID: PAT_MRT3847_55307C.1
tcgcttacgcgtgcggataaaccgcgatcacaggctgccgtacattaaaaccggaaacaaatgcaatcgttacttgattacaagaattcctcaatttcttcctacttctttgcgcacgagttcttaagggaatgagaagcactctctgtgatgaacacagacttggtgaatcatcttcttttgcactcttaacatatgtgctgaacactctgctatttgatataggactatgagtcagatctaaacttgttatgattgtttgtaaggtctctgtacaatttcaagttcaagtgggcgaaactttggattacagctcccactctgctatatgcgatacgacttcgagggtagactattatatttatatcctttcttttactg

SEQ ID NO: 93349 - DNA, 195 bp, Glycine max
  Clone ID: PAT_MRT3847_55308C.1
ctacgcccttgcgtaaacaatcaaccactcttcccttcacgcgcccgagcaagctcagggtagaggtttaaaaaacggagcagcctcctgcatggcttacctcttcctcatccctggctggcaaggccgggaatctgggtccatcaacccccgaagtcgggagggtcaacattaggaagaccgtcaccaatcctg

SEQ ID NO: 93350 - DNA, 836 bp, Glycine max
  Clone ID: PAT_MRT3847_55309C.1
ggctcgagcggctcgagcccggttttaagctgctttggaacacggtgaaatcatttcttgatcccaaaactacttcaaagataaatgttcttggaaacaagttggatagaggattacttgaaattattgatgcaagcgagctgcctgaatttctaggtggtaattgcacttgtatggatcgaggtggttgtatgagatctgataaagggccatggcaggatccaaacattttaaagatggttcttagtggtgaagtacaatgttctagacaaatagtaacagtttctaatgatgaggggaccgtgatcgaatgtgataaggcatgttatccaatgccaataagaagtagtgatacatcaacagcagaatcaggatctgaagtcgaagatattacttctcccaaagcaagtgggaattatacaaacccaaggttaactcctgtccacgaagaagcaagattgattggtagggctagtggtttctctgagtatgatgagtatgttcccatggttgacaaggctgttgacctcgggtggaaggagaaacaagtaacaactcaaaactcatatggctcaacagaaaatttcctactgagggctggaaaatctggtggaaactgtgcatatatcttggctgttatcgtgggcttctttgttgccatttttactttggttcgttcattagcacttcctgtgactaagagaatacaagacacaaaatctgattctgccaaaaatatgcccaagacgactgtagacccaataaccaaggaagaatctccttccccgtcacagcttcccacaataaccaacaccgaattcttccaatccgctatg

SEQ ID NO: 93351 - DNA, 367 bp, Glycine max
  Clone ID: PAT_MRT3847_5530C.1
ctcgagccgatgtgtgatggggtgtgcctactgagattgctgcgataactgttagcgaccggactcacacagggaccagcgagtctatctcgttcctcacaggcggtgggaggatgctcaagattcaatgccggcggattcgggtaacaagaaaggaattgcggtcgcctctttgcgcggatcgtcctatgctgggcctatgaagagtatcgctaacatcttttactcaaagcttgggttcaggcttcggagggaggactatatgcagcacagttctggagatggctaagttggtgtgcttggccgggactatgctttggtatctggcgatatgtggatgctggcactcgagcggcataatggttct

SEQ ID NO: 93352 - DNA, 371 bp, Glycine max
  Clone ID: PAT_MRT3847_55310C.1
gtgggaaaaaaaataaattagaattaaatttaaccgggcgggattacaatggccccctaaaaaaattgacacacatttgacttggccctttccctccttaaaataacaatccaaaatccaaaacaaggaacttaagggggggggttaacaaaatttatgggctcaaaaaaggtactcaccccttttggggttttagggaaaaagggattttttcctacattttggctaccacctggtgagccgaacttttttttaaaaatcctttgggggacaacttattcaacaactccaaagcttcctggggtaatcctttataaaaaaggccttttttaaaaatgggatatgtagctttgggagggttgcatcctttt

SEQ ID NO: 93353 - DNA, 3103 bp, Glycine max
  Clone ID: PAT_MRT3847_55311C.1
taccacttccatcttcgttgacatgtctaccaatctctgctttgaaggaatggatgaaaggcgagagaggaagttgagttttgagaataattctgaggatgatagatgggcaaaaattggtagcctgaaaaagaaagcattattcgcgtccaccaaatttagacattcttttaagaagaaaagaagcagaaaaattgatagcaggagcaattccctctccattgaggatgtgcgagatgttaaagaccttcaagcagtggatgcatttcgacaggcactagtgttagataacatgcttcctccaatacatgatgactatcatatgctattgagattcttgaaagcaaggaagtttgatattgagaaagcaaagcacatgtgggccaatatgatccaatggaggaaagaatatggtacagatacaattatggaggattttgaattcaaggagttgaatgaagtcctgaagtactacccgcatggttatcatggtgtagatagggaaggaagacctgtttatattgagaggctagggaaagttgatcccaataggcttatgcaagtaactaccttggaaaggtatttgagataccatgtgcagggttttgagaaaacatttgctgttaagtttccggcttgctcaatagctgctaaaagacacatagattcaagtacaaccattttggatgttcaaggcgtgggcttcaaaaacctaacaaagtctgcacgggaactcatcacccggctgcagaagattgatggtgattactatcctgaaacactctgccaaatgtttatcattaatgctggtcctggttttaagatactctggaacacggtgaaaacatttcttgatcccaaaactacttcaaagattcatgttcttggaaacaagttccagagtactgcttgagattatagatgagagaatttcttggtggcagttgcacttgtgtagatcaaggtggttgtatgaggtctgataaagggccatggcaagacccaaacattttaaagatggttcttagtggtgaagtggaatgttctaaacaaatagtaacagtttctaatgatgaggggaccgtgatcgaatgtgataaggcatgttatccaatgccaataagaagtagtgatacatcaacagcagaatcaggatctgaagttgaagatattacttctcccaaagcaagtgggaattatacaaaccctatgttaactcctgtccatgaagaagcaagattgattggtagggctagtgattctctgaagtatgatgagtatgttcccatggttgacaaggctattgaccttgggtggaaggaaaaacaagcaacaactcgaaacttattttgctcaacagcaaatttcatactgataatttggaggatgatacttgggcattatttggttgcctggaaaagatagcattggtcgcgtccactattgttcgatcgtcgatgtagagtaaagatgaaggaataaggtatgcagaagcacattccccttcatacagaattttcaagatggttgtgacaattgagcagcgatgttctcgacaaatatcatcttcttctaatgaatagggaaccgtgctcgatcattagcatttcgtgtgactaagggaatacaagacaccaaatctgattctgccaaaaatatgctgcctaacacgactgttgattcaataaccaaggaagaatctcgtcccccatcgccagttcccagattaacaaagacagaactcatctcatctgctttgaaacgccttggtgagcttgaagagaaggttgacatactgcagtcaaaaccaaatgtcatgccatatgaaaaagaggagctgctgaatgctgctgtttatcgcgtggatgcattggaagcagaactgatcgctacaaagagggctttatatgaagctttgattagacaagaagaacttctggcatacatcgatagtcaggaaagaagaaaattcgagaaaaagaagttttgctgttgaagagataactgtacagaacggagctgttcggcagaatgatggagagatatatattacttctttcctgcttgtatattttaactgcacagtactttgtcttcaagatggcttgttaattttcatcataaaattcttgtatgatggaattttatttacacgtctacttctctgtctttcattctctctctctttcaatatagatgaatttgactgctgaattatagataatttttatcgtgtggacgcattggaagcggaactgatcgctacaaagaaggctttgtatgaagctttgattagacaagaagaacttctggcatacattgatagtcaggaaagaagcaaattcgagaaaaagaagttttgctgttgaagagataactgtacagaacggagctgttcggcaaaatgatggagatatatattacttcctttcctgcttgtatattttacctgcacagtactttgtcttcaagatggctttttaattttcatcataaaattcttgtattatggaactctatttacacgtctacttgtatgtctttctctttctctttgcctctattaatttgaatgtagatgaatttaactactgaattatagataattgtatgacacaaataaagtttgatccaccttttaagtgtataacttttttgcaagtcaatgatatttgcatcttgtttacgtcgcacaccaacacacacatacatacagaatgtgaaagagagaaagaaaaggtcaagttctagttaccttaatgtcgtgcatggtgcatgggaattcttaagagtttgttcaatctgtttttgtaaagcagagaaagggttgctggtgaagagaatactgtacatggtcgagtttgttcggtggtatcatacttctctcactttcaacatgtatacaaaaatgaggagaaccaattgacgtgtaataatgtataaaatcacggtgatatcaataacatacttgagaagtgaactaggggcttcttcatttgaacgctgtttttattctgtttgggtattcgaaatgaataatgttacacccaaacacttataaattatttcatatttatatactagtaattttcattatctaatt

SEQ ID NO: 93354 - DNA, 235 bp, Glycine max
  Clone ID: PAT_MRT3847_55312C.1
gtttggctgcgggggaacctggggttccgaagcctcctccagttccgcaaccggttgcgaaggcttcaaaatgtaccccaacttgaacttcactgaatcaaccaccacccaaaccttggtcatgggaatggcacctgttaaagcttaatttgaaggtgcttaaatgggtgtgcccgcttagaaccaatgctgcaaatgtggaccaaactgcttctgcaacccctgcacttgcaag

SEQ ID NO: 93355 - DNA, 1580 bp, Glycine max
  unsure (1)..(1580): unsure at all n locations
  Clone ID: PAT_MRT3847_55313C.1
caattcgtccgtatggctgcactaggagtacagaagcggggttttcagtcaaattgaacggaaccaccgtttctctctctctcacgcacacatggtgctgccactgtcactcttctcttctcctttctgcttcgccgattctctatttttgcgcgcaatcgattgtatgctttgggccagtcgttaatgataacttgaggtctggatgatgctttctgattggttgtttacatattgtaattcagaatgtggaactttgcatcgaattgcattgctggaactgtgggactgaaaaatgattcaaagcctactcattctgcttcggaatgttctgatgatgaaaactctgttataggcagagaggaagggctggaatgcccaatatgctgggaatctttcaatattgttgaaaatgtgccctatgttttatggtgtggccacaccctttgtaaaaattgtatcctcggactgcagtgggctgttgtgaaatttccaacactgcctgttcaacttcccctttttatctcctgtccatggtgcaaccttctgtctttccgtttagtttaccggggaaaccttaaattccctcgcaaaaactactttcttctttggatggttgagagcatgattggtgatagaggggatggttgagaacatgaacggtgatagagtgaagtcacattctactgtttgcggggatcatcaaccagtgtggccaattatagacagtttaaccaacggaagccaagtaagccatgacagccttcagggagggcaagtttgccatccagagtcttcaagttccaatcattatcatggtgataccagtaattacttaagtatagaaacactgcatgcatctctgcggaagtcattggttttatttgttcacttgacagcaaagttcccattgatcattatatttcttttgattgtcttatatgccataccagtcattgcagccattttggctctgtatatacttgttaccattctgtttgctctcccatcatttctcatcttgtactttgcatatcctagtttggattggcttgtcagggaaattatcacttgagatcaaagctgtatttcttctgctttgcaagcattatgaatgtaactttgcctcaccttgtggccccttcatccagtgtcttctacttcgtaattggtcaacatttccatttgcagctgtatcttttatcttatcatatatagccccagtcaatctcagtacgctttttgaatctttttagctctggttgagcttggctggttaggaggagggatatcagtttttggcataaactatttggacaaccaaggccgtggagtgaataaggtaatgaatcgtgattttgccttttcctggtggcaaatggttgtttttatctgtatttgaacttcagaagaaccccctaatttattcatcaagtgggtcattatcagaaaagctgtttttttttttttcttttcatgggcacatttggatgctcctatgaatactgctgacagtatttttgctaattgtaatctgtaattattattagtagagctattttcctggccaanaaaaaaaa

SEQ ID NO: 93356 - DNA, 421 bp, Glycine max
  Clone ID: PAT_MRT3847_55314C.1
ggaaccaaaaagcccaacaaagttgtgcttcaaaaacccttttagcctaagcggtttttatccctgcccttggggtaaaccaattttgggccaaatttataggggaattatggggttcgttgggctaatggagttctccaaaaatttacaaaagaaaaaaaaagggggttttctaagaatggtttaacaaagaaatggtcaaccatccacgttaaacaggaaccggaaaaccctttttgggcttgctttccaaaaaattgggggggggttggcctaagcccccaattgggggggcccattgggggaccttttgaggggtattcggaaaaggtgttccagcccttaacctggataaaagggccccccatccttttctcataaaacattttgggagctttttttcgggcttgggggggggggt

SEQ ID NO: 93357 - DNA, 400 bp, Glycine max
  Clone ID: PAT_MRT3847_55315C.1
aattaatacgcgcccgcccacgcgcccgggaaacggactttttcccagggcactccccgcagggcctaaaagaatgcctctttctatagggggaggagctggtgcaaagaatgctattctcatgaatatgccacatgctggtctttcaatggggagacatattgttggacatctcggctttgaagtttctaagatgacttctccctacattaaatgcacagtgtctttcttcataccattagtcaaatttggctgatgacaccatcaatcttgaggcttatgcccacaagctggtgccgcctggcgagattccggaaaacagtgactgaacatttcccaagaggaacttcttacagcccggtcaactcaggtgcgggctgcaacaactcctgtggctgat

SEQ ID NO: 93358 - DNA, 182 bp, Glycine max
  unsure (1)..(182): unsure at all n locations
  Clone ID: PAT_MRT3847_55316C.1
caagtatgttgcctttaaaanatgctccgagtcggtgtttgcccactgttatcaagtttgtctacttaataacatgtgacttnaggcattgtgccactatcttaacagtgaacgtgtgctgcntgtattgtgtatatactggagaattttaagaatgcttcgtgcgagcgtgttgtgtatcg

SEQ ID NO: 93359 - DNA, 563 bp, Glycine max
  Clone ID: PAT_MRT3847_55317C.1
cgtgggcggacgcgtgggttcaccttcctctcgtccccatactagtgtccttcactctgccgcggcagaaaacactcaactcgcgttccagtttctctctgcgcgggtttctgctccactccgtcacaaatggcctccgaaaagaaactggcgaacccaatgcgagaaatcaaagtccagaaactcgtcctcaacatctccgtcggcgagagcggggatcgtctcacccgcgccgccaaggtgctcgaacaactcagtggccaaacccctgttttctccaaaggtacactgtgcgttcgtttgggattaggaggaacgagaagatcgcgtgtcatgtgacagtgagaggggacaaggcgatgcagcttctggagagtggcttgaaggtgaaggagtatgaattgctcaggaggaacttcagcgacaccggctgcttcggatttggcattcaggagcacattgatttgggaatcaagtatgatccttcgactggcatttacggaatggatttctttgtcgttctggagcgccctggctaccgtgtgggacgacgctgtcggtgc

SEQ ID NO: 93360 - DNA, 320 bp, Glycine max
  unsure (1)..(320): unsure at all n locations
  Clone ID: PAT_MRT3847_55318C.1
gaagagcataagcaatctcatggtgtttcatgtaataaagctgttgacgcatatgttaactctgatgctgagaaagatgaccattaatatgagggggggagttctaatacttatatgccgctcagagcgatcatcctatatctactaccgattatacgattaaacactgattattatggtacccatgtcagccctgctccaacttgggatctatctcactctaaaaccagaaatctatgctcttctaacctagggtgctctttangcaagcgtgctatcacttgaaatcaaactgttaaagcttcgatggtttcagctta

SEQ ID NO: 93361 - DNA, 245 bp, Glycine max
  unsure (1)..(245): unsure at all n locations
  Clone ID: PAT_MRT3847_55319C.1
ttttgggttttttttttttttttttttgttgcgggaaaggcgtgcattattataagcagagattcggaattcaaattagccgaacgttatacagaagcgaccatttacgaaacattaaaaaaaaaccgaaccaaccatgagcttgacacacctattacatgtggggggggntngaacttgttgaaaggcaaaacattaccactttcttctaaggatgttggttgaccacaaaacaccnnagtgca

SEQ ID NO: 93362 - DNA, 636 bp, Glycine max
  unsure (1)..(636): unsure at all n locations
  Clone ID: PAT_MRT3847_5531C.1
tttatttttttttttttttgaancaagaaatcaaatgtttctaaggggagggcaagaactaaaagttggtttagacctgaaccccgctagaggggtgaaacacattgatcactcttcgccccttagtgagtgtacaaaaaaacacatggcaaaactgcttttggggaaaacaagaaaaaaaaacttcggtgatacaaaaaaaacaaagggggaaaaaaatagccagaaaaaaaaaaaaaacggagtgttccaaaaaagaaggggggcgcacaaaaacaccccaaaaaaaatatcagcgcgccctaagaaccggcccccccgatcaatagggggaaaaataacaacacgcacaaaaaaaaaaaacaacaccgggggggcctcggggggaggaacaccaacccccaaagaaataaaagggatcgggacccccggccctggaaaaaaagagaaaaaaaaacacttgtggagaaaaaaaaaatagcagagccccaaagaaatgggggagaaatggttcatccccaaaagaaaacagggggggggggagaaacaaaaagaaatcccaatttttcgtggggggaaaaaaaaaaattggggggggggaaaaacaaaattacagggggggggggggggtggctt

SEQ ID NO: 93363 - DNA, 303 bp, Glycine max
  Clone ID: PAT_MRT3847_55320C.1
agaacagttggtgcaactaatgtttgaaacattcaatatatcaggattttatgcctcagaacaagcagtgttatcactctatgctgtgggacgtatctcaggctgcactgttgatattggacatggaaaaatagtggaaagaatcatgtacttaggctgctatattcggtaacataggttcctaggattaatttatcagcagtttcacagttccaccatgccagatattgcaccggtaattgagggtgctgttcaccacatcgcctcgagaagatttgagtttggaagtactgatctaactaa

SEQ ID NO: 93364 - DNA, 182 bp, Glycine max
  Clone ID: PAT_MRT3847_55321C.1
ggttccaaaaaaccaccaaagggttcattttcgagatgacaacacaaggggacctggggtacctctaattcgatatccaaaaaaaaaaaaaaagcgggcgctctagaggacccaagcttacgtacccgtacgttccacggcatacccatgctataccggcaccaaccatcaatccagagaca

SEQ ID NO: 93365 - DNA, 488 bp, Glycine max
  unsure (1)..(488): unsure at all n locations
  Clone ID: PAT_MRT3847_55322C.1
caggattttatgcctcataacaagcagtgttatcactctatgctgtgggacgtatctcaagctgcactgttgatattggacatggaaaaataggtatccacacctgaatgctgtggtccatttcttgccattgtatataccttgtgccttgtgtattctagataacatttttttttacaatattctttttgtcttgttttctgcatggttgagtggaaagaatcatgtacttaggctgctatattcggtaacataggttcctaggattaatttatcagcagtttcacagttccaccatgccaggtttttccttatgacttagtttcctcactgtcaattgaaagctgagacaagttattttccacaattttctcttctgcagntaagtattaagagttacaatattgtaactntctcatgtaatcatggntaacttttgattttaagtgtagttggtaaatgcaatgaggaaaatattactcaattta

SEQ ID NO: 93366 - DNA, 659 bp, Glycine max
  Clone ID: PAT_MRT3847_55323C.1
cttgttttttttttttttttattaattcataaattaaaacataaattccaaactatcatataaaaggaacaaaggggtgtgctagaagaggtgtagctagtagctacaggctacaaggttacaaatggccaaaatgaatattttacaggagatatccacattagaaagatatgcaagctcctagagctccaacatatgcatgtttaaggaacaggtgtttacggaaatcttccactgctaccagtagatgcagaggaataaatagttgttgaaaccatgtggatagatactgttagaagcatttccggtgaacaatggaaggtccagtttcatcatagtctgccttagttatatgctgattttgagggaaaaccactttggcaagtatggcacctcccacccatgcagaatacatggttaaattttctggcatatattctggaggcttaacgagtgtaggttgaacagcagatgaacttaagctagattccttctgaaatctctcttcaaacctgccatagaagaagtgccaccacaaaccacagtattttccagcagctgccgttggttatcagatgacacagttgaaatagcacggacaagctgatcaacaatgccatgagcctcttaacccagtagacatggctgggataaagctt

SEQ ID NO: 93367 - DNA, 314 bp, Glycine max
  Clone ID: PAT_MRT3847_55324C.1
gcaccaaaactcggatgggcttctgggctttactaaggtccttttcccatgagggtttttactaatcccaaacctccatttaaccaagaaaacctttcttgctagctacaaggtattcaaactcatttgctagaagttgaaaaagaataaaatgcagcacatctaaggccccttcgaattcaccgctaagaaggagtgataagatactagaagaaagcaactgaaagccaaagactctaaaagtgttagtgggaatggccctttacaaacatatgctggatggtgctcttgccaacaaatggggcactcctgga

SEQ ID NO: 93368 - DNA, 295 bp, Glycine max
  Clone ID: PAT_MRT3847_55325C.1
ggagttgaaggggttagggtttaggaagggatggaagcggcagtggtggacgtcggctctaagctcctcaaagcgggctttgcaattcctgaccagactcctgccatggcccgcacttggagaggttttatctccttcaatgcataattctaagtttctaacccacttagctattctcaaataattcccactcagatgaagcaattactcgatgatggatccgtcgcagataattcactggctgacaatgtcaccgttgattccgttgtgcgaggatttattagagattgggatg

SEQ ID NO: 93369 - DNA, 585 bp, Glycine max
  Clone ID: PAT_MRT3847_55326C.1
atttaaccgatcttaacttctaaattctaaattctaaaataagttaacacgtcagaagtgctacatctcctcttccatagatctattaacactaccaactctagtttgcattcttttctatttaaattgcctattttagttctcttccattcatttctagcttccaaattcatagaaagtcaaattataaggaaaataatctttctaacccttgttcctgtcaaagttctggttcttgcacgtttgaaaaatgaacaagaaagcacctacttgcgttacaaattggcaggttataattgagaacaaggatggtatttttgatgggttgcctcacttaatttatgcatccagagagaagcgtccccagtatcatcataattacaaagccggagccatgaatgtcttgactgtgacatgtttgtgaacaatcccaagattgttcaacacgctttgtgcattttgatggattcacaaagaggaaaagaagttgcgttcgttcaatgtttccaacaattctacgatggaataaaagatgacccttttggaaatcagtgggtgattgcatttgagtacattatacggggc

SEQ ID NO: 93370 - DNA, 1150 bp, Glycine max
  Clone ID: PAT_MRT3847_55327C.1
atgcgggcggacggagcacaggcgggagagggaaaagagttgaagacttgaagtgaagaaagaaagaattgagaaaggatagggtttagggttggcaaaggaaggaagggatggaagcagctgtggtggacgtcggctctaagcttctcaaagcggactttgcaattcctgaccagactcccgccatgataattcccactcagatgaagcaattgctcgatgatggatcagtcactgatagttcactggctgacaatgtcaccgttgatcccgtcgtgcgaggatttattagagattgggatgccattgaagatttgttgcaccatgttttgtatactggcctcggatgggaaattggcaatgaaggacaaatactatttactgatccactttgtacccctaaggcgaacaaagaacagttggtgcaactaatgtttgaaacattcaacatctaacaggtttatgcctcagaaccatccatgtcttcactctatggataggccctgtaaaatattcactttggccatattgaacatggaatgatctgtagttacccgctaacccctttgtgctttttttcacatagctttgtaattttttgcagaaaaggatgaactgacctaattaatttcctggatctagaacttggaatgttcaatcaacatgttaatatcagcatgtctgatgtggagaaaataagagatttgtactcatgctgtgctgaagatgaattagcttatcagaagaccggatattcttgtcctatggagaagcacacccttcctgatggacaggtaataacaattgggagagaaagatatactgttggggatgctttattaaaccgatgtggacctcgtttaactacatgcaatattatttctttgctcaagtgtcaaggcacccacaggtagatgatttcagtaaaacctcgttctgacaattcatataatgtatgttgcaacggcaccagcctccctgtcttagtagggactacagcggcaccgcattttgtgtgctcccccgggtcctcctcctgtgctgttgcacagagtttctcaaacttgtctgatttcccttttttgtttaatggaattgccagtaatagcttaatattcgttttccacttttccaggcgaacaaagaacag

SEQ ID NO: 93371 - DNA, 1217 bp, Glycine max
  Clone ID: PAT_MRT3847_55328C.1
gcagagttaattgcttcatctcatttcacagcacctattgcatgaaaccatagtcacgtaaaaggtataacaactacgtatactgcagttaagggaaagttgattagaagtcttgcctataacttcccttccaaactattaatgagatatattactaattcataattttaagacaaaaattacaaaactatcataaaaaaggaacaaaggggtgtgctagtagctacagcccacaaggttacaaagggccaaagtgaatattttacaggggatatccacattataaagatatgcaagctcctagagctccaacatgtttgaggaacaagtatttatggaaatcttcgactgcaacctaggaagtcgtaaagagtgagaagattgcattaatggagatcgctgcagcttttaagatatgcacgcacatggacatctagcacttggaatatacaaggattatggcatgttacggtaccaacagttgttaaaatcatgtggatagatactgtcagaagcatttccgatgaacaatggaaggtccggtttcatcatagtctgccttggttatatgctgattttgagggaaaaccactttggcaagtatggcacctcccacccatgcagaatacatggttaaattttctggcatgtattctggaggcttaacgagggtaggttgaatagcagaaggaatctagctagattccttctgaaatctctcttcaaaacctgaagtaagaaccaacattgacgagtaagctttttcataaaaagctatcagcttactgtgagataaccctcatcttgtcatgaacatactgaactaattgatgccttaaccaacatagatttcctggttaatcagagaaaacctaaattccatatgcaactaaatgcaaagaagtcattgaagagtggagtatacagtacatttgatgcatatcaaggaacaatacatgcagaacagcacaggacaagtgagttacaagacaagttttgttcagtctactatttgggggtgaatgcacaacataacaaattgcgatgttcgttgtttgatgcacgtcagtacgagaaagaacaaaatgaatttattataatacccatagtgctatataatgttcattttgcatgatgaaaaagcacaagattttgatattttaacagttagcattcaatatatgtgtgtgaataactgaatatattcggacgcgtgg

SEQ ID NO: 93372 - DNA, 367 bp, Glycine max
  Clone ID: PAT_MRT3847_55329C.1
ttctaaaggatctacactgccgggaaaagagtgcttttctccctcgattggcgagaactcgctgactacacttaaccaaaggactagctgcgagacacatcatctaatcttgaacattttccaaaatgacaacacctttcacaaaagcggggtttcaacaggacattaaggggaagccgaaatacgctaagcccttataatgctgcaagaacgacatctataccggacgcctggaaggctcatgatttacaagatgataactgcctcaaagtatactcggaaaggtgctaggattatgcgggaccccgatcaagcacacagcctgccacgcaaaaaacgatgatgacgaataaggtagtcctatgac

SEQ ID NO: 93373 - DNA, 292 bp, Glycine max
  Clone ID: PAT_MRT3847_5532C.1
gcaaaagtacaccctatcttattcaagccgagagcccctttgggcgtccaaatctaggagatcagcagccgtcgactagaccacacaggcaccagcaaaagtagaggctgcgccgagatggatcatcccaccacaactggacccaaacaacacatgcccgatgttaaggggcactaccagtgggctcctgcgcaaggcacaggaggaggagtcatatgtcatgacgtaggactcatccaaagaaaagatctatgaaatgccaactggcatgggcgctatcatgagggagggt

SEQ ID NO: 93374 - DNA, 316 bp, Glycine max
  Clone ID: PAT_MRT3847_55330C.1
gggaaaaattcctgaactttatttgcaaaatcattgtttagggttcaaaccgctctccaaaaaaaaccccgcccctatataatattaaaaaatggccacgggggaaaaaaacttccttgggcgagttttctaaaaataaaaagaacccttgccccccaaagaaaaaacccccctgggggatctttttctaaaaaaaaacattttttttcctgaaaaaaacaaccccgggggggataccccttgggtggacaaaccccttttttttggggccaaatcccaaccttgggtacccccccctgggaggtaaaaaaaatta

SEQ ID NO: 93375 - DNA, 2353 bp, Glycine max
  Clone ID: PAT_MRT3847_55331C.1
attgggcgaaaagaaatagagggggagttgaaggggttagggtttaggaagggatggaagcggcagtggtggacgtcggctctaagctcctcaaagcgggctttgcaattcctgaccagactcctgccatgataattcccactcagatgaagcaattactcgatgatggatccgtcgcagataattcactggctgacaatgtcaccgttgatcccgttgtgcgaggatttattagagattgggatgcaattgaggatttgttgcaccatgttttgtataccggcctcggatgggaaattggcaatgaaggacaaatactatttacagatccactttgtaccccaaaggcgaacaaagaacagttggtgcaactaatgtttgaaacattcaatatatcaggattttatgcctcagaacaagcagtgttatcactctatgctgtgggacgtatctcaggctgcactgttgatattggacatggaaaaatagatattgcaccggtaattgagggtgctgttcaccacatcgcctcgagaagatttgagtttggaggtactgatctaactaatttcctggctcaagaacttggcaagtccaatccacaagtaaatatcagcatgtctgatgtggaaaaaataaaagagttgtactcatgctgtgctgaagatgaattagcttatcagccgatattcttgtcctgaccctatggacgcttgatagcaaggcgcgaggaaagatatactgttggtgaagctttattccagccatgtctactgggtttagaggctcatggcattgttgatcagcttgtccgtgctatttcaactgtgtcatctgataatcaacggcagctgctggaaaatactgtggtttgtggtggcacttcttctatggcaggttttgaagagagatttcagaaggaatctagcttaagttcatctgctgttcaacctacactcgttaagcctccagaatatatgccagaaaatttaaccatgtattctgcatgggtgggaggtgccatacttgccaaagtggttttccctcaaaatcagcatataactaaggcagactatgatgaaactggaccttccattgttcaccggaaatgcttctaacagtatctatccacatggtttcaacaactatttattcctctgcatctactggtactgtaacatgctgtaatagctgtatattccaagtgctagatgtcgtgtatatcttaaaagctgcagcgatctccattaatgcaatcttctcactctgcatgacttcccaggtagcagtggaagatttccgtaaatacctgttccttaaacatgcatatgttggagctctaggagcttgcatatctttgtaatgtggatatctcctgtaaaatattcattttggccatttgtaaccttgtagcctgtagctactagctacacctcttctagcacacccctttgttccttttatatgatagtttggaatttatgttttaatttatgaattaataatatatcttgtattaatgttttaataatagtttggaaggcacacctgaatgctgtggtccatttcttgccattgtatataccttgtgccttgtgtattctagataacatttttttttacaatattctttttgtcttgttttctgcatgttgagtggaaagaatcatgtacttgctgctatattcggtaacataggttcctaggattaatttatcagcagtttcacagttccaccatgccaggtttttccttatgacttgttttcctcactgtcaaattgagctgagacaaattttccacaattttctcttctagtagtattattacaatattttaacctcatgtaatcatgggacttttgatttcaccggaaaagcttttgatgggatttatttgcggctcgagttcaaacaggacagttcctttacgcttgtattagtacatgtggtaggccttcatttgactcagattcaaaatgctaactcactagatgtttaggtacttgcatgtttttaaaaactgtagtggatctccattgactatatgcaatcatatttccttgctcaagtgtcaaggcaaccacaggtagatgatttcagtaaaacctggctctgacaaaatcatataatgtatgttacagcaacagcagcttgcttatctttgtaatgagcaagcctgcaccagattcagtttggtccccagtgacctctacctgtactgttgcacagattttctgcacctctcctgtaactaattattacactttgatttgcttgtattttgttcttcatcgataacatttcttaatcagttatggtgaagttagtaccaattgaagaagaacttaacg

SEQ ID NO: 93376 - DNA, 385 bp, Glycine max
  Clone ID: PAT_MRT3847_55332C.1
ggctcgagcatgaactcggtccctatgaagagccatgtaagaacttacaagttatgcgtcgaacaatatcttgagtgagttggatgcagcattcgatatttgcttggggtggcggcgggagatcccaaggttaaataatgcgaagatgatacgctcagagtgcggcataacattcatgataggctattgcatatcctgtggggaactcgaagcattttcagggctgacgattctagctgaccgaataattcctgtcttctaccatttagcgagcaatccatgagttagtcctaggtcgaccacacaatatatgaattacatgtagtatatataagaaattttccgactttaacagtcaaaagggaaagagaacagggcaggcgtt

SEQ ID NO: 93377 - DNA, 542 bp, Glycine max
  Clone ID: PAT_MRT3847_55333C.1
caaaaacaattgtttattcttattacttatcatattacaagctttcaacattctttttttttaaaggattgtttttttatttattattacagtaaaaaaaaaggcccttacatatgattttttttcttaaataactttttgagaaaggccattcatatgaatataaaatgtaaaaaataaatcaataacgaaaaagctacattgcactggtggaacttgaattcattaatccatgaaaaaaaaaaaaaacgccacatgatgcattgccttaattaaaaaaccccgctttccaaacaaccaacggctgtaaaaatccaacaaaaaccgcggcttatattacagcacggtgtgcccaacttccttgattgttaggaaggcgaggtttttttcaaaaaactcgcagtaccccgcaacaaacctatttgagtttcatggaacccataaatgcacaatctaatatgtcaaaaaccaagttcaatcctaactttcggtaaaaggcgcgcgcgtatcatgataaacactgaaaataagggccttatagc

SEQ ID NO: 93378 - DNA, 580 bp, Glycine max
  Clone ID: PAT_MRT3847_55334C.1
caaaaaacaactttcaaactctgagaaagaatggctgccaacacattgatgagtactgctatctcagccttcccatctctcctttcttcctcaaaatccagatttgccaccgcagttcctctttctagctttggtgtcaccaatgcctcttcttctcgcttttctatgagtgctgactggatgccaggccagcctagacctccttaccttgatggttcagcacctgggtatgcttcaatttccctttttttatttgtttagtacaataatgtttcaacatgttttcagttcttgaaattatgatttgtttatttttctagaaaaagaacttagcatgtagtgtacattgaaaggaacttatgttttcataccctcatttttttaggcaatcatattattggtgtgaaatattacagtttgatgaattaatctctgttggaaaacttgtcttgaacatatttagtgggaaaatgactaatctaaactatacaaactaaaagtacattgttttttattaaatgtaaaaatgaaagtaaaaaatataaataaatagagattggaactgaaaagaaatcacttt

SEQ ID NO: 93379 - DNA, 176 bp, Glycine max
  Clone ID: PAT_MRT3847_55335C.1
cttcacctttcttcatacaacacaatatggatgaccaaattggtattaataagttattccaatggcttctcaaggttaatccttacctcaccttattgttccttcatttaaactactcatagttttttatcatcactataatttctttcaatcatttcataattcatttcatactt

SEQ ID NO: 93380 - DNA, 311 bp, Glycine max
  Clone ID: PAT_MRT3847_55336C.1
ccagttattgattgggtggactaaagcgcatcctcacaccgcggtactggcctaactgtggaaagacgggtgctttcattgattccatctggtaagcctgttaagactgggctggcacaggaccctatgttgtactagcctataagtaatcaccagagacttcccaattttcggggtgaagagagaaatctttaaggagaccgatatgcttggagaaggtcataaaagaagccataggtatgggaatgtcaagaatgaaagtttatgattgtcctcgcaatcatactctggtgcaatggacaatgcatttt

SEQ ID NO: 93381 - DNA, 395 bp, Glycine max
  Clone ID: PAT_MRT3847_55337C.1
aaacaaattgaatagatgaatgattaatgatgctttgtatcatatacaaacagaaatacaaataacaagcattcagtacaattttttttttgacaatgcatataaatatatttatgtgggggaaaaaagtctataaaaaggggagagtgtagtagaggaaaaatggacttaaaaaaaaaaaaaaaaaggggcagccaaggatcaaccacatccacaagtgtgtgaaaagaaaggatccccgaaagagaaaaatcccccaaacagagcatgagggggggggggtttgcaagaccaaaaaagaaaagaggctctggggatcacaaacaaaattaaaaccttcatactgaaggagtgaatcatctggcctaggaggaacggtgaaaacaaaatccatt

SEQ ID NO: 93382 - DNA, 454 bp, Glycine max
  Clone ID: PAT_MRT3847_55338C.1
gggcggggggccactaaccaaggtcctaaaaaaaaaatggaccagggagggggggaggccttttgtattcccggtggggggtcaaaccttttgggaaccagggggtattttaaaaccagaccggaaaatggaccagaaaatcaaaaaggggccaggcatggcaaagttggaggatttggtggtggttgggggaagggggggaccaatggctggcttgcaattagaaccgcaatggatggcatggaaggaaggggtccatgctttttttgttgggaaggaccaaaattccttcaccacttttgttaaaggttggttggatgaactaaaggtggccgttggctaaaaaaatatggccaacattaaaaaccccaggggtttgggttatgcaaggattccatcgaaggagctaaatttggaaaaaaagatggcggcccctacgggggtggttctggac

SEQ ID NO: 93383 - DNA, 354 bp, Glycine max
  Clone ID: PAT_MRT3847_55339C.1
ggctcgaggactcaagacactcattctaggttactatggaatgacttttgatagtttggaggcgatcacaatgcttctgatcgacaacattacgccatgtatgccactaaggggaacaatcacagcgattgggtgatcttgaacctttgacctgcattggtggtttgctaactggtacaccaaactacactgctgttggaccctatgatgagatgtctgactgccaaacaagccatggaataggccaacatccttgctgagttctttcaatggcaacctaaggaaggccttgtccttgtgcatggctctgctggtggttctggcttgggctatattgctctatatgaagccaac

SEQ ID NO: 93384 - DNA, 1140 bp, Glycine max
  Clone ID: PAT_MRT3847_5533C.1
ggcgttagggtttggcagagaacagaaattgggaaattcctcaatcttttgaactcgtcaagtgcgtgcaacactgtacaataatcttcatcgtccttgaaattcccaatcccctgtagtggtagtaagttgctagcaatcgagaatgggagggcacggaggtctcaacattctcccccaaaagcgatggaacgtttacaatttcgacaacagagagaaggtccgtcgcgacgaagagcaagccgccagggaggagcagctcaagcgtgaagagacccggaagcgcgacgccgagctccgcctcgaccgactccgcgtcgctcgcggcttggcgccgtcgattccgccgcctcccgaatccgaacctcagccttcctcccgctccgaacccgtgccttcctccgaccctggccacatcaacctcttcgaggggatcaacatttttgacccaattcagaaggacggtgctgctgaaagggattgggcgaagaggaggaagaagattgagaagggaggaggacccaagcccaagcccacagtttctgtgggcccggaggatgagaagtataggctgggctatgggcttgcggggaagggggttcagttgccgtggtatcttcggaagcctgatggtgaaggtgtcggtgatgataataaggatgaaggtggtgacgtggataggagagaaaataagggtgagaagaagaggaagactatggaggaattgagggaagagaggttgaaaagggagaggaaagagaaggatagggagagggctttgagacacgagaagatgcagagtcacagagatggttctggttatggcagtaggaggaggttcaccagatgaacataggttttttgtgttctttttctgaactgatttttgtttctgaagtttcatgtaattggaagttatgcaatttggattcagtagtatattgtataagggaagataggtttatatagttaatcaaagtggtttggttttctttcatgaagttattttatgagctgatgcattgatacatacacagatgattcctttgttgagaaaattccaatgcagaagttgctattagctggcagtctgtctatgcttgtatgattttcaatcaaggtttcgcagctttgttgtaa

SEQ ID NO: 93385 - DNA, 1039 bp, Glycine max
  unsure (1)..(1039): unsure at all n locations
  Clone ID: PAT_MRT3847_55340C.1
cactgtttcaatttcattttcaattttgacattatctatatgtctggactgaattttctaacaaccagaattttccatgaaggtaactagagtttggtctttaccattaaccatttcataactctcaaccaatgaccatatgaaaaaaaaatactatgctacctgtttcaccttttctgaaaagatgaagcagaactgaagtttgtagtgaaatttttttgagtactgaacaatttttgagtactgaagcagctctatggtttcgcctactctagccctttggacattttctccacaaattcatggataaaatatttaagggggagaaaggcaatgacactgttgctaataaggtattgtaagcttgtgatgttgttgtttgttggtttggcctctggctctttcacttatagggatagtattttgcattgtgttatgttctgtaatttgcttggctttggtactagtttctaactaatgctctcatgaatgaaatatactattattaggtgctctcagtcatgggtattttagggatcatttgatgtagctatatgtttaaggacaccctcccaagacccactaaaccttgatgccctataactataccacccagctaactgcattttgatgatgtccatcagtcacctcgtcagacacatgtaggctgaagtagtaacttgtggttttgtggaatcgtgtccccaggattagacctctccagaggagcatttcgaaacaattatttggtctagaaaaggtatattaggcattaaaagcttaatagattgtagaagctgctcaaagaacagttcctgtcactactacaaaacttgcttattacgacgcgctaacaacgtcggtcgatatacccctgtctttgaaaataatggaatgacacgctcgtaattaaattataaatttaaggacggtcattgaaaagaccgtcgtggggcttctctatacaaagacgatcttatcccaccgtctttgaatgatnataactttattattttctctctctcttattgcgctagca

SEQ ID NO: 93386 - DNA, 800 bp, Glycine max
  Clone ID: PAT_MRT3847_55341C.1
ctcatgaaaagaagaaacactgatcagatgatgaagatcacgttgctctcaacccttttactaggatgtctcttggtcatgactgtccaaggagattcatcagcaggagttgttccagcggtggctgtagttgaggaagggaataaaaacaagcttggagtgtcatctcaaaaggaaccatttgtgagaagtggagctggtcacgtgaggaagctggggcttggtgggccgcgtgccggcacaaatgaggtgacaagtgtggactctaagaatggaaaaggagcatatggaggagagacttcaaagatttcaggtaaggatgatgatggtttgaagaagtcttctggatcacgagaccaaaagaatgatgatcagaagcttatgatgatgggaccaaaggaatatttgaaatccaccaagttcttcgtagttccaagaagaattcccaccagcacgtacccgaagtcatgttcacaagactgcattattgctgtgccagttaaatccagcttagggagttcctcatcaagtcatgaacatcaaatttctgaagaaacacctcagaaagatgagacacaaagatttgctgacgctgcaaaagagattgcaaacatgatgaataaggattatcatggaagaccgagtcacaggccaccaatcaataacaatgagcctagaaattgagattatcaacagtcatattaatgacatagatatatgtatctgctaggctcacagttttgcaccaaggttgtgcggtaccaactacatggtaatggcctagatatatatatgatata

SEQ ID NO: 93387 - DNA, 335 bp, Glycine max
  Clone ID: PAT_MRT3847_55342C.1
gaagtagttgacaaggacataaaccgcaaaaaatccatgtacgatgcagtcaaaaacctaagctgatggaaaagaagcataggcatcttgggctaatcaaaaaaactgactgcacggcggcactgaattggtttccattatacacggctactgaaccaagttgctactcacttcttaagagctgcttggacttgacaagcctatcggatcggatgggagctcctttcactgtccgcaccggggctaatccaggctgacacgcctacttagagggtgttcatcgggatcccactcctggggatgggcatgcccccccacccaaatgggggaaactt

SEQ ID NO: 93388 - DNA, 320 bp, Glycine max
  Clone ID: PAT_MRT3847_55343C.1
aattcggctcgagtgctgcggaatcgtcggcgaacgtcagcggtcagggattcgttttcggcagttttgacgacagcgtcgttaactcgctcggaggaatggcgttggggaattcgcaacactctgagatcgatgaggatctgcacagtcgacagctcgttgtgtatggtcgggagaccatgctaaggctctttgcgtccagcatcctcgtttccgggatgcaaggtcttggtgtcgagattgcgaattatctcattcttgctggtgtgaaatctgcaacctttgccgatgaatgaactgcgtagtcatgggatttgtct

SEQ ID NO: 93389 - DNA, 536 bp, Glycine max
  unsure (1)..(536): unsure at all n locations
  Clone ID: PAT_MRT3847_55344C.1
gnttctgcaaaaccgatccaatttggtcaatctgcatttggtaccaatgcaaaggatttcaagcttttccaacaaccgccttctcagccttcattcagttcaaatattcataccgttgataaaactaccgatgaatcgtacagaggtgatgaggggtcggacaaagaagacgctgcagaggaattcgttccggacgtgcattatgagcctgttgttcctcttccgcccgaagttgaagtttctactggggaagaggaggaagaggtcattttctctgctcgttgcaaattgtaccgctttgataaggatgctcgggaaaacaaggagcgtggtttgggtgatatcaaattgctttacaatcctcggagcagncggtatcgntgtgtgatgcgtcgtgagcaagttttcaaactgtgcgcgaacttnccaatttatccggacctgaaaattcatccgcgtgagcatatgccaaccgtttacacctgggcttgcagggacttcagcgatgaacccccccagggagatgacgtgacgtt

SEQ ID NO: 93390 - DNA, 295 bp, Glycine max
  unsure (1)..(295): unsure at all n locations
  Clone ID: PAT_MRT3847_55345C.1
acaaacgactaaaaatttattcacattctatcgggggaaattcaactttcaaataaaaatcacggagtgtgtcctctacacaaaattcacgcaaacttaaatcaaacgaggacacatttaataataataataatgatgatgataaaattgagaaaagcttgaacctttaaacttgagctttaaccttattttttcactcaaaaccatacttaatgttnnnntcctgaatagacaacagttctggaaattttttacttaatttgtcatcgttaagctcattgttgctccccggtgc

SEQ ID NO: 93391 - DNA, 217 bp, Glycine max
  unsure (1)..(217): unsure at all n locations
  Clone ID: PAT_MRT3847_55346C.1
gataagcaaaacatgctatttattcaaacaaaattgctaatnnnccaagaagttcaaagatcatttattttccttaatactactggacctacatgttcatataaagactaccaaaaacaaaacagcatgtccaacatcttcatcctttattaagccaataaaatacaccaactctcacactactatttacaataaatatttcttatttaacctcatt

SEQ ID NO: 93392 - DNA, 589 bp, Glycine max
  unsure (1)..(589): unsure at all n locations
  Clone ID: PAT_MRT3847_55347C.1
ggctcgagtggacttccaaacttggaggagttggttatcaagagtatgtgtgatttgaagtcaatatggcctaatcaactggctccaaattccttttccaagctgaaaagaattatctttgaggactgtgaaggctttgattatgtctttccaatctctgtggctaagaagcttcggcagctccaatctcttgatatgaagcgctgtgtcataaagaatattgttgaagaaagtgatagttctgatatgacgaatatttaccttgcacagttatcagtagatagctgtgataatatgaataccatagtccagccctccgtgctatttcagaatttagatgaattggtggtaagtgattgtcatggagtggtaaatattataacgccatcaagggccgaaagtttaccaaaactccgcattttaagcataggtagttgtaataagctagaggaaatttatggaagcaagaatgagaatgatgcaccattacgtgaaatttattttatgaaattggagggattattattgggtagggtaccgaggctcacaagcctttgccggngaaaaatacacttctactttcaatcac

SEQ ID NO: 93393 - DNA, 343 bp, Glycine max
  Clone ID: PAT_MRT3847_55348C.1
cttcttggtttccttgagcttttggtcttatggcgccaccagattctccctaaaaaaaaaattgggtaccgtgccggtggtgccgaacaacgagctacagagacacccccgcccctccttgaatcagcagcgacaactgcttttacatagtgggagacctccttgtgcttatagaaaatgggggggggcaacaagttttccttggggaaaaaaaaagaggccccttcttgggggggaaaaaaaaaatgtcccgggctgacaaagttaatgcctatggcagacacagggtttcttaaataaaaaaagacccagacgggggagggggggtttcatgcgagggggg

SEQ ID NO: 93394 - DNA, 348 bp, Glycine max
  Clone ID: PAT_MRT3847_55349C.1
aactccctctctccctttcaattttcaattttctctttcctcccttatgtcttgcatcgcgttatttaaacaccctgcttcctatgactattccctaaaatcctattgcgagagcggtgtttccgcttgagacactccttcgtctttctcctaaaactccgacctcgttcggaccagattctttcgtggccttgatcctcacttctttaaaccctaggatctgacattttccataaactttttttctttccttatggacctggctcgtcaacatttctttcacatttttctagcgtgcctttgactatattgtcccgcttgtaaattcctactttgaatttcatctct

SEQ ID NO: 93395 - DNA, 432 bp, Glycine max
  Clone ID: PAT_MRT3847_5534C.1
aaaaaaaagatttcttagggtgaaggttggatctagttatgatttaggtatctcaattggccgctcttccgctgcgccgcccccttatcgtcaccacaaaacctaagacactcaatagatcttaacttggtaaccactttctcacggcaagggctgtttgaactttgaaccgccgccgtcaaccgtctgccactgccaggttagtagaagaatacaatcaccactttatattattcgatcgttggtatgtatgactctcttattgtaaaaattcttatcatttatgaatttatgatgatttgttattagataatagtgtaaaaatcttttacatttactttgccgaccacaaagccatgcctctccatagctgcaagctgcgtcatttgtaaagattttgctagagttgtaagagcaacagaattaaattct

SEQ ID NO: 93396 - DNA, 229 bp, Glycine max
  Clone ID: PAT_MRT3847_55350C.1
ttgctcacgcactcaccatactacacctattgggcgtgcttggtgtcgcataccctaaagaccttatggggcatcaagcccaagaccagtggtcaccagaccatgggaaccactctaatgggggaaaataaaacgcaggaaacataccagcaggcgaaacttgatccaccgccctattgcatgctaccaacaagctatataacgccaccactaaactcacagaaaatgc

SEQ ID NO: 93397 - DNA, 183 bp, Glycine max
  unsure (1)..(183): unsure at all n locations
  Clone ID: PAT_MRT3847_55351C.1
gnaattaaggcgtgtaataaggtctcaggtcgttggtgggttgtggaaacagtgaaagattatttatttaagaacattgaagttttgaccccccaaaatttaaccagttggggaggcggttaaccagtagggaacttacttggaaacttactttgcaaagggagaggaaaagatgatcttgaa

SEQ ID NO: 93398 - DNA, 339 bp, Glycine max
  Clone ID: PAT_MRT3847_55352C.1
gagatggttgtggtctttgtgatgaaaaaggagaatgaaaaaaaatgtttttagaagaagttgtggaagagattttaataaaaagggtgaggggcacatggtgagactgagaagatgggcaaagaacacaccttagggggaggggaagttacagaggcattggatgggattttgcaaaagggtaccaagttatggaccgaatcatatgattctttcttagagattttccttgcctgtgtctgaggacggaacactacatcgagaagagggggggaaaagattcatatgcaaaaaaggaaccccaaaaccattttaaaagagaagggccagacattcctt

SEQ ID NO: 93399 - DNA, 388 bp, Glycine max
  Clone ID: PAT_MRT3847_55353C.1
gtcaaaataaggtttatttatgaaccaagaaaataaagataaaattcctaaacataagattaacagatataaagataaaattgaaatcaaatcaaatctaaaagataatgcaaactaattaccataaattcaaaataatatccctaaatatgaaatctaaattgaaatcctaaataatatctaatagtaattagatcataatccaatccccgtcaatatgccaatgtacgtgtaaagatttccatttggttatgttgtgtactcggcatttattttaacataatcgtagcttaaatcacagccccatgcttgtccacatccaactgatatctgaattctaacagtgtcatgagtctccccagcccttctgagataactactagccacg

SEQ ID NO: 93400 - DNA, 1526 bp, Glycine max
  Clone ID: PAT_MRT3847_55354C.1
gagaatacgacagaaggggagcaaaggaatggagagactgtgaaggaaagcaagcgagagggatggaaggtgtgcttcaagggaaatattaatggcaaagtgtatggtggcagatacacattgaagaagtgcaataaaagggagattgtttcagttgggttttttgtgcaatcacaaacaacaccataaattaatctccaaatcgcatgtgtagtgcttcatcatcagctcataaatctaaagcaggcaatcatgatcttgatgctgaaggttgaaaagggtctgtgagctgcagcagcttaattgatctcaaccactcccttcctcaccattaatactattaaatagagagagccttccttcgtttcttttttctcttaacaagtcgttttccaactttcaagctacttccggaaccttcagactgtagacacggataacaatctgagttctgtgcagggcatctcaacctagccgaaaatactaactgttacgacattaagagctactacagcaacgaatggggcacctacttctactattctcaaccttaattaggattttaaaaagaaagcatgcgatcgcatatacggggtcatcgcaagagatgtacggggcaaaggcaacaataaacgtatgggatccatcaattcaagtaatcaacgagtttagtctatcacaactttggatcctttcaggatccttcgatggcactgatcttaatagcatcgaagctggatggcaggttagtccggagctctatggtgacaacagacccagattgttcacttattggacgagtgactcgtatcgggcaaccggttgttacaaccttctttgtgctggctttattcaaacgaatagcagaatagccattggagctgccatttctcctgtctcttcttatgatggcaaccaatatgacatcacaatcctcatttggaaggatccaaaagtggggaattggtggatgagttttggtgacaacacattggtagggtattggcccgcagagctattcacacacttagcagaccacgccacgatggtggagtggggaggagaggtggtaaattcccggaccaacggccaacacacctttacccaaatgggctctggacacttcgccgaggatggtttcggaaaagcaagctacttccggaaccttcagaccgtagacacggataacagtttgagttctgtgcagagcatctcaaccttggccgaaaacacaaactgttacgacatcaagagctactacagcaacgaatggggcacttacttctactatggtgggcctgggaacaatcctcagtgcccatgattataaactatatataacgtatatatatcaatttacttcagtttcaaacaatccttctactctaaatgtttcattctttcattgtacgtaattatagaattaatattgtgctatatatttccattcttgtttctaccacttccactgttttgtttgtttcgatcgatgaaagggccggaaaaggaaattttgagttgtagtc

SEQ ID NO: 93401 - DNA, 678 bp, Glycine max
  unsure (1)..(678): unsure at all n locations
  Clone ID: PAT_MRT3847_55355C.1
ccacgcgtccgcaacactcctctcccacttcctaatcgcccttccaattttcttcaattcaagcaccaaactttcttcttcaagttcccgaacccgaacccgaacccgaacccgaacccgaacccgaacctcgttcgattgcgcaggctcaattgctcagtatcagacggcaccgttccgtcttcggttggtgccacggactcttcttctcttgcggtgaaggtgagactgatgaagattgttgtatagatagaatatcttgtttggtttcgcctcaaagaataatagttcgaaattgattttagataaatttttcacatattttactttcatacccaaaaagaattcagaattagttttcaattaaagcaattttagatagcttttgggtagtataacaatatttatactgttttttggtttcctaggaattataggttaaaaaatttaatttctcatgtttgataagcattttgaaaaaaataacattcttgagaaagaatgttcccgggaatattttttttgtctgctttccacagaaacttttttgagtttaatttactttctggaggttaaattggtctttttatacagcanaagcatcaattatttattaaattatataatatgggtaataattaaaantatcaataaaanntataggtaacttttttatta

SEQ ID NO: 93402 - DNA, 417 bp, Glycine max
  Clone ID: PAT_MRT3847_55356C.1
acaacgatacaaacaagtcgccattaacattaaacaatgagctgggaccaataaaaactcacggaattctcatccaaatgcaacgatggatcttcaaacccgacatctatctcctgcttaaaagaacacgaatgatcgatgtgggcggcttattggctggcgaaatgctgcgcggcccgcgcatgcaacgcctgcatgaccgacgtattgggaatcacaccgacgggccgtcaggatcgacaactggggcctctacggcttatctatagttgtcgcctggatcctccgagaggtcgctcgctcccctaatggaaaacataccctggtacaatcactgcaaacacacgcctagccgtcaatgggttgaaacggatgcacgtttgagggttagccaggggaatcttatgtttctcactt

SEQ ID NO: 93403 - DNA, 531 bp, Glycine max
  Clone ID: PAT_MRT3847_55357C.1
cggacgcgtggggtttgccctgaagcctggtcatttgtatatgagtacttgcccagtggaagtctccaagattatctattccgaaaaagcagttttctgccattgactaggaacatccgagcacaatggattgccgaaattgctacagctctctgcttcttgcattcttcaaaacctgaaactattatccacggtggtctgactcttgaaactgtccttctggactctgcacttagttgcaagatatgtgaatttgggttcagcaggctggtgaaagaggagtcagtttatcttcctaacttccacttcagcactgagccaaagggttcttttacatatacagatcctgaatttcagagaactggagtactgacacctaagtctgacatatactcttttggaatcatcattttgcaactcctcactggtaggactccagttggattaatgggtgaagtacggagagcagtttcttgtggaaaattgtatccaattttggattcttcagctggaaaatggaattccaccatg

SEQ ID NO: 93404 - DNA, 295 bp, Glycine max
  Clone ID: PAT_MRT3847_55358C.1
ggggggcggtttttttttttttatccttgttggggggcgtgctggtttgatagggttagctgcttggggtctgcgccagacttgcaccttgctgacaagggtctgattacctcctccttagtgggggcgcaaaaatgttgggccaggagctgctgcagggggggtttaacctcttgggcgagttctttccccgcgcagcccttggtgtcactcagcatgggggcgctgcatattgttcaggctccttcggggggggcggtgcccgcagttggccagggcttcttagcggcgagga

SEQ ID NO: 93405 - DNA, 233 bp, Glycine max
  Clone ID: PAT_MRT3847_55359C.1
tactgctgctagaagacgacagaaggggggatgtacatacacacagacagaacaatggtagaagcaaggggaattgacgaagaagtgtcagccccatttcactctaacctgttctaaagtataagaatgtctttatggaacgtgtgtcaagactgatggctttgattttaaccgctgtgcaaattatccggtgtctacttagctccatggtcacaactgtggttcaagccttt

SEQ ID NO: 93406 - DNA, 224 bp, Glycine max
  Clone ID: PAT_MRT3847_5535C.1
catgcttgattggaaaaccaaatcaatgccactcaattagaccctatatgatcacctcatgactttagacacaaccaagcttgtgtaaatgatttcagtatccatttcaaactaagaacctgatacatcatctgttcaccattatccataattactaaatcaccacttaaaaactttcacagattttaattataaatgagaattttcgcccactgttcactctc

SEQ ID NO: 93407 - DNA, 289 bp, Glycine max
  Clone ID: PAT_MRT3847_55360C.1
cgtaagacataatttgcactaacattacagttctgatcgccacagacgactttcagttcacgtcgcatataaacattcgagcaagtatcattattatgatgtaacccccacccatgtgcccattaaaaaaagaatatattttatacgccatgcttcattagactacagtatattaacggtaaaagccgagcgcattgtagccataataaccgattaatatgcggcccatggacccgggtaattttgattcgacatatatacataaggacggtgtctggactccccattg

SEQ ID NO: 93408 - DNA, 544 bp, Glycine max
  Clone ID: PAT_MRT3847_55361C.1
aataaggtttcccgtcatcactgtatgatgatcctcctgtctttgggggggggttgggggggggggcgacaatggtaaaggaaggggtaggtacccggatggcgtaagaatgaggcataagccccgaagccagggccccctgagcatgacgtgacgtaggccacaatgggtaccaagagaaacctagagaatagcgcgtgtgaatactagggttgtttggggagagatatggagtagtcgcctataagggagggagtagagtaggatgtagatgcccgcgtatttgagttatcggggaccctagggtagcttgtgagagcgcgaaggccggaccaaagtagccgagacgtacctcgatacgggcgacaattaggcgaccgttatgtttatagagtaggcctctattgtgcgtaaagatggccgaagaggtttgtggctgaatttacgtggtggtttttagcgaagagtgggagcgagttaagaaccatgggggttggaaaaatcaaggccacctagaacgtattacgaattagagttttattaa

SEQ ID NO: 93409 - DNA, 377 bp, Glycine max
  Clone ID: PAT_MRT3847_55362C.1
cttactttacaaacatacctttttcattttcacccacaacacaatcatttttagggctctggtttatctttctcaaaatccacaatctttcctccttaatatctccgaccccaacaaatagaaacaaagcaagccatgaattcccagaaccatggctagaccacataaaaacaaccccttaccaacaaaactaccccccattctcccccaaaaaaaccgcgggaagaaaaacaaatcaaaaaaggcttaaaaaaaatgaaaaaatcgaacaaccggaacttcaccccggcgctggttgcggcataaaactcctcaaacattggggtgcttctcctgaacaagtacttgataaacaactaccgcttcaaatacccaaa

SEQ ID NO: 93410 - DNA, 252 bp, Glycine max
  unsure (1)..(252): unsure at all n locations
  Clone ID: PAT_MRT3847_55363C.1
gtcactcttcttctcttgcggctagggttttagcgcanttncttcctagatttaaggaagatgggtaaggnaaaggctcacatcagtatngnggtcattggccatgacgncctctgggaaatccactanccatggnncactgatttacaagcttggaggcattgancaagcgngtnattgagaagttgagcaggaagctgcagagatganncaggagtcctttcaagtntggccngggtgctggacnaactt

SEQ ID NO: 93411 - DNA, 525 bp, Glycine max
  Clone ID: PAT_MRT3847_55364C.1
gggctgtatttattaattaatttacactaattgaacgtgcaaattacaaaagggggcgacaaccttaacataaatccttaatccatcaggaatggaatatctattacaagatttgctgcggggggtttaatttttagatggccttttgttcttgaagggtcaagctacaggctgcccacacaaaatgaaaccttgaattaagcattgagcagcgtgagtttgatctggggctccaaacacaatcaccagaccctcagagggtccaggttttgaataatgaacagccacgtttgcaccaaacgtctgtggaatctgagttaggttggtattgttctccccatacacgtgagttaaatacatagaggggggggggatctcaataggtaaggtatttggattgtgcaatggatttccgttctttacaggggtcttatttttagagggaaactataagtataggctgttcctcctggatttcctgtggcaacaggcagaggattccacgagcttggagaatttgggcct

SEQ ID NO: 93412 - DNA, 331 bp, Glycine max
  Clone ID: PAT_MRT3847_55365C.1
attaaaaaaacaaacccaaaaaaccaaaacgcccgggggggcaagaaagcccaaaaaacccaaaaaaaaaccccgcccaaaaaggcaaaaaccagacacccaaccaacaaatccgcaaacggcaagcaaaagacaggagccagcaaaagggcccaaaaggggcaagaaaaggacacaagccccagcaacaaaaggcccgggaccaacaaccagaccctccacgccggggggacaaggcaggagaccgtgaacaaaacccagggggggacaccgaaaaccgccacgggccacaaccagcccgacactggcccaaaaattgcgcaacaaaacc

SEQ ID NO: 93413 - DNA, 259 bp, Glycine max
  Clone ID: PAT_MRT3847_55366C.1
acaataagcaagtgacgtatgtttatcttaatgccaatacccgtgttcatgatgcagtggagttctggaatcttgatgaagcgaaccggctttcattgggatgtcatttgtggcactgggtgggctgacactccaaggctaggtgatcaagttccaattgattggcttatttactatcaggagtgtgtctccaggacctatggtgtttaaaatccacaaaatccttaagtgttaaataggtggatggggaatctgactt

SEQ ID NO: 93414 - DNA, 259 bp, Glycine max
  Clone ID: PAT_MRT3847_55367C.1
attaaaaacgcatttctgtatcattgatgtaggtgccttgttgagagcctatacaagtacactattttaaatacaatttttgaagtataacattgctttggatcgatccctcgaacttaaacatttcttttacactatgatcataagttccttttgtaagtgcacgtttgaaccttgatatcttccaagggcaaactgtcttttgggaaggagaatgcccgaatcttctctacaacttggtgcggcaacagattacaag

SEQ ID NO: 93415 - DNA, 464 bp, Glycine max
  Clone ID: PAT_MRT3847_55368C.1
actgactcgatcataattgtccttcactattacctcatggcagacgaaaccgatatcaagtgtgtgagctctgtgggtgatgaccaggatcgctgtgtgattgtctttttcgggaagataatggttgaagcaaaggtgtctcatgcttacgaggaggttatctccgccgactttattaagtcactgtatcacacccatgagtgacgtgctcaggctgcttagaaaaggttcaacgatctgtcagcaggtctaggtctgtaaggttattttactttatgcgctttgcgtgcatacacattatctatgtatgacttgatgatgctgataagaatacctttatattgactggacgtttatttataatatttactgtatcattcagacgaaacttaatttgatacgatattgttctagttgaatcagcgatcttgagtttgctgctatgattgtcaacccttgatgat

SEQ ID NO: 93416 - DNA, 615 bp, Glycine max
  Clone ID: PAT_MRT3847_55369C.1
ggcttcatttctgaaactactgccaccacaactcaaagaaatgaatggccagatttttattttttattttcccaatttttttaatatgaactcacttgtatatcattgtcttaaaattatgtgggttttttggctgaaaattttgcttttatttcatctaacattgttatatttgcatcttgttccttattgtttcagatactggacggcagacgcattcaagtgagttatgcacacaaagggtagccaccaagtgtggcaacaattcataagagttcacatttgcaatatattaaatttctaaccttgattctagaagtccatattcttagcttttagtcgttcaacaaattttctacttagtggccttctagatattctcattttgtggatagttcaaattgatgttccttgtccttgaaagactaaaatacgatcattgaccattcatctttaatttggggctcagctatttccctgtttgtttcttgtgattttttgccgttaattgttactggcagcagaatgatgatggctgtagcagtttgaaacttgtgcattgtctcccattctattttcaggctgtgttttgattggttgattgatgtggaatgg

SEQ ID NO: 93417 - DNA, 396 bp, Glycine max
  Clone ID: PAT_MRT3847_5536C.1
ccttttttttttttttttttttttttttttttttttttttttttttttttttttttttttccaaggaacaaagcaaaatgccttaataatatctcagtgatatgtattgtacattaagattggagaaaaacatgaagatgaatgatttagagagttggagctctctcagcagacccggcaatgacagtgagcaagttgttgccaaaagggtcactgagatgttttgctaggttctcaacaggaccttctccggtgacatatgcttggaagtagaaaccaagcatggcaaacatagcaagtctgccattcttaatttccttcaccttagcacctttctgatcatttatccttctcctttttctcttcaccatcgtcccctttagctttcaaatcttt

SEQ ID NO: 93418 - DNA, 166 bp, Glycine max
  Clone ID: PAT_MRT3847_55370C.1
ggagctaaagggccagtaaaaacaactaaatcaagccccaaagctaaaacaaaaaactcttaaaatccagcagcattacaatcccaggtgtatcacaacaggcaagttaaaagccaatcggacccgtgggcggacccgtgggcggacccctgggcggacccgtggg

SEQ ID NO: 93419 - DNA, 476 bp, Glycine max
  Clone ID: PAT_MRT3847_55371C.1
ccaacaatgcacgcgtcaagttcgaaatatgatttacattaatgacacaagcggagagtaatggataaaggttccggtaaaaatgccaaatgccatgaatctttacacataaatccggggacaaatatgaatcttgaagggacttgattcacaagtgaatagtacaagttgttgtatttttcaagttgaagcttaagggcgggtttaaaaggctgggacagcccccttttaaccaatgatgacttctccattaattaagcctgccaaacctcctccaatcaatgtgccaacccaataaatccagttagtagcgaaatctccactgaccacatcttggccgaatgagctatctgggttcattgacccaccacttaatgggcctgttgataagatgttggcacccagaactaacccaatactattgggtgcaatgatgcccaatgaccctttttttggttcttgtgcccttgtttcgg

SEQ ID NO: 93420 - DNA, 840 bp, Glycine max
  Clone ID: PAT_MRT3847_55372C.1
cggtccggattccccgtcgtccgacgcgtccggacacaccccaacctgacttctgtgttgtgtgggtaaacaaacttgtatcatctcatccgaatgaaattcgctgagtcgagttaaaactcacccgccctaactcgttctctttcgcgtttggttgtatctgtgagctaccctcgctcgctctcacacccatccctatcctcatctctcgcctccaccgccattcgacattgtatgtgatgtacatgccaagactttccatagttgaataatggctgttgagacttctgataaaccaaatttaccccatgattttgaggatgatgatgatgggccagtaatttacaaaaggtactcatcatctaagaaaaatcaatcgcattcagaagtaaggaagtcaagttctcacagtcatgatggacagtcttataggcagatttctaatgcaccttcttcaagtggccaaacttcctgccttcagaaaggtaatactgtcccatctgccaagccatcacctgtgaagccttctgtaggcatctccaaagcttctaaatctcttgtcaacacctcctccacgaagttgcctgtagcaaattcaaaatcaccttctttgggagatagacagaaaatgtccgtagatattaagggggaaccaaaaactattgaacaccatgctaaaaatttcgttgaagattcagaagatgatgaggataataaaccgttgagttttaggttgaagaattctaaccatgataacaaagtgacctctgttattgccaaaaaatcttctgaagactctgatgatgatgtccctttggcaaaaaagtataccgtaattcc

SEQ ID NO: 93421 - DNA, 301 bp, Glycine max
  Clone ID: PAT_MRT3847_55373C.1
gggcgatcccaacagaacatggcattgcataaaacacagcgaatggaagtgttttgatgttaccaaacaaggcaaatgaagtgttgtcgtgtttcaatctttctcttatccctaattcgtctcttttttttcgcctcagaatcccaacaactctctcttccctctctacccccctcctcggttaaaccggccacggcacttgttgctgccctcgatggcactatgtatttggtggacagtgtttctgcgagggtcatttggtctttttcaactggatctccaatctaccaccactcctatc

SEQ ID NO: 93422 - DNA, 379 bp, Glycine max
  Clone ID: PAT_MRT3847_55374C.1
tcgttttttagttcaacaacaattaagcaatttctctttgtcctctgcaaataatttattatgagtaattgcatttgttttttgccgctgctctctctttttgttgttttgactgtccattttttctttggtgtgctcaaaaggggaggaaaaggaattaccaactcggccacgaggagtctctccccaacttgctccattgtaccaaacgcggtcacaatttgagtgtttggacgggaagaagagcaatcccatttgaacaggtcaacgacgactatttgcgactgctccggacagaagcgactagctcggagacgtctgccgtgcaaaaatggacattttttacttgcaccaatttcggctctaggccgaaaacttt

SEQ ID NO: 93423 - DNA, 473 bp, Glycine max
  Clone ID: PAT_MRT3847_55375C.1
gctgcgggacgtgctggaggcaccatgacaggagttcttagtgcagcaaatgagaaagctgtagaaatgtttgttgaagaaaagtaagcactatcttagctatttttcttatgccagattcctcttagaatttcactgcatttaggtttccttggagatccatgtcattcaaccaatgatacatcccaccaaatctcttctgtatatgggagaaggatgcatcaggagtcaggactaacataacatttgatcatttggaatatagtaatataacattaaaattccattgtgggatgatattgaaatttgatggattggaatagaattactagttagttatgccgatgaaaatgtttccagtcatgaaaaagtccaacctaaaaaataaatttacaatttcattctactgctatattacatggttttaccatataaacacatttttttgtttgaaaacctgaaaacaggtacta

SEQ ID NO: 93424 - DNA, 1141 bp, Glycine max
  Clone ID: PAT_MRT3847_55376C.1
atcctcagtttccaatcgaccttcaatttccttcattttctggattaaaccgaggttccttgttttatcatgttggtgcagaaaaattatctgccctgttcagatctcatttgttcagcttgatgaatgcttcagactcagagaaagaagacacagaaattgaagtaatagcaattacacccaatgaagaaaactcgaaattgatgaagaaagagaagaaaaagaagaagaaagtttcgttgaaagatgcagagaagaagggcggcgtgtgttatatgagtcgaatcccccctcatatggaccacgtcaagcttcgccacattctctctcagttcggcgatattcaaagaatttttctcgctcctcaagattcttctgtccaagtgcctgctaagaggtcacgtggatcccgagaccaagcatattcagaaggatgggtcgaattcggtaataaaagtgttgctaagagggttgccaatatgttaaatggtgaacaaatagggggtaagaagaggtcatcattctactatgacctttggaatattaagtacttaagtaagttcaagtgggatgatctgactgaagaactagccttaaagaaagctattcgggagcaaaagctggctgtagaactttctgctgccaagagagagagggatttctatctttccaaagttgatcaatcacgtgctttgagtgctatagagggccgactaaagaagaagcagaagattcaacaagactcaggactagtggaaaaagtgattcgccatttccctcaaacaaagcctatagctgctgacaccaaaaaaaataaacctgagctctctgatgatatattggatgctgtatttggtggctcgtaattcatgtattgatactttcacatcaggagccaaaaatcacattatattttctgtgtccttggttcccataggcagggtgaatcagtgaagcttctctggatgtatttattgtagcgatttttctagaaaatatttttttttgttgatctaggttttcaaaagaaaatgcaatcttcttatacgtaaaaaacaagcaatgaagttaaccggagttgaaatttgtgagtttgacaggacttggttataaatgtctttttgcttgaaaaagggcggcc

SEQ ID NO: 93425 - DNA, 286 bp, Glycine max
  Clone ID: PAT_MRT3847_55377C.1
gggggggagaaattatagggggataattgccaaaagggattttgttttgcaattcatccccaatatcaacattaaacagggggttttaaaaaaaaaattttgacccaaggcaaacggggtgaaaaactacttccaaatgcttcaatgaaacttgggtccacaatttaaaatcatgtttccaacccccatcccaggattccaagccttttggccaatgcaaaaaccctgggggactcaccctaaactcaaggaatgggcttttaactgaatggccccattggatttt

SEQ ID NO: 93426 - DNA, 327 bp, Glycine max
  Clone ID: PAT_MRT3847_55378C.1
gctcggaattctccaaagtttgtatagtgtaggatttgttggtattcgtgataaaaacacctcatcctattcattttgccatgacgggcgaactccagataaaggttttgaaagtaatgagaaattattaattcatccatgttactggcttggtttgaatctaaatcgtaatgcacttgctccagaggaagcagaggagataaatgacgaatatgatattaatattatttcagataattcagccattagaaataaaacaataggtcaaataactactcatctagatcagataccgataggaaatgaaggtgccactgaatttgaaca

SEQ ID NO: 93427 - DNA, 443 bp, Glycine max
  unsure (1)..(443): unsure at all n locations
  Clone ID: PAT_MRT3847_55379C.1
nnnnnnaatggggtgctggtgctcagagttatgagcacgcgtgcacgcgctcgtaatttgggtagtggaactatgaggctcaccagggagggtcgacgttctgatctctggccatgcgagccacaagaacgaggaacctccgttgattagatggtgttgagacagagctacatacttgctagagaagcatgcgtatccaacgccgctggcgacaaggtggacgaacacaccactttcagaggaacttgagagagaacagttcttatgttatgttgatgaacgctctaaaagttgctggagaacatattctcaggacaaaaccctgtgtgcgatgagtatttgccatcattataaggtatctgaattccatggggcatgccatcaccttgatcataaaatggttcgtcatggatgggaagagggtgactcttccgcgctgatct

SEQ ID NO: 93428 - DNA, 322 bp, Glycine max
  Clone ID: PAT_MRT3847_5537C.1
atatccctacaaaccctatctaaaaaaaaaaatttctttgggggaccccccgaattttaggccaccccaatttttcagaaaacccgttccccctttcaaaggggtaaagtccaaaagggggtccccccaaaaccttaaaaacccctgtttaaacccggaaaaattcctccacgggccttttttttacaagttttacaaaaagggttggcgaaaatctttaaaaaacagggggttctgataaacttttaaaaaaaaacacgggcccccccccccttggggtggctccccaaaaagggccaatatgctttgggggaaaaacccc

SEQ ID NO: 93429 - DNA, 293 bp, Glycine max
  unsure (1)..(293): unsure at all n locations
  Clone ID: PAT_MRT3847_55380C.1
cctcgtgccgaattcggcacgagggccaaatgcttgcgcatttatggctttaggtttatggctgtttgggataatagccaattgctatttgttggttccaatatatatattgtaagatatgcagctttgtgtttgacataattgtaaagttatttttttcccttcctttttttgttggtaggccattaatttgaggcaattggaggattgtgctcctcannnnnnnnnnnnnannnnnnnnnnnnnaanaanaaaaaaaaaaaaaaaaaaaaaaaaaaaaaaaaaaaaaaaaa

SEQ ID NO: 93430 - DNA, 408 bp, Glycine max
  Clone ID: PAT_MRT3847_55381C.1
ctcttcttctcttactccttgggttttagcgcatcttcttctagatttaatgaagagtggtgattaaaaggttgacatgactattactaccattttccatgtctactctcataaatccactaccactgctcacctgatttacaagcttgcatgcattgacaatctttttattgacatttttgagaatgaatcttcttacatgaacaagatgtctatcaagtatgcctctttgctatacaaacttaatgctgaccctcaaatatgaatcaccattcatattgcttcatgcaattttgaaacatcatagtattatttcacaattattgatgctcctgcacatatgtatttcattaataatatgattactgtgacattccaatctgactttgcttttcttatcatttattt

SEQ ID NO: 93431 - DNA, 319 bp, Glycine max
  Clone ID: PAT_MRT3847_55382C.1
cggggggccctaaaagggacgcccggttcgacccatgcgtgcgcgctttatatatattagctacacccaaggcaaaaaaaaaaacagagggggcacacaccagacggcacaggcattcccaaatagagagaaaagaaaaaaaccacgggtcgcaaagctgcaatataggatttaaagggtgcaaccacaagccggaagtagaaaggaatggggaatgcagaaatggcgaacggcgaacagtgaattccggaacgaagagaatggcaagtagcgatgctgaaacagcggcggcgcagagcgaagcatgtaggagaaagga

SEQ ID NO: 93432 - DNA, 292 bp, Glycine max
  Clone ID: PAT_MRT3847_55383C.1
acctacttacagagaaaggaagatttttaatgaaaaggcccacatcatcctcgcaaaactaggccatgtcgactctagaaaatacaccaccactggccacctgattgccacccttgattacattcactagacaccaattgctagctgtctgaaggaagctcctaacatgaacaacagggccctccgcccacctgagtgctggacaaactcaaacctaagcctgaaaaaccaaacaccacagatttggcttgggatgaagttgccaacaccaacaaaaaatgcctcatttaat

SEQ ID NO: 93433 - DNA, 103 bp, Glycine max
  unsure (1)..(103): unsure at all n locations
  Clone ID: PAT_MRT3847_55384C.1
atgagccattgtctcaaagagataggagagtctacgctggttatcatgggagagacctacatcttgttacccttttgacacaatntctagaggcaatgaggat

SEQ ID NO: 93434 - DNA, 534 bp, Glycine max
  Clone ID: PAT_MRT3847_55385C.1
gttgacccacgcgtccgtgaatctggtatagtgtagtagcattgcaacagcatacttgtagggtttataagctataaataaaagaagccttctctgccataatacatttttatcttttcttttttaatttaattgcttgcacttttagtataatgttttatattgtcaaccaattagaaatcatagtgggtatgacttttaagtggtttttgttaaagtcaaaacactaaccatacacggaaattgtgattggatgatagtgtaaaacactttatagtgtcaatgcttgcactattttctcttcttttttctcctacgctgtacatactgctttgtcctggctattttttaacaagttctgaaagttcttaaacattttctcatgttttaggttgaaatagatggtcagatctttggtaaagggtttggattaacatgggaagaggctaaaatgcaggtatcctactttctttttatgaaatattatttacatatgtgtgtgtgttctatgtataaatgaatttgattaacttc

SEQ ID NO: 93435 - DNA, 515 bp, Glycine max
  Clone ID: PAT_MRT3847_55386C.1
ttttattaaaaaatacactgatcaatttcttaatcaaaattttcaagaaaaataggtaatataatataaccgtttttaaaccaacaatgtaatacttttaaaaacggttatattatattacctatttttaaaagtattacattgttggtttaaaaaaaaagtattatattgtatggaagtgattaattaaatcgtgaaagctagagaaagtgaaaaagaaaaagatacggacacaccaaaagcaagtaaaatttaacacgtttggttttttcaacttgaatgtatttttgcatagtagtccgaaaggagtgatcttcgtgtctggcctcgcgtgaaacgggtcggaaggataataagggacatgtttggaatgacgcttcccatggaaattgctcattgcatcttaagtcttaacaatgcacattatggacacatctcacatgtgacatgttcttcacattattttatttataaataataaataaactcgagtttaaatttaatataaaaaatac

SEQ ID NO: 93436 - DNA, 239 bp, Glycine max
  Clone ID: PAT_MRT3847_55387C.1
agtttatctaaaaatggataataaatatgattcaatgagtaacactgcataagaaatacttcaataactcaatgtaatcaaatttattatccatttctagtttatctaaaaaaaaaaaaaaaaaaaaaggaaaaaaaaaaagggggggccgcccgttgttgggccccgggactccgggtttattccggggcgggcacctgggggggtccaggtttcccccaagggggcgcgtttaaagg

SEQ ID NO: 93437 - DNA, 410 bp, Glycine max
  Clone ID: PAT_MRT3847_55388C.1
cggacgcgtgggttcgcaattcaatctctttctcttcctcttcctctctctctctgtctggctttgtcgtacctttccttcatcctcagggcgttttgtctcattttgttattcaagaatcaattaaaaaaaatgactcatatcctttgatatggaacattttcattttctgtattcttctttttcattctttcttttttaatggattgtaatggaagttatatagtttaacactttgccttcattccaaacgagggatatgtaaataatttattttgccgcgttttttctcttttatttttttattctttttgggtgtgtttgtttgggttttggttctttgtgatgtggaatccgttgtttggacttaactgaagccaacgcggtaaccagagggaaacgagatcgtg

SEQ ID NO: 93438 - DNA, 998 bp, Glycine max
  Clone ID: PAT_MRT3847_55389C.1
ggaattcggcacgaggttgcctttcaaaatgccttttcttctctctctttctccttttctctcccaactttgaatcttcaatccctgcattcatctatcatcatcaccccactttgctttcaccatctttttatggttagtacccttcatcatctctccattgttttggtagttacactttgctaatgtcatattcgatcatcttaatttctctctcgctatctcttttgttatgcttgaatcttttgatcatgtgattattgagattcatgtatgtatttgattttggaaatcattttccatatggaaaactggtctcgggtggtgtcgggtgttggaagcatggcatacaaagtggaccatgaatacgactatctcttcaagatcgtactcattggagactctggtgttggaaaatccaacattctctctaggtttacccgaaatgagttctgcttggagtctaagtctaccattggggttgaattcgcaaccagaaccttacaggttgaggggaagactgtgaaggcacaaatatgggacacagcgggtcaagagaggtaccgagcttgatcaagtgcatactactgccaggcgcactcggtgccttattggtgtatgacataaccaagaggcaaacatttgagaatgtacaaaggtggctccgtgaactgagggaccatgcagactccaacattgttattatgatggctggaaacaagtctgatctcaaccatctcagagcagtctctactgatgatgctcagaatttggctgagagagaggctctctcattcctagagacttcagcattagaggccttcaatgttgagaaagcatttcaaaccattttgtttgacatataccaaattatgagtaaaaaggcactggctgcacagggagcagcttccactactagccttcctcatgggactaccataaatgtctcaaatatgtcaggtagtgtggagaagaaatcagcttgttgctccaattaa

SEQ ID NO: 93439 - DNA, 482 bp, Glycine max
  unsure (1)..(482): unsure at all n locations
  Clone ID: PAT_MRT3847_5538C.1
ntccgccctacgccgtccgctccaccgcgtctcggggtatgggagtaaaggtgaagggtgctnnttcggcgacctggctcgaggacacactacggggtgtcactcacgggnngccagttnctgtttctgaccgctttctggnngtgcgannagctcanntagaatcnncgctggctttcctcctacctgcnnatcaccacgtggcgttctctcatacgctcgctttcctacggttggcttctgcctcgacanctcggcttctatcttcctacccgcgcgaaatggctgtngagcagggcgcaacatcaatctacccaagcgcgtttccaattctcgtcatatgtgcgacgccgacaaccggcttacggcaatgccattgaacctnncaagcgaaccgtcaaggggtttcatttgccgccggtnttcgcagggaatcattctggaaagaccaagattgccgccgaaaagcgtggtgggcacac

SEQ ID NO: 93440 - DNA, 391 bp, Glycine max
  Clone ID: PAT_MRT3847_55390C.1
cccacgcgtccgaaggaatgccgtctattgtaattaatcctttagaggaggaacgtgatgcagacgaacaaattatattgccatcagtaaatgcagaagttgatatggctgtattagctgccttaccacaatcaatgcaacttgatattcttgcacagcttaaaggaaagaaaaccgaaggactagtaaaggaagttgacaatcagaatcaacatgatgtcaattatcggggcaagggtaaggggattctgctcattgaagctgacatggtaggttgtagctccagacatgacaatgttacatcaaggagtgacaatcaacactcaattgatgaaatgttagctgcatctattgctatggaggaaaatgaagagttagtaaataatacatc

SEQ ID NO: 93441 - DNA, 431 bp, Glycine max
  unsure (1)..(431): unsure at all n locations
  Clone ID: PAT_MRT3847_55391C.1
gcctgacctttagatgtcatgcaaatcttaaaaatgataagtgaatttgaaattgaatatggtttatacagttttaccttcaatttttagttacagcaattaatatgaaacattagacaaggtcaaacatcaaagttgaatataacttttgtttcagtgatggtttgagcttatagctagcataaagttgtgttttccccctagactaaaatatcaaaatgtgcttgtatgcttgacatcaatgtttcacaaatttaactgcaagactataatattaagctaacaaaggcgaggcagatctcaagctggttggagtcaacaaattgttcaccaaattattggttgtacattgaacttgaagtacatggggttaattttcatattctagactctctttagtaaggggtnttatgttggaggagtgtgattca

SEQ ID NO: 93442 - DNA, 278 bp, Glycine max
  Clone ID: PAT_MRT3847_55392C.1
cggctcgagaagttttggaattttctattcaatccacttccttcacattttcataaaagggggaagagaaaaaaaaaaaaaaagggcggccgaacacctttagcataaataaaaccccaaaattagttgcgggccccttcctgcttgctttccggcttcccgattattgtttcgtctccggccttggggctatcccgctcttcactgatgggggcgagtacttgtcttccgcatcaacttccactgtgcctgcctctgggggttattttgcccctatc

SEQ ID NO: 93443 - DNA, 459 bp, Glycine max
  Clone ID: PAT_MRT3847_55393C.1
ggaaaaatcatttttatttgagttgaatgctatcagtacaatggttacacattgatgaattcgaggtctcatcaccctcctactatctccagttttcaatctaacctctaactaacccctcccaattctatttttagctacttaactactaacaattggttataactaacagttagttatcctagctgtcctaacaaactgacagctctctaactcttccaatgatattttctaacatacacctttccccatctttttcccccctctatcaaaatccttccacccagtttgaactccaagtttctcctcctttatgaatcccatttctacagtccatttgggctgacccacgatgtaaaatattggacctcctttgcagaattccaaaacaccccctttttctcatccttcagaactgaatcatttacactaacagggtaggcctccttggtgtccctc

SEQ ID NO: 93444 - DNA, 152 bp, Glycine max
  unsure (1)..(152): unsure at all n locations
  Clone ID: PAT_MRT3847_55394C.1
ttcatttaccnntttttttttgtcaaaactattagggctaattctttattacaaaggcttttacataattacacaatattcatcagattttaacatagttaattcttttgaagctagctccttacagaaccaacctattatgcaattaacaa

SEQ ID NO: 93445 - DNA, 373 bp, Glycine max
  unsure (1)..(373): unsure at all n locations
  Clone ID: PAT_MRT3847_55395C.1
accaaactcacaccatgaatgcagggagagaccaaaggacatggatacaggcaggactacgtgtgctggagatgcaccaaacgcggccttcgatgtcgtctgtgaaacagacggcggtctagccgtcggatacatggtattccggggatcggaccccggttactatgagacattgggtcgtaatgctattacagcctttgaatttgcagataactacaggagtgcttacagtgacaacgatcatgttaagtgtaatgcgtgcccatattactgcgatactgatggctatcaagatgagttgctatggngagccgcatgggtaatgagggcgacgcaggacgataatgtactcaactacatacaaaccactggc

SEQ ID NO: 93446 - DNA, 573 bp, Glycine max
  Clone ID: PAT_MRT3847_55396C.1
ggctcgagcttccctttccccttcttcttcctctacaaatatccaatagcagactaaaccctagcatagcagtagcagtggaaaatggatgacgaggagagagagaggcttctggagagggagagattgcaaatccaggtcattcgccagctcgatctcgaggacctcgtagtcgaagaagtcgaccactccgacgaagaagacatcgacggcgatcccgacgaggagtatgcgcttttcctttcgcaataccattcggatgcttctcttcctcctccctcatctgccgaattcaatttcgatacctatatcgcgcctttgcatacctatctcggtgatgtcgaagacacgcgccacaggactgcgttcttggacggtggcgccatattgaaccttcccctcttttgtctcggaggagttgtactttttcctggggctactcttccccttagagttattgaacctcatttggtggctgctgttgagagagctttaactcaagatgatattccttgtaccattggtgtggaggttaactctttgtggttattcatgcctggaatctgtttaatt

SEQ ID NO: 93447 - DNA, 1048 bp, Glycine max
  Clone ID: PAT_MRT3847_55397C.1
cgcctatcgagagttgtttgggtctctttcgttcccccaatgagtcactgagtgcagtcctgtgtgattggctcatcttttgtcttttctcggctctgataaaaccgagaattcgcaaaactctttgctctggttcagttctgtcgtgttgcaagttgcaactgaaccaatcaacaactttcttgtattccaaattatcttcaccattacaatcctcaaagtcaaaaagtgaagaccttaacataaaacaaaacacaatggtaatgtgggtatttgggtatggttctttgatctcgaaagctgggtttcactatgacgaacgtattgttggtttcatcaaaggctatcgacgagtcttctaccaaggctctactgaccacagaggaacccctgagttccctggaagaacagtgaccctggagcctgctgaaggagaaatatgttggggagctgcttacaagatcgcaaagaaagaagatgcagaaacggcattagtgtacttggaagtaagggagaagcaatacgacaagaaggaataccttgatttttatactgaccttaccgctacatctccagccgtttctggagtgatggtatatatagcaactcccgacaagaaatctaatgtaaattatttgggccctgcatcgattgaagacattgcaaggcaaataattcaagctaaaggtcccgcaggacctaacagagattatcttttcaaccttgaaaaggctcttcatgaaataggatgcaaagacaaacatgtcattgatcttgcaaatgaagtcaggcgtattcttgcagaggaacactgaatgcatctgtgtgttatttatttatttatgctgatcagtatgttattaagcacaacattctgagacattgaagtatatttaaatccattggaaacttcaagtcttccaaaaaatgttatgttggaagataataattgactgtaattgctataaaattaaagtttgtatgggatgcttattgctatacaattgaagcttaatataatgatttttattaacaaaaacaaaaaaaa

SEQ ID NO: 93448 - DNA, 377 bp, Glycine max
  Clone ID: PAT_MRT3847_55398C.1
tagcagatgttccacaagcaactaaagccactattaccaaaaaggatacgacaagtgaaagtagcaataacacttataaagccccatccagacctaaggtgttacatcattttaaatgggacagatcaaaagacttgcttttgaacggattaagcggttttataccagacatgtttgtacagggcctgcgtgcgagaaagctgttttttttgagaacccgtctgatgcgagagaaccatttttgcttttctcgacctacctataatctagaaccgctcggctgctgagcgaactccctgctaatgacattgtacggccatttgaccaaagctgcacagtggtcggacatgactctcacacatgaacaaaccagcgta

SEQ ID NO: 93449 - DNA, 207 bp, Glycine max
  unsure (1)..(207): unsure at all n locations
  Clone ID: PAT_MRT3847_55399C.1
gcgcccacacgtgcgctcattctctctttagctctcgaaaacctcgatccctctcaggcgctcctataattcgctcctacaccgacgctctgtagaacaaccacaccaccattttactcacctggcaaacccagcatcntggttttttagccccatggggactcgcagcccgaggcctctggagccgaaggcaaaaaggacaccccg

SEQ ID NO: 93450 - DNA, 550 bp, Glycine max
  Clone ID: PAT_MRT3847_5539C.1
gtcttgaacattacttttaatccattatttccaaaattgtatatcagtaaattctataatgttcacaaatttggtaggtactaatcacaaataaaaacagtcatattagcaatgtagcgtacagcacactggcatgaaaagtacaaacatgttaaaccttaatgaatagaaattgacttgtactgtttgactgtatttgtaatagcctgctccactggaagtctttccatacttgaagccccataaaacccatgaactcctttggttctcttcaatacaaatgctgcctcttttggaccagatattggacctccatggcacaacacgatgacaccaggattgatcctatgtgctgcatctgcaatagcttgtacatgaactacactttctttaagtgaaacagatgtttttgcacctatggagcctgttgtagttagacccatatgggccactataatatcggcgccaactttagccatttcaatagcttcatattgattgaaagcatatggggttgtaaagagacccattttatgggctttctggatca

SEQ ID NO: 93451 - DNA, 383 bp, Glycine max
  Clone ID: PAT_MRT3847_553C.1
aaaatggggctagagcgcctcctatcgctacttatcgcaccaccttatgagatggaattttcccaatttaatgtgctctattcagaccccgtggtccactgaatcaaaatggtgacccaaacaacacttttcactacaacatcctgtttgaagctattggggatgcttcctattatgccataaaaaccctcaatttcaattatatacccattgttgtcacagaaactggttggccaaattttggtggagccaatgaaccacatcctactacaaagaattctgagacccacaataattatttaagtaaaagagaaataaatggttcatgtgcccctaatcagccaaaaatagccatcaatacccacctatatgaattattcaat

SEQ ID NO: 93452 - DNA, 368 bp, Glycine max
  Clone ID: PAT_MRT3847_55400C.1
acctttttgagagacgaacagaaaagccacaacccggggaggcgccacgggacgaaaccgccgaggagaacaaacaggacacacacaacgccggaaggaagaaagcaccgcaccacaaccacgcggcaacgcccgcagccactcgagacgcgccagacggacccgaagaagagctaaaccgacaaggacaagcaccataacgaaggagccgggatgagagacgaagagcaaaaaggggcaacggagaaacaaaaacgcggaaaagagaagaaacaagcaccgagcgcgggggagaggaagacgaaaaaagagaccccagcggaaacaaaggggacaaaaccaggcaggagcgggacaagagaatcagc

SEQ ID NO: 93453 - DNA, 270 bp, Glycine max
  Clone ID: PAT_MRT3847_55401C.1
gaacaggtggaaaatgggcagggcagggcatttcaacggaaattttaaattttttagccccccctttttccttccttttttataccaacccacattcggggggaaccaaaacaaccttttcaggtttttttgacaaagggaaccctttttgaaggaaaaatcccgggggggtttagcccccaggaaagatgggtcccttggtttttttttttataaggtggaaaaaaaaatttgccttttttatttgggaaaaacccttttccaaatggt

SEQ ID NO: 93454 - DNA, 615 bp, Glycine max
  Clone ID: PAT_MRT3847_55402C.1
tcggtggttttttttttttttttttttttgtagaattaacaaatcagtttgaaagactgaaactgttgttagcacaataacttcaaacaaacgtaatgtaaacaaacgttgtatgtattatacagtttggcctggttgcctgctatatattttgaaaagcttaaaggagataatctaaatcaaaatatcacaaaattcttctaaatcttcacaagtttgacccatcatttgagatactcacgcttgacgcttgtatcttgtatttctgaaattatctatttgaacttgacagaacttcaaacaatccacagcaactcaaccaggaggtcttttgcaccaaatttggagccaatgctacatgaggcattggtaaatttagtgaaaggactagcagacggtgaagttaacattttactatcacattcctttggcttaggctcctccacacttgacattgtaagggaagtagaagcaattggtggaaatataggagcctcagcctctcgggagcaaatgggttatacatttgatgcattaaagacctatgctccacaaatggttgaattactggttgactgtgtaaggaacccagccttcttggattgggaagtcaat

SEQ ID NO: 93455 - DNA, 882 bp, Glycine max
  Clone ID: PAT_MRT3847_55403C.1
aaagatcaaagtgaattttcttaaggaagtttctaggtctctttgctgctctacattttttaggaaagggtgaaataaacagcattatgaccaattccatgtcacagaattaacaaatcagtttaaaagactgtaattgttgctagcacaataacttcaaacaaatgtaatgtaaacaaacgttgtatgtattatacagtttggcctggttgcctgctatatttttgaaaagcttaaaggagataatctaaatcaaaatatcacaaaattcttctaaatcttcacaagtttgacccatcatttgagatactcacgcttgacgcttgtatcttgtatttctgaaattatctatttgaacttgacagaacttcaaacaatccacagcaactcaaccaggaggtcttttgcaccaaatttggagccaatgctacatgaggctgattttcagaacattttgcagtcttacaatccttaatatgttcttcaccattggtaaatttagtgaaaggactagcagacggtgaagttaacattttactatcacattcctttggcttaggctcctccacacttgacattgtcacattctcattggttaaggaatatacgttatcctcatttatcttcattgcgagattggtcacttctacaggatggactactgacttctctagtaacattccagtgtcactcttttccacctcagacacagaagccatgtcagtaactaaattaacagaaagtcagcagctgaattaacctcgagcctctagggagcaaatgggttataaatttcacgcacccacagacatatgctccccccatggttgaattactggttgactgtgtaaggaacccagccttcttggattgggaagtcaa

SEQ ID NO: 93456 - DNA, 758 bp, Glycine max
  unsure (1)..(758): unsure at all n locations
  Clone ID: PAT_MRT3847_55404C.1
ccctcgcgtccgcccacgcgtccgcccgcgtccccgcccaagcgtccgcataaagtatctattaatcccccaaaagggtgaaaacaaatcaaaagaaaaaaaaatatatgtttatcactgtctctcactctttcaagctccaacctccctttttttttcttcctttaacaccgttttttctcttcaatcattctgctaaaaggaggagacttgagcacagaacataagcatagaataaagtgtgcaagggcaactgcttttccaagctgagaaacaaacaacacaacaagggtgttgtttagtattattattcattgtctgttgtcatgagcttccacaagctcataatgtggaatgtgccactactcttggtggtggtggtgtttgcatgctcactgattggtcatgcttcagcttctgtgtcctatgaccataaggctatcaccatcaatggacaaagaaggatactcctttctggctccattcactatcccagaagcacccctgagatgtggccagatcttattcagaaggcaaaggaaggaggtttggatgtcattcaaacttatgttttctggaatggacatgaaccttcacctggcaaatattattttgggggaaactatgatctggtgaggttcataaagctggtgcagcaagcaggcctctatgntaacctcagaattggtccttacgtttgtgctgaatggaacttggagttttccctgtttggctcaagtacattccaggtatcagct

SEQ ID NO: 93457 - DNA, 283 bp, Glycine max
  Clone ID: PAT_MRT3847_55405C.1
cgttcttttttttatttgaaccatcgtgtaaaaagtatcttaaatgaaatacaagccatgcatactactgtgaacacatgaccctttatccaccacacctacaatgttatgtggcactataacaggagattattggctggtccaacctcacaaacgatttgattcctagagataaggatagggcttaataacatgggccaattaagctgccacggaactccatagacttcagctcaagattagctgaattcaccgattgaggagggcctgattcttatacctc

SEQ ID NO: 93458 - DNA, 280 bp, Glycine max
  Clone ID: PAT_MRT3847_55406C.1
ggaacaaagaatctgatggcgcgtttatacaacatgttgattaattataaacgaagttcgaaccattactactgaatactgattctgggcactaccactcagatgtacaatgctattcattagcagaaacattgtgcttactcgggcgatcatgggaagaattgtataaccagcgacaatgtttgccacctataattgcgaggaggaaacgaaattacagcttacagggtcacaccttaggttaccattcataagagtgtggtaaggtttattagcttaa

SEQ ID NO: 93459 - DNA, 181 bp, Glycine max
  Clone ID: PAT_MRT3847_55407C.1
atctgcaaaggatcaacactttttgaaatttatagcggaagaatttacagaaactctgggctaaaaatatagccacctatactacgactcaacccgaaattcataaacactataacgccaaactaaaacccactccaatccctcacttctgagccttggcctgtttcgatggaaatcaaac

SEQ ID NO: 93460 - DNA, 250 bp, Glycine max
  unsure (1)..(250): unsure at all n locations
  Clone ID: PAT_MRT3847_55408C.1
canngnatgaactcgttngttgggactttccgnagagtatcttccgtcatagatnntncatnncagttaaggnncnctcgttttagtcatggantattggnagcgccancctcncacatggcggcagcaannacaatttgctacggnccctcntctaatgnnctagggacagatttacttaaacgaagacacttgnnaaacacttcgtttgctgatcgatnntctccttcaagntcnttncttgtagcgg

SEQ ID NO: 93461 - DNA, 132 bp, Glycine max
  unsure (1)..(132): unsure at all n locations
  Clone ID: PAT_MRT3847_55409C.1
gtctngaaagcggttatcatgttttaaacaaatcaattcattacaggagggattttcggggggggcaaaacagctgtggaagtccaatattggagttttttaactgggtatattgagtgctcatggttatga

SEQ ID NO: 93462 - DNA, 567 bp, Glycine max
  unsure (1)..(567): unsure at all n locations
  Clone ID: PAT_MRT3847_5540C.1
nnnnnnnnnnnnnnnnnnnnnnnnnnttgtttttgtttctttttaacaaacttcaacagctctaaactgatgatgaataaggaagcgacagatatttcattctacagttttctctctctcacacacaaagaaaataaagtgattctcttagtgcatgtttacttgtacattcatccaccgtatttgcgtcattcagaaactgagtattagaacctacgcatacaaaaatactttgattgaatacaaaagaataaagaccccaatactatttgagatcttaaactagcacaaatagctgactttgaagtttcctttttctcctttatcaggtatgggcatgcaaagttttccaaaatatttaaaaaagatcacagattgaaggttgcatggctttatcagtcattagggacatgaagaatgttttgttaagagaagggagatgcctttaataccatttacaaaaagaatggaaaccaagataaggagacaaaggatcaaacttgtatgtgccgggtttatctggcaaacgcttcagatgcatttcaacttggaggattgtccactgca

SEQ ID NO: 93463 - DNA, 415 bp, Glycine max
  Clone ID: PAT_MRT3847_55410C.1
tgcaagagtttgttgagagctataggctggtttatcgtgaggagaatattaagatgtttgttttctttgcagctgcagtagttctggttgcatggccatgccatggctcaagctaccaaaggttggctcttctgaagaaaactggctatggagagcgtacttctgaggtaaaatgcgcagagaataggctaggtgtggaagcacacaacatccgagcctttaaaaccattcctgaagagggcgttgatacaacaaaggactaccttaatggcaaacaattgatatcatactctgaaacagttagccagcaaggttctttttatgctagtgaacccgaagtccataacaacgacatattgatattgggaataaataacaccgtgctgtgtaacatgccatactatgaaaaacatgg

SEQ ID NO: 93464 - DNA, 310 bp, Glycine max
  Clone ID: PAT_MRT3847_55411C.1
attctacttcttaatctcaatctattcgagtatatattattttatgtacttggcacttatcacagttcacatgcatatatcatgccatcatatctttagggaacattctccaatccatactgatctcccatattttactgcaagatgattaacttaaagacacacagatatatttcagctaaaagcatatctatatactaagacaagtctaatgaaaatgcttacaatctggctgctttatgctttaggcaaatagatggtggtgtttctttccatgagctttctcatctcgcaactttgcttacttttt

SEQ ID NO: 93465 - DNA, 520 bp, Glycine max
  Clone ID: PAT_MRT3847_55412C.1
actatggtgaaagctgtgccgcctcgcgggtaccgattcccgattcccgccacgccccacgcgttcggtttcgacagtttcgagggtgagaggcacgtgcgtaggtaagggcgcgttagtggttgataacgtggaggtttctaaaagagataatcgcgttttcccggcgaagaccactgattgttgaaggggtcttttttgtcaggtgcaggcctttgagaacgagatcggtattctgaaactagttacctcgccgcacgtggtggtttatatcgtcgacgatttcacctgctaggaaactgtctcgttcaggaacctacatttgtagtacatgccatgtggcacctgacacttatttggactcgtgctgacacggtcgagcgtgtagtgaggcgctacgcttggtgccacgcgaccgcgctatgtgacgtccacgctcatggttacgttcctgtgacgtgaaaaggtggaacgtgcttttattcggctacggggaaatggctaattttcgcgacttcct

SEQ ID NO: 93466 - DNA, 804 bp, Glycine max
  Clone ID: PAT_MRT3847_55413C.1
agcagctggtctcttcatggacagcaaccgggtggttaagccgcccggttttggtgctgcggcattgcatgttcggtctggcttcatggatgccggccctgggaccagccggtccctgggccagcaggcctgggagtgttccagaatggttccacgacgctaattccagcgaatacgccaccaaagttagtgaaattgatgcacggggccggtcaccgacacacggcttagggcctcaacttccaaggcattctcatccaacggttgtggatgtgcttcactggtgctggcaccaagattcatctttgagaccccacttctcagaaattcagctatttctgcctcatgcgccctagagggtgattggagaatttgaggcccccggtttggaatgaacctaaacattcgccaagggacccctcaacatggtaagaggctaagtgcacatctaaatgtgacgatttctcaattttattgtaaaaagtccagtgattggaatatgaagttgatattacccattggcgagatgtatataaacttatatgtgaagctatttctcattaaaacaagcagtgatactcacaggtgagctattaggcaaaaaataaatggaattcagttgtaaattataagaagaggaaaacaatgtaaataaatataaaaaaaaaaaaagggaaataactccaggataggtctcgcattgtgactttttcctctctttggctttctcttgtttgacgtctatagtccctagaattaaacattctccaccgtgggatatacaagggcatggcgtacttctgg

SEQ ID NO: 93467 - DNA, 487 bp, Glycine max
  Clone ID: PAT_MRT3847_55414C.1
ctttgggctgatttatgtgcttgcatggagaagatgatagaaggggggagcggaggcagcagtaagcatgctgcacacgcggccgactcctcgtcggccgcccgccccgccttccttaaccgctagactcgaactattggatctatctcctatatctatctatatcgaacggtcctcgaaggtgattgctattattattattattattactaagactatgactactactactacgactacgactattactactactatgacggagagggagagattaatctacgggcaggcaaggacgggaaggcgcattacagttatgacggctcggtgttgtacctctatgaatttacccatctttttggtcatcctgttagaagagtcttattgtcctctaatagaaatcctaatgaaagagttcctattgctggaactggcggatttgctggcatcggtaaaatagtctctacgccggtttcccgcgaatctc

SEQ ID NO: 93468 - DNA, 345 bp, Glycine max
  unsure (1)..(345): unsure at all n locations
  Clone ID: PAT_MRT3847_55415C.1
agctcaccatcttcatccactgctttttttgtttctctcccttttttgatgccttcccctttcaggaggagagagtttcaaagttagtgttaagattcattcttactttttcancttccatattatttccctctttttccattgaagcgtctcctattccttttttgttctcattttttttttttttttcttaatatttatataaaatcctaaccttcaaccatttttcttattttttattttttaaataattataataattgagcttcattccaatacatacttttatttaattatattcatatcatctcttattataactattcatcgcggaaatttccttct

SEQ ID NO: 93469 - DNA, 483 bp, Glycine max
  Clone ID: PAT_MRT3847_55416C.1
ctcgagccgattcggctcgaggtcgtacccgacccgaaactgcgagaggaaataaaagcttcaatagcttcgaaattcgttccaagtcatagggaactctttgagaagtatcaggtcgggtcagaaaccgtgttcgggcttacacccgatgatttggagcatagtctttctgacattttatcgggtagcgtttcgtcgtcgcattctccttcacctccacatcgcttcaaacgcccgtgaagttgaagcacgcgccggcgaatgtaatgggccccacatctgtcgttattgtttttttggctaatggtaaaaggcaagaatgtggcccagataagtgtaaaagattttttttgtgttgaatgacaccatgggtggtatagtacctgaaatcctaggtgtgcgttgttcaaaatttttattttaccaacttttttgagttataaatcagtgaataacccggcatgtataaaataatttcgcggg

SEQ ID NO: 93470 - DNA, 585 bp, Glycine max
  Clone ID: PAT_MRT3847_55417C.1
taatttttattagcaagaagaagtcgaattcattacttctctcttattatgatccaataaatattaacattaatgatgacattatttatatgtagtgttaaaaaaaattgtcatgtcggtattaccgatgaaaaaaataatttctgttactaaacttcttactaatacattaatatttagtaatacgtatttgattgtataccgaattagaagtgatcatatatatatgtattgtgttgtgttatactggccgggatgtaggatttggagaagcatcaccagaagcaaaggctgctgaaaacctccacaatttcttcacctttgttgcagtgaagattgttgctgctcaacttgaggttccttctccttttgctttttcatttgttccacaccttcctattgcctttcgtgctcgcttgtattcattctaattactgccactcgttgaaaatagataactagctcccaagatctttttgagcatcaattcactgatcattactattctttatttttaacggaaaaaagtcgtaaaattttacactatctacaagaatatatagtctttattccttcaaacttttt

SEQ ID NO: 93471 - DNA, 424 bp, Glycine max
  unsure (1)..(424): unsure at all n locations
  Clone ID: PAT_MRT3847_55418C.1
ggcggcgagaagacaacacaaggggggaggaggaagcaatggggcaggcaatcgcaatgcgcgacgcacgtgggggcaaacaccgagagcccaagcgggcgcgnaaacctatgatcaaacgggccacaacgacaatagaagaacatcgacaaaaacacgagcaaggagagaagaacgagggagaaagagacgaacaagaagaaaaggcagaaggcagcccccaaaagccaaggaaccgggaagaaggcaaccgggcagaaccgccaggcaaggccataacacggaaaagacagaaggcctccacaaaaacgcgaggaaaaaacaacaaacgtgcgcgaaaaaagagggcaccaagaaagcgacccaaagacgaaccaaaaaaccaagaaaggggcaaacgacaaaccaaagaaccaagagggga

SEQ ID NO: 93472 - DNA, 246 bp, Glycine max
  Clone ID: PAT_MRT3847_55419C.1
ctcgagccgaatcgggtttagcggatcaatgttttaggatactttacaccctggattataccattgcagggcggtgcggcctcagcgagtaaatgacctgatcaagacacgtccgaaacatgtctgtatgtatgcagagggaaacgagtattagattgacacaggtcccttttgctcgggcttcattggaccatgatgatgtatacttactagacactcataaattgattgatcagttagatggtg

SEQ ID NO: 93473 - DNA, 679 bp, Glycine max
  Clone ID: PAT_MRT3847_5541C.1
ggagagaactgtgtattaattataaatatctattttgattcaataatggaaaaaagtatatgtaactcggttaaacatttcagtatcagattacactacactacaacattttaagggcaaaatcccgacattaaggtatcattcactctgttgcaatcttcgactatctctaaagtaactttagctgaactaatttttcagcttgtaaaagattgctccaactccgtgatcaaagttcaccgcagcacccaaggcatacatcataacagattctactcaatttgacataaaaatattcacattttctgaactgagtatatgaaatagagtaatcatcattaatcattgttccttgaaaaagatggcaatggcattgagccttgtgggcgaaggattacaagcacaccaaacatcccaagcattggaagaacaagaagccacttcaacagtttatagtagtgcatatggaatgtaagagagaaatcatcagagaaatacagtccatttctgtcaaccatctcaaccaaaaccgttcccatggtccttaccgacacagttggcagcttaatccgatatttaccaggttgaccataggtattggtcaactttatcggtctctctccttgggaattaccaggtacgagcaaggaagtagtgactttgtacggtccttgatgcc

SEQ ID NO: 93474 - DNA, 303 bp, Glycine max
  Clone ID: PAT_MRT3847_55420C.1
cctgtatagcgggcgcgatctattctgttcgttgggaagcaaggatgattggatagggcaccgacatgtaccattctacgaaaagagcataattacagagtggatcatgtatctggattcaagaggtatgatctatgatgctcttgaacaggctcctgaccctggctacagttttgtactttcactacggctcgagtatctagatggtgaagccagcattgaatgtgctatgtatagcctgcctaaatggaggcctgaccctgaagaatctaggtcttccgacgcgctaaatgaggctgttga

SEQ ID NO: 93475 - DNA, 359 bp, Glycine max
  unsure (1)..(359): unsure at all n locations
  Clone ID: PAT_MRT3847_55421C.1
tttaaacggttgtcagagtcttactaatatatatctattcttgccattatgttccttatttatccaaggaaatcttgtcctacatcgcaaaaaccaaaaacgccccccatctcaaaggaaggaagaaaagacctgctgtgacagacattaccatttcctcttggggggggggacgaannggaaaaaaaaagccccgaccaaagaccaaaaaaaaggggggggggggggggggcccaaaattaaaacagggggggggggcccgatgaaaaaaaggggtgagaaaagggggggctggttcaagaaaaagaaaaaagggggcagggcaacatctatgctccttcatgcaacacccccggggg

SEQ ID NO: 93476 - DNA, 307 bp, Glycine max
  Clone ID: PAT_MRT3847_55422C.1
ggggaaaaaaatttgatttttttaaaaaattttggacccttaccccggtttacttttttcccgggggaaattttgcccgtagtattccgttagcccttgaaaaatgccgggcccttcaaagggaaaaaaaaaaaaaaaaccccggaaaaagttaaaacccccaaaacctttgtgaaaacccggttttgaccccattttttagggaataattaccaatttggaaaacccgctggggggggaagccgcttctgatttggaagttttcccttcaatacaatccaagccttttttaaaccccagttggggg

SEQ ID NO: 93477 - DNA, 293 bp, Glycine max
  Clone ID: PAT_MRT3847_55423C.1
atcatgtcacaaatgagcgtcttgatcgatcttcttcattatggtggatcgagacaaatacatactagacattgaagctacattcatgacaactgagagaacacataacctaagctccatcaccatcatgttttagaaaaaattgagatttactagaagataattcattccagccgtggtgaactaaatactttttagcttgctattcagcaaaaattttaatgggagttccaggttgtcttttgatcaattttagaatcaatatcaaaaaattcacttcaaataagcttaaa

SEQ ID NO: 93478 - DNA, 601 bp, Glycine max
  Clone ID: PAT_MRT3847_55424C.1
aaaaaaaaaaaaaaggatccaagcccctaagccttggggaaaagccccgagaataaaaaattaaagcaaaaaggccttaaaacaaggcccgcccacaagggggggggcaaaggcggcaaaggggggctttttaaaagccccccaaaggggaaaaaaccgcccgggcccatatttttttaggcaaaccccctgggggggggggcaaaaacgggtcccaccccccgggaaaaatggaccaaaaaggggggacccccaaaggagcaggggggggcccaagaaaccagccccgggccaaaaattaaaaaattcggggggggaaagccccaaggggggaacaccctcaaaaggggacccccagggggggggcacccacccccaacaaggcgggccagggggaaaccgggcccggccccatccaaaaaaacccatttaaatccggccccaaaaaaaaaaaggggggcccaaaggggggccaaaatcccggcttgggagagggcaccccccagttttaaaaaccgccccaccaattttagggaaacaatgggtttgggaaaacttgctttttgaaccttggaaaaaaccttttcgtttaggggggggg

SEQ ID NO: 93479 - DNA, 164 bp, Glycine max
  unsure (1)..(164): unsure at all n locations
  Clone ID: PAT_MRT3847_55425C.1
ggctgantntnnagcatatananngttnacannaggcatcancttagnggaccggtaaatcaattcacancataggnngttcgataggaacgacagtntanttatttaacaatagtcacttgattcttcatggataatactgtaatagcaagttanattcatca

SEQ ID NO: 93480 - DNA, 2681 bp, Glycine max
  Clone ID: PAT_MRT3847_55426C.1
ccacgcgtccgctccaaacaaaaccctaactctccctacctttgattttgaagatgaaagggaagaagaacaccatgaccaaaaacgacgttgaagacgacggagctccggttccttcaccaacagtatccgattccgactctgattacgaggactcttcagcagatgacgacgacaaatcttctgactcgctggattctcaatctgaatcggaattagaagatgcttcacctgagaatggtggctccggcgatgtagaatctgcagaagatgaggacactgtcaatgatgaagacggtggaagtgagagctctgatctccatcaggaaggagctgagagtgattcctccgaggatgaggtggctcctcgaaacaccattggagatgtgccattgaagtggtatgaggatgagcctcatattggatacgacatcaaggcaaaaaagattaagaaaaaggaaaagcgcgacaagttggattcatttcttgcaagtgagtgatgattctaagaattggcagaaacatctatgatgaggaagatgatggattagtacagttatgaggtaatgaaagcagacgaaagagtaaatcaatctcgaccgtggcccccccaagtgactggcacccaattctgactcgcctgtaatccaaaaaattgacgcaaaaacttccattcaaattacatggacttgctgttaggtcaaccttccatccatcccgttccgtcttctttgtatgtaccaaaaagagtgttcgtgtgtatgagggattaatcactttcgacaagccaaaagaggaagatggtctttatcacttgtggggagatgcttctggttcaacagaaagagcaaatcatttggcttacattcctgccccaaagcagaaattacctggccatgatgagtcatataatcctcctctagagtacattccaacccaagaagagatcaattcttatcaattgatgtttgaggaagaccgccccaagtttataccacaaagctttgtatctatgaggagcattcctgcatatgagaatgctatgaaagactgctttgaacgctgtttggatttgtacttgtgaccctcgagttcggaaaaaacgcctcaatattgatcctgaatctttaaagccaaagcttctatgtcgaaaagagcttgatcctcttcccacaacttgttatatcgagtataaaagccagtgaagatgctgttacatcaatttcactcgaagcttcaagacaatggatggcttcaggttcacgtgatggaactgtccgtatctgggaggttgaaactggcagatgtcttaagcgcagggaggttggtgaatctgttagctgtgttgcttggaatcctctgcctgatattcatcttttggccgtttctgtgggccaagatgtacttctacttaacacttgtttgggggatgaagaagagcagaaacggattaaggagcttctctgggttgactcgtctacagcatcagatgactctggcaacaaagcacctagtgtaagctggcttaaagatgataaacatatgggtttaaggttaaggcactttaagactgttactgctgtagaatggcaccggaaaggtgactacttttcgacagtgatgccagcaggtgaatcaagagcagttctgatacaccagttatccaaaaagcttacgcaaagacttccattcaaattacatggacttgctgttaggtcaaccttccatccatcccgttccatcttctttgtttgtaccaaaaagagtgttcgtgtgtatgatttactgaagaccaagatcataaaaaagcttgatactgggcttcgtgaagcttcatccattgcagttcatcctggaggtgataatttaattgtgggtagcaaagaggggaagatgtgttggtttgacatggacctttcatctaaaccatataaaattcttaagtgtcacccaaaagatatcaacaatgtcatctttcatcgctcgtatcccttatttgcttcatgttcagatgactgcactgcatatgtttttcatggaatggtttattctgatctcaatcaaaatcctcttattgttcctttagaaattctacgaggtcataccaattcaaatgggagagggatactggactgtaaatttcacccgagacagccatggttatttacggctggtgctgataaactgattaaactttactgtcattaatataaatatggatatacatgcatgtgataggcggataacatctaagaaggtggcttgcaacttcatgaccaattttgttccccaattcttaaatagatagcactgcaaaccgaaatgaagggcaacggagtagtgagtttcttgctctggttttatggattgttgttttgttttccacacatcattcctgaaattcacatccactaaactttgcttgctgtggaaatagaactacaattttgatgtaatatgtttagctatgagaagctcattattttaaggcatccagcggatgcatctttttggacattgaatgtggcattctgcatggttgtatttattacagataacatcaagtaacgcactttaccgtttctttgagtaatgttaaataatacgaaaaaaaaaagaaaaaaaaaaaaaaaaaataaaaaaaaaaaaaaaaaaaaaaaaaaaaaaaaaaaaaaaaaaaa

SEQ ID NO: 93481 - DNA, 366 bp, Glycine max
  Clone ID: PAT_MRT3847_55427C.1
ggaattcactctctaaagaaaatccttgtatgattggaatcatatggtttaggatcattctatatctcacgcgttattaactctttttcgtaaattgagaaatgtgatactttcatgtgatgacatggagattaattgagattacatgttctgaatcatggaataatttcttttctcatagagaaattattatatgatcttggagcagcacatgcctattgtccgatcaatctccatataacgtgttaagtagagtttgactgagattatgaatatgtggtggtcccaaactgtataataatttctcaggactaaatattaaatataggagatgttttagttttttcacttctcgtgtggttgttg

SEQ ID NO: 93482 - DNA, 913 bp, Glycine max
  Clone ID: PAT_MRT3847_55428C.1
ggccgaaagtgtgggtaaaactaaaaccctttacctcctccaaacaaaaccctaacttgtgattttgaagatgaaggcgaagaagcatgcccacgctgaagaggagggagttgctccgcttccttcaccaacactatccgattccgactctgattacgaggactcttcagccgatgatcaccacgaatcttctgtctcgctggattctcaatcccaatcggaattagaagacgcttcacctgaaaatggtagctccggcgttgtagaatctgcagaaaatgaatcatctcaatacgaggacactgttaatgaagaagacggtggaagtgagagctctgatctccatctggaaggagctgagagtgactcctccgaggatgaggtggctcctcgaaacaccgtgggagatgtgccattgaagtggtatgaggatgaacctcatattggatacgacatcaagggaaaaaagattaagaaaaaggaaaagcaagacaagttggattcatttcttttcggtgttgatgattctaaatattggcggaagatctatgatgagtacaatgatgaggtagtcgagttgacgaaagatgaaatcaaactcgtccgtagactgctcaagaatcgggcaccccattctgactttgatccatatccagatagtgttgactggtttaaatgggaagatgccaaacatccattgtctaatgcacctgaaccaaaaagaaggtttattccttcaaagtgggaagctaaaaaggttgtacagtatgttagagcaatccgtcagggattaatcactttcgacaagccaaaagaggaagatggtccatatcacttgtggggagatgattctggttcaacagaaagagcaaatcatttggcttacattcctgccccaaagcagaaattacct

SEQ ID NO: 93483 - DNA, 582 bp, Glycine max
  Clone ID: PAT_MRT3847_55429C.1
ccggcaattcccgggtgcgacccaccgcgtccgaaaatcctcttattgttcctttagaaattctacgaggtcataccaattcaaatgggagagggatactggactgtaaatttcacccgagacagccatggttatttacggctggtgctgataaactgattaaactttattgtcattaatataaacatggacatacgtgcatgtgataggcggacaaaacgtctaggaaggtagcttgcaacttcatcaccaattttgttcctcaattcttaaatagatagctctgtaaaccgaaaggaagggcaacggaggagtgagtttctttctctggttttatggattgcttgttttgttttccacacctcacatttgtctttccaaaatctttagctgaaatataactgcaattttgatgtaatatgtttagctatgagaagcccattattttaaggcatccagcagatgcatctttttgggacattgaatgcggcattctgtttggttgtattatagataacatcaagtaacgcacttcacagtttctttgagtaaatgctaaatggtacgaaatatgatcgtttg

SEQ ID NO: 93484 - DNA, 434 bp, Glycine max
  Clone ID: PAT_MRT3847_5542C.1
tgcgagaagacgacagaagggcaatagacacagatgatgtgtacaaaactgcagaagcaattaaacttgcaggaggaaagattactcgagaacctggaccgatacccgttatgaagacaaagatcacatcgtgtgttgatcctgatggttggaaaactgtttttgtagataatgttgactttcgtagggagttggagtagtttttatgcgagtcgtcatcatggccattttgtgaggcttaatatcaaaacctgtggcagaggaatggtattctttgttgaagttttttttttttttgagtcagtgaatgtatcatacgcaagtccatttttttgtagatgatggaataatgactgtacaaatatggctcttgcaacaaacatctttagctttatacaatttcacttacacatatgattttgcaaatggaaaaa

SEQ ID NO: 93485 - DNA, 294 bp, Glycine max
  Clone ID: PAT_MRT3847_55430C.1
atggattctactacctcaaagcacatttgtagagactgggagatgtttaacactttaaaaatcgatggagaattcaaccatttcaagttagggaatcgtgaaaaaataagggttgaaggcataaggagcatgaggatgaagctctatgatggtgctattcaaactttctcaaatgtgagtggggatgcaaagtgtacaaggggagacacttggtgttgtgatgacagaaaaataaaggtaacctttgctatttggatggacaagcctggaagaggaatcatgatagcaaagtga

SEQ ID NO: 93486 - DNA, 485 bp, Glycine max
  Clone ID: PAT_MRT3847_55431C.1
gcagactcaaatttaaatattgcaaggctttaacgcattcttataaattacaagattgaaagaggtgctctgaaatttagcatacacatttcagaggcatattataaataataaaaatcactaaatcagcacatttgagagaagaaaaaataccaaaagtccaacacagaataggaatgtaaggcactaatattccagccactgtgacgggtaaagaaccatataaacagagaagatgagggtggcttgctgagtgcgagtgaaggagtatggggtgagggttctcttagacaagtcgtttcagtatattaaaacaaggtcaaattacctatttgatcattatcttatttatttttccactttgatcccttatcttttgaaaaatcgatttagtcatttatgtctataaagtgggtcaaaataatcattacatcaatgcattcatacccggtcatacaaaatttaatagctcagattaaaattag

SEQ ID NO: 93487 - DNA, 303 bp, Glycine max
  Clone ID: PAT_MRT3847_55432C.1
cccggataaaacccgggggaacattgtttaacatttaaacaacatgggtccaaaataatccctttttttttaaactaaaatcctgattggactagtttccaatcccttattatttaaatataatgggctcccccggcccattaaacacaagtaacaaaagttttaacaatattttaatcttccccccggtttagaggcttcaaaaaaaagacttccccaattacaagttttagggggagaccggtttttttttttttggttgaaaaaatttgttttggggcccatccatgcttaataaagctt

SEQ ID NO: 93488 - DNA, 415 bp, Glycine max
  Clone ID: PAT_MRT3847_55433C.1
gatgaacccatcatcatcaatgcctattgctccacttactgccttgcaccctttctcaagggcctggaccacaaattcggcatgatcaacggtaccatcaccaccactcactcctacaccggtgaccaaaggctttttgatgcgatccaccgtgacctgaggcatgcaagggcaccaacactcaacattgtacccacttcaacatgagcaacaaaggcagagtgccttgttctaccaaccctcaaacgcacactcaatggcattgcactacgtgtgccaacaccgaacgtctcaatggtggacctagtcgatcaggtctcacagaagacctttgcagaaataattgaatgcatcattcagagagagtgcagacattgagctaaagggaatcctctctgagtgagatgagccactt

SEQ ID NO: 93489 - DNA, 220 bp, Glycine max
  Clone ID: PAT_MRT3847_55434C.1
gtcctacgctgggcatagtgcagagcattctctgctcccagcttcagtcattcgcaacaacacacgcaagctatttccgcgctctagcctgcgttgtacacgttgcatgtaccatctgacgtgctagcttattgatatatacatgtatatgtattacaggcatcccttgatttagctatatactcagagaggatctgcaaattgataagaagatctagaa

SEQ ID NO: 93490 - DNA, 302 bp, Glycine max
  Clone ID: PAT_MRT3847_55435C.1
agcggaatggtgagcgagaagctgccgagttattaatgtattcatgttaccatcaccttaaggggggtgaatgagaagaatgtcccttattacctgccgcaggtctccaactattatattgtgtgaggtgtgttgctgggacagcggccaagtgggagcatgaagcctccagataagaatgagttatgactattggatggactatgacaaactcgggcgctcttgtttgtgaccatagcttgcctatgacaatattggagattgagggatatggtgggtccttgcggacagaagattgggct

SEQ ID NO: 93491 - DNA, 326 bp, Glycine max
  Clone ID: PAT_MRT3847_55436C.1
tcctctagagcggccgcttttttttttttttttttttttttttttttggaaaaagtcgaagtgaattggatctcaggaccatcaggattaggacaaattttaaggcttaatgagtatttatagaaatatttacaaattatttactaataagattttcacagagaaattaaactcacatcctttaatgatatgaattcattatttaacaactagatgaatctttatttatttcgattccccttctgtcgtcttctcgcagccgtacccttctgtcgtcttctcgcagccgtacggacccgtgggcggacccgtgggcggacccgtgg

SEQ ID NO: 93492 - DNA, 153 bp, Glycine max
  Clone ID: PAT_MRT3847_55437C.1
aacaataacaaaactcaaattatatagaaaaagatatgattaaagcgttcaaaactcgaatttcgaagtcaaaacgccaaatacctatgatctaaaaatagtattccagaaaatgaagcatatataagatgattacagccgaattttggggcc

SEQ ID NO: 93493 - DNA, 1329 bp, Glycine max
  Clone ID: PAT_MRT3847_55438C.1
ggctcgaggaatcgaaattacggcttacttgtcaaaacgtagtgtttcagtggttaggtcttcccttcccatacacacactgctgtttccctgacatcgctttgctaatcctctttctctctcatacgcatcaatttccaaccatgacggactacaaacaagaacaggatatggaaattgaagcattagaagctatacttatggatgagttcaaagaaatacattctggtgaaagcggcctaagtacttccaatcgatgcttccaaataaaggttgttgcgcaggatgacgatgcagatgggccaataactaatccagctcaactggctttgatcttttcacacacagaaacatatcctgatgaacctccacttttaaatttgaaaagtttgcaaggaatatctactgaagatctaaggattttgaaagaaaatcttcaacaagaggcatctgaaaatcttggtatggctatgatctacacacttgttacctcagctaaagagtggttggctgaccggttttgtcaagatgatgttgggagtactgaagcagaagaggcagccaaagaggatgtagtgataccccacggggaaccagttactgttgaaacatttttggcatggagagaaaggtttgaagctgagctagcattggagcgagctaagctaatgccagagtctgtgctctcagctcctaaggaaaagaagctcagtggtagacagtggtttgaaagtggaagagcgaaaggtgtggctgctgtcgctgaggaatctgaaggggaggacgaggaagatattgactttgatgaagatgattttgaagatgatgaagaggaggatatgcttgagcattatctggctgaaaaatccgattcatccacacattcttctatgagagctagttaaattgaatatgctgcatatcaggcagagttttacagtttgcctcgctgactttgagggagtttctgccatctttctaggactggaggatttggttttatgatattatcaaaggcacaatgcagaagtgtttgatgtgtgatattgtatttcacttaaacactgtctgatataaaaagaaatatcttttgtttgtaatcatcatcctcgaattgcatgaaatcagtaacttagggatagacaactcaatttgaagtagcagaaataagacgattttgtttcattatgaacgtgtgtatctatgcagaagtattctgtaagaaactaagaatactcttttctgccttttagacctttcaaaatcgagtttggagatgtctgaatttgaattcattcaagtttagagatagtctcaaattttgttttc

SEQ ID NO: 93494 - DNA, 2023 bp, Glycine max
  Clone ID: PAT_MRT3847_55439C.1
ggtttgattaggcaaccaaagtatggtcatctaaaggagcttcataaggccatcaaaatgtgtgaacgggctttagtttcagctgacccagctgttacttcaatggggaacttccaacaggctcatgtatacactacaaaacctggagactgtgctgctttcctctcaaactttgatacaaaatcttctgttagagtgatgttcaacaatatgcactataacttacctccttggtccatcagcatcctccctgattgcagaaatgttgtttttaatacagcaaaagttggagtgcaaacatctcagatgcaaatgttaccaacaaatactcatatgttctcctgggagagttttgatgaagatatttcttctcttgatgacggctctgcaattacaatcactacttctggtctcctggaacagataaatgttacacgggatacgagtgattatctttggtatataactagtgttgatataggttcatccgaatcctttctccgaggaggcaaactacccactctcattgttcaatccacaggccatgctgtgcatgtttttatcaatggtcaactttctggttctgcctatggaacgagggaggataggagattcagatatactggcacagtaaacctccgtgctggaacaaacagaatagctctgctcagtgttgctgttggacttccaaatgtgggaggacatttcgagacttggaacacaggaatccttggtccagttgtactccgtggacttaaccaaggaaagttggacttatcttggcagaaatggacttatcaggttgggctgaaaggtgaggccatgaatcttgcatctccaaatggtatctcttctgtagagtggatgcagtctgcattagtttcagagaaaaatcaaccactgacttggcacaagacttattttgatgctccagatggagacgagccgttagcattggacatggagggtatgggtaaaggtcaaatatggattaatgggctgagcattggaagatactggactgctccggctgctggtatttgcaatggttgcagctatgctggcacattcagacctccaaagtgccaggttggttgtggccaaccaacccagcgatggtaccatgtacctcgatcttggttgaagccaaatcataatctgttggttgtttttgaggaacttgggggagatccttcaaaaatttcacttgtaaagagatcggtaagcagtatctgtgctgatgtgtctgagtaccacccaaatattaggaattggcacattgatagctacggaaaatcggaagagttccatcctccaaaagttcacttgcattgtagtcctagccaggccatctcttccattaaatttgcaagctttggaactcctttgggaacatgtgggaattatgagaagggagtttgtcattcttccacttcccatgccaccctagagaagaaatgtataggaaagccaagatgcacggtcactgtatcaaacagtaactttgggcaagacccttgtcctaatgtgttgaagcggttatcagttgaagctgtttgcgctcccaactaattggagaggctgaatgattaaggaagcacccttttacgtgtagtgtgaagtgacttaacaagcacacgaaagaacaataatagtataggtaaagtaaagtgtcatggttgtttttagggagaaagtaataatgttctgatatgttggtgccgaaggcacgaggtttttagtttcatttggtgatgtttttacgggaatgtataaaaattagtgattgttggataggtgaatctttaatcagggagtccaaaattgggatccttggtgtagtagttcccggccttttacgttttaactataggcacggggaagagagggaatttggtttgtgtgatgttttttcgttttactttgtggggttaaattaaactccaaatcaggttcaagttgggagcggatcctactgtaaccactctacgtttatttaaagcccattgttcaattctgtgcc

SEQ ID NO: 93495 - DNA, 199 bp, Glycine max
  Clone ID: PAT_MRT3847_5543C.1
cacccacgcctccacttctccttctcaatcttgtaattctatttcctccaccataatcctacacaaacttaaatgacgtcctttttaaaacaatcctctcaccctccccattcacctcaacttctataatctcaccccaatcaactactattcctattcacttttccttatattctaccattctttactttcaaattca

SEQ ID NO: 93496 - DNA, 242 bp, Glycine max
  Clone ID: PAT_MRT3847_55440C.1
attacccaacccctaaaaatccctaccacctgctgaaaaaacacaccctctcttcgcaaaacaaactaaaacggcaaagttataccacagaagctcccctcgaaaaaataaaatctgaacatacccttgcaacaggagtagctcagacccatgattcataccccactgactaacccatgaacctttattcagcatctttaagatcttttacaaattccagacctagtactttcatacctgca

SEQ ID NO: 93497 - DNA, 384 bp, Glycine max
  Clone ID: PAT_MRT3847_55441C.1
gtcaacctgtacccgcaacattggcttgacataacgcagacagcttgactaaccgggcagacatagggtttttgaacaaagacccaaagcaactcctagccgctgctgctaccaccccatacacgagctagggttctcactgcgcatgggctccgagtttaaccatttaagccacccaacaaccctttgtttgaaggccactagacctcattgatgcctgcccgcacgcaggtccataatggtgacatggggaaacgttaactctgtgcacgaggcacgcgctctaactgtaaggaggggactgccacttttactagggcatggaggggttgcatgaacagctgtttgcctagagggcccttccgtgggatgtttccgagacac

SEQ ID NO: 93498 - DNA, 113 bp, Glycine max
  Clone ID: PAT_MRT3847_55442C.1
gggttaaaaaaccaaatccccttctccccaaactcgaattcaggtcaaacatctaacagataactaagtggaaaatgcccatccaacattcctcaattatggcctcgtctcct

SEQ ID NO: 93499 - DNA, 282 bp, Glycine max
  Clone ID: PAT_MRT3847_55443C.1
agtgcactgaacccttccacggtggtgactgagtgatgacagacaacaagtaagtttcagagctacagcacaagaaacagtctgatttaatacgcttctatgagcgggtgaggtgctgggagtataggtcgcacacttccattgttcgcttgacaaagtcgacccgcactgacgaggctcgtcgcttgggattcaaggctaagcagggctatgtgatataccgtgttcgtgttaggagcggtgagcgaaagacgccagttcccaaaagtattgtttatggga

SEQ ID NO: 93500 - DNA, 246 bp, Glycine max
  Clone ID: PAT_MRT3847_55444C.1
ctcaagcattccattcttgtggagttttgggtgtgtttatacctgagactagtgctggatctggttatccagtgactgatgatcatatatattataagaggcactatatctttatatttacaatggtaccgcattgttagcatggtgtaaagttatgtatatagatatcaagacatctgacgatgtacagtcatgacgatgtgtacaactgcaacgagaaaagtactctgactttatgcttaaacg

SEQ ID NO: 93501 - DNA, 1756 bp, Glycine max
  Clone ID: PAT_MRT3847_55445C.1
gaaaacaccgacatggcgatggcgggcactcacgctcggcaatctgcttggattcttcgcctgctctgtttgtgggcttctgcagttctcgtattcgctgatgaacactccttatgtcttactcaaaatgccacactgcagctatcccgtggcttgcccgtgggaaattctcctggttccaagcctggtgctactgtgattgtcgaaagagttcatatacatggactgtcaaggtttagaaacttggggaaatttgcacattccattaaagtgaaggtgttgccactgcctacaaactcaaatgttcgcctgccaaacatagaggtttgtttccataggaatgtgtctcttgtagctgggatgtgtcgacatgggcagtgggagaaagttaccaaaggttcttgggctcgatcgatgtctctttttgaccacaagatcttagatgtaaggactgctggttccacactggaaaattttgaggtttctgttgaagaagaattttttgtatatcgtattgtattattgacattgggtattattctgttgagcttggcatcctttataagccaatctttagcattttattatagcagcgcaatggcaattgggataattcttgtcatattgattattatttatcagggaatgaaacttcttccaactggtcgcaagagttcccttgctatatttttatattcaactgctttggcttttggtacgctgacttttgttgcaattcctggagcctggtcgtcgttctgggtggtccacaagcttgtcttgactgaagatggatcagtggacataagcactgctcaatttgttgcatgggctgtaaggattttggctgcagttatgattcttcagagttctatggatcctctgttgggaacattggcattattatgtggatcatttgtctccttattgaagaaaatgcataggttgagattccttcgtcatttacgcaggcgtttgtttaaatctcccaagaaaaacaggaggagatcccaggttcctgattcatctccttttgatgattctcgtgatgaacttatgtacaagatgcaaagtaaagaggactctccactttttcggccacaactgagaggccctaccttgtccccttgcaaatctcctgtgacaggtttcactaggacaccaccaaaatcacaggaggcattatacccgtccatcatacacaacacaccggagagaaaaagatattcagctgcagaatgggatgcattcacaaagaagtccactgaaacagctttggaagaacttgttgcatcccctgattttggtaaatggctgtcgaccaatgctgataggataagtgtaacccccaactctagaactgatcagcagcgtgggtggatgttgtggtcttgaagcacaccttaactttctttgcaaattcatgactgcttgatcgaagtaggtgagaaaatcccatagggttcttgccagttggcctaaagaaggttcaaacagaagtgcaatgtagattagagaatttttgtgataagtaatgttttctagggtgtactgtagatattcattccctgcgccggtggttctcacttctcagttcttgccccccgggaaggatcggggatttaattttgtatccaagcatccaacgctgacaagaggtggtttaaccggtccatgtccatgtagtcttaatttttaaatcaataagatgttgaaatctctataagagtatagttggatggagaaattaaagcaa

SEQ ID NO: 93502 - DNA, 921 bp, Glycine max
  Clone ID: PAT_MRT3847_55446C.1
cttaattcttgcactttttacatactttttttcttctagttttgggaaataaagatagtgtatgtgtgcgtgcatgtatgcacaatagtgtgttggaatgtgtgtttttgctattttatcatctaaaaggaaagtggcgtaaaaaacatgtaatgaaaatggtgtataaatagcaatattgatattcctatgcattttcaagtttgatgttattgtaaaacctaatgattgcttcaccgtgtttaacttggcagaaatctaggctcgagcttgtttcggagcttctcagggaccaaattacaggggattcttccatgttcaaagatctccaattgtccagcatattcacattgttttcatgttaattgtggtggaaagaatgtaaaggtgatggaaaatgatgaaaatattcactatgtaggagatggaggtgtgttaggtagcggtgctgctaatatttcattgatcatgaaaatcactggggatttcttggatgatggtgatcaattaaattcacgttaccttaggtctttgccatcttcagatttacctgagctatataaaacagctcatgttactccaatttcgcttacttattttcactattgcttggaaaatgggaaatatactgtaaaactccacttcgcagaaatacaattttcaaatgataacacatttggaagtcttggaaagcgcttatttgatatttatgttcagaatattctggagattcaattctactgggctggcaaggggactacaaggattcctgttggtggagtttatggtcccctcatatcagctttctctattgtttctggtgcgttgccttgttctgaccaaaaaaatgcaaggcataagataatcgttggagtgggatttggagttacagctctatgccttgtctttataatagtttga

SEQ ID NO: 93503 - DNA, 228 bp, Glycine max
  Clone ID: PAT_MRT3847_55447C.1
aacgttctaagaaattatcgaaggacaaggcagcagtataagcaatgagaagagcaaaagcaaatccaagaaggttcatggacgttagggtttctccttatagttctgactatgatgattcaaaaagtttggacacattggcttcctctaggtctgaagatagctacagaagaaaggggacagatctcgcacaagcaaaagatgtcgaaaggtacttagggaggcaag

SEQ ID NO: 93504 - DNA, 500 bp, Glycine max
  Clone ID: PAT_MRT3847_55448C.1
ccgggtcgtggatacttttatttcccatgtcgcactgcttactatcattcatgacttcatgctaacgggcgccacagccgaaattggatgaaatcgaggcaaatacacaaaacatagattgctcatgtactttacaccctgcaccaagactagttcacaaaagtgctgtgggaacataaaaccaaaaacacttaaaaaggagagcttcgatgtcactgaatacctaggtgggggctcctggctcgctgaccatccaaaacgctttttcaaaccaaccctctgcggtgaagcttgataatcatgggaaaacccgcctggatgaacagattgtggagggagccctagaggggaatctttgtaagtggtgcaaactgtatcaccgatgtcttcaatggatgacagagaatacatggtggctggagctatgccatactgagatcagggatattggtagaaacccgatggggacgccaggaatggctctagccgaattcccgact

SEQ ID NO: 93505 - DNA, 272 bp, Glycine max
  Clone ID: PAT_MRT3847_55449C.1
cctaaatctggaattcggtttcggaaacaattgaagtttaaaaacttgccctaatatataaaaaatccagacacaagacatcatcatgcatggctgcctccgtctccactgtcggagctgtcaacagagctcttttgaacctgaatgggtctggacctggcgtttcagctacaaaaaaaaaacttctaaaaaaaaaaaaagggggggggccctccttataggctttcgcaacccgggattattattccatccggttttgggggtgttcccca

SEQ ID NO: 93506 - DNA, 258 bp, Glycine max
  Clone ID: PAT_MRT3847_5544C.1
agaaatcacagctgaaagagggtactatcaataaaacagcgctacagatattgttcagaaatttctgtaccaaaaaagtaaacactgaatttattgcactggctcaacccccctcttcctttctggctcacatgcacttctttgtctttctttgaagttcatctatccacacatacatatccctttagcctttattacaagcctcagatataactacttcacttgttgtgactaagctcactaatcattatcatcatt

SEQ ID NO: 93507 - DNA, 411 bp, Glycine max
  Clone ID: PAT_MRT3847_55450C.1
tgatggtgtttcacaacagattgtttcccaacctgactttacatgaacaggtcggtgtactactgcaggggccctgacatgaacctcgactacgacgtctcctcatacaaacatgtaagcactatttatagataccatcttaaattgcgttcagaccaactccactactaccttttttttacgattagcaatatcccgttcaacgcgactaaagcgttcatagacaccttcacacaataggctatatctctacctggtttaaacttcacacagactaattacaacatctcccacttataattatggttctatcacttgaattctcgtttttaccatgtactgttttgagcgagcatttttatattgaatgcttcacatgtcgcttattgctaatacttattgattctacta

SEQ ID NO: 93508 - DNA, 1429 bp, Glycine max
  Clone ID: PAT_MRT3847_55451C.1
ggcaacaggaagcaggggccagagacatgaccttgaaagaagaggggcaaaagaatctcgagctgttcctgcacctgatgccaatgctgaactgccactgtcaatgcaggtactgaccttctgtatttgctgtttcctgtttgctgtcctactgatcttgtcaaatgtcaatgcatgaatttgcttttggattaactcttgtttgtattctaacaaaatatctgcatggcatcttaagagttaaacttagtgctaaaataaaataaaaaaggttggttgaaggttgaattattgaatcttatttcagtttcccttttgaaatgtcatatttgcatcttgtgagggtacttttttactctcttattttgttataacacttttctttttgtcaaaaccttaattactctttttttacagaagagacaaagtcaggcccaatcaaaaagcagaagtgagaagtttaatcctcatcctgaagaagcttctggatttcctattgatccccccagatcgggatttgctgtagatccccccagaccaactcaagtaccacaacataaaagagcctcccattcgggtccgctggctcaccgaactgcatgggctaaatctgggaaccgaactgcatggtgatgctccaaagatttcagttgggggcgacctatcaacaatctcaggcttagttgctgaacagagtatgtcgtagttgcatcgaggagtatgttgtcagatgatcgcagagaaagatctggatcgtcacaaatggaggcatcaaaattgatgaacaggttcccaggatcattcaaggacatctctgaattattgataaaacaggatcaaaggcatcatgtaccgggccaagtaggcacttcccaaaaggaagaagggagaagcagcaacaaagaccttgttcttgttggttatggatcaaagggtcataaaattcattactctggtccattaacatcaagcaacatggatcaggtgttgaaagaccatgaccgccaaattcaagaggcggttagacgggcacgtttggataaggcaaaaatgagaaggctccaagctgaagggaaccagataaccaattcattatttgtttcaggccgttgatttgtagagttgttgagatgcaacaaggcatcataaaggatctttaattcttttttaatggggggcctgtatagggagaaagtatcctttgcaaaatgccctggtggccgtgttaggtaactctatagcttagaaaagctctcccttaaaatttatcacatattttctttctacttaccgctgtaatttctggcataagcccattcttgtaaagcttatcagccttaagctgttagaaatctggggaacaattgtgtcatgagagttaataatattcactcggaagatgcctaagtaaaaaaaaaaaaatatgtct

SEQ ID NO: 93509 - DNA, 435 bp, Glycine max
  Clone ID: PAT_MRT3847_55452C.1
gtagtgctttgtagtgacgggcgctgatcctctggctgtcgtgtttgttttcagaccagaccctagctccgtatcgcaaccatgccgaccaagcaaggtggaaaagctcagcctttgaagaaacccaagtctgataagaaggattacgacgaggatgacatggctaacattcacaagaaaaaggaagaggagaaggcgctaaaggagttgaaagccaaggcgcaacagaagggaagctttggaggttctgggctcaagaaaagtggaaagaaataagggctctttatcatgattgtatacatccaatattgagccctgtagatcattaccaagataactgtatgcttattggggccttttttattgctctaaagttagtactgaactgaggtatatcgtgatgtaagctgcgacaagatacttgttttgaagctt

SEQ ID NO: 93510 - DNA, 2684 bp, Glycine max
  Clone ID: PAT_MRT3847_55453C.1
gctatataattcagaataaagcagcacagaggtctcctgtgattaagctcttctgcgttggctcgttatattttaacgattatttttaattgaacgagagaaacatttttagagagataaagtcagtgacaagcaccagaagaagtagctagcacccgacaaccacaccagattttggataaaaagtaagatccattgagtttgttcttgcacatcatgattttctctggttcaacaacgaagggtgtgaagagatgggtttgatcatgacccttttgatgagtcacatgcccacatagctcagtagttaaaatcgcgctcttttttgtgtgttttgtggaatttgttcatgtgggtcgtgctaattcccttcgattgacgagagaatttaccttctagttccattcagaattgggtttctatttattgcgtgaaagaagagtttttttttttttttttgaggtggctctgtgaattttaatgagccatgggggagcaagtagcagcggtgcacactgcttctaacgctatgcaagcattagggaggggttttgatgtgaactttgatacgaggttgctttattgtaaaggagtttcagggtctagggtagttgagattgatgaagaacaccgtaggctcgagctgtggttgtacgagggatgtggctgttcccgatgtttccagggacattggatgctaccaggaggctatggtgcgtcagagttctggggtccgcagttttaaagagatggtggaatactttaatgaaagggcaaatgtatcagggaagtttcctattgggagttttaattctgcatttagcttcactggttcaaaacatgttgatgaagcagctacaaaaaccttgtcttcagatgggttttacattcctcttgcaaaggttcagcttcaaaaatcccacttaaggttgcaaggaaatgtcaaaaaggctgtcccagtcaattgggacccactgtccttggcaagttttattgaaaattttgggactcatgtcattacatcaataactatgggtggtaaagatgttatttatgttaaacaacaccatacttctcctttgtcaaagttggagatgaaaaactatattcaggatattggaaatcagaggttctctgacatcaacagccaaacaagttcagggcaaacaaaatctaaggataagggtgttgatcccttttcattcaatagtcaaggggtttatccccaacccacgactgcaacatatcctattgggaaagaagatgtcacagtcatttttagaagaagaggaggagatgatttggaacaaaaccacagtaaatggttatcaactatcaagtcctccccagatatcattgagatgactttctgtcctataactgatctccttgatgagatacctgccaaggagcatttgactctgccattggtctttatcttgaatataaacctcctattgaagaacttagatatttcctagagtttcagattccttgtgtatgggctcctttacaggacaagattcctggtcaacaaaggaagagaacctgtatgcccatctttgcaattcagcataatgggccagaagtaggtatgctaggtaagaacagattacagtcggacgtaggccagtaactggcttatgtctttgtctaggaggaagcaagcacaatcggctgagtgttcacgttcaacacttagtatcgcttccgaaaatccttcatccatattgggacagtcatgtcgctataggtgctcccaagtggcagggccctgaggagcaagacagccggtggtttgagcctgttaagtggaagaacttttctcatgtgagcacggcaccaattgaagaaccctgaaaccttcataggagacttctctggtgtctacatagttactggagcacaacttggagtgtgggatttcggatcacggaatgtattgtacatgaagctcttatattcaaggttacctggatgcacgatccgaagatcgctttgggatcacatcccgaacaagccgccaaagactgtgaatgctggaaacacctccaaccttgataactcaacccttaaagaaaatgccacaggcaacaagttggtgaagtatgttgacttgtctgagatgaccaaaggaccccaagaccctcctggccattggttagtcactggtggaaagcttggtgttgaaaaagggaaaattgttttgagagtgaaatattcattgcttaattactgatcctaccttccaagtttgtgtatgaagatgtgcatgcagtggtgacctatgctaccagaagcagaattgttttaggtgcctataatttgcccttgttgtccatgtaaaaacattttgaggattgatgaaatgagttgaataggaagcttttgctgttagtggattatgattagtggatgtatgttttggtggtggcaaatgctatttgtttccattgccactgatgatgtgatgtccatatctcataggagttagaacctgttttcaccatgccccattttaaagtaatgtttatatccatatagatttgagaatacaaaatgacaaaaatcctttgcttcccctttctctatacaacaaaacaagacggtgacagaaagggggaaaaggtggttagtgaagttgatcattcttaatctatcgttttatttgtgggactttcctt

SEQ ID NO: 93511 - DNA, 237 bp, Glycine max
  Clone ID: PAT_MRT3847_55454C.1
caaaaggccatataatttttttttatttgaaataatgtccgggatcattcaggagattgaggagaccctccatgtgggagggcacaagaaagaggagcacataggagaacaccatggtgagcacaaaggtgaacacataggagaacaccatggtgagcacaaaggtgaacacataggagaacaactccattgggagcacaaggagggactttgtgataatatcaaggacaagatcca

SEQ ID NO: 93512 - DNA, 395 bp, Glycine max
  Clone ID: PAT_MRT3847_55455C.1
gatcccgataacaccatcatcactttcagtcactgtcgcttccataccatgtcatggtactgttgtacatcaacgatagaatggtaacactgatcaaacacaccacactgtctcccactcccattgtgtacacctcactcaatctcgatgatcatggcatcatccatttcaagcacttgtgacaaacctcaattccctcaccctctctcctcctctttctcttcatctgcatcattaataagagatctgggcttccacataatgtttcagcagaagcccattagaaatgtagttgattggtgctcaaattcccacctagtgattcatttcccacaacagtcctacaacaaaactgaaattaacaaaaaaaccaataacttcaacggcggaaaggc

SEQ ID NO: 93513 - DNA, 435 bp, Glycine max
  Clone ID: PAT_MRT3847_55456C.1
ctgtggattaattgttgagttttcccattcattggggtggttttacggtgtttttttttgattttaatcaaaccacgtgggcttaattgtttggttataacaaatgaacagactttaatttttcgaaacttagtaaaccaaaattcgcggaccaagaaatggcctgctacagaaaaccaaattcgtggctaggaggataggcatattctaacgtcaaattctttcttaaacaggtacgtccagggtctgcttggcctagtaaaaaaaattgtggaaaagataaccatcctggggggccccttagtttagggccggccccactaaactaatgggagtttcaagctccgcctttgtcttccgggacaaaacaccctcgggttttggaggaaattcaatttaattcccccccaccgaaaaaaatttttccaaacatta

SEQ ID NO: 93514 - DNA, 228 bp, Glycine max
  Clone ID: PAT_MRT3847_55457C.1
gtttagttgatttcaaattcttaaactattcagagcatcactcatagtggccgtttttctgtgcacgttgggatcattctttgctttcttcgcaccatctgcatcgtacgacatagtgtgatctgaatctttctacaaaggcttatccccctacattgccaagtatatcgcaaatcatatgcactaacttttcatcatatttcatgccccattcgttcacctgaaact

SEQ ID NO: 93515 - DNA, 453 bp, Glycine max
  Clone ID: PAT_MRT3847_55458C.1
cgggattcccgggtcgcacccacccgtccgtacggctctgaaaaacacaacgaagggggctgcaagtataaggagcatcacatagagcaactacgcccatacctacttcaactatggtgaatattgtacctgatgtgaaggtgctccctgggcctaagccattgttccataataagaccaagagggtggtacatcatattatttgcccctgtgcattggaagcacccttccttgatagtggagaagcttatggctcctcgaccttgtctttttttagtattcatctatatgctatcacttgcagctcttgctggactagggactgttaaggatgctggctggggtcctgatggtacggtacctgataaaactttgagtcctggtgacatgctttcatatacttattgtgcgaacctactacttcatcgttaactattaacccccttaaaacag

SEQ ID NO: 93516 - DNA, 336 bp, Glycine max
  Clone ID: PAT_MRT3847_55459C.1
tctctctcccggcaaatcaaagacatcagaaagaggcaattggcacgcccatgcattaattccaaattcactcgttttaaaagacttgtctccatttaacgtgcgaaccatcccagaagtcacttcctcaccctttggccgttgccttgttcttgaagtctctacctttcacccttgactttgctctctctgctatttccaaccacccaaaagccttctttttgttgctgacttgtttcttcttcttgttcagctcttaagtaaaatcccaaggtatcagtatatcttctccctgtcagatttttgctggcagctacttattgacaatgaacaatc

SEQ ID NO: 93517 - DNA, 263 bp, Glycine max
  Clone ID: PAT_MRT3847_5545C.1
ctctaggaaaagactgcaaacctgtaattcctaaagtccttcaggaagtgagaactattcatgtatatcactgaccccagccccaccatcctttctaattatgggggggctgggctcagtgatatacatgaatagaaaggatggtggactactgtgtatgaaaaggttgtttttctcttttgggtttgatcacttctgatgtaatatgctgaaaaaaaaagaaaaaagaaaaaagaaaaaaaaaactaagggggggccccccg

SEQ ID NO: 93518 - DNA, 240 bp, Glycine max
  Clone ID: PAT_MRT3847_55460C.1
gctcactaataggaaagagctctaaaccgaacatgcgtacgtacacgtacatacacagaaatagctctcggataaattaacggacggtttaatgactgtccattcctttacaacgtccccactatttaaaccttgatttttcccaaataattacccttgcacttcatccccttttcctcctttgattcaaaaacaaagaggcccgaatcgaattatcagatttactgggtcgccgggaac

SEQ ID NO: 93519 - DNA, 396 bp, Glycine max
  Clone ID: PAT_MRT3847_55461C.1
gtcattttagaacccaggacgaattattcggtccatatatcaaacacttacaggtataaggctatattcactaatttcgaacacatcagcatataaactcgccagcaccaatttgaatacaacaaattcaagcttcatatgataaactctaaaagggcttctgcagagcatgtaattaagcatcacttgaaggcatacttgatgatcccaggaaaatgaatattgatgaactagtcctccctatcaatcattttcagcgtcaaagtaaaacaatctcgggctctaccccaccttgccttgccgatgataataacttctatgctatacgactatcacataccccattgaagaacaagatcagcttggtagttccaccaatggcaagacatgacggat

SEQ ID NO: 93520 - DNA, 172 bp, Glycine max
  unsure (1)..(172): unsure at all n locations
  Clone ID: PAT_MRT3847_55462C.1
acgagcacttcttcttttcacactaccctttcaattatgacttcacagaagaaacttttgaaccgtatgctttaaataaaagtgcagcanctcgttctcaatatcntcaccattaaccaccacaaaccccttcatggctgcacatttaagaataaagctcctaaagctatta

SEQ ID NO: 93521 - DNA, 1192 bp, Glycine max
  Clone ID: PAT_MRT3847_55463C.1
ggctcgagctctgtcttaccattgagtttatatgcaggttctttggccagaatgtggttggcagccagtgtctctgacagatatgattacctcttctgcagttaaaaaagtgtatagaaaagcaaatttatgtattcacccagataaagttcaacagaaaggtgctactcttgaacagaaatacacagcggagaaggtttttgacattcttaaggaagcttacaccaagttcaatgcggaagagctttcttagatcccactgctaatgtctttgcaaaatcaatagatctattagcacttgcacggtttcggcatcggcctgtttgcttgcctagctggtgcctcatatatttgtttttgtgtcgttgaagataactgcataaatgtttcgtggcatcgtttggcagcagattctttttccctataacgttgaacgatctacgataatgatgagcatcttgaaaggaagattctagatcctgagcacttgagcaaggtggaatcaattttcggcaatctttcataaacccattaataatatgggatcttgggcctcttccttgggtaggataagttggaggggcatacaacagtgctggcaatcatgtttctaatagatttctaaacagcttttggtacttagatcaacttggaatagcatcctgctacagcactatagtctattgcaggcagactctaattggagggaactatggccttctcaataccaccacctctgctcccaatcctgactactacagtgcagttttgtggcatcggttaatgggaaagaaggttcttgcggtctcaagtgatgttcatattaaagacttttacctatagttaggaaatgtaagtagaagttaatgacttttacctacaattgaagatgatagatacatattaaagactttttacctacagttaggaaatgtaagtagaagttaatgactttaacctacacattatacatagtaggtgaaacctatagtgacagacaattagccgtcactatacccccctcaaagttgacagagaaaacgtccgtaggacaaagtctatcatacatttacctactgattttttatttataatgacagtttttatgcgtaggtatatgtcattttttcttgtagtgacaaatgaacatgaaagtaagtgttcaattttaaaatctaaaaattaaggttac

SEQ ID NO: 93522 - DNA, 233 bp, Glycine max
  Clone ID: PAT_MRT3847_55464C.1
ttttttcttttctggggcaacccaaaaaaaaattaaagccaatcccgccgcacttttttctgggcggacggaaccctgattttttttgggggagaaaaaaacccccttttttcaggattggccaaaggaaaatgtcctaaattgggcagaaaacaattttttacaacaaggcttcctttaagacgccccactacccttaaataaggaacccccccctttggactttgagcacc

SEQ ID NO: 93523 - DNA, 1176 bp, Glycine max
  Clone ID: PAT_MRT3847_55465C.1
atcaccttcttctcttctctgcttttccactccttctcctcactcacccctcccttttatttccattgttattctgcctaagcagtttcttccaaacttccttttacatttccaatttctctattctatcaaaagggtttgaactttgaagggaaaggaagaaagatatgatgacgaaccaaaatgtggtgactcatgaggttattaacacgttgattgccgtggcagcttccatttcaaactcaaccgcgttgccaagtgcaacagtgccagaatccatggctgtgcttggtgggttttgggggctgccccataataaaaatcttgtgaaaaggttggaaggagctaaagttagtgcttggattgattcaatgagagcttcttccccaactcgtgccaaatcagaaagccaagaaaaaagatcttggattctttatcacccttcagctctgaacacgtttgagcaaatagtatgtagtgccaaaggaaagcaagtcgtagtttttcttgactacgatggaactctctctccaattgttgtagatccggataaggctttcatgactagaaaggttttccttttgttcccatttttctcttatactcatatccattgaataaagcttgtgtttatgattaatctgagactttgttttctcaaattagatgagagccacactaaagggtatagcaagacatttttccacagcaatcgtgaccggaagggagcatagctagaagatttattattattattatatgatttttacctacagttgaagatgatatgttcatattaaagacttttacctaaagttaggagatgtaagtagaagttaatgacttttacctacagttgaagatgatagatacatattaaagacttttacctacagttagaaaatgtaagtagaagttaatgacttttacctacacactatacatagtaggtaaaacctatagtgacagataattagccgtcattatacgccccctcaaagttgacagaagaaatgtctgtaggacaaagtctatcatacatttacctacagattttttatttatagtgacagtttttgtccgtaggtatagatcatttttcttgtagtgatcattaaattaaataatatattgtgattatttgctaataaaattgaaaattttaattaaaaaaaa

SEQ ID NO: 93524 - DNA, 716 bp, Glycine max
  Clone ID: PAT_MRT3847_55466C.1
gatactgcagatgttcagataaagcgctgggctgcagggaaagaaggcaatatgcgggcattgctatcaacattacaatatgttctttggccagaatgtggttggcagccagtttctctgacagatatgattacctcttcggcagttaaaaaagtttatagaaaagcaaatttatgtattcacccagataaagtccagcagaaaggggctactcttgaacagaaatacacagcggagaaggtttttgacattcttaaggaagcttacaccaagttcaatgcggaagagctttcttagatccctctgctaatgtctttgcaaaattgatagatctattagcacttgcacgattttggaatcggcctgttcgcttgccttgctggtgcctgttatgtttgtttctgtgcgttgaagataactgcataaatatttcgtggcatcatttggcagcagattctttttccctacgacgttgaacgctctactgtgagttactgagttataacactttgtaagtaataatgttggttgattcaggtcaatgtacaaattttgaaagttcattcttccctaagttcagacaatatttagattattagtatgcccaattgcacgcataatatattttgtggggatgagtgataatgtaattatgtacttgtaactaggcttttgtacgaatagaaatgtttcgattgatttttttcattggaatc

SEQ ID NO: 93525 - DNA, 475 bp, Glycine max
  Clone ID: PAT_MRT3847_55467C.1
ggctcgaggcagcgaaaccaagacaaaagtggcatccttgttgttcgcttcaaattcaatgttctacagagggtaccactctttctacctcctttttcccctttcttcgctacaaatcttaggtttaattcataatctcacatattggatatcttctcttcttttcttttctgttctgtttaattctcgttatgacgtatggaaattttcatttaatttgtcaaagtcttgaaaccttaacaattttcgttatcttttttaattttacgaattctgaattatcttcgaactgggtgaggacgaaatctgaactatcttaaaacaaaataaataattggaattattagaagtaaaaccctaaataaatagaaaaagatgtgttgtccactatccccctaatatctagtctaaaacagaacatctaagagtaggtttatataagaaagttgagaggatggaagcaattggcttgctg

SEQ ID NO: 93526 - DNA, 1094 bp, Glycine max
  Clone ID: PAT_MRT3847_55468C.1
ggctcgagttcatcttttctcttctctgtttttccactccttctccacacccctcccttttatttccaatattattctgcctaagcagtttcttccaaatttccttttacattttccaatttctttattctatcaaaagggttaatttgaattttgaaggaaaggaagatagatatgatgacgaaccaaaatgtggtgactcatgaggttattaacacgctgattgccatggcagcttccatttcaaactcaaccgtgttgccaagtgcaacagtaccagaatccatggctgtgcttggtgggttttgggggctgccccataataaaaatcttgtgaaaagattggaaggagccaaagttagtgcatggattgattcaatgagagcttcttccccaactcgtgccaaatcagaaagccaagaaaaaagatcttggattctttatcacccttcagctctgaacacctttgaacagatagtatatagtgccaaaggaaagcaaattgtagtttttcttgactacgatggaactctctctccaattgttgcagatccgaataaggctttcatgactagaaagatgagagcaacactaaagggtatagcaagacattttcccacagcaatcgtgaccggaagggagcatagttagaagatttattattattattattatatgatttttacctacagttgaagatgatatgtacatattaaagacttttacctaccgttaggagatgtaagtagaagttaatgacttttacctacacattatacatagtaggtaaaacctatagtgacagacaattagccgtcattatacgcccctcaaagttgacggaagaaatgtccgtaggacaaagtctatcatacatttagctacaaattttttatttatagtgacaatttttgtctgtaggtataggttatttttcttgtagtataaactttatccctatgtcacataattgacccaaattccaaatttacgattagtctggaagggtgaaagagaatagaatgaaagaagattgagaagaaaaatttgaattaaagtagtgtggtagatgtgtgagacccacccctattttt

SEQ ID NO: 93527 - DNA, 1597 bp, Glycine max
  Clone ID: PAT_MRT3847_55469C.1
aatcacaaccaatttaaaagagaaccaattttatatttagcaacatgttttgctaaatataacagaaaaaacatcataatccatcctttagaaattaaaaaagaacaaaaaaatgatggaaggattggacaaccaattttatccaccaaaagctgtttaaaaatctgttagaaacatgattgccaccactgttgtatgcctctccagcttctcctacccatgcagaagagcaaggaccatatattttaatggtttttgaaagatttccgaaaattgaaaatatatgtatgcagagagccacttcatttgtcctagcaattgaaaatatacttatttaatatacaaaagaagtggctctctgcatacatatattttcaattttcggaaatctttcaaaaaccattaaaatatatggtccttgctcttctgcatgggtaggagaagctggagaggcatacaacagtggtggcaatcatgtttctaacagatttttaaacagcttttggtggataaaattggttgtccaatccttccatcatttttttgttcttttttaatttctaaaggatggattatgatgttttttctgttatatttagcaaaacatgttgctaaatataaaattggttctcttttaaattggttgtgatttattgtaagttttgaaatttaaatggctcaggtacttagatcaatttggaatagcatcctgctacagcactaaagtctattgcaggcagactttaattggagggaactatggccttctcaataccaccacctttgctcccaatcctgactactacaggtaagtactaattgaaaattgcaacaaacaaaaagagcatacttttttttccttgaaggttacttgaagatttctggtgattattacatcatgtttgaacatatctaatcctaggttctggcatagtttctaaacagtgcagttttgtggcatcggttaatgggaaagaaggttcttgcggtctcaagtgatgttcatattaaagacttttaccaataattaggaaatgtaagtagaagttaatgacttttacctacagttgaagatgataggtacatattaaagaattttacctacaggtaggaaatgttaatgacttttacctacacattatacatagtaggtaaaacctatagtgatagacaattagccgtcattatacgccccctcaaagttgacagaagaaacgttcgtaggacaaagtctatcatacatttggctatgaattttttatttacagtgacagtttttgtctgtaggtataggtcatttttcttgtagtttggtccttcaaaggagtcccaaattaaataacaatttgtatcattcacacaaacaaggtatacatatacttatgatctaatagctacattcaacgattttattaaaaaaaaaaaaaaaaaaaaaaaaaaaaaaaaaaaaaaaaaaaaaaaaaaaaaataaaagggggaaagatataaaagaaaaaaaggtaaggggcgcgggaataaaaaatcaaagctaacgtaaaggggaaagcaaaaaccaaattttttgtatggggggccctaaaaaaaagaaaggggaaac

SEQ ID NO: 93528 - DNA, 613 bp, Glycine max
  Clone ID: PAT_MRT3847_5546C.1
aaatataatgttatggtgacacagttttttaattttttatttatttttaacgtgagcgtgataacttggaagagcccataaacattatcaatgaaagcaagtatattttagcagctgctacattttcatttgtatttgttaaacacttaaacttccatttatctctttgacttttaaaacaggtatggaaacggtgcttctatatttaccacatctggtgtggctgcaaggaaatttcagaccgagattgaggcggggcaggtgggcatcaatgttcctattccagttcctttgccctttttttcatttactggcaacaaggcatcatttgctggcgatcttaatttctatggtaaggcaggggttaacttttatacacagatcaaaacagtaacccagcagtggaaggattcggccagcgaaagcaagattaatttggctatgccaacctctcaaaaatcttgagtccgaagtttatattgcctctgaaacctttggactcttataaatcctgttaaacgattgtcttatatccttagcaaattcttgtgtaaataatacaccctgatccacctatttttataaagtattgtactatgttatgttttaaaaa

SEQ ID NO: 93529 - DNA, 304 bp, Glycine max
  Clone ID: PAT_MRT3847_55470C.1
tcgtttatgtgtatattttggtgctctgagtgtataccatctggatccaacggtccaaaatgttcggtgcttgagctgcataggtatccatgctttaaagctacaaaccttcagatgctccttattcttctacagatcctgcttactatataacatactcctgtacgagaaggaacttggttgctctgtaatcaaaaggtagactactcataactcactttggttacgctcagttacagatcgctaacctctgccacagatactctcatggctatgctagatgctggccgatcataacacaggc

SEQ ID NO: 93530 - DNA, 144 bp, Glycine max
  Clone ID: PAT_MRT3847_55471C.1
cattgctggagggagtttcagttattccctcttcattcttcgctcctttttggttgctccaagaagggggcatgatcatggacttcaagagcgagatcattatcatggacttcaagacccggttccttattatgttattgactt

SEQ ID NO: 93531 - DNA, 337 bp, Glycine max
  Clone ID: PAT_MRT3847_55472C.1
cagaagggggaatcactagacctttttgtagttttcacctaacaccatacaaggagcccatctcttgcatgtttgcggtccaatgcgataaaatctttaccaactcctcccttcggatcttcccaattgtcgtaaaattaataaaaattactaatctaccagaaaaattattataaatgacaatacaacatatgaaaaacattcatgaacacccaactcccattgaacactcaatagagatcacatgagtgagagagagaaactatatattatagatcctcaaatgtgatagaaaaaagagaacctgagaaaagatggatattaacatgcagtttat

SEQ ID NO: 93532 - DNA, 252 bp, Glycine max
  unsure (1)..(252): unsure at all n locations
  Clone ID: PAT_MRT3847_55473C.1
ttggggtccctcttcctctgggtcctctgggtcgagagctctgggtcatcaattccattgcgcggggtngggcaanaccccaaggggacccatggggcggggcgtanggggagcanagggggcgcttggggggggggtnagcccacacgggggactcanctctcgggggggccaggggttttctctacaagggcgttttatcccaggaaaaatgggatcatttgataactctgggcaaggagggggggggga

SEQ ID NO: 93533 - DNA, 1306 bp, Glycine max
  Clone ID: PAT_MRT3847_55474C.1
ctaccactccatcaaagttctccagggttttataacgaattcagcttcatttcaatctacaggtatccaaagttctccagggttttaactcaaattcagcttcatttcactttacctatgatttcctaaccatgaatcatactgagaggttagttactagttattgaaaaacagtgttacatgccattattcaacacaacaaacaacaagatgaccactttcctctgcttcttactcttcctcttgatgacaaccttatcagagtcccaaccagaccgtttcatgagacgtaaaccccttagtggcggttctaaccaagaatacttcgaagtgagttaccctccaaactcacacgaacccacaacaccttcatgcacccaccgaatcatccaccacgctttcgccaacaccatcgattctccaccgtacaccaccacctacacgcctcccccgcggtgcggggcgccgtggtcccgcgtggtcctccacttccacgtgcggtgtaagggggagcagtacgaccgcatcgccgccatctggctcgccggcgccgagatccttcgcaccagcaccgccgagcccagccctgccggcatcttctggaacgtccgcaaggacgtcacgaaatactcctccctcctcgccaagcccaaccaggacctcaccatgatgctcgaaaacatcgtcaataatgaattcaccggcgtctaccacgttaccgtcactctcctcttctacaacgagtacgccgttagggttccgtttgtcccctgccccgaagaactcaataattttgatcggattcaatcaagatcaagatcgagatcaagatcgcgatctcttgttcaggaaccgggttccagaggcgttaatgaatcgccggcggatttgattattccgatctccgacgacggacggcgagggttctggttcaaattggaggaagaaaaaggttcttgttcaaagacaattcgaattccgcggaacacttaccgcgcggtgcttgagttatacgtttctttccacggaaacgacgagttttggtactcgaacccgccgaattcgtacataaaggcgaacggattagaaacggagcgtggaaacggcgcgtacagggaagtgtacgtgacaatcgacggccaggttgttggatgggagattccgtttccggtgatattcaccggcggaataaaccctctgttctgggaaccgatggtggcgattggggcctttgaccttccctcatacgacatcgatttgacgccgtttttggggaagggttttggatggaaagaagcacgtgttc

SEQ ID NO: 93534 - DNA, 433 bp, Glycine max
  Clone ID: PAT_MRT3847_55475C.1
catggtgtctcacacgagcatgatttgcaacgctttataaatagactacgagggctttccctgcatgagggggggggataaacccatatgcacaatcactatcatctactggacttggtcctacatctcatgcttcaaaaatgatagcgatacaactaccagcgggcccaatagaaacaccagcaagcaccgactctttcaccaccacaaggactaggataataatcacatgataaaccgatactggttactacaacacataatattccaagccgtgagaagactataactcttgattcaacaagccatcatatgagtcttcttgcggtggctattaatgtggctacaacaaaacaatgttatactagagacgagccaccttttggtgagggctatgaatgtgggtacaagaaaacaagttattctggtggca

SEQ ID NO: 93535 - DNA, 257 bp, Glycine max
  Clone ID: PAT_MRT3847_55476C.1
tcggccacgcgtacgatcttatgccagctgtttctgttccacaggctactgccagatcttctgaaaatgctggatcctctgcatgatctggaatttgtgtactctttcgcttgctagtttgtttagttcaataaaggaaattatgcgtgaccctctggctgagtgtgctctgtctatttgaaaatttccacacctctttgaaacgtctgaatgatgtgtgaagcgtgtgttcttataaaaacttattctgattcttt

SEQ ID NO: 93536 - DNA, 214 bp, Glycine max
  Clone ID: PAT_MRT3847_55477C.1
attaaaaaaccaaattttaatagggtaaaataggacacactgaagggtatgaaggaaacaaacttcaagagtaaaattagagattcatatgcacaagcacgtgttgtaaagatatctaaccttgcattctttttttatacttccagcggaggctaaaacgaacgcagtggataccctactcgtatcaaaactgagggatttttatttctacaac

SEQ ID NO: 93537 - DNA, 253 bp, Glycine max
  Clone ID: PAT_MRT3847_55478C.1
caaagagttgatgagcacatagaaaacaaagctgtgctgaatgaattgaatttgagtgctgtccccagtctatatgaactatttgttaaactgattgaacgtttgttggagaacaaagaggaggacaaggattcaattgtgattttcttgcttgacatgctagagattgtgaccagagacataatggatggagacattgaggggtaaatcatttgcaatttttgtatcccttgctaatttgataaattttgga

SEQ ID NO: 93538 - DNA, 595 bp, Glycine max
  unsure (1)..(595): unsure at all n locations
  Clone ID: PAT_MRT3847_55479C.1
tacggctgcgagaagacgacagaaggggggaggtgattgaacataatgaacgaaaatcgagagtaaaaggcgaaggagcggtgggagcgatgcgcatggttgttaacgacgcattcctcccattaactaaatggctatgtctttacctcttcgttttcattcctcatctttctctctctcttggggttgtgagaaaagtgcacgggactctaataatagatattgttcaaccaaggagtggaaattggaacttagcataaaagaaggggaagactcatatcgtttaagggtcgtgcgaggctggtacatacaacgtgccgaatcgatctctgtccctgggaccttaccaagaactgatggaaagaatctaacatctctcgggataagaaaacagttcctgaagcagatactccgagtatctatcaaggatgttctttttttgtatgaatttttggaccggagtacctcgctcacagtattgactggagctggcagtacagagtgtggtggcattcctgactacagaagccccaatggagcttatagttctggtttaagccaataacccatcangagtttctccgttcaagtcgag

SEQ ID NO: 93539 - DNA, 382 bp, Glycine max
  Clone ID: PAT_MRT3847_5547C.1
ctgctttggacaaacagtttttgttggttagttgacagcagattacccagtgttccattagggttgcttcaaaagccaccaattgcaaggaacccttaagcctaaccacctttacttttttgaaggggttctttacttgcaggcacccttcgacccacttgtcaaaaaaacttgttgtcttgaccaaagcttcaagggacaaccaaaattgcttaaccaaaaaaaacccggggaagagaaccttccaccaccacaagcttaagttttgttgggtggaacttgaaaataatgtgcccggttgtcaaaagacagtgtttgcacttgaaaaggttctggggatggaactccttataccaagaagtgtttcaaatgccctcttgga

SEQ ID NO: 93540 - DNA, 187 bp, Glycine max
  Clone ID: PAT_MRT3847_55480C.1
ctaaattgatgcatgcacagactcaaaactcatccattattcacatgggggaagggggtaaaagtacaaaatctgcatctttaactatttaaacccgtctctataaaaactacattataccacccaggattctatccttctattcctacaaaagcagaagccatttgatttcctattcattatattc

SEQ ID NO: 93541 - DNA, 321 bp, Glycine max
  Clone ID: PAT_MRT3847_55481C.1
ggcctaggcctcgaatgctaggaattgtcccttctcttgagtaaaaagctttctgatcataacatttggtgctttcattgagagcatcaatggctgccttcgcttcttccacgtcccctatggggaccgcatcgaagccgccactgcggaactcacctccgatcaaaccatgtccaccaaactggacgaaattcttcagaggttgacccttcttgaaatccactatcagttatccaatgtgctccaaccttcttcgaccccttcatctgagcaaaccgctgccgacgcggttcctcagttgaataccaaagacggagccgc

SEQ ID NO: 93542 - DNA, 675 bp, Glycine max
  Clone ID: PAT_MRT3847_55482C.1
gatagactaggtggaggtgagaccgcggtgctatgaaagatcaccaatcaatcatgttgacaaattttcttgtccctctattttatttcaaggattggatgacaaggttgtgcccccagatcaagctcggaaaatttaccaggctctgaaggaaaagggtgtgccagttgctcttgttgagtacgaaggagaacaacatggtttccggaaggctgagaacattaagtttactcttgagcaacaaatggtcttctttgcacgattggttggacacttcaatgttgctgatgatattaatcccatcaaaattgacaactttgattgattgagaatgactttttcagaggtgctggtgttggctttctttgtcaaagcaagttttaagcaatctttgtgaggtactggaagtgttattgcaccaatgagcttcttctggcacatagccatagtagccctatattaatgcgcattgtccagagtgtgctgagtttctactatatatattatcttggagttctatttgatcttgttatcttgtttcctagttatcaatttatattttgaaagtgtgttgcagatactgtacgtatatgtttgttttctatgatatctgtcatgcatggataaagtgggtgatgataaacttcatagtattgaactttattatgtttcggc

SEQ ID NO: 93543 - DNA, 426 bp, Glycine max
  Clone ID: PAT_MRT3847_55483C.1
gagattttccgagctaagtaacaggccaaccctgggggggatataaaccacacaaggagagctaaaaaatgcctaggaatggaaatgccaagaacacccgcccttcagcggacacaaaaccaggaacccgcactgacgcaaccataaagcacgccaaaaaacaaattgcaagacacgatcaacgacacaatcatattccatcagaaccctaacatggaacagggctcaccataaaacccaacaaactaacaaacaagcaacgccaactacacaacataagataacctaagcaaacctccatggcgattgctacgaacaatctcaggcaaaaacccctaaataggctaccaaacaacaccttgacctagggggctcaagctaaaagaaaaaagcaattaagaggcccccctaagaaaatcaatacac

SEQ ID NO: 93544 - DNA, 185 bp, Glycine max
  Clone ID: PAT_MRT3847_55484C.1
gcattacgagtgatgattgagatatcagaacaagtttatattacttgagaggaagcataagacgaatgatgaaagtcatgttgcggactctggtaatcatgtgtctatccatacatctaatgatgatcataatgatcatgagtcttcactttgggctgatcagcttttccatgtgagagtagaag

SEQ ID NO: 93545 - DNA, 178 bp, Glycine max
  Clone ID: PAT_MRT3847_55485C.1
cgagaagaaaaaaagtagtttctgagttgacattaaagatatcggtgaggtgaaggaccaacaccagccaaggccaaattatgatagaacgcggaagaagaagaagaagtaaccgacgcttgaataaaccgaaccggtcttcgattcgggttcaagtgtcaagaaaaaaagcgatgag

SEQ ID NO: 93546 - DNA, 463 bp, Glycine max
  Clone ID: PAT_MRT3847_55486C.1
ctcgggtgcaagaagacgacgcacgggggaaggtcaatttcgaaccctttcgaatccaaactcaacagaacattggattttcctataaatctcgacgtgtggctaacttccgctctcactcctagaaatcgttatgcagaagattccaatcggagctcaaataaaaaagaaacctaatcgccgaacgcgtcgaaaggtcgatgatgatctgagaaattgccttttttttttccgatctgtgataattgtgcgaataataacaataattgtgtgcggttcctcttttaggttacgaatctgtggttcctttgtgtgtgataactcttttgcgcgacgaagataggggtcccggttactgatgcgttttgtgccgtctggagatataattctgcgcaactgtttaattctacatgtttgaggggttatttttgggtgagtgatttgattgtacactatgacttgt

SEQ ID NO: 93547 - DNA, 1323 bp, Glycine max
  Clone ID: PAT_MRT3847_55487C.1
acgcccacgcgtccgcccacgcgtccgtacggctggccacctagatcttcaatgccaaagcttgaaggagcatacacagcacttcaggcatggaaatctgcagtcactgaggaccctcttaagattttatcaagttggattggtcccaatgtgtgtgcttacaaaggagtcttctgtgctgcaaaccctcaagatgaaacggttggtgcatcagcagcattcccagttgtagtagcaggcatagatctcaaccatgcaaatctgaaaggaactcttgtgaaggagctctctctactcagtgatttgtcccttctccacctcaacagtaacagattcactggcactgttcctgaaacattcagagaccttgtgtttctggaagagttagacctcagcaacaaccaactctcaggtcctttcccttctgctactttgtacatgccaggcctcatctacttggacctcagattcaactacttctccgggtccctccctcaggaactttccagcaagaaccttgatgctttgttcctaaataataaccaatttgatggaagcatcccagcaagtttgggcagttccccagcctcagtgataaacttagccaacaacaagttaagtggaagcatcccagcaagtttgggcttcatgggttctaaaataaaggagattctgttcctcaataaccagttaactggatgcattcctgagggagttggactattcacagagatgcaagttctggatgtgagcttcaactcactcatgggtcatttgccagacacactatcatgcctgcaagacatagaagttctcaatttggctcataacaagctctctggggagttatcagatgtggtgtgctctttgagaagccttgcaaatctaactgttgcttacaatttcttttctgggttcagccacgaatgctcaaggcttttctttaggaatgttggttttgatttctcactaaactgcattcctgatagggacatgcagagacctccacctgagtgctctggcataccaggtggaagtcttagttgtctcagaatccccacaccaaggcctcttgtttgtggttcaatggctgtaagtaagtctaagaacattattgatcccacttcatcatctcctccttgatgatggttattattagttacattacattacattacaggttggtcatagctgttccattaattactgctaccaatcttaattcacaattctgctaatttaattcttcaaagactccttgtgcatattcatgattatatatacttggcgtgcacgggtaatacacatgccacattttatgag

SEQ ID NO: 93548 - DNA, 620 bp, Glycine max
  unsure (1)..(620): unsure at all n locations
  Clone ID: PAT_MRT3847_55488C.1
aaacaagcataaaagtatgatacatgcattcataaagcaactatatattacagaataaaagtatgattaacttacatcccaaaaaatttattccttcttctctacacattgaaaatatctcaataataactcaacaagacatcaccatattatatacaaggagttcctatacttttggctgatggctctatgggagtgaaagaattgaatccattaccatgttgaaaaagtatgtccttcccttgtgtttggacaacttactattaaacaccgaacaaaacttacatagatatctttagatgcttttgacattgttattcgatcagaagtaaagttctgtcacggtaatctacattataaatgtttacatgcagattatcaagatgaactataattctaatcgaagaataacaccaaaaatacccataaaactaaatcaaagttttgtggtttaacaaatgacacaggcattgggattctcttccatgctnggagcatagtagtgtgtggtcatgtaggggttatatgccctataagccttgacccattccaaaacaggatctgggactggnggggatctttcttcttctcatcctctttctctctttttcttcccttct

SEQ ID NO: 93549 - DNA, 468 bp, Glycine max
  Clone ID: PAT_MRT3847_55489C.1
gcaccagcaacaattccactcacttcatcatccactcaaacacttgacctgtctagcattggcttctcttttcccactagagcaacactccaagagctagaatatggatcagtaacaccaattgatgaggaactacttcatgatgatggagatgaactacacaaacttggaagggcacaaggggtgtgtgttgctagctcagaggatggaagcagccatatggtggctatcacagcaagctttttcaagggtgagtttcaggatggactgaggctttttggagtgcacaagactgatgtttttgagtcacatgttgcagttattggaggcaccggaaagtactatggtgctaatggatatgctgctgtcaaggttgtggacaaagtaggatctagtgaaaaagaagggaaagtgacaagttcaaagttcctcttgtttgatgtgtatcttagttgattaattagaagg

SEQ ID NO: 93550 - DNA, 130 bp, Glycine max
  Clone ID: PAT_MRT3847_5548C.1
aaaaccttaggtcaggcggggtaacttccgtatttaaatcatggcaccaactgagatcggaaatgtcaatccaaacggcattttggccgacatgcgctaagatatcactcccatacactctcaattcaca

SEQ ID NO: 93551 - DNA, 1160 bp, Glycine max
  Clone ID: PAT_MRT3847_55490C.1
aaacaacatagaacggcaagatcaaactgctgcaaatacacttaattaacaactaacacaaaacaaacctcttacattctcttctagtcttttacgagtactacaaaccgtacacggaataacaacccctaaacttaccattaaacccaaaaagtaaaaacaaccacatgcgattaataaaaaggtgttctaaaccctacttttcttgaactaaacttagcaaataacacaaaccaaaccaactcaaccgaagaacatccataaacctaaacagacaaaccaaaccacctcaacccaacaacacacataaacctaaacagaaaccctaggcacagccttgcaagacagtggcttcttcatctccatagaaagcttgagaaactcatccaattccacagaaacaccatcagatgaaacccaatgaaaattttgaagcaactgagcgagccaaagatgaaccgaggccaaaccaagggccttcccaggacacactcttcttccagacccgaaaggtgccaacctcaaatcagaccccattatgctcacatcctcttccacaaaccgctcgggcctaaacttctcgggctcggcccacaccctctcgtcgtgggttatggcccacatgttcaccatcgcggtggtgcccttgggaatcacgtgcttgccgccaaccgtaacgtcgtgcacagcaaggcgagcccacgagagtagcgggcctggtgggtgcacacggagggtttcttttactatgcactgaaggtagcgcaggttcggaatgtctgcttcggatacgagcctggaggatccgcaaacgaagtctatttcgcgctgtgcctttgcttggatttcagggtggagaaccatgcgagccagaatccactctagcagaattgctaccgtgtcagttcccctgaatatcatttcccaaagaacagcaatcatgtcagcttcactgagcctgttttccttctccaaatcaagcaaaacatcaacaaaatcctcagctccttcatccttcacacagtcacccctctccctcttcaccctatgctccttaataacccctccaacaaaaacattaaccttgttcaaccaaacacctacacctctgcctcaccccctgcaaatccaatcacccgaaaaccgttcgagccgatgcc

SEQ ID NO: 93552 - DNA, 2084 bp, Glycine max
  Clone ID: PAT_MRT3847_55491C.1
tcgcgatctagatttttttttttttttttaatggtagaaattaaacaacatagaacggcatgatcaaactgctgcaaatacacttaattaacgacccacacaaaacaaaacctcttacattctcttctagtcttttacaacttactacaaaccgtacacggaataacaacccctagcgattaataaaaaggtgctctaaaccctacttttcttgaactaaacttagcagataacacaaaccaaaccaactcaaccaaacaacatccataaacctaaacagacaaaccaaacaacacacataaacctaaacagaaaccctaggcacagccttgggaacaacatccacaaacctaagcagacaaaccaaaccaactcaacccaacaacacacataaacctaaacagaaaccctaggcacagccttgcaagacagtggcttcttcatctccatagaaagcttaagaaactcatccaactccacagaaacaccatcagatgaaacccaatgaaaattttgaagcaactgagcgagccaaagatgaaccgaggccaaaccaagggccttcccagggcacactcttcttccagacccgaaaggtgccaacctcaaatcagaccccattatgctcacatcctcctccacaaaccgctcgggcctaaacttctcgggctcggcccacacccttttgggggggggttatggcccacatgttcaccatcgggggggggcccttgggaatcacgtgcttgccgcccacggtaacgtcgtgcacagcaaggcgagcccacgagagtagcgggcctggtgggtgcacacgaagggtttcttttactatgcactgaaggtagcgcaggttcggaatgtctgcttcggatacgggcctggaggatccgcaaacgaagtctatttcgcgctgtgcctttgcttggatttcagggtggagaaccatccgagccagagtccactctagcagaattgccaccgtgtcagttcccctaaatatcatttcccaaagaacagcgatcatgtcagcttcactgagcctgttttccttctccaaatcaagcaaaacatcaacaaaatccccagttccttcatccttcacacactcacccctctccctcttcaccctatgctccttaataacccctccaacaaaaacattaaccttttcaaccaaacacctacacctcttcctcacaccctgcaaatccaaccaccccaaaaccggaaaatggtcactccagttaaaaacacccaacaactcatacccttcactcaccaaaccctcaagctccaaaccctcaccctcgtaaaactcataagacttaccaaacaccgtcatcatcacattgttcaacgaactaaagtgtagaattttcttaacctcaacatgttggttctcactcatggttttcttaacttgttcaaccatttttaatccaaccttgctcctgaaggattcagagccggtgattctcttcggggagaagagatgtagggctgagattctcctcaaattcctccagtactccccatacggtgcgaaacccattgcacggtggaagagaagctcataggcggattccttcaccggcctatcagcgaaactggggctgccgagaatctcctttgcggtttccggttcgctggagatgacgaaacgggtcagaccgatggagaaagccatgagtttttccgcgtgataattacgggcgagtttggataaagcacggtgaggcgtggagccagtaaagatccctaacagggcagttactgggccagggatgatgggccgggtcgaggacttggtggcccaggcccaaggaagcccaccaggagtgaagaaaaacgtgaacatgagggtgaagagaaggacgcagagggtggcttggaaagtgatcataggggactgcatgagttccgggaagaacaaaagtgtgaaatctggtgacatttttggtagtgttgttgcaaagaaaagaaagcctgggagagatgaagagcttgttgtgctggaactaagaagagtagtggatggtgtccccttctgtcgtcttctcgcagccgtacggacgcgtggg

SEQ ID NO: 93553 - DNA, 718 bp, Glycine max
  Clone ID: PAT_MRT3847_55492C.1
ccgctttctttctctctcgccctctctctgcgttgttggagaacattcagaaaaaaaaaggagagtgagccaaaaaaaacaattcagaaaatggagaacaacgcattcagagatcgaatcttggaggacaatgaacacgaagaaatccctgattcctttgtttgctgcgtttgtctggatctattatacaagcccattgtgctatcttgtggtcacatatgctgtttctggtgtgtctataattcaatgaattgtctgcgggagtctcaatgtccagtatgtaggaatcaatattatcacttcccaacagtctgccaattgcttcactttttacttctcaagatctataccgctgcttacaagagaagggaaaaccaaactcttgaggaagaaaagcaatcaggattctactcccctcaatttgatcctgatacatgtgaatcacaagctaaatttggtcattctgggtcagctgccaatgaaggagatgatggcaccatctattatgatggagagtctgatattattggaactcctgctaaaggaaaaaaaatgcctcaggaagagctttctgtacaaaggaaattatcagttgcagatgtgacttgtacgatgtgcaagcaactgctctttcatcctgtagttcttaattggggtcatgtgtactgtcaaacttgtgtcatcaacatagatgacgagatgctcagatgtaaagttt

SEQ ID NO: 93554 - DNA, 651 bp, Glycine max
  Clone ID: PAT_MRT3847_55493C.1
ctagtcctctctgtaatcccaagaaggacacggtcatgaccaccccacgcgtccgtgcaaattttctgcttcctttattcttcttcttcttcttctgttctcacactttgttctctcatgcagccgattccatcacaggagatacagtaatcagagacaacgatgggggtgatactttggtgtccaaagacctcacctttgaaatgggtttcttcagtttcgataactcttcaagatacgttgggatttggtaccacgagattccggttaaaacattcatatgggttgcaaacagagaaaaacccatcaaaggaagagaaggtttgatccaaatcaaaactgacggcaacttggttgtcctcgatggagagagaaacgaggtgtggtcaacaaacatgtcaattccaaggaacaacacaaaagctgttcttcgtgatgacggcaaccttgttctttcggaacacgacaaggatgtgtggcaaagctttgaggacccagttgatacatttgtgccgggtatggcacttccaggtagtgctggaacgagcatgttcaggtcgtggaaaaccagaacggatcctttaccgggaaacttacctaatgaaagttgactctgacgggtcaacaaaacaaaattttatttttggaggg

SEQ ID NO: 93555 - DNA, 1774 bp, Glycine max
  Clone ID: PAT_MRT3847_55494C.1
cggacgcgtgggcggacgcgtgggcggacgcgtgggcaccgctttctttctctctcgccctctctctgcgttgttggagaacaatcagaggaaaaagattggagggtgaaccgaaaaaaacaattcagaaaatggagaacaacgcattcagagatcaaatcatggaggacaatgaacatgaagaaatgcctgattcctttgtttgctgcgtttgtctggatctattatacaagcccattgtgctatcttgtggtcacatgtgctgtttctggtgtgtctataattcaatgagttgtctgcgggagtctcaatgtccagtatgtaggaatcaatactatcacttcccaacagtttgccaattgcttcactttttgcttctcaagatctataccgctgcttacaagagaagggaaagccaaactcttgaggaagaaaagaaatcaggattctactcccctcaatttgatcctgatacatgtgaatcacaagctaagtttggtcattctggtatccctagttcatcctctattttgaatttgacgtccaactcatgcaatgtgggaacttctgaatgtctggagcaatcagggtcaactgccaatgaaggagatgaaggcaccatcttttcgaaccgagagcctgatattattggaactcctgctaaaggaaaaaaattgcctcaggaagagctttctctacaacagaaattatcagttgcagatgtgacatgtacaatgtgcaagcaactgctctttcatcctgtagttcttaattgtggtcatgtgtactgtcaaatttgtgtcatcaacatagatgacgagatgctcagatgtaaagtttgtcaaagtccacatcctagaggattaccaaaagtgtgtttggagttggatcactttttggaggaacaatttcctgaagaatatggacagcggagagatgccattgaactacagcaaatcaaagtcaaacctgacaccccttcttcttgttcattggatggtggtaagaaaccagaaaatacagattggtggtctgatcctgactcaaaagttcacattggagttggttgcgatttttgcgggatgtttccaataattggagatagatatagatgcattgactgtaaggagaagatgggctttgatctttgtggtgattgctacgcaagccgctccaagcttcctggtcgatttaatcaacaacacacctcagagcacaagttcaagcttgtacaacccaacattattcataacataatgttgaggctggccacagcacagttaggggaaggttcgattgacctggagtctataggaaacatagaagttacttcagacggcgctgcattgtttggtgatggagaagataaccacaatgattctgaagccgccaattgaaaaattgagctcaacaaaagtccattgtctaaaaattggtgttttggtggggggtttaagtggataactcctaatagtaagaggagcaaataatgcaatgcttcaaggaagtttgctagtcaattggttgaggaattctcaattctacatggtctctgtgattttctaatgcatgccaacttgatagtgtttttatgtctcaactgaatttgtctccagcttgtggctattttatgttattgcattcgggaatgtatatattctaggagtttgtctgagatctatgatgatgtgtttgttacaataatattaataataattggtacatcattgtgaataatataaaaaaaaaaaaaaaactcgagactagttctctc

SEQ ID NO: 93556 - DNA, 257 bp, Glycine max
  Clone ID: PAT_MRT3847_55495C.1
actctccttgttacaatggtgaggtttagtttgtctaatgatgctcttaatatcatgatcagctcctataaactgtggaagcgccaattcatgattaggccttcctagaatgtcataataaaattcctcttggttatgcaaaatcatgggtacattgatgaattcgagtattttgatgaccacagggctggtaaaatcttggatgaattgaatgtcattcttaataattgatgttatataatccctttctttaatgt

SEQ ID NO: 93557 - DNA, 464 bp, Glycine max
  Clone ID: PAT_MRT3847_55496C.1
gaaaataaagattgttattgaaaatatcctcaagtttccaccagcaaaatacaagaattgctttgtaaatttagcctacagcaaataatcactggcaaaatccatgacactgaaacaatggtaaaagggagtttgggggcaatcatgaccccatttactaaagtttaaaatatccctcaatcacaacactctgatctgaggccatggacttcaaattgaccacttttagtccttgctctgagctcttcaatgtctgcagaggatctggctcagccaatccgtcccaaactggcaaaatttctgggacaaatttattaatatagttcttcttgataccttccttaacaagctcttcaaactcaccaaaactccctctaatatctaacagaacactgcacaatccttgacaattacaataatccaagatcacatccagatttatttgatccagaactacaatttca

SEQ ID NO: 93558 - DNA, 335 bp, Glycine max
  unsure (1)..(335): unsure at all n locations
  Clone ID: PAT_MRT3847_55497C.1
attcncangtacncgtangtaatctcgganttcggctnnagcttnnctcagantcngacngncgtngntgcnggngantttggcnaatnntaagnacantatgctcattttangtnntntgtncgnctgnatnnnacggggnganggnttcgancncngcggnagtctattngtanngtgcattgctcgtccatntgtnnngtcgtnnngntctgcctncctcanaggcnnncaggtttcgacncgtgctgannnnatctgtcnnntnatggacngntgcagcaacgnnnnnnntactnannngcggnnncnganctcanntnnnntncggtnnc

SEQ ID NO: 93559 - DNA, 447 bp, Glycine max
  Clone ID: PAT_MRT3847_55498C.1
aatggttcctttttgtttgagcttttttgaagtgggttttagtcaaaatccttttttgttttgctccttttcgaattcatgatgcagcagagatggaatcgaagaaaaacccatttacatttactaggtttactctttgttttcttcatagttttgacaatcctccatagcgagcatagcattcaacaaatccatgaaaacccagatcctgaagctcaccgacaagatgcttcgctttcatttgtgaaacctaatgttttaatcagtcgaaatggagctcctgaaattttggatagattcagtaagtgtaatggaacgagagagtatagtggccggaaaatctcgtggtctggccggaaaacggaatcaagtcgtcggaaagttaagtcggagaagtgtgatgtgttttcaggaaaatgggtttttgataacacttcgtatccactt

SEQ ID NO: 93560 - DNA, 277 bp, Glycine max
  Clone ID: PAT_MRT3847_55499C.1
acctgtctacttatcaaaccaaagtagacaaggatctacagtctttggaagacatcttacatcaagttgaaaacaaaacatcagaagtcaaacagctgataaaagcaatccaactcacttataatcctgatgaatcatcaaaaccaaatatgatagacgctgctactttgaagtccaggaaaatgttagaagaaattatgaaatatgaagcatcgattttaacacatgactcaagtattcgatatttgcaggaaatatataattcaaataatcaaaa

SEQ ID NO: 93561 - DNA, 467 bp, Glycine max
  Clone ID: PAT_MRT3847_5549C.1
gcggtttgttttccattcattcatttcttatcaatcgcaaaggctttcgcggccatgtcactttgactgattccaattggcccaattcactcgggcgaatttgcgacctttgccaattatgggcgattgaaaggctttaccaaaacaaattaacccatttggcaatgctttgtgagcagaaaacatatcaaattgcggatacttatgttggaaaggataaacccaaaagcattttctaatttactcttttgacttttcccttttttggcatttcattcaaaatttgcactttttttgatgcgttccgttccaatccctcgactatgtgtggtggaaaaatcgagcgcataatgctaatacggatataatctgcacgccgaaaggggaaaaggacactttgttggtgaccgtgacattggcagcccagcggacctttccggactcagacctgtcgatcacataattgc

SEQ ID NO: 93562 - DNA, 250 bp, Glycine max
  Clone ID: PAT_MRT3847_554C.1
tgataggatattgagcttgcaaacgttcatagcacagtttagtatgagaggactacagataggtatgtgctgaccgtagcatttattccaaatccctggagggcttaaactgaacagagaaagggacttggaggcgattattaagtgctttattgagtgccttactagatatagattggcccaagcattaatctttgtgcaataatgaagatatggaagctcctgttgagacttgaaacctttacaggct

SEQ ID NO: 93563 - DNA, 163 bp, Glycine max
  Clone ID: PAT_MRT3847_55500C.1
acggccgtcgtccttttttttgcttttttgaaattaaattatgtatcattttccattgaataccctaacgggggcacgggttcgtgaacaagatgacataatacctattggacatgtgtcccttattcagttaaactaacgacgaaaaggaacacgcataaaa

SEQ ID NO: 93564 - DNA, 264 bp, Glycine max
  Clone ID: PAT_MRT3847_55501C.1
tactattcacactctaattaatatcctctatatccatccaaacatatttcattaccctacactatctcaacctcacaacaatacattacacattttcttaaatataactctatcttaatctatataacactaaccatatcttacatatacttcactataccactacttacatatatcacctattaatataacacatcatcttaaactattcattaacaactattaaatcattaccacattttttataactctttcttaactttc

SEQ ID NO: 93565 - DNA, 316 bp, Glycine max
  Clone ID: PAT_MRT3847_55502C.1
tggagtattccaactgtgattcaagatgaggaattgtatagattattgctgaagtcagatatttcgtgaatataacgtttaactgcgtctccgaggaccctgtatgtgaggagcaaaacagattaggttcaatgcctcccacttgccacaacaagtgcaaccagtgtcatccatgcatggcagtgcaagttccaacctcgcctaaccatgaacgagttcacccaggtcttcttcccccaactgcttcaatggaagttttctttctccaaggtaacactaacaggtactccaattacaagccattgagttggaaatg

SEQ ID NO: 93566 - DNA, 552 bp, Glycine max
  Clone ID: PAT_MRT3847_55503C.1
cctagttttaaaattaaagacaacactagctattaagttaccttatagtacaaagtttcaagttgatcagggttttttggacaaagtcacatgaattttctatagagaggatcatgctcaagtggaatagaaatattaattataaacaacgtactaaaatgcgattgctatagaaattttgcgtctaatactctctacaattgctagggatgcaattgctatagaaatagttaaaagaccaattcctattttttgttttgctcctatgcatgcgggggacaggtactaaaatgcggtcatagattataacccaaagtactagagataaaatcataaatgtcacaaaggagcctgaaggaatttcaaagttcgaagtaatgtggcggtccatggaggacgcctctagtaccagaaatgaaccctgactgatgctcacacccatcatgattcctgttgtccaaattgggactatcttgataagtgccttgagttcttcaacttggtctactgtgcaaaggttccatggattcaaagctcttccctcggggtgtt

SEQ ID NO: 93567 - DNA, 181 bp, Glycine max
  Clone ID: PAT_MRT3847_55504C.1
ggctcgatattatattcagattgtggccgtggcaaccagcaacaatatgtctaaactcgagtgatggtctcagcgttagctacgacactcgctccatttcggggggggcttcatatgcagcaccataacatgtcactctcacttctaattggttccgcaactctcaatctgatgtaaggga

SEQ ID NO: 93568 - DNA, 301 bp, Glycine max
  unsure (1)..(301): unsure at all n locations
  Clone ID: PAT_MRT3847_55505C.1
gttgaggaangngtangtaagntaggaattaggntngagaatngaaagggatcnatanaagaaaaggaagggagagngantnnaatggnagatnanggaganaganatgnnnnangnncgaatnggaagaaaaantnangtnnaanagnngganantagtgaanaatgngaaggaggagnanaaagggaggaagaaananaggaatttagaaaaggnaaggangaangaaagagaagnanagngggangggngatagagagaagggaaggagggaaagngagnangggangggnaangaaa

SEQ ID NO: 93569 - DNA, 356 bp, Glycine max
  Clone ID: PAT_MRT3847_55506C.1
gacacagacgaatattcattgcatttagatgcagcatcagcttataacaacaattaaacatgagtgcagccagcatagcttggtttgtggcatcaagcagtggagcagtggatgcattgaacgatcgattgggggtgtgcaagtggaaccatgcattgaggtcactgcagcatcaagccaggagcgtcattatctgctacaggcaagccaatcccttgtcatctgctacttcagctgcggtcgccaataaggtcaataggaccaaggacgagtccatgaggaaagtcatggacttgagctgttgaggtcacaatacatcaacgtttcactgtgtggactattcgaattgcattcat

SEQ ID NO: 93570 - DNA, 188 bp, Glycine max
  Clone ID: PAT_MRT3847_55507C.1
ctaaacttacggattgagactgcactgggcaattaacagataggtccatatgaccatgatttagatatgactacgagacggcaacttcttggaaaaatctggacgcttgactacagacaatggagaggagctaataaactaatacttgtaatgccggtttgacctaattgagctaatttatatgattc

SEQ ID NO: 93571 - DNA, 485 bp, Glycine max
  Clone ID: PAT_MRT3847_55508C.1
gcctcgtgccgaatcggcacgaggcagattcaaccacttcttattcaagaaaagaaaaatcaggttctttctggttttgtctcatttgtaaagaagtgggtgaggatttacttaattattatttattactatgggaggtgggtacgtacctaaagcgacacttttgttcattagattaaggttttgtaagaaccagtaagatgttatcgacatgaaatgcttcgtggctcacaaagtcgtgtaataggatatcatttcatttcttaatgaattttgctaactaatattcttagagtattaattaagaaattgaaagagaaaaatattcattatgaaaattttaaaaaagtcatgttaatacaatttgcatatttcaataaaaaaaaattcttcgtttaattttttaaccaatattttaaaaacattaattagcatttacttttttaattaagccttaggaacttgttaccctacggttgattttg

SEQ ID NO: 93572 - DNA, 493 bp, Glycine max
  Clone ID: PAT_MRT3847_55509C.1
ggttcggtaaccctaggtgcagtgcgcgcacgaggcccttcttctcggcgcattttagcataagaattcagaattctattacactgtttcttttactcttcctttttggtagcttcacacaattccgaattcccacagagagagagagagagagagaattatgggaagcaactttctctctccgccagctaagcgctccgcactcgacccgaatccgtttcctccaaacggaccttcaaagcgctccaggcaatccaagcctccgccgccgctctccgtgccgcccggccacgtagccttccgcctcctctgcaacgcctcccgaatcggcggcgttatcggcaagtctggctccgtcatcaaaactctccagcaatccaccggcgccaagatccgaatcgaggacgcgccgcaggagtcgccggaccgagtcatcctggtgattgccgacgccgcactcagctgcaaggttctgctgagaaacgaagaagtc

SEQ ID NO: 93573 - DNA, 1647 bp, Glycine max
  Clone ID: PAT_MRT3847_5550C.1
atggaggtaagggtcgttcaaagaaacaagggatcaggaagaaggaaacggtggatttgaggaatcttctattgatgtgttcacaatctgtgtatgccaatgacaacaggactgccaatgaattgctaaaacagattaggcaacactcttctcccgttggggatgcatcacagaggttggctcattacttcaccaatggcctcgaagcacgcttggttggggatggcacaagtgcacaaggaatgtatacttttctgagctctaagaacatcactgttgctgagtttctcaaggcataccaggttttcacttcctccagccctttcaagaagtttatacatttctttgcaaataaaatgattatgaaagcagctgcaaaggcagaaaccgttcatattattgattttgggatcctatacggtttccagtggccaatactcattaagtttttctcaaatagggagggtggacctcccaagcttaggatcacagggatagagtttccccaacctggctttcgccccgcagaaagaattgaggaaacaggtcaccgtctggctaactattgtaagcgttacaatgttccctttgagtacaatgccatagcatcgaagaactgggaaaacattcaggttgaagccctcaaaattcagagcaacgagctagttgctgtcaattgtcacttgaggtttgagaatttactggatgagtctattgaagtgaacagtcctagaaatgcagtccttcatttgatcaggaaaataaatcaggatatttttactcagtccatcactaatggatcttataatgctcctttctttgccacgcggtttagggaggctctctttcattattctgctacttatgaattgattgacacagtcatacctcgtgaaaacgaatggaggttgatgatcgagagagagcttttgggccgggagattatgaatgttatagcatgtgaaggttctcagaggattgagaggcctgagacatacaaacagtggcaggttaggaatacgagggctggtttcaagaagctccctctgaatgaggaattaatggccaaattgaggactgcgttaaaggaatggtaccacagattttgtcttggatgaagataacaactggttgcttcaaggttggaagggccacattttgtatgcttccacttgttgggtgccagcataatgagatgctactggactgggttcagaactcatactatactgaaggttttggtatccttggtttggctacctctacttgcttaaccttcaggtgctgtgatgaagattgcaacaagctttgcacgaagttacttggtaaaactatggcacaagttttcgggtagaattgagacttgtgaatgtaatgcaatttctgtaatgatattgataagtagggcctattagagtaggaaggccattatagcatgtttgcccgagtaccagtatattgagttattttctctaaccaacatgtattaggcattttgttaggatggacccaaagaggtccaaaagaaggatgtttaagtggctcaaagattataaaagataatgttttttatttataaattatagttttttatttaatttatattaaaataacatgatgttgagacttggataattattatccatt

SEQ ID NO: 93574 - DNA, 501 bp, Glycine max
  Clone ID: PAT_MRT3847_55510C.1
gggggcctcagctgctggttattgacattcaggggggccctataacaacaggcctggaaactgcaaaaaacaagggggggaggggagtgtctgcagggacaaaagtggagggcccaaggaggggggaggccaaaactgttgggaaagcaggtcagggccagggccaaaagtcgtcatttacactgggaccctgggccccacaacctcagcccctacttttggtgtctcctgactccaggctagggctgggaattctttgacaactttttacaaaaacaaaatccaaaaatgctgccccccttttgggataaaagcagggtttccagtcctgctttcctcctccacccctgggttagggagggccccgaaaaaaagctgggctctattgcatgttttaaaggcattaattttccctgggggcccagcccaccagcgccacactatggcccagagggagcactacaagcgttgctggcctaatggaaaggataggggagggga

SEQ ID NO: 93575 - DNA, 262 bp, Glycine max
  Clone ID: PAT_MRT3847_55511C.1
cgaggattccctcttagctgctcctattgtcttggactaggtacttgttgctgagctcagcactatagtcgagttgatcgctgataatgagggagagttccactcagtgcacgcagttgctaccatactcaggctcctcaccagggctcctgctggtgcaccgggtctccattggtgatgcattgtcgagcgacgtgcgttacttggaaacgtagatcaggacttgtgtttatatggcccgaattatggcatgattgtcgat

SEQ ID NO: 93576 - DNA, 369 bp, Glycine max
  Clone ID: PAT_MRT3847_55512C.1
gatgtcaatcttcaattcaaatccctaatgtcaatcattctcacgaaccttcccaacgcgtcctcgtttcatccgaaacctaaacctaagccctctcatcatcacccacagatggctctcagtcagtctgcagtaattgtagcgcggacaatttgcttgaggaatctgttgcgaatggcagcgtcttctgaagagcgatccagtggaggaagtcaagttatcactgagaaaagcgatggtgtcagagtcctggagaatgtgaaagacgataataagaatgagttcgatgatacggtgattgaagacgcgtaagaagaagagttgtctgaagatggacagggtctgtcatatgatttgatggattagctc

SEQ ID NO: 93577 - DNA, 555 bp, Glycine max
  unsure (1)..(555): unsure at all n locations
  Clone ID: PAT_MRT3847_55513C.1
ggctcgagttctgcgtctccaatgcccttggagaatagggtgcttgaccctaagaagtctcagaacattgccattttgcttagagcgctgaatgtgactattgatgaagtttgtgatgctcttagggaaggcaattgtgatacgttggggacggaacttcttgaaagtttattgaagatggctccaactaaagatgaagaatctaagctgaaggagtttcaagatgaatcgcccttcaagcttggcccggctgagaaatttcttaaagtcgtgcttgatataccttttgcttttaagagagtggatgctatgctctacattgcaaactttgattctgaattagaataccttaagaagtcctttgaaactctggaggtggcctgtgaggaattaaagaaaagccgcatgtttctgaagatactcgaagctgttctcagaacaggaaatcgaatgaatgttgaaccaatcgtggtgatgctcatgcgttcaaactggacacacttttgaagtagttgatattaaaggactgatggaanaccactctctacatttcgt

SEQ ID NO: 93578 - DNA, 918 bp, Glycine max
  unsure (1)..(918): unsure at all n locations
  Clone ID: PAT_MRT3847_55514C.1
ccctcttcttcttttttttattttttatcttctcttatcttaaacttattcttctgctacaccaatcccatccttggtccatgtcctgttcaagccatctttggcatgtgccacttggcctctgacacaaaaacttttcttttcggaaccaatcatttttcatcaaacttcaacatttacataactcttaattttaatcacttttgttcgtagctacatcaacatggaccacatgggagacccgaagagcatcatacatgagctgctacaaggtttggagttggcaaggcaactccaagtgtatctccacatgccaacttcgtcccaagaaacacgtgacctattgatccagaagatcatatcaacatttgaaaaagcacttgaaatggtaaattgtaaagggccagtgccagcgggtgagtcatcacatcatcccctaggggctgcattaatccgagtgtcagattcacctttgagcagtagtccccgcagtgaagactctgatagagatttcaaggaccaggaccccaatgctttcaaaaagagaaacactttgccaagatggacaaaacatattcgagttaccccaggaatgggagtggaaggacctcttgatgatggatatagttggagaaaatatggccagaaagatatccttggagccttgtacccgaggggctattacagatgtacccacagaaatgttcaaggctgtatggcaacaaagcaagtgcaaagatccgatgaagaccccaccattttcgaaatcacttaccgaggaaaacacacctgcacagtggccaacaacgtgggttcttcatcaccaattccactagaaaaccaggaaccaagtttgaacaacacanatatttctcagcatcagcatcagcagaatatcctgcaaagccatgaacaaca

SEQ ID NO: 93579 - DNA, 120 bp, Glycine max
  Clone ID: PAT_MRT3847_55515C.1
gttaattgagttgcgacggtgacggctcgttgtgtagcgtcctgtcgagcgccgctcctctgttacccgtctgtgagagtagatggtgcgctgaatgcgctacgtaaccatgtcaagtaa

SEQ ID NO: 93580 - DNA, 1135 bp, Glycine max
  Clone ID: PAT_MRT3847_55516C.1
aactcggcttcttcaggaatgggagtggaaggacctcttgatgatggatatagttggagaaaatatggccagaaagatatccttggagccttgtacccgaggtaattaaaaccaaatttaaccctcacaaactattatgtttacattctaatttctaagtctcatggattgaactagatttatataattatatactttgtctgtatgcaggggctattacagatgtacccacagaaatgttcaaggctgtatggcaacaaagcaagtgcaaagatccgatgaagaccccaccattttcgaaatcacttaccgaggaaaacacacctgcacagtggccaacaacgtgggttcttcatcaccaattccactagaaaaccaggaaccaagtttgaacaacacaaatattcctcagcatcagcatcagcagaatatcctgcaaagccatgaacaacaacaaaacgaactacttctgagcctgcggaaagggttgagagtccaaacagaaaacctagattcccccgaacaaccattagttccattccgtttccctttgtccacaaacataaaaaacgaaagccatgtttttccttcccctgtgcttgaaaacttcacttctccttcttatgtttcccctgctgcatcaggaataggccacttttctgtgtctccaagtggagtagtgaacagctttgaagggaacccaaatttggcaaattctgagtctcagatcaatgatatgatccctgccactactacaacttcagcagctccaaactcatcaaccgttggcttagagtttccctttgaccagtttgaatttgatggccagaacttcacattcgataacccacggtttttctcttgaatatgctcaattcagagaagaagccaaataaatcataaaaactaattaattttttttaaaaatgaactagaagcatatggtgaaagtttgtggtaacattctagaataatatgaccctttagaaaaagaggcaaaaacatttcaatgtatgtcttagtcagctacttgtgtcgtaggaagaatgtgcaattctaaaattgcttagtcaataagaattttcctttatcattaaaaacatgtcaagttaatatctggtaggtttttctttta

SEQ ID NO: 93581 - DNA, 411 bp, Glycine max
  Clone ID: PAT_MRT3847_55517C.1
atgaaggtataattaatagctgttcttcagttaatattgtatgtttgttactattggtgctgacctgcagcttttgaaggtttggtcataattatgttatttattttcttatttgagagtgcttacgtacagtagtgccccaatcattgtgaatattcatggaactttggaagtcaattttgttgtttcaaccttaaagcctgggtctttcttttactttttcaatttgttaatgcattgtttttttctttcccttttcccttgatgtatgttatgaagagatgagatatatcttaatcatttcatcacagtttatgttgtttagctgctaaactaccaactttttagtttgttccagagttgattcatgcttaatggaattggtgtagcacttaatgaaatattccttgt

SEQ ID NO: 93582 - DNA, 207 bp, Glycine max
  Clone ID: PAT_MRT3847_55518C.1
gacccgggcagaaaaatagctcatcccctctaaagaaggggccatcgtaaaaaaaaaaatctctgttttgcccaaaacccggggcctttggcgtagggggtcttctgggaatagtccctgggacaaatttggaaccttgatgccgcgccagtttagggggaaccggtctggttctttaataacccgtctcggtgggggactagacaa

SEQ ID NO: 93583 - DNA, 425 bp, Glycine max
  Clone ID: PAT_MRT3847_55519C.1
gattgaacaagtttgctgacatcactccttatgagtccagcaaagagtacttgcaagctcccaaggatgtgtcgcagtaaatcacaatggctaacaagaaaatgaagaccgaacaacctacctgtgactatccacctgcatcatgggattgtaggaaaaaaggctccatcactcaaatcaagtgccaatggcgctgaccaggcggcagggcgttggatgcctcagaagccatagacacagggtctggcgaagacaacatgtgaccttgctagcgcccctactcatcaacttgatgacagcgtacgagggtgctcaacaggctacactttacaattccctggatgttctgatctctttttcagaaactgctcatttgtcactatcagcacattgatctttgcaacaacttacattgtgtggaaagt

SEQ ID NO: 93584 - DNA, 403 bp, Glycine max
  Clone ID: PAT_MRT3847_5551C.1
tacggctgcgagaagacgacagaaggggaacacaaagaagtctaattgatggggtgttgttgcaccaaacagcgagtcgatcataaagatccagcagatcttgcttcccaaacctatgttaatatttctgaaattgaaacactgtatgatctgttcaagaaattaagcagctccatcatccacgactgtgttatcagcaaagaagagtttcagcttggcttatttggaagcagcgagaaacggagcctctttgccgacaggggctctcaattatttgactcataaaaatgatggggtgatagaatttggagagttcgttaaagctctcaacgtcttccagccagcagcgccacaagcacaaagagcagattttgcatttcgactctatgatataagtcaaaga

SEQ ID NO: 93585 - DNA, 600 bp, Glycine max
  Clone ID: PAT_MRT3847_55520C.1
atttgttaactgctcctaagtcctaactaacaagtcttcaccatcattatggttgctttgttttcccctccagtgttctcaaccaagggatggctcttagaagaggatccattaagctatgatgtgtcctctgagtactcatttccctatcaattttattcaccacagacacagattgagcttgaaattgaaaggtccacttctccatcccctgaagaccctgccatggtcaaaaagcttagccacaacgctagtgaacgtgatcgccgcaagaaggtcaatcacttggtttcttcacttcgttcacttcttccagtggctgatcaaacgaaaaaaatgagcattccgactacagtttcgcgagttataaaatacatacccgagttacaacagcaagtggaagcactatctaagaaaaaagaggatcttttgtgcagaatttctcggcaattgcaaggagatgcggtgaacaaagaatctcaaaggagaatttcccatcacaattctgattttgctgtttcaactagtaggctcaacgattgtgaagctgttgttcacatttcctcttatgaggctcacaaggctccactatccgacatc

SEQ ID NO: 93586 - DNA, 107 bp, Glycine max
  unsure (1)..(107): unsure at all n locations
  Clone ID: PAT_MRT3847_55521C.1
gttgagtgctccaataataccatgnnagctcaagcgtcgtancttgtttattagcttgttttnctctctggtgttgcatttgcttgcaaagtattattacaagccaa

SEQ ID NO: 93587 - DNA, 1713 bp, Glycine max
  Clone ID: PAT_MRT3847_55522C.1
ggctcgggctcactttcactatcttcaaccagccaaaaaaaaaaaaaaaacccagaaccaaaccctaattctccgaaatttgatttctttcaggaaagttctttctgaatccacgcctcctgcagacccatatcgcttttcttcttctttctaattctccgccaccaaatttgcgatctttctgtgcctccgaatcatggagaaggaagagaacgaaccccacgttcagaaaagtggcggcgaaagcgaagacgctgaacccatagagctcgttctctttcaagtgcccgagtgttacgtctacataatacctccaagaaagagtgcagcttcttacagggctgatgaatgggatgtcaacaaatgggcatgggaagggatattaaaagtcactagaatgggagaagaatgcctcataaaacttgaagataagagcacaggtaagccccaattaaacctgcttcaagtacacagaagtatccaacatactcacttacaaatctcagccttgagataactaatatagttgagactctgaaaacagttaaagacacagaacctgaggattctccgtggaacctgttattgacagcagtagatactttgttcttcgcatagttccaagacataggtggtcgccttcgacatgcttttattggcataggattccgagaaagaacagaggcatatgacttccaagctgccttacatgatcatatgaaatatctaaacaacaagaaaactgctgaagagatggatcaacattaccagcaaacttcctcagttgattacagtctgaaagaaggagagactcttgtactacaaattaagaccaataaaagtggcagcgttgcacagtgtgagtctatagccttggccgacaggtccgggtaatctttgaaatttcatcgtgatggggaaagaatctatacctagtattaagctatcacctcctccagcaccactttcacctgttttcggcacgcagaagtctccaacaaactcacctacaaatctcagccttgagaaaactaatatagttgagactcctaaaacagttaaagacacagaacctgagaattctcctgaaaaacaaagcacagaggatgtaccagatgatgattttggtgatttccaagcagcaggttaagctatccatcgtcgtgtgttttgaatttgtgatggttagaaaacatacaaaattgtgactccttgaacatctggtatataccaaagacttctgattcagtttggagaatcaattatgtccttccagattggagaaagtaaatcctacatagccaccaacaaaatatcattaaaagaatcaacctatatgctttatcattggtgattgtttttgttacattgcgggctactactacgagagtttttccttgatcttgagtcaatttatttcagttttatgctttgtttatatttctcagagttgggatgcctgagtaatcatttagtcgtacatcataaaccgggttcattactttgttagatagcataattgctgttttgatgaatgaacaagattgagcgtcttgaacttgttgagttgttccttatatatgtatgcattatagtttataccctaagaggatttgctaaaggccttttcagcctcataatattgttttcctcatgaaagaatgaaaactgaggaatttgattggttaaataaaaaaattaacttgtttactg

SEQ ID NO: 93588 - DNA, 674 bp, Glycine max
  Clone ID: PAT_MRT3847_55523C.1
ggaagggcaacacatgcaaaacgtgtgtttcacgtgttccatgtcaataactattttactgttattaagactgcacggtcagtacaacattgaggaaggtgcttacatcgggtcctttgtattgtagccttcttttcaattcttctctcttgctatgctttttaagtacaagattcttaaacttcaatcaataactataatttaaaatacatatactaccaccaatatattgcttacattataaattttcctgagaacaaatgaaagtaaaacaaaacattaaaaccaaagatattcacatatactcagatgtcaacacagcattgaattgcttgatgactagtatagtagcactcattgcctcgaattcatggttggtagctgcacttatcaccatggttcaatccgtacttctgtctcatccgcgcactccaaaaatctgagtgatttccactattatcacctttgctagacccagatggttggccaggttgaggattcagtaggggctcccaacttctacccctaacatcatatccatcctcataatcaaaatctgctctcctagaagaaactgtggctcgcaaaattaatgccagtagtagagataatgcctgaggttgacaacaagaaaaatgagcaatagcaataaggaaggaatgggataaaaggaa

SEQ ID NO: 93589 - DNA, 814 bp, Glycine max
  Clone ID: PAT_MRT3847_55524C.1
tttataaaacaccaatgaagcttattcaaaatatttgttcttgagaaaaacaaaaaaattgaatcgcaacacatgcaagacgtgtgtttcacgtgttccatatcctacctatgtagctggatgcgtagccatagagcaatgtcaataactattttactgttattaagactgcacggtcagtacaacattgaggaaggtgcttacatcgggtcctttgtattgtagccttcttttcaattcttctctcttgctatgctatttaagtacatgacttaaacttcaatcaataactatagtttaaaatacatataccaccaatatattgcttacattataaattttcctgagaacaaatgaaagtaaataaaacattaaaaaccaaagatattcacatgtactcagatgtcagcacagcattgaattgcttgatgactagtaagtagcacttttatcctcgaattcatggttggtagctgtacttatcacatccattatatcacccgtccttcggagtcgaacgcgagctcgcaaaatagtaagaccagaaacacgaacagtaacagttgttgggccgttgtcttgttgttgggttagagtgacaaggccatggacggaggaattgcccttgaggattgcaacggctttcttggtagtggcgggaagggcaatggattgaggagctgggaaggaagaaaagagaatagtgtgggcggccatggctgcaattgctgcttgcattgttaagagtgatagttaatggaatgaaggggtcaactcaactctgattctgatgatactgcaatgcaaccccccc

SEQ ID NO: 93590 - DNA, 391 bp, Glycine max
  Clone ID: PAT_MRT3847_55525C.1
attaaaaaacgttggggacagaaacagtaatgccaccaataggccctgagaaattcattcctataacacaatggtactaaatcagagttacttgataaactcgattaatgctgatattgaacctataaacggccagaatcattctaattgggcatctgaggtttatcaaactttcaaccatgatgataggacaggggtccaatcgcatacttttccttccttgaaccataaagctattccacgcttgcaattctcagggctgtcactgccttgaacaacattccttcctgtttgaacaacctggtctacgcttgaaatgcctggtgacattttgcagaagtttctgtacccctataaccctgcgtgcctatgcccctacttcaacaacctt

SEQ ID NO: 93591 - DNA, 451 bp, Glycine max
  unsure (1)..(451): unsure at all n locations
  Clone ID: PAT_MRT3847_55526C.1
ttctacattcttttgtcttgacattttctgtttgggaatattatccgttcacatgactcctatttgatttgaggtacttcttctctttcctttacaaggatttctaactggtggtgaatgatttctttagagaaacactaattacttatcttaattactttaaattgtcactacatgtatacctatagtcatcactccattataaacgagggatgatatttagtaggaaaattatcaataggaattcactagaatctaaaaatagccaatcaaaatattacataatcattcagttaggaaagagaatgaaaactatctccaataaattcacgccgcttaaaatttgtgtggattcgtatatagtatatttttgagtgctgattatcattttcctttcaataaagtgaaactcaggatnnnnnnnnnnnttttttttancnnntacatnnag

SEQ ID NO: 93592 - DNA, 330 bp, Glycine max
  unsure (1)..(330): unsure at all n locations
  Clone ID: PAT_MRT3847_55527C.1
ctagccggcggccgcccttggttttttttttttttgaccccccactatattaacgtcattcgcaaaacanacacaggaaccggccaaagttgtacgacagcaacaccaaccatctgnnagcgcaagattcaaggcgttcatgggacattaaatgactggaggagatccccattgtggagtaaatgtccacaggttgggatcctctccccccaaaactggtccacaacgggcaagtgtaccgggaataaacttaaccttagtgcgcgctcaagccaaactgccatgggtcataggcaggcacctctgtaaatgcggaccaagcccaggggc

SEQ ID NO: 93593 - DNA, 325 bp, Glycine max
  Clone ID: PAT_MRT3847_55528C.1
gtcactggatggactgtcaccctagtgcaggagggccaggtttcaattgattggtgcatatcctctgaagaatgtgttcgcaggacctattgtgttttgaatgcacatagtccttgtgtgctatatagggggctgggaaaactgacttttccccaaggcacttgccggagtggtcaaagaatgcctttttatatagggggaggagctggtgcaaagaatgctattgtcatgaatgtgccacatgctgctctttcaatgtggagatattctgttggagagctcgactttgagagtttgtaagatgacttctccctacattaaatgt

SEQ ID NO: 93594 - DNA, 366 bp, Glycine max
  Clone ID: PAT_MRT3847_55529C.1
gggaaaaaacaaaaaaattaccctaattgaacgggcaattcacaaaaggggcccacaaccttgacaaaaatccttaatccctcccgaaggggatattttttacaaaatttgggggggggattttaattttaaaaaggccccttggttttggagcctaaagctaaaggctgcccacccaaaaaaaaaccttgaattaggccttgagcaaggggagtttgatttggggctccaaacacaataaccaaaccctcagggggtccaggttttgaaacatgaacagccccgttggccccaaacaggggggaaaattgagtaagggtgcttttgttccccccctcccgcgggggtaaaaaccaataggggggg

SEQ ID NO: 93595 - DNA, 206 bp, Glycine max
  unsure (1)..(206): unsure at all n locations
  Clone ID: PAT_MRT3847_5552C.1
cagcacnggganncacgcggnaccaaaanatagangnnncaanaccaaagcgggaagagaggaaaaaggcaangnnggnacaccccganaaaaanangggnaangagaaggcngcagaagccnnnaagaaaccccaaaangcacangagaaacnaangganncgnngaagcgaaaagcnnangangangagccaaggagagaggag

SEQ ID NO: 93596 - DNA, 1697 bp, Glycine max
  Clone ID: PAT_MRT3847_55530C.1
aaaatcttcaggaaaaagtaaagacaaaaactgaaattcctgaacaactccacctttgtaggagttagttttatctttgttggcctatcctttctttccttcaaaaaaaaaaaaaaaaaacaccaaccctttaaactctccaatcaactactccaaaaatcaagagcaaaatcaaaagaaagaaaaggaaacaaacaccaacaccaacacctcatacacttgtctgtcatagggtgatctcctttagtgagaattgagaagccaagccactcaattcatcaccttctccctctccttttccaaggaaaaaagaaaaaaaaaatcatcaattccaatggaggtttcatgcaaaattttgagaagatcaattcacagttttcttcaaaactaccactatttcacctcaactgcagcttttctagcccttcctttctcagcatcaataatcctatcacaagcttttgtgccagcctcttcatccctcttgcctcagatacacagtcacctaaggactctctttgatgctgcaggctttccttccacatcacaattgtttaccattctcaaccttaaggtttctcaaacaatcacttcctcaatcttcacccttcctttcactctcacattcctcctcattgcaaaagcatccataattcaagctctaagtcaccacaaaccaactttgccaacttccttcacttccatcttgtaccattacaagcctcttctcctcacctatatctacaactctttcttcattctctcagcaaatgcatcttgcttttgcctcctctttttggccttcacatttgctgaagggctgggatacacttcatcaagttccacacttttaatgtctgctgcatctgcagttctctattctgtgatccttgccaatgcatttgtgatttgcaacatgtcactgacactgtctggcatggagggacatggagggtacatggcaattctgaaggcctgtgttatgctaaggggaaggacatcaatggctttgttcctggcactgcctgccaatgtaggccttgctgccattgaggctttgttccagttcaggctcgagagagcctatcacaatggtgaaatgtcatcatggccttttatggctttagaggccattttcattgcctatttgtactcagttttcatcaccattgacacaattgtgagctgcaagttttacaaaagctgcaaggtgggattgaggggtgatcaggaagacaagcattttatgaggattgaattcccagaggaagacagttgtggttacttggtattgaagaattttgaagaactacctaagtaacataaggtagcatattgttgtcatcaatcaatttggccaaggtttttctgcttattttctcaaaagggaaggagctacaagttattcaaaatatatagatgcatttgaaaattccttcatgttactgaaaccaaatcgagcaacaccccagggcaaaaaggttttcaacagaggaacctcagctcagctatgtgctaaaactaggagattgattcaccattttactttaatgtatttcttttatgttgttaaaatgtcttctttttatcctatctctctaccttgtatatttattggtaatcttttacttgtgaataatacaaaggctcttgtctaaaaaaaaaaaaaaaaaaaaaaaaaaaaaaaaaaaaaaaaa

SEQ ID NO: 93597 - DNA, 120 bp, Glycine max
  unsure (1)..(120): unsure at all n locations
  Clone ID: PAT_MRT3847_55531C.1
gggatgaaatgntagancaangtgttaagcccactttggttacttgcnacactgntatnnaggggcatttgcgggtggcaatgtgttaaaggcnaatgactcttcggnaagatgatttgg

SEQ ID NO: 93598 - DNA, 353 bp, Glycine max
  Clone ID: PAT_MRT3847_55532C.1
ggggaatgaagcctcacttttcaatttttttaaaaaggggccccaaaggccacattaaaaagtgttttctttacctctcccaaaaaggaaacttttttttgggggaaaaaaaaacataaaccttgtttttttgtgaagaggaaacaccaattttgaccttttttaaattgaaaaaacccttttagccccctaaaaacctcctaaataagagaaggcccaatgtccccccccctgtgaaaaggggaccataaagatcttttccccattaagaagggccctccgcccaaaaaaacccccaagtgacccttccctcagaaagggcccaaggacctcttcaaaagccccaaactccc

SEQ ID NO: 93599 - DNA, 245 bp, Glycine max
  unsure (1)..(245): unsure at all n locations
  Clone ID: PAT_MRT3847_55533C.1
actaccatgaaccatcggggcagtggtattttagggcattcggcctatctacaccataaataaccatacaattnnttncaactcttcaaaaagccaataatgaggacgcaccaaaattggagtgtgaaacccaagaaaataaacccattccaggcccttatcaaaaggcaaggacctttggctggttggagtttgcgtgccacaaatccaagtcacttaattgggggggctttcttccagaaaac

SEQ ID NO: 93600 - DNA, 382 bp, Glycine max
  Clone ID: PAT_MRT3847_55534C.1
tttgtctgcgtgattctttggatgtctaagtgtgccggagtactgttatacatattacgaactggcgcgttgcttgtgtgatgttcgtgacgatgttccgagcccatacaagggggacaggtaggggctccctattgagaaattgggactcgagtttgcgtgctgattgaggagagcttccggttactgaggacggttgaaaaaatatgcaccagctcggggttcaccctgtcgcaccaaacgtgaggaggcttctatgcatagatgactgattcccttggaggagatagtccacatgtaccggtcaacacattggagcactggtgtcatgcaaatgaacaataatgcgcctgctgaataagccccaggggctgaacacaag

SEQ ID NO: 93601 - DNA, 227 bp, Glycine max
  Clone ID: PAT_MRT3847_55535C.1
cccacgcgtccgttaaaagattactggagtatatgtcaatgaatctatatcaagtaagtgaaaaaaaagacgaataagaaaagtttgtaagttagtttcaatagtaggaaatattttggattggttatgttaataacgcttttaaaaattccttgttcaaaattaaattattcattggacctttattattaaaaaaaatttatgtgtttcacatatatatttcaaaa

SEQ ID NO: 93602 - DNA, 542 bp, Glycine max
  Clone ID: PAT_MRT3847_55536C.1
tccgggactttgcctaaccttgtttagaattttcttggcagcagacgagggttgttttcaaggattatctgttcttcttcccctgtcgtaatctcaacgaaggaacaatcttaaccggagagatcgggttttctcgtaggtaatttttccttctcccctctgctttagggttttcaaaaaggtttataaaaatgcaattagagaatcaataatcgaaatcaccaacatcaaatgcccatactgaaatacatccgcttcccctgattctgaatgatacaaagtttacgtctttaccctttttcgctgtttggtatgcttgctggcactgtgaatcatacttctttgtgggttttctttgactttttgtgtcttcctcgtaccaagattttttgtctactatgctgcccatttcaccagtgcaaaccattctctcatttatcgtcaatgtgttggttttgtgttgaatgcactttttgattcaccactctatgcagtgtgcacctttacttattgttagccatattcaactcgaatcctatggc

SEQ ID NO: 93603 - DNA, 274 bp, Glycine max
  Clone ID: PAT_MRT3847_55537C.1
aagttaaaaatgttttaacatgaatactcgcggtttatttagagtattatgttaaactacaacaaatgcgggacatatatggttgatgaaaggaataccgatcggaacctgttataaggggatgtaaggacatatggtagtatgatacattaggaggcttatttaaggggaactctttcgtgtctaagtcattactgtgttatgcactttgtcaaataagcttgtaacgtaattatgtcacttatacaattctatgtatctacactatctctat

SEQ ID NO: 93604 - DNA, 446 bp, Glycine max
  Clone ID: PAT_MRT3847_55538C.1
cactgctctaatgggtgtcactggtgcaggcaaaacaactctgatggatgtacttgctggtagaaaaactggaggatatgttggaggtaacatcaaaatctctgggtatcggaagaagcaagaaacatttgcaaggatttctggatactgtgagcaaaatgacattcactctcctcatgttactgtgtatgaatccttgctttattcttcttggctccgattgtctctagatatcaatgttgaaaccaggaagatgttcattgaggaagtcatggaacttgtggaattgaaaccactaaggcatgtattagtcggatttcctggtgttactggtctctcaacagagcgaagaaaaaggttgactattgcagttgaacttgtggcaaatccttccataatattcatggatgagccaacttctgggttagatgcaagagctgctgcta

SEQ ID NO: 93605 - DNA, 297 bp, Glycine max
  Clone ID: PAT_MRT3847_55539C.1
atgtgggagatttcagtcatgatgaagatcatacgtcatccgagatcgccttctaccaggatgcacgatgtcaataggaggcctactagatctaccttccaccaagacacgactgctaaagttcacgaggatgtgggagatttcagtcatgatgaagatcttacatcatccgagatcgccttctaccaggatgttattggtgaagagatacttgagagagagatgctttcatccgacgaggaatgcgattccttgggagacgagagtaacccttccaaagatatgacttcaccctag

SEQ ID NO: 93606 - DNA, 334 bp, Glycine max
  Clone ID: PAT_MRT3847_5553C.1
cgtcagacataaaatcaggcctcaaaacaaaaaaaaaaaaaaaaaaaaacaaaagaaaaaaatgcaaaataaaaaaggaggttcacctctgtgatacgatctacagttgacctagtcttttagcagatgctccttctattgtattttctaaatgttgttctcatacggtgtcttatttggaaatggactggagtagcctaatctagttcgtcgagaataatccacacatttcaaagcatactttcttccggtgctttcattaagtcttctcagtccgatcaatttaatcggattttgggataatcctgttttccatgtatgaggtccattccta

SEQ ID NO: 93607 - DNA, 364 bp, Glycine max
  unsure (1)..(364): unsure at all n locations
  Clone ID: PAT_MRT3847_55540C.1
gttttaagaaagttaggccattttgatctatgcgcattccttaccatgacttctcttttgtttgtttacctttatttctcttacgttcttgtatataactctttgatgcttttagtgtgtttttaaatgtatgcatgagatagatatttattcatttgatgcacatgaacaccaacacttcttgcatacacggtgagttgaaaaagggccctatacccgggtccgtgggaacataagaaatggaggtgaatctgtgatcatgttaagtctccgacatgcttgatgacagtgaaacctcatctagagtttttctcttcgatgatatattgtcgctggtagtccctaccgncacaatgttgatatc

SEQ ID NO: 93608 - DNA, 489 bp, Glycine max
  Clone ID: PAT_MRT3847_55541C.1
gcaagtagaaggagatggagtttctccaaggccaagacaaaggactcccccaagcttacttagaagaccttcattttctggaagaatgaggctggctggaattgatgttccaaatgcagaaaatgatactgggaagctaggcacaaataaaatagtccaggaacctcagatgagcccttgtcaattggccaatggcaatgtaccacatatttcaagacaggttactactagagagcctcagaaggcttttgaaagaagttccaaaggattgcaaacagacagcagcaattctgcctcatcttcagtttctatccaaggatgtgaacttgctgatgatgcaacaactttcattgacatgagagaacagatgcttcctaatcatgagaaagtaaaccacattgtaggtgttgaatcatgtcctgataggagccaacctacaacttgtgcacattgtaagatggttgaaaaagtgcctaaagaaacctgtga

SEQ ID NO: 93609 - DNA, 452 bp, Glycine max
  Clone ID: PAT_MRT3847_55542C.1
atatcatccatcactctaaatacaacgctttctactatccatacgacctcatactactcaagactatctctacatccaccctccactctctagagtctcccatcgctctcacaaatttctaatccgatccttactcacatcccctaatatctggctgggtacatacccataccatcaatcaaaactatcctaataatcaccattcactaccttctcccatactataccaccccattagctacaattcatacacatgaccgatcattcacaacatattcaaatacatctacactcagtgtaacaatgtactctgtctatatttatctctatgctcccattaatcatatacgtagaaatgctgtgagtgcactaacaagcagcactctttgaagatacttcaacccttgaaacatacattttccagcggacccattctctctttgtgattttaa

SEQ ID NO: 93610 - DNA, 355 bp, Glycine max
  unsure (1)..(355): unsure at all n locations
  Clone ID: PAT_MRT3847_55543C.1
ggggtatcctttctctttttttttttggtgaaaaaaaaaacctttattcttccaaaaaaagagcataatggataaagatcggtgggtaattctttatccccttcagggcctcccccaatcggggaacagctctaaatagcccttggtattgaagccggggaaccccctcctttcaactagactaaaggcaattttcccaccagagggggggcgaggtacaactttgccacagggggagcatcctccgcaagaagttccccatgacactaaataattaaccgcacggcgggaaggagaggaaacagggctnaatagggataatcataaagcacttagcccagctgccacctcagac

SEQ ID NO: 93611 - DNA, 884 bp, Glycine max
  Clone ID: PAT_MRT3847_55544C.1
aattcggctcgagacggctgcgagaagacgacagaagggatagcagaaaataataatagtgttgcttttttcctattttcattgttcaccccgtgacgcaccattcagcaacggcaaccattgttactattacatggaataaattcaccctaaagtcggcgacgtatttgaaatttttggtaatgctaaatcacacattatacctcttctcgtaaaatacacgcaactaagtttgatagtagttgatactacttttatcagcaatttgacaacgagttcataagtattattttattcaatattttaatgtaacaaataatttcattgattcattctcatttaatagtagtattttatattatcattttaaaaccattattttaagatactcactaatcactattattactgatgcagattgtagtaacggaaacaaataaaaagagatgagttgagaatccaattattattttgtttttgacttagagaatccaaattatatttctttccattgcggttacatttaccacaatgtcccgttttcattgtcaatgcaccaaattaatgtgagcaatgtgaggatcagattctaaattactcattaatgaaatttgattttacttacccttttattttgtttttaccatgttattttgttttttcctaatagtaatctttcccttttatttttgtcttgccaacttgttatgattttcttttcttttccacttttaacagttctgagacgctgggagacagtaccaccaacctatactgcataaaaagcaaagctgagaaagaaagagagagagagagaaacaagaataggaacaaaacaacattgtccgcaaaacagagagatttaagcaacatggggtgtcccc

SEQ ID NO: 93612 - DNA, 305 bp, Glycine max
  Clone ID: PAT_MRT3847_55545C.1
ctatcaacctacacgggatctggtttttgcgcaacagtgtcagctgacgcaggattcttgtaacctgtgctatgggcattcggggagcaaacaactcagtttctgacaaggactcgagaccattcagctggctttcttcgattgagagatgaacctgttgatggtagcaaaggtcatctattgggccactctgtataacgctgggctgaagtatggcggccatccttcgtgagtgcatagtagaatgatagtttgtggttgaaccatgagaagtgcactctgaatggctgggatttgttcatctt

SEQ ID NO: 93613 - DNA, 456 bp, Glycine max
  Clone ID: PAT_MRT3847_55546C.1
ggctcgagtacagagatcactattacaatttccatttccaaggacattacatatacacagagagtgtgaaaggaagcatactagggaaacgcatccgcttccaagttacaaacttcagggaggctttatatatatatagaaagtgacaactatatatatatatatatattggaggtgaaatggtgaaggtgttgtcggtgtttctcctttgctttcattataattagggtgtttattggtgccgtctatggtgacaatgtcacctacgacgggagatccttaatcattgatggccaacataaaattctttactctggttcaattcattatacttgtagcactcctcacatgtggtctaatataaatgccaaagctaacgaaagtgtattagaagtatacaaacttatgtgtttaggaacttttacgaacctttactaggtcaatttgacttttgag

SEQ ID NO: 93614 - DNA, 454 bp, Glycine max
  Clone ID: PAT_MRT3847_55547C.1
aaaatattaacaggggctgctcagtgctcacttctaaaaactgcaactgcaaaattctctgtaactaagccaaattgtgttttcaatttcgtgaattcaggttcttttctctaaaggctaaagtgatttaagttcaaatggagcagtatgaaattctagaacagatcggcaaaggtgcatttggttctgcccttcttgtgaggcacaagcacgaaaagaaaaagtatgttcttaaaaagatccgccttgctcgtcaaactgacagaacccgtagatctgcccaccaggagatggagcttatatctaaagttcgaaatccatttattgtggagtataaagattcctgggtagaaaagggttgttttgtatgtatcatcattggctattgtgaaggaggggatatggccgaagctataaaaaaggctaatggtattaactttcctgaagagaaact

SEQ ID NO: 93615 - DNA, 2503 bp, Glycine max
  Clone ID: PAT_MRT3847_55548C.1
gttttctttggtcttttgcaacccttacagaattaaccgcttcaaattgtgcttgtgctggttccttggtggccctcgcgtgtgcgcttttgttcgtatctgctgatccatggttggctttgacaggctggtaactgacagaatcggccgcaatttgatcctctgaatttgaaaattcacctcgaattaatgagcttggtgccgagctttttatgaatccaatggccgaaaagaaatatcatgaggcgaaaccagtttggacagcccgcaaagctgcttaaccattagttatgcccaccaggagatggagcttatatctaaagttcgaaatccctttattgtcgaatataaagattctttggtagaaaagggctcaattgtatgtatcatcattggctattgtgaaggaggggatatgtgaacagtcttaaaaaagtgtaatgggcaaaaccataactaagagaaactttctaagtgacttgttcaattgctgatgaacaccgattactagcagagttacagtattcttcacgcgaaaaggcgaacataaatatatcaagggaaagaagtggcaagtgctcttggtctactatcttgacaaaagatcaagatatacgtctaggtgactttggtcttgctaaaatgttgtcatctgatgatcttgcttcctcggttgttggcactccaagttatatgtgcccagagcttcttgctgatataccctatggctctaagtcagatatctggtctttgggatgttgtatctatgaaatggctgcttacaagccagcttttaaagcttttgacatacaatcattgcttataaaaataaacaagtgtatagtatctcccatgccaactatgtattctgctgcttttcgagggcttgtcaaaagtatgttgcggaaaaatcctgagttgaggccaactgctgcagaattacttaatcatccacatcttcagccttacattcataaaattcaactaaaattaaatagccccagaagaagtacttttccattccaatggatggtggacaaatcacgtaaggagaactcgattagtagatcgggagactatctacacgctttctgaactgggcagatggttgtagggctcatgcgcaaaggacatgttgcctagtgtttctggaactgaacaagtttctcagtgttctactgaaagagcacatggattatccacttgttcaaaagagaagatctatgaactatctgtaggttgtgtccgtgaaaaatacaaaactgacaaatcaaaagccagtaagttctcaactgttgagagaacaccaagatcaagagcagttacggtttctgccactaccaaaaggcatacaatagcaacatcaaagacaacccattctggtccaaaacgtgattcacttccagcatctcatgcaccatctagaaaattttccacaccaccaagaaccagggcaagggcaacaccaaacttgtacactaatgttcttggaagtctagactctcttgatgtttccattaatgcaccgcgaattgacaagatagttgaattcccaatggctttctgcgaggatcctttttcacctatccgtggaccatcatcaacatcagcgcgctgctcttctagttcagcagggagtactgctgattgctccatcacaaaggacaagtgtacaatccaagaggacaaagttactctccccacaagtatcactgatgcttgccctgctccaaaggaaactaaatgctcttatgagcatgtcaaagattgtgtttcaagtcattcctctactgacttggatcaacgccggtttgacacatcatcgtaccagcaacgtgcggaggcattggaggggttgctggagttcagtgctaggctcctacaacaacagaggtttgatgagcttggggtgttgctaaagccattcgggcttgagaaggtttctccaagagaaacagctatttggttgaccaagagctttaaacaaactgcagtctaaggttttctttttcatgcatgcatatgattatttgctaactgatagtgtacataacgttgtacatttgacgataaaatagtgaataatgacttttattattggtgttagcattttccttgagatgcacagtgtactgcacaacgggcatgcatcatatagaataatactacacatatctcttacgtatcaactatcatctataaggttttcacactattataaccggcctaccttaggctttgttatcattgaagcaggtgatgtacaccaaggtgttatgctccaagcattgttccttcaggttttgtccttagcttcgttatgggccgatttcggactcatcatattcgggaaaagattattttccaagatttcaattgcttttgttgtaaaaaagttgtttgcaaaataaccaaaatgtaactcatgaatcgtccttaggtctgggaaagaacttcattcaggaatgagttttctataatacaatggaaaatacagttgcat

SEQ ID NO: 93616 - DNA, 175 bp, Glycine max
  Clone ID: PAT_MRT3847_55549C.1
cgggacgggccctgtagcggagcattaagcccacccgctgtgagaggtactctcagtgtggcccgtacagttggcagcgcttctaagcaccggtacctgggattacttgactgcctttctcggcacgttcgtcagatatccgcgtcaagctgtaaatcctgggctgcctttaggg

SEQ ID NO: 93617 - DNA, 398 bp, Glycine max
  unsure (1)..(398): unsure at all n locations
  Clone ID: PAT_MRT3847_5554C.1
cttctggggggtttatgctttcttcaggaataggaatgagttgatttcaactttgaagaccaaaatattatggtctttcgctcctccaagttatgatgattcttgccttctcatgtttgtctttgtgctgctgctgaaatggttggcacatgacaggtgatgagttctgatgctggtttaaactgaagaactttaagggtttttctcacaaatggaggtgctgtgggtcacaaggcatggaagaatgtttgaggggagggtgttgttgctcttggttttgttcttgtggattcccacacaggtggtggtgggaaggacaagagctaccatcacaaactctactacttcttcggcaccaagagttttgagaagtggagtacntgttactcttaattcta

SEQ ID NO: 93618 - DNA, 796 bp, Glycine max
  unsure (1)..(796): unsure at all n locations
  Clone ID: PAT_MRT3847_55550C.1
aaaattctctgtaactaagccaaattgtgttttcaatttcgtgaattcaggttcttttctctaagtaagagttcattgcaaatcctgctcttgttgtactatctgaatatatagcctttgccttgaaagaggctaaagtgataggttcaaatggagcagtatgaaattctagaacagattggcaaaggtgcatttggttctgcccttcttgtgaggcacaagcacgaaaagaaaaagtatgtccttaaaaagatccgccttgctcgtcaaactgacagaaccctagatctgcccaccaggagatggagcttatatctaaagttcgaaatccatttattgtggaatataaagattcctgggtagaaaagggttgttttgtatgtatcatcattggctattgtgaagcagggatatggccgaagctataaaaaaggctaatggtattaactttcctgaagagaaactttgtaagtggcttgttcaattgctgatggcacttgattatttgcatggaaatcatattcttcatcgtgatgtcaagtgctcaaatatattcttgacaaaagatcaagatatacgtctaggtgacctttggtcttgctaaaatgttgtcatctggatgatcttgcttcctcgggttgttggcactccaagttatatgtgcccagagcttcttgctgatataccctatggcntctaagtcagataatctggtcttttgggaaggttgnatctatgaaatgggctgcttacaagccagcttttaaagcttttgacatacaatcattgcttataa

SEQ ID NO: 93619 - DNA, 226 bp, Glycine max
  Clone ID: PAT_MRT3847_55551C.1
tttttgttttgtgtgagaaaaggaggaaacacagatctatatatatctatgtaacccactaaatgaagcttgattttttgtattgacagactacattgaactggctcattattcttttcctaagagaaaattgcgttttctccgagagagctgaaggaacgtatcagcacaaccacaacgttaatctcaaagcccaaacgccgttgggcatgaatccatgccaaag

SEQ ID NO: 93620 - DNA, 411 bp, Glycine max
  Clone ID: PAT_MRT3847_55552C.1
cacacaaacgctgtcatcacggcttcgaaacggaggcagcgtccttcacggcggcggagccgtcgttgaccgcgacggcggactgcaccgtcagcacggacatgctcggagacgacggcccgtcaccagcggggttggcggctgtcggaatctgggcggcggagtgctcgtcgaaggagggaaaaacgacattagcagtagcgtcgtcgttgttgttggacggcgtcgtttcgtcggggggcttgatgtcgttgggggtgttagggtcccataataatggcttgttatggttgagatctgtccaagagcaggaagagagcatttgttcgagaaagtcgtcgtgagaagttgaatcaaagtgagcaagttggtgttgttgttgttggtgttgttgttgttgttggtggtggt

SEQ ID NO: 93621 - DNA, 2160 bp, Glycine max
  Clone ID: PAT_MRT3847_55553C.1
aattagctcgagggacggttcatcttctcctatttaaaaatatccactccaaccaaacttaaaaatagagtttccatacactcttgcacagaaacaaaactcgcttccgagttccgatcctcaagacagaaacccgagaacttctcataacacaatgctctttccgttagttccacttcctctcccactctgactcagttcccatttaaaagcaaaccctctcaaatcaaagactctctctaacccttgtcctttatcattatcatcacattcataactctttcacaatttggatatataattatgcaaccctgtagcagagaaatgcaaggcctcaactccctcttaaattcttcatcccaaatctcccttcaagaccttcacaatcacaccactaaccagatccaaaattcacacatgaaccaccaacaccaccaccaacaacaacaacaacaccaacaacaacaacaccaacttgctcactttgattcaacttctcacgacgactttctcgaacaaatgctctcttcctgctcttggacagatctcaaccataacaagccattattatgggaccctaacaccacccaacgacatcaggccccccgacgaaacgacgccgtccaacaacaacaacgacgctactactaatgtcgcatctttttcctccttcgatgagcactccaccttagcctccaagttccgcaaccaccagatcagctccaataacaacgcgcccaaaaacgccgcggcggcggctctcatgctccaacaccaactcctcagagactctggtcttctcaacatgcctctttccttgcccggaaacgacgtcgtggttgacgcttctaccttcgaatcccccaatccgagtggtaaagcttcagtccaaactctctacaacgggttcgccggatctctgcatggcgtaggccaatcctcgaaccagactcaacattttcaacaccctcagggaagttcgaatccgatgcaagggcaaaattttggggcggtgccagctggtggtggtagcgcgacgaatcaggctccagcgagtggcgctgccgcgggtggcgcgccggctcagccgaggcagagggttcgagcgaggagaggtcaagccacggacccacacagcatcgctgaaaggttacgtagggagagaatcgccgagagaatgaaggccctacaagaactggttcccaatgccaacaagacagacaaggcatccatgctagatgagatcatcgattacgtgaagttcctgcagctccaagtcaaggttctgagcatgagcagattgggcggtgctgctgctgtcgctccccttgttgctgatatgtcctctgagggaggcggagaatgcatccaagccaacggcaagagtaacggcggtggggcccacgctccaaacaccaactccagccaaacgacagcgacaacaacctcaaacgatagcctaacgatgtcggagcaccaggtagcgaaactaatggaagaagacatgggttccgccatgcagtaccttcaagggaagggttgcctcatgccaatcccttgccacgcaatctcgccacgtgtcacaccaggaacgttaccgttaacgtccccttgatcaatgccgccgccgccgcccagattccgacagccgccaaccccgctggtgacgggccgtcgtctccgagcatgtccgtgctgacggtgcagtccgccgtcgcggtcaacgacggctccgccgccgtgaaggacgctgcctccgtttcgaagccgtgatgacagcgtttgtgtgactttataggaaaaaaaaaagaaaaaaacataaagtggacaaaggacagaaaatgacgtgtgtttttttaaaaaaggagccgttaaagtctacgaaaataaggcgtcagggatacggaggactcgacgacgccgtatttacctagactttgttggctgatgatgctacctctgaacaaaccaatcacaaactccaccatgccaaatgataaaaaaactccaccatgacaattacctactttgtttattattattattattattattattattattaactgtcgcttttggtttcttttgttcattgttttttcttgaaaaaaaattagtggatttcttccctttaaaaaaaaaaaaaaaaaaaacccaaaa

SEQ ID NO: 93622 - DNA, 1088 bp, Glycine max
  unsure (1)..(1088): unsure at all n locations
  Clone ID: PAT_MRT3847_55554C.1
ccatcatacacacttgcaaaaaacaaactcgcctcgcgtctccgatcctcaaggccgaacccgaaaacttctcataccacaatgctctttccgttgtttccacttcctctcccactctgagtcagttcccatttaaaaacaaagactccctctaacccttgtcctcatcatcatcatcgcatttttcactctttcgtaattttacattgatatataattatgcaaccctgtagcagagaaatgcaaggcctcaactccctcttaaactcttcctcccaaatctccctccaagaccttcaaaatcacaccactaaccagatccaaaattcacacatgaaccaccaacaccaacttgctcactttgattcaacttctcacgacgactttctcgaacaaatgctctcttcctgctcttggacagacctcaacccaaacaagcccttattatgggaccctaacaccctcaacgacatcaagccccccgacgaaacgacgccgtccaacaacaacaacgacgctactactaatgtcgcatctttttcctccttcgatgagcactccaccttagcctccaagttccgcaaccaccagatcagctccaataacaacgcgcccaaaaacgccgcggcggcggctctcatgctccaacaccaactcctcagagactctggtcttctcaacatgcctctttccttgcccggaaacgacgtcgtggttgacgcttctaccttcgaatcccccaatccggtaacataccgtaaatttctctttttctttctaaatttgtatacctaatttagttttttaattttgtcagagtggtaaagcttcagtccaaactctctacaacgggttcgccggatctctgcatggcgtaggccaatcctcgaaccagactcaacattttcaacaccctcagggaagttcgaatccgatgcaagggcaaaattttggggcggtgccagctggtggtggtagcgcgacgaatcangctccagcgagtggcgctgccgcgggtggcgcgccgggctcaccgaggcagagggttcgagcgaggagaggtcaagccacggacccacacagcatcg

SEQ ID NO: 93623 - DNA, 372 bp, Glycine max
  Clone ID: PAT_MRT3847_55555C.1
atccttttatattactatagtttaagaaaggttcaccaattgtttcaggtgggttgaaatgatggctcctgttttctcaagagctgcttggcgttgcatttggtatatgatccaggtgcacccttctctcatttaatgttactgctgaagaattactataaacattgctttgctaagattactttatttattcaccattcatggtttactttattttacagaatgacttgatccatgcatggggtctagatatgcagctaggctactgtgctcaggcatgttaaaagctccttaatttctcgtttcagtttgatgagttccatttctacatgttgaatattcccctgatgccttaatcctcgttaatttttt

SEQ ID NO: 93624 - DNA, 391 bp, Glycine max
  Clone ID: PAT_MRT3847_55556C.1
aattcggctcgaggataaagataggaacagcagtggcccaacaaagccgcattaatatgaaacaaacaaacactaatgtttcacttgtcgaacagtagtagcaagtggatatagagataaggaagaattgagcaccaaaagcatcagttacccatggcaccccacaaaacttttttttttccttttctttaaagaatatgcgatataggcggagaacagtgtggctctatctcaaagtgaggttgtcacttgtcacagtcatgggaaaagttggagtttagggtagctgcgtacttgccttagatacacattgtaagggtagggcctcagccagctcttcattttttttttcttagttttgaatgatactttcgttgtttgttttcccctt

SEQ ID NO: 93625 - DNA, 502 bp, Glycine max
  Clone ID: PAT_MRT3847_55557C.1
ggcgagatcttatttaaaagtattttttcagaacattttgttcccaagtctcaacacatataaaacaatgggttttcgtttacctggtatcaaaaaagcatcattaaaccaagcatcttcaaaagctgtggacgtgccaaagggctaccttccagtctatgttggagagaaaatgaagtgatttgtgatccccttatcatacttgaagcaaacttcatttcaagacatgctcagtctatccgatgaagaatttgggtataaacgtccaatgggtggtcttatgattccttgtggagaaaatgtgttcttagatatcacttctcgatcgcttgaattaataggttctaaccctacaatgataagactgacatagacatatagttcttgacgaaatttctgtaattcaatttctcactttgaaaatattttttctttttttgttatcatacttaggcaagtgtagaaatgttcagccaaatatgaagtttatgaccattaccat

SEQ ID NO: 93626 - DNA, 116 bp, Glycine max
  Clone ID: PAT_MRT3847_55558C.1
gaaaatcatctcttcaatggcttccctcatgagcaccatcctcatgcaaaggtcttcgtctacttcacatgctgctggcatgtttttccctacatgagaagtcaccactattgaat

SEQ ID NO: 93627 - DNA, 384 bp, Glycine max
  Clone ID: PAT_MRT3847_55559C.1
ggctcgagctatctccagatcttgtctactgcactgctgaaacctcagggggatacattatcccagcgagaacgtgacctctggcatgggctcagcagggtggcgccgtaccagaacaatcatgtacatggtgactatggcttagagctagcgtgcattgtctagctaggtctaccaagtcgaatgaccaagaatggtcccttcgaatgacgagctgcatggacaacacaactactggaattgagtgctaatagtataggaacctgacaattgggatacactgtgctgcattgccactgacattcatacgaatgccacagattccaacttgccaatcgcagtttcactgacctataagattcgattgggaaatagttcacttgg

SEQ ID NO: 93628 - DNA, 389 bp, Glycine max
  Clone ID: PAT_MRT3847_5555C.1
cccactcgtccgaccacgcattccatttcttatcatctgaaatttatttcccaatcatggagtattcatcataaattaacactcacttggatctcatcattaatctccacactcttcaccaacaacttccacaaataacagctccaaaacaatttttacacatacgatttgtaggtgaagaaatcttctgtaaaacaagagtcagcaggtgccttggcggatgaactgaatcggttgagtgcagaaaacaagaatttaaccgaaatgctcacagagatgtgtgagaactacaacactttgcgaagcaatttgatggaatacatgatgaagaatcctgataaggagctcagctcatcaaggaaaaggaagtcttcaatcctcaacaacaa

SEQ ID NO: 93629 - DNA, 993 bp, Glycine max
  unsure (1)..(993): unsure at all n locations
  Clone ID: PAT_MRT3847_55560C.1
gttaaggctcttaaagtctaaaaggcaagttctagtttgttgggtagtttattagaaacacaatgctgatgattataatacagtctaatgacattttgtttggtgactgtggctagcttgctgtgtttaatatctaaagattacttctccattcgtgcatgctgctcaccactatgctgaagtgatgcgagctcattgcagggtgctaaatcttccatgtataaatattactatgtgcttgcattaactgattgatttactccaaaatttaggttctaatgattataaaaggattgtttggaaggtacgaaagatggaaccctgttcatccaactcatggagccttttggggaatgggtgtgggcgttggttgtggtgtcggatggggtcctgggtttggccctgaagtgataggctatgttggagctggttgtggcattggattcaatgtaggcatcacttttgctggtgttggagttggcctacctgctaattttatctttgaaggtccatataatggggttagctggattggaaatttaccttgtatctctgacttgcaaagagaagccaatggaaaattgtttgaatttaggcaaaagcatttatcaataaagggaattaacttctttgacaagaagaacagcttgcctttgctcacttctgccagtaaaagtatacaagcattccgtaaccaaatattcagctctcataaagggaaagattgatgacttccaccactgtcagttttgtgcttacattttttgacacattttgtattttgttgggtcggaggcgaagctcttgttttcacagttaaccagataatctattattgttctgctctatctctccccacatggccacattcaaattcagttgtattttatagtcttgttacatgtgtttcttcagaaaatctcagccaaattttgtaaccaatatattaaaagcatatttatannaggaagaaataagatttcctactgtggg

SEQ ID NO: 93630 - DNA, 414 bp, Glycine max
  unsure (1)..(414): unsure at all n locations
  Clone ID: PAT_MRT3847_55561C.1
ggttttcttttttttatagctatccatataacaatttctcccaccatactcccttcaaataaagagaagaaaagcaaagagatcgaaattcaaatctaaacatactggaacacaaactacattatttatgcaaacactaattaacatttattcaaggaggggggcctcccactctcacatgtgctatacaatatcttttcatccaataggggcaaaaaggagaaaaagacacacgtntgaaaacaaaggcaggcacgtgccccgacctgtaaccggtgcagtatcatcaatgagttattcattgattctgtgtttgattaagaatatggaaaatagaaaagaaatttttgaattaatatagagaataaaagttgtgaaatctagggccaaactattttttcttctcaatttctc

SEQ ID NO: 93631 - DNA, 687 bp, Glycine max
  Clone ID: PAT_MRT3847_55562C.1
agacctccccagcagcaaaaccaacaacaacaaaataattatgatcttttcttggagaccttcaggaaagtagaggtgaacatacctctactagatgcccttaagaaaattcaaagatatgccaagtttctaaaggagttgtgcacccacaaaaggaagctcaaaggcaatggaaggattagcatgggcagaaatgtatcagcattgataggtaaatttgataccttgcattattgggaacaaaaaatttgagaatgccatggtagatctaggagcatcagttagtgtcatgcctttgtccattttcaattctttatcttttggacctttgcactctgcagatgtggtgattcatttggcaaatagaagtgttgcttaccccgcaggtttcatagaggatgtattggttcgggttggtgaacttatttttcctgctaatttctatgttcttgatatggaagagggattttcccatggttcagttccaattattttaggcaggccatttatgaaaatagcccgaaccaagatagatgtttatgctgacacattgtctatggaatttggtgatattgtagtccattttaacattgttgatgccatgaaacatccatatgaggatcattctatttttcgtgctaagatacttgatcagatttgatgaactactgtaccatctgattagga

SEQ ID NO: 93632 - DNA, 433 bp, Glycine max
  Clone ID: PAT_MRT3847_55563C.1
aaaacaacccccgggggtttttttagcaaatcgatcatcacaatttcccacaaaccggcctaaggttacatgcctacctgacccaacaattattaacgggccccccaccccaaatcctcgatcaaagagttgaaatcggtggaaaaaaaaccttcttccttcacaaaacgctttgccatttgagcaagcctttttgctctggtcctaatttccttgggctcctttccaaccatgaacctcctcacagcctttttaaccgggttcttttttacaggggcccttcccattatcccaatccacgtttgaacccctaccctccccccaattttaactatggccggcaaaaacttaacattggaaaattgctttgggaacattggccatgtcaccattgggacccctgcacaccccccctccaatactgagttccacc

SEQ ID NO: 93633 - DNA, 997 bp, Glycine max
  Clone ID: PAT_MRT3847_55564C.1
ggaatggatgccataaaactggagggagggtcgccttcgagaattgttgcagcaaaggctattgttgaggctggaattgctgtcatgggccatgtaggccttactccccaggccattagtgttttaggggggtttagacctcaaggaaagaatgttgctagtgctgtcaaggttgtagagacggcattggctttacaagaagcagggtgcttttctgttgttctagagtgtgtgcctgcaccagttgcggcttgaaccacggcatcccttccaatacctacaattggcattgggtctggacacttttgcagtggacaagtgctagtttaccatgatctgcttggtatgctacaacaccctcaccatgcaaaggttactccaaaattttgtaagcagtatgcacgtgtaggagatgtcatcaataaagccttactggagtataaggaggacgtgataaatggttcatttcctgatgctcaccatagtccatacaaaatcagcaaaacagatgcagatgttttctcaactgagttgcaaaggttaggtctagacaaggcagcatctgcagcatctgaagcagttcagaagatggatacaaccaaatcaactagtgaagggaaacaaacaaaataataatatagtatagctagagattcacccttttttcgctcgtaggtcccaatgtgataatttagcatgctacaaaattaagttacataattaaatagaagttgagcagttgactaatggatagatagacaccattttcgtagggaaggccacttcaatttcaattgtttttcctcttatccttttgatcatcaatgccaatgcaaaaaatttcttaatgttacagaaacagcatctttgttgtccaacattaggcatggaatcttcaaagtaaccctcttttgaagcattgtaaaggagcaaaatgtgtgaaactagttgattttattgttattatttatgcaattcactactgatgtaagccccc

SEQ ID NO: 93634 - DNA, 205 bp, Glycine max
  Clone ID: PAT_MRT3847_55565C.1
ccacgcatcctctctattcttcaatttaactttacgtctcacatctctctatctctctctctgatgtaataacaaagctctctctgctatttatgatcactctctgacactcttctgacaccaaatcaaatactaccatctctaccccttcttctctgattgtaaagattcttatcttcttagattattattttccatccaatca

SEQ ID NO: 93635 - DNA, 2282 bp, Glycine max
  Clone ID: PAT_MRT3847_55566C.1
taatttgagagaaatttcattcattttacccttttaattcatttaattttcttcttctataacaatttattaaaaagtttattcaaacttacctcttagtcaatatcaatttgagaaaatctagtttctattctatccttctcctttgtcaatacttaaatccccataacctaaacaagtttatcaattatccagttttattcattcccattttgagggcgagccctggtgcagcgataaagttgtgccttggtgacttgttggtcatgggttcgaatccgaaaacagcctctttgcatatgcaagggtaaggctgcgtacaatatctctcccctataccttcgcatagcgaagagcctccgggcaatggggtacgaaatttttttattcattcccattttgatggttcggttcagaggtaaacttccatgacatgttacaaggccctggaaaaaactgaagccaagcaagacaaactgcctttcaggttcacagttcactagacatggagaagccatcttcgagatgatggattcctcaattcaaaattggtgccatcattgtctaacatgtgtgcatttctctactctttaactataatgcatttacaattggtttttatatcatctgcgtagctatccacctgagcaaaaaaacagaaaatagcctacacataatgtggcttctaatttgctgctgatctcactagcccttgcttggggggaacacccaaatcattcaataatttcttgcataactgtttatacacagaaccatctccatacgacttccttaattctactacatacaatgatggacttatttcaaacacctctactaccactgagaggcagccgagagttttgtgcaccttgttctctcgcatcactttcaatttgccatttttcttctcgactctaaattccatttctgtcacagtatcttcaatcctatcgatcagatctttaaccgaaagaattgatgcaaatcttatctttctctcagaaacatcctctttctcaaaaaagccagagaggtctaagcatgaagacatccctatcaattgaaatgcattgattagggttggtgatcctgaattcctctgttctgcttcatttggttcttcatgggaggaaaaggcttcattgtcaacatgtacatcctcatcctcaggatttgctggaatataacccttcttgaaccatgggtcttctttaatcccagccattgttatccgtgtttcggggttaggatcaagaattctccttatcatattttgtgcacccggtgttagccattttggtatctgaacatctcctttaaaaatcttctgatagagaactacaagatttctatcgtcaaaaggtaagtgtcctgttaggatcacatacaatataacaccacatgaccatgtatctgatgttgcaccgtcatagcccttattagcaagtacctctggtgcaacataattgggacttccacaagttgtatgcagcaatccatcttccctaagatgctggggtaaagcactaagaccaaaatcagttattttgatgttccctttgttatccactagtacattctcaagcttgagatccctgtggaagacacctttagtgtggcagtagctcaccccatcaattaactgttggaacagctttctacattctccttcgatgtgtttacctttggatgcaattatgtcaaataactcccctccattcacgtactcaagtaccatataaatttttgttttgctagccaagacctcatataatctaacaacgttgggatgccggaggagctttaaggtcgctatttccctctttatctgattggtgatgttgagatcaacgatcttattcttctcaatgatcttaacagcaaaagcttggccagaatcagtgttcctagcgaacttgactttgccaaaattgccctcaccaagagtcctacccaactcgtatttcccaagtcgcattccttctctctcgctcttcttcttcttcttcacaaggtttataatcaccatttttcttcttcttcttcttctttcactcgttcccccgtatttcgtttacgtataacgcgtggcacagtagatgaaatgaaagaacagaaggagaatattatgcaatttcccaaaacaggaaaaaaccgaaagaagaattgaaatgcgcaaagtggccaagcaaggattaggaatggatgaagatgaggaaacacgcccatcaaatttatgaaactcggtcattatttatccggttgaggcaatgggtcaa

SEQ ID NO: 93636 - DNA, 326 bp, Glycine max
  Clone ID: PAT_MRT3847_55567C.1
aaccagaaaaccttgttaagctttgggtgattgggcaaaaaaaacagcttcttggaatttacaagggccggaggggtgttttttaaggggcctaggaaccaaaaaaaaagcggggtggtgacaaagaaaaattgcatttgcccattccatttgtttttgaaagagggaaacctcaacccagtttccaagcgttctggaagaggtgttgatccataagggggggcccattttccaagataaagggggaagggcgacactataccccaggtttttccttttccatttttttctacaggggttggctttttatttaaaaggggcaaatt

SEQ ID NO: 93637 - DNA, 817 bp, Glycine max
  unsure (1)..(817): unsure at all n locations
  Clone ID: PAT_MRT3847_55568C.1
gtttggnttttccccgcccaaaaaacccttttttaaccaagcaccgttaatcccccaaccagaaggcccaattatcaatcctcaaacccggttaagccccnccgtcataatcgtcatcgtcgcctccggcatngtcattgtcgtaatgccnatgccgnttggggttaggntngggcccccgcccgggccgttaggctcggggcgttggcgggggccgagctgattacgcggccagtcgtacgagaggtgcccttgctctccgcactcgaagcagcgatcggtgtcgcggtagacgcgcttgcggatgaactcgggggcgcggccgttgtcgccggcgatggagccggcgagggtgcggccgttgagcaccttcccgtccatctgcgcggccgcatcgtgcgcgtcgtggcgcgacacgaactggacgaaggccacgccgcggctgaggcgcgtgtggcggtccttgaggacggtgacgcgcgcgacgcggccgaaggtggagaagagcgtgtggaggtcggagttcgtgagggagtagtcgatgttcgaaacgtacaacgttgatttcgacggagccaaggaagaagacgaagatcccttgttgttgttggatttgggatttggattgtgttgtagggtttgggtttgagtttgagtttgggtagggttgacgctgctatagcggtagtagaaaacgtcgtcgtcttcatcgctatcactatttttctttttcgctttgcttttcgacatgatgaatgaacgctcctttgtctttcgactgagcggacgcgtggcctcttccgctcctcactccttc

SEQ ID NO: 93638 - DNA, 296 bp, Glycine max
  Clone ID: PAT_MRT3847_55569C.1
tgcactaactgagtcaggtccatctccgtcgtcgttcatcacactgttgcagctgttagtttccttcagtgtggcggacacttacgttttggccacaccgaaacgcatccgttccgatgacctggactgcagcgacgcgattaaactgctgatgcaccatggctacgcaatctctgcagtcgcgctacctaccacacagtcacagaacacatggctacgcgatctgtgaaattccgtaatgtggcggataccctaatgaagtattgttacgcaatccgtgagtttctgtgacttct

SEQ ID NO: 93639 - DNA, 591 bp, Glycine max
  Clone ID: PAT_MRT3847_5556C.1
cccggatttccgggtcggaccaacccttcccttttaccttttcttctttaactaacttaaccgatttgatgtattgagggggtccacattcaattagcacaatcatcctttaatttctaatttttccccacaatataacagatttccggatggtaaagccttcaatactatgcaaggataattggtgaaactcccccatttcttcttccttatcctcccattgctggcccttaggatctccttcctccttttcttacataatcattaatctgaattgactatttttgcacacatgtgtaggattatacttctcctcgcatgtgagacaccctcccttccttatctttttatttacctctgcaggcgacaaattgtggaacgttcttctacctttccaaccacttgaccctgtttttgtagcattctgaacgacagccaccttattgtttgctggctgccaatcccttaccaatttctgtcccgaatgaacgtttttctgcagattactccctttaccattacccacgggtaacttccctgaaattctgctcttatcttccactcttcgagccttaaccatgacttccatca

SEQ ID NO: 93640 - DNA, 397 bp, Glycine max
  Clone ID: PAT_MRT3847_55570C.1
ggtgtggtgagtaactactaatcagtgcatgtttatatcatactttgcacacaccaatcattactttagatattatacactaaatttaatactcaagaacatgtacaaatcaccttgatgtggtgtttgaacacaatattatgtcattaaaactttagaaaggttacgtttctattgggcacactccatggtttagttcaccactaaattacagcatttggtgcaggagtacttgcagcctacaaatgtaatactagagcaaatatttggagacccagaaatccctgagttttctcctcgcaatgtaattccaagattgatttctcggtcattagctgttattacagcaactattatagcagcaatgcttccttttttaggggacatgaactcgcta

SEQ ID NO: 93641 - DNA, 358 bp, Glycine max
  unsure (1)..(358): unsure at all n locations
  Clone ID: PAT_MRT3847_55571C.1
gggagggtcctaaatagaatttcttccgtttcccccccccnnaaaaaancccaacacaaaatttttcaatgaaaaaatggtgccctggaggtttccactggtccatcccacaagacatttttttgggtaaaaagaaaagaactcccttttatctttttatcctaggggcagattttgaacatcctttagtatttggtggaggggagctacaatcacatttttttcttcatttgcaagccaaaacacaatttgaagcattgactgcacctttttttttttttagaagttcccgaaaaaaggggggaaagaattttagggttggaagaagggggaaaaattgaccaaaaaaaagtggtgc

SEQ ID NO: 93642 - DNA, 294 bp, Glycine max
  unsure (1)..(294): unsure at all n locations
  Clone ID: PAT_MRT3847_55572C.1
gaaccggtccgcaaaacccttttcgacccacgccgccgcattctttcacaccaccacccgcancaaaaaaggggggaattttaagggnnaagcccatttttacacccaaatatccaaactccaaatcatattaaaacaatgggtgatctctctcttcaatttcattgcaccaccacgcttaaaaaaaaagtccttttatcacgttgaggacacaaaaatttcagggtgaaagttgctcttcctagacaacaaaaagccaaaagttggatcaaaaacaattgtggggacccccat

SEQ ID NO: 93643 - DNA, 2696 bp, Glycine max
  Clone ID: PAT_MRT3847_55573C.1
aaagaaatgatatttgtattgaagcaataataaaccaatgacaacagagttggggtagaactagaaagcatccctagcaaaagtcaaggttggccccttgcgtcaatcgccggcttcgaaatcgctgtcaattatggcatcacactgtgtaatggccgtgacgccctcaacccctcttctctccttcctcgaacgcctccaagaaacagccttcgaaaccttcgcccattccaacttcgatcccaaaacctacgtggacatgcctctcaagtccgccctcacggttaccgaggacgcgttccagaagcttccgaggaacgccaacgggtccgtgccggttgaggatttgaagcgtttcatagaggcctactttgaaggtgcaggggatgatctggtgtaccgggacccacaggatttcgttcccgagccggagggtttcttgcccaaggtgaaccaccctcaggttagggcctgggccttgcaggtccattcactttggaaaaacttgagccggaaaatatccggtgcggtgaaggcacagccagacttacatacgctgctccctctccctggttcggttgtcattcccgggtcgcgttttcgcgaggtttattactgggattcctattgggttattaggggcctgctggccagtcaaatgcatgacacagctaaggctattgtcaccaatctcatttccttgatagataaatatggctttgttcttaatggggctagagcttactacactaacaggagccagcctccccttttaagcgccatgatttatgagatatacaatagcacgggtgacgtggaattagttaaaagatctctacctgccttactgaaagaatatgaattttggaattcagatatacataaactgaccattttggatgctcaaggttgcactcataccttaaatcgttattatgcaaagtgggacaaacccaggccggaatcgtccataatggacaaggcatctgcttccaacttctccagtgtttcagaaaaacagcagttttaccgtgaactggcatcagctgctgaatcaggatgggatttcagcaccagatggatgagaaatccacctaatttcacaacattggctacaacatctgtaatacctgttgatttgaacgcatttctactcgggatggaacttaatattgccttatttgcaaaagttactggagataatagcactgctgaacggttcctggaaaattctgatcttagaaagaaggcaatggactctattttctggaatgcaaacaagaaacagtggcttgattactggctcagcagtacatgtgaggaggttcatgtttggaaaaacgagcatcagaatcaaaatgtatttgcttccaattttgttcctttgtggatgaagccattttactcagatacttcgcttgtgagtagtgttgttgaaagtctcaaaacatctggcctgctccgtgatgctggagttgcaacttctttgactgattcagggcaacagtgggactttccaaatgggtgggcgccgcttcaacacatgctagtggaaggactgctaaaatcaggattgaaagaagcaaggttattggctgaggaaattgccatcagatgggtcacaaccaattatattgtttataagaaaacaggtgtaatgcatgaaaagtttgacgtggagcattgtggagaatttggaggtgggggcgaatatgtaccccagactggttttggctggtcaaatggagttgtgttggcattcttggaggagtttggatggcctgaagatcggaacatagaatgctgatgtgcccagagatagaaaggtggaaaaaatttggtacgctgcaagaatttattcatgaaagctatttgcatgaggggttgaagaaaagtagttaataaatgcgtcaaaagccacttgttaaagcctataatgaaagttgagatgatttgagtttattactttatttgccatttgatgttttacttggaagtatgttcagaaaattcaacaaaagtgatggatgtcatcacatatcaatgctttggcacaaattgatgcataattggaccatttgatgtgagttgcttaatatactggcgtctgacgggattaaacacgatccaaatgtgacacgtatattgggcggcgctaacaccgtgatacaagactgtattgggcttatattgtttgttacaaaaaaaaaaaaaaaaaaaaaaaaaaaaaaaaaaaaaaaaaaaaaaaaaaaaaaaaaaaaaaaaaaaaaaaaataaaagagcaaaaaaaaaaaaaaaaaacacacaaacaaagaaaaaaaaagaataaaaaaaaaaaacggggggggccgttttaagggaccaaattttagtacccggggtttgcaaaaaaaaattttttttttggggcccccaaatttaatttccggggccggtttttaaaaacgggggactgggaaaaacccggggttacccaaattaattccctttgaaaaaaatccccttttcccaaggtggggaaaaacaaaaaggccccccccaatccccctttccaaaaatttgccccccctaatgggcaatgggacccccccttttaggggccaattaacgggggggggggggggggttcccccaaggggaccctttatatttccagggccctttggccccggtcttttggttttttcccttccttt

SEQ ID NO: 93644 - DNA, 756 bp, Glycine max
  unsure (1)..(756): unsure at all n locations
  Clone ID: PAT_MRT3847_55574C.1
cccgctcgacccacgcgtccgcctacaaagtcaaggttggccccttgcgtcaatcgccggcttcgaaatcgctgtcaattatgggtttgttctcttcttcttcttcttcatgttatgtgtttgattaattaccaaaataaaaaagtttccaaacaatggccgagtacgctcaaaattataaagtgctcatcctcacatggctctcactaacactagtcactgtaacagcatcacactgtgtaatggccgtgacgccctcaacccctcttctctccttcctcgaacgcctccaagaaacagccttcgaaaccttcgcccattccaacttcgatcccaaaacctacgtggacatgcctctcaagtccgccctcacggttaccgaggacgcgttccagaagcttccgaggaacgccaacgggtccgtgccggttgaggatttgaagcgtttcatagaggcctactttgaaggtgcaggggatgatctggtgtaccgggacccacaggatttcgttcccgagccggagggtttcttgcccaaggtgaaccaccctcaggttagggcctgngccttgcaggtccattcactttggaaaaacttgagccggaaaatatcccgtgcggtgaaagcacagccagacttacatacgctgctccctctncctgggttcgttgtcattcccgggtcgcgttttcgcgagggttattacctggatttcctattggttattaggggcctgctggccagtcaaatgcatg

SEQ ID NO: 93645 - DNA, 195 bp, Glycine max
  Clone ID: PAT_MRT3847_55575C.1
aggcgtgcgaacaggtgcgagaggaccaccgacggatgatcgtgagcacgaggacaggccacgttaaagttgttctagtacagagaaaaggagacacattagctactgtgttgcaactgttgcagtggccattaagggaacctcttgctgtgagacaatggtatcgcacatggcaccttggactgctgaagaaga

SEQ ID NO: 93646 - DNA, 282 bp, Glycine max
  Clone ID: PAT_MRT3847_55576C.1
ttccccattacacttcatgtagtgtcttaccttactggacttcgacagagtttttagtggctacactttatattagtcttactgaggcttgtcttgtacaagactcactctacgtcacattactttgctcacaaataatttatgcatactttgtgaatcatgatgcagattattgcaaagttaatgatctgggtgtaatcttattgtctgtttgtaaactcatccaatttaatatggtgtatagatgtacatacaataaggtaaaaaaaaaaaaaaaaaaaa

SEQ ID NO: 93647 - DNA, 385 bp, Glycine max
  Clone ID: PAT_MRT3847_55577C.1
gtcattaataatttaaacctagaaagataaaaacgaagaactggaagcccaagaaatccaacaagaaggaagagcgcaaaaggtggagcgaacgtaaggagctagaaaaagatggcaaaggaaggaagggggggggagaaaaagaaacaaaagagaaaagaatagcacgggaaggagctgagggatgagagggattgaaggcaacggaaggcgaggctaagacaaaagaagccggggaccagaaaaaaaaggacgcaagcggaccatttaggaaaaaaaggaaagtcccgacaggcgaagacttggaaccgatgaggcggacggcagtaaaacgaagggccgatgagaccaaaagcgtgaggacccggctacaaatgggcacaag

SEQ ID NO: 93648 - DNA, 1016 bp, Glycine max
  Clone ID: PAT_MRT3847_55578C.1
gcggctgcgctgctgctaatagcgcgttgcatctgctacctatatacatattttcgccaaaccgccgattccgttgagcgtttctaccgtagcgctcagccgtgacaatctgtgcaagaactgcaagagacctggtcattatgcaagagaatgccctaatgtcgcaatttgccacaactgtggcctccctgggcatattgcttctgaatgtacgacaaagtcactgtgctggaactgtaaagaacctggccacatggccagcagttgtccaaatgagggtatttgccacacctgtggtaaagctggacaccgtgctagggaatgctcagcccctccaatgcctccaggggacttaaggttgtgcaacaactgttataagcaggggcacattgcagctgaatgtacgaatgagaaggcatgcaacaactgtaggaagacaggccacttggcacgtgattgtcctaatgatccaatttgtaatttgtgcaatgtttctgggcatgtggctagacagtgtccgaaagccaatgttcttggagatcgcagcggtggtggcggtggtgctcgtggtggtggcggtggtggctatagagatgttgtttgcaggaactgccagcaattaggtcacatgagtagggattgcatgggccccttgatgatttgccacaattgtggaggtcgtggtcacctggcatatgagtgcccttcgggtcggtttatggaccgctaccccaggaggtactgatgatgggaaatttatgcgttaccagttatatggatgtttttctatgatttctttgccgaggacagattgttgagtcttggtagtgtatgtgtttggctttattatttttaactttctagagtcatgacaatgatgccaatttatcggcaatttatagtttatgatatcgtgcttgtgctaggaataagaatttgctactgttaaaacatgttattgtatgcagatgtctggtgagactattttttattggttcagtgcaaaaaaaacaaaa

SEQ ID NO: 93649 - DNA, 1623 bp, Glycine max
  Clone ID: PAT_MRT3847_55579C.1
tacggctgcgagaagacaacagaggggcgcgtccgaaaaaaccaactttgcggctgctctgctgcaaatagcgcgttgcatctgctcccaatcattcatataaaaaaaaacaactttgcggctgcgctgctgctaatagcgcgttgcatctgctacctatcatacatattttcgccaaaccgccgattccgttgagcgtttctaccgtagcgctcaggaaggaggcagtggctggtggtgttggttgtggtggaggtggttttgctgatcatttgtggtagagggtaggaaagaaaaaaaagttgaaaatgagttcagacagccgcagcaggagcagaagcaggagcccaatggaccgtaagatccgctctgatcgattttcctatcgtgatgcaccttacaggagagattcacgtcggggtttcagccgtgacaatctgtgcaagaactgcaagagacctggtcattatgcaagagaatgccctaatgtcgcaatttgccacaactgtggcctccctgggcatattgcttctgaatgtacgacaaagtcactgtgctggaactgtaaagaacctggccacatggcctgctagttgtccaaatgggggtatgtggcacacctgtggtatagctggacaccgttaaggagggtgctcagcccctccaaatcctccaaaggagtagaggtttgcaacaactgtaggaagacaggccacttggcacgtgattgtcctaacgatccaatttgtaatttgtgcaatgtttctgggcatgtggctagacagtgtccgaaagccaatgttcttggagaccgcagtggtgcggtggtggcggcggtgctcgtggtggcggcggcggtggctaccgagatgttgtttgcaggaactgccagcaattaggtcacatgagtagggattgcatgggccccttgatgatttgtcacaattgtggaggtcgtggtcacctggcatatgagtgcccttcgggtcggtttatggaccgctaccccaggaggtactgatgatggtatgcgttaccagttatatggatgtttttctgtgattttctcgccgaggacagattgttgagtcttggtagtgtatgtgtttttgccttattatttttaactggctagagacatgacaatgcttgtgctgggaataagaatttgctactggtaaaacatgtatgggatgcattgggttgcctgatgaggttattttttattggttcagtacaagtttttatgtcgttagtttttcctttaacccttctcttcttatgccttattaatgtttgttttattgcgacgggactctctgttagggttagggttagggttaaattcgattcggattcatcttgtcgaatttgggtacgatttccttcagtttccctcattttccgatatcgatgcttggggtttcgtttcgccttgattccctgtggtgcttaccgttatcggctcttcttagggttccgattccgaatctgtaatttacataaggtttggacgtgacggatttatgacttttgatgtgtgttttcctggtaatggttgacgatctatgtttctacgcgtaagattgaacggttttcccaaaaacaactttgctcggatgt

SEQ ID NO: 93650 - DNA, 541 bp, Glycine max
  Clone ID: PAT_MRT3847_5557C.1
cctattcgtccgagataacttagatcccttagtgaaacgtgctgttgctgcagcgtctgcagttccagatcttcaagatcgataccacaagatccctagttatattgaatcaaagctattgccatttcagcgagaaggtgttaggtttatattacagcatggaggacgtgttctcttagcagatgaaatgggacttgggaaaactttgcaggcaattcactgcctaatattaaatcatttccatacgtccactgtgcattatgatgcatagcagtgttttgcttctttgcaaacaaacatacaattatttgtgctagaagttaaatcttggcaggatttctgcttttctatctaatatctattggtgggttgtaaattttgttatctatcttctacaaattaagaagtgcatcttagtgtcttagatgctaattggctaatgatagaaaacatcctgaatgatacagtaaaatatgtaacttaattaacaattaacactagtacacataaataacatcagtcacagtagcatcttatgagc

SEQ ID NO: 93651 - DNA, 1261 bp, Glycine max
  unsure (1)..(1261): unsure at all n locations
  Clone ID: PAT_MRT3847_55580C.1
tacggctgcgagaagacaacagaaggggagaacaaaaaaaaccaactttgcggctgctctgctgcaaatagcgcgttgcatctgctcccaatcattcatattttcgccaaacagccgattccgttaagtgtttctaccgtagcgctcaggaaggaggcattggctggtggtgttggttgtggtggaggtggttttgccgatcagttgtggtagagggtaggaaagaaaaaaaaagtggaaaatgagttcagacagccgcagcaggagcaggagcagaagcaggagcccaatggaccgtaagatccgctctgatcgattttcctatcgagatgcaccttacaggagagattcacgtcggggtttcagccgagacaatctgtgcaagaactgcaagaggcctggtcattatgcaagagaatgcccgaatgttgcaatttgccacaactgtggcctccctgggcacattgcttctgaatgtaccacaaagtcgctgtgctggaactgtaaagaacctggccacatggccagcagttgtccaaatgagggcatttgccacacctgtggtaaagctggacaccgtgctagggaatgctcagcccctccaatgcctccaggggacttgaggttgtgcaacaactgttataagcaggggcacattgccgcggaatgtacgaatgagaaggcttgcaacaactgtaggaagacaggccacttggcacgtgattgtcctaacgatccaatttgtaatttgtgcaatgtttctgggcatgtggctagacagtgtccgaaagccaatgttcttggagatcgcaatggtggcggtggtggcggcggctgctcgtggtggtggcggtggtggctatagagatgttgtttgcaggaactgccagcaattaggtcacatgagtagggattgcatgggccccttgatgatttgccacaattgtggaggtcgtggtcacctggcatatgagtgcccttcgggtcggtttatggaccgctaccccaggaggtactgatgatgggaaatttatgcgttaccagttatatggatgtttttctatgatttctttgccgaggacagattagttgagttcttggtaagtgtatgtgtttggcttatattatttttaagcttttctagagtcagtgacaactgatgccacattcacccgcgcaaatntatagtgttatgatatacagtgcaaaatgctaggaanaaaaaaanaaaaaaaaaggcgcggccgccgacnntagtgag

SEQ ID NO: 93652 - DNA, 2732 bp, Glycine max
  Clone ID: PAT_MRT3847_55581C.1
acgctgcgagaagacgacagaagggggcgtgtttagagaaaagtcactaaccatcacgcgtccgcccacgcgtccgcattctgattcatgcagagggcagccacctcccatgtcttcgcttgtcttttgaatcgaatcaaatcactggatccacaacgacatggcactctcgcgtcttcgtcaccctctcttctctcgctcccttcgcatcctctcttctcccgccagatccctctccagaacttctaattcatccatttttaccctcggaggtgatcatcacaatataataaggcctgcattttgctccaggcttactggaattcatgatagatctttgaagtcaaagtggactgatgtcaaatacttttcatcttcagattcttcacatgaagtccttgggatgcctgctttatctcctacaatgacccaaggtaatattgctaaatggaggaagaaagaaggagaaaagatagaagtgggggatgtactatgtgaaattgaaactgacaaagctacactagaatttgaaagtcttgaagagggatttttggctatgatattggtacctgaaggtgcaaagtacgtgcctggtggacaaccagttgcaataacaattgaggatgaaaatgacatccaaaatgttcctgcttccggtggggggtgagactcagggttgaagagaagaaaccaacacttgggggtgtctcagatgagaggaaatcagaatcaacttctagtgtagttaatgcatcagaacttccacctcatctccttcttgaaatgccagctttgtcaccgacaatgaaccaaggaaacattgctaaatggaggaaacaagagggagacaagattgaagtgggtgatatattatgtgagatagagacagacaaagctacacttgaatttgagagtcttgaagaggggtacctggctaagatacttgctccagaaggttcaaaagaagtggcagttggacactctattgcaataacagttgaagatgcaagtgatattgaagctataaagaattctgttagcagctcaacaaaccaacagaaggccccccaacgtggcactaaaagcgaggtcaaagctcagaaaaacaatataacacgtattagtccagctgcaaagttgctaattgcagagtatgggttggatgctccaacattaaatgcaactggtccttatggcaccctactgaaaggggatgttctatctgcaattaagtcaggaaaattgtctccaaaacctgcttcatctaaagaaaaggcattgtcatctcaaagtcatcaacaagttgcagcttcccaagagtcaaaatctgacttaaaaaagtcagatgcttatgaagattttcctaatagtcaaattcgcaaggtgatcgccaagagattattggactcaaaacaaaatacaccacacttatatttatcatcagatgtcatactggatcctcttctttcccttcgaaagggtcttaaagagcagtatgatgttaaagtttctgtgaatgacattattatcaaagttgtagctgctgctctcagaaatgtaccagaagcaaacgcatactggaatgttgagaaggatgaggtgattttaaatgattctattgacatatccatagcagttgccactgagaagggcttgatgactccaataataaaaaatgctgatcagaagacaatatctgctatctcctcagaggtcaaggaactagctgcaaaggcacgtgctggcaaattgaagccacatgaattccaagggggaacttttagcatttcaaacttaggaatgtttcctgtggataaattttgtgctattataaacccccctcaggcttgcattcttgctgtagggagaggcaacaaagttgtggaaccagtaattggaactgatggaattgagaagccatcaattgccactaagttgagcttaacattgtctgctgatcatcgtgtttttgatggcaaagttggaggtgcatttctctctgcattgcaatcaaacttcagtgatataagacgacttcttttataatgacgcaacacaaattttcatgttacttgattggatttctcacgaccaatcatgtggatccaccacaaccaggatcaaacttgcatagcatccccatttttgtctttttcacttttatctcatcatctgaaacagttttcgattgttgtgcctcattagtttttgtataataatatcttgggtctaattactaaatatcctgagaaaatacccaccaaggtaccatctaacattaggttttcaacaattgagattcaagcacgttggaatttttgttcattaggcactttgctgctctttgatgggtagttttgtatgaagagctttgtatagacagtcattcaaataccaacatttggatgaataaatattcttttcatgtgctgcatatctgtcatccgatttaagcgatggcatgatttggcacaatggtacttttggttcaatgttcatctataagcctggtctggctctttctccccagcattttatctttaacttttgtactaggatttggcctagtggttggattaataatgggaaatttggttaaatctcttcagctgctaaccaagtagcaccagcaccagcgggccccaccaacatcacccaagttcttgagaaagcaggccaattcacaaccttcatcaaacttctcaaggcctcacaaatagctgatagaatca

SEQ ID NO: 93653 - DNA, 316 bp, Glycine max
  Clone ID: PAT_MRT3847_55582C.1
ccgacaatgaaccaaggaaacattgctaaatggaggaaacaagagggagacaagattgaagtgggtgatatattatgtgagatagagacagacgaagctacacttgaatttgagagtcttgaagaggggtacctggctaagatacttgctccagaaggttcaaaagaagtggcagttggacactctattgcaataacagttgaagatgcaagtgatattgaagctataaagaattctgttggtttgttgagctgctaaccaagtagcaccagcaccagcgggccccaccaacatcacccaagttcttgagaaagca

SEQ ID NO: 93654 - DNA, 349 bp, Glycine max
  Clone ID: PAT_MRT3847_55583C.1
gccacgagcacgcttttatacaaattttttttacatcacatgaccgtgccataccttttgaatgggctgactgcattgtatgacctggaatgggggcactgtttcacatggagggacctgtaactcagaacagacaggtaggcatgacactatggtagaggatacggtggctatgggaaaatttacacacctcaattaattgacggaaagacgggggacatgaagaagcttctcaataatataggacaagctgagggcgaactcactaggggagccaaggctactgcgcatgggctgcataagaacttgtctcgactagtggactataagcatagaatgcacgtcacag

SEQ ID NO: 93655 - DNA, 2189 bp, Glycine max
  unsure (1)..(2189): unsure at all n locations
  Clone ID: PAT_MRT3847_55584C.1
ccaaaatgttcctgcttccgctgggggtgagaccagggttgaagagaagaaaccaacacgtgaggatgtcacagatgagaggaaatcagaatcaacttctgctataattaatgcatcagaacttccacctcatgtccttcttgaaatgccagctttgtcaccgacaatgaaccaaggaaacattgctaaatggaggaaacaagaaggagacaagattgaagtgggcgatatattatgtgagatcgagacagacaaagctacacttgaatttgaaactcttgaagaggggtacctggctaagatacttgctccagaaggttcaaaagaagtggcagttggacatcctattgcaataacagttgaagatgcaagtgatattgaagctataatgaactctgttagcagaagttcaacaaaccaacagaaggctccccaacgtgacactaaaagcgaggccaaagctcagaaaaacaatataatacgaattagtccagctgcaaagttgctaattacagagtatggattggatgcgtcaacattgaatgcaactggtccttatggcaccctactgaaaggggatgttctttctgcaattaagtcaggaaaattatctccaaaacctgcttcatctaaagaaaaggtatcatcatttcaaagtcatcaacaagttgcagcttcccaagagtcaaaatctgacttaaagctgtcagatgcttatgaagattttcctaatagtcaaattcgcaaggtgatcgccaagagattattggactcaaaacaaaatacaccacacttgtatttatcatcagatgtcgtactggatcctcttctttcccttcgaaaggatcttaaagagcagtatgatgttaaagtttctgtgaatgacattattgtcaaagttgtagctgctgctctcagaaatgtaccagaagcaaacgcatactggaatgttgagacgggtgaggtggttttaaatgattctattgacatatgcatagcagttgccactgagaaggtaattgatggtgtttaactgtcggtatgatagtatcattatacaaaatactcaaaccttttgtttgactatagggcttgatgactccaataataaaaaatgctgatcagaagacaatatctgctatctcctcagaggtcaaggaactagctgcaaaggcacgtgctggcaaattgaagccacatgaattccaagggggaacttttagcatttcaaacttaggaatgtttcctgtggataaattttgtgctattataaacccccctcaggcttgcattcttgctgtagggagaggcaacaaagttgtggaaccagtaattggaactgatggaattgagaagccatcaattgccactaagttgagcttaacattgtctgctgatcatcgtgtttttgatggcaaagttggaggtgcatttctctctgctttgcaatcaaacttcagtgatataagacgactgcttttataatgacacaacacaaattttcacgttacttgattggacttctcacgaccaattatgtggatccaccacaaccaggatcaaacttgcatagcatccccatttttgtctttttcacttttatctcatcatctgaaacagttttcgattgttgtgcctcattagtttttgtataataatgtcttgggtctaattactaaatatcctgagaaaatacccaccaaggtaccatctaacattaggttttcaacaattgagattcaagcacgttggaatttttgttcattaggcactttgctgctctttgatgggtagttttgtatgaagagctttgtatagacagtcattcaaataccaacatttggatgaataaatattcttttcatgtgctgcatatctgtcatccgatttaagcgacggcatgatctggcacaatggtacttttggttcaatgttcaaaaaaaaaaaaaaaaaaaaaaaaaaaaaaaaaaaaaaaaaaaagggcgggggcgcgattaggaatactgagctcccggaccttaaatttaataccgggacctgtacctgcaccatttccccctttccttatancgattagaattagagctagtcgtaatcatggcctatatcttgtgccagagtgaaatgggtatccgttcccactcccaataaacatccgaaaccgtaaacttaaaaccctaagcctgcct

SEQ ID NO: 93656 - DNA, 447 bp, Glycine max
  Clone ID: PAT_MRT3847_55585C.1
tgatgatctgattctgattcatgcagtggcagccacctctcttttcttctcttgtcttttgaatcgaatcaaatcactgatccacaacgacatggcactctcgcgtcttcgtcaccctctcttctctcgctcccttcgcatcctctcttctcccgccagatccctctccagaacttctaattcatccatttttaccctcggaggtgatcatcacaatataataaggcctgcattttgctccaggcttactggaattcatgatagatctttgaagtcaaagtggactgatgtcaaatacttttcatcttcagattcttcacatgaagtccttgggatgcctgctttatctcctacaatggtaagcttgggtaaacaatttttctctttgttttatctctattccgtttagggcttccatgtactgttgtttgctcatcttttggtttc

SEQ ID NO: 93657 - DNA, 390 bp, Glycine max
  Clone ID: PAT_MRT3847_55586C.1
ttactcattttttcttctttctctatctacttcttttttttttgttcttgttttcttttcatttcctttttctttttgttttctttcttttccagggaaaaagggggggactttaactctcaaatacctattcctcactttcacagatcgccagatgtatccccccccaaagggggcaccctaacccccaaaaaccacctacgtgggaacaaaatatcatcacaacaacctcatactaaataaatcataaccccctcatcggggaagccccccgcagaaccatttttaacccatgaacaaaacccatcccttccaggaaactttccctcctggggctccccctttggatggggggggggaaccccaccaaaaactccctctccccggggg

SEQ ID NO: 93658 - DNA, 385 bp, Glycine max
  Clone ID: PAT_MRT3847_55587C.1
gccacgcatacggaaagaaaaccactaatttttccgtttttcacaccctgctacaactgggaactttgaaggatatcataaagccacaggctctctttttttaatttctctttatataatcgaatccagttaatttttcatcatgtgactgtccaatcttgaaatccacaacaacaattgtgacaggattgctcaacaacctcctctctcactccctctcagtcgcccgaaaatggcagcacaatcaactacaccaccttaacatacactagtaccagtgtgctaaatttatgatcaaacacgcagtcaacgttccgagaagcctcgctgtttactctgttgaagaggtcagaaatgtcatcaatgaccttttccctaattaaaa

SEQ ID NO: 93659 - DNA, 252 bp, Glycine max
  Clone ID: PAT_MRT3847_55588C.1
ttcatagggtctctctctgttctttcagatccttttcacatcccccccccccccctcccctattttcagggaaaaaccgatgctgcccttttgcactgtgagcttgtgtgatggttttgatgaagttgggttgatcggcatttgcgattcataaagtttgaatttttgaaactcctagtctctggttggaagggtgtctttctggggaccccaaaaagggtggagtgttgaacttttgaaaaggtttgggtt

SEQ ID NO: 93660 - DNA, 235 bp, Glycine max
  Clone ID: PAT_MRT3847_55589C.1
tcagttacttaattttgtattaaatataagagacaaaaatattgttttgagaaatattcatcacagaaaattaattggattagtgataaaaattaaattgtttatattaacaacattgaaattgctcttggtgcgctgaagtattcattttttatttttacttttgcccttcatgatgatgactatcagacaaaatttctcatttctctactattaatgtgacagtaaaatttaa

SEQ ID NO: 93661 - DNA, 725 bp, Glycine max
  Clone ID: PAT_MRT3847_5558C.1
cagacccgtttttactaagttgttgacagcatatatttgaatgttattgtagaactcttagactggaacatggctgacaggaagctcacgcacatggggggaccaattttgaacaaagcaagatttaatgacgggagaatccataattaatttgcacaggtcaaaccaaaatcacactgtaggaaccataaaaccagcccgatccctgcatagtttgggctacaaaaacacacccaaactacccatgcacaagtcaatggcaaagaaaccaccaactaggaaaggcacagccattgccattggaagtggaaaacatttcccaatgatattgggggctagatctctgaccaagttggctgctatggcaaatgcaaaaaatccgtaacaaagctgtacgcaatgatgggaaatgccagataatcctcccacaccaagaattgccatgttcctatataatgatgtcatatggagccttgtagttcccatctgggttccccacatcaaaacccttgtcaaaaaggagaatgtgagaggagcaactacacaacctattgctgtcccaaaatgctggcttagaaacaaccaccctgggggaaagtgaaagttgcaaaggaccagtccttgaaaagacatgctacaaaattaccattggaaagggggacaccaatgtaattttttatcaaagggcaaccacccccaaattaatttcccaggcgaaactaacc

SEQ ID NO: 93662 - DNA, 307 bp, Glycine max
  Clone ID: PAT_MRT3847_55590C.1
gataggctttatcggcgcaacaaatcggacgagcgcacgactgactgatgtactatgatgcctagggcaaacaaaaaggcgaggcggccgcagctgcaaattttggtgaggaacaggatgagaaaggggtacaggcccaagcggaaagcagacaaaaacccataaccaatggcccggacagcaatggccacaatgaaaacgacctacgccaactgcgtgctgacttgcacagacactccaccgggtgagtcggatgaccatccgaagaagaagcaaacatggaaagaaagactgacagaccatgacg

SEQ ID NO: 93663 - DNA, 406 bp, Glycine max
  Clone ID: PAT_MRT3847_55591C.1
aacgattttacccacttttcccactcaaccccaatgtagcccttatgaactctttccagacattcaaatacttttctaatccgaagcagaatttacgtcctcaaattcataatcagcccatctctctgaaaccactgatgatcataattatgcgtatgtccaataccatctgctttctctactggtccatcaacaattatctacctcttactactcgcaacaagaagaataacgacaaacccaaaatcctaacaatgcagaactttaaattcttggaatcttcaaagtacattagatatcttgccactttactagttgcttatggaatcagcatcaatctttttgacgttacctttaagtctaagctcaaatctcaatttcctaaacccaacaaatactcttcttt

SEQ ID NO: 93664 - DNA, 309 bp, Glycine max
  Clone ID: PAT_MRT3847_55592C.1
gggcgcgccatttatgctatttacaccatctggtgtgaggactgtgaattgtcgaatgctgcttgcacacaagcactgactatgtcatttaatccaaacccgggtgctgatgcatggagcacggaattgctgaagcgtactggatttcattgcgagatcatctgagtcactggatggactgccaccccaatgcaggatgtacaagatacaatggattgggttatttcctatcacgaatgtgttcccaggacctattgtgttttaaatccacagaatccttttgtgttaaataagtggatgggaaaattg

SEQ ID NO: 93665 - DNA, 203 bp, Glycine max
  Clone ID: PAT_MRT3847_55593C.1
gagagaataagttatagtgacttccatggattagattatgtgggctcaagagattaggcaggggaaaagatggtaaaatcgtccagtgagaatatgcaagacaggttccattggtatctgtctaatgcggatgtgcaagggaattttggaaggttacccatatggcaaaagtctaagatgtgtttctattcaatgagttgtgc

SEQ ID NO: 93666 - DNA, 426 bp, Glycine max
  Clone ID: PAT_MRT3847_55594C.1
ccggttcgaaaggtatctcacacattttaatgcgaggcataacattcaagagtgttattgtaaacgcgcacgctaatgctgaaggagattttgctactggcgatcctttactgagagttgagttgctagaaatgaccactaacacccatatggaacggtctacaaggaagagcgggaccaacccaacgccttgcattatgacatgctagggaggatctgccaccataaagccatcagaaccttggtcgctgaaccacatcccaatggcctcgccaccaggtcgattggactggattgaactcaaggagaatttacagtctgaagagcaactactgaaacagttgacctagaaatggcctcagtactctgcttgtacaagagcaggaaccgcaactacatgtgttgtaaccaagagaggcacccctg

SEQ ID NO: 93667 - DNA, 291 bp, Glycine max
  Clone ID: PAT_MRT3847_55595C.1
gaggtttctctctcccgtatacatcttgaacctaccgcgtttccgtgacagagacatcgcagtggcgatgaggcctacgccgtgttagcggcagatgcaaatcaatccataccccaactcccgtttctgccgtggtcttcctgatcctaatatcagaatctaagatgttggtattagtatgaaaagtgttggtgattatcccttctgcgttcatctggatatcttggactaggaaaatgtttcaagtgcagctgtggcagctgctacaactgcaagcaccagctatatggc

SEQ ID NO: 93668 - DNA, 270 bp, Glycine max
  Clone ID: PAT_MRT3847_55596C.1
gatggatttaactggactcatttacaatatgtgggtaccatttttagtgcacctaacttctgttaccgatttttgaacatggcttacatatcggaggttgattattgcaagggccacacatttattcagtttgaacctgctcctatgagaggtgaaccttatgtcactctgagaacgccctattacttcttataatgtagctgacgaatgtcatactgctatatcaaggtttcctctactgcacttattttatgttgtttcgcattctta

SEQ ID NO: 93669 - DNA, 344 bp, Glycine max
  Clone ID: PAT_MRT3847_55597C.1
aaaacgcaactacggcaagggaattttaaaaaacaccgaaaaaaggccttccgacccggaggctacaagaacatatggcacaagctaaatttagtttagggacgaaaacaacggcttttctacagcaaaaaagggtttcaacaacttggcaaaaccccaaaaattggaagggaaaaaggtatacttttataaacaaaaattgttttggaaaaaggaagggtttcatcgccttgaaaatccccccaaaatcaacagggccatagaaaccacgattttgaatccagaagggccccaaaaattcggattttgcctatctccaaatccaacttctttttgggggttgg

SEQ ID NO: 93670 - DNA, 429 bp, Glycine max
  Clone ID: PAT_MRT3847_55598C.1
aaaaaaacaatttaaacccctggaaagggaactccttggggaaaaaattttttgctttgaaaatattttgccccaatatttttttttttaattttcccataaaaccctcccctttttgaaatttagaccttttggccacctcccccttttgggtttttatccccaaagtttttttttttttccggggtgaaataaggggccaaagcccagttttaattgggccttaaaaaaacaaatacccttcaaaaaaattttttcacccaaataccctccaaggaaaaagggaaaaccccgcttttggctagaaaagagcttacttttatattttgaaaaattttggaagagttggggaaccaaaaaagggggttttttttccgtttcctcgcgggaaacctggggggggggcccccaaatttttttgcttttttt

SEQ ID NO: 93671 - DNA, 377 bp, Glycine max
  Clone ID: PAT_MRT3847_55599C.1
ggggaaaagagcaacattgcttcatgaagattctccgcgccactgttgcctcctaacaaaattaagaacttcttaattcggctgacgacgaggatattataaagctgctattattaccaccatcattaataataacagcatgttctgccaacaaaaacaccattcttttttcttgaaaactacttgatgatgaggcaccccgcccttctataaagacctcctacccccctaatatttctaataatgtacaccactgacggttgctattattgctgcagaaacaacagtttggtgatcatttttctgctggtggagcaacacacttttctccttctttgccgcctaaaacaaccccccctcctccttcttcttcttct

SEQ ID NO: 93672 - DNA, 175 bp, Glycine max
  unsure (1)..(175): unsure at all n locations
  Clone ID: PAT_MRT3847_5559C.1
aagccagctttagtgagtatgtatgaaacattaaagntgctttgctagcatgatacgggtttcttgggggggggggcgggaataataaacctttataattctagcaaagcacccttagagactctttcatacacattaacgctgccgagagccgacttcaaatcttttttacaca

SEQ ID NO: 93673 - DNA, 2982 bp, Glycine max
  Clone ID: PAT_MRT3847_555C.1
cggacgcgtgggattttctgttggaggctgcgtagttgatggaaatggcatgggagtggagggggtcaaaatcatagttgatggtcatgaaaggtctattactgacaatcaaggatattacaagcttgatcaggttacatccacgcactataccatagaggcccaaaaggagcattacaaattcaagaaactggagaattatatggtattgccaaatatggcttcgatagaagatatcaatgccatttcatacaatctttgtggtttggttaggatggctagtggtgatctgaaagtgaaggtggctttgactcatggacctgataacgtgaaaccacaaaagaagcaaacagatgaaaatggaaacttctgctttgaggttcttcctggtgaatatcgcttgtcagccattgctgctactcctgagaatggtgctggactcatgtttgctccatcttatattgatgttgtggtcaaaagtcccctgttgaatattgaattttcacaagctttggtcaatattcatggtgctgtatcctgcaaggagaaatgtggcccatttgtatccgttactctggtgagacaggttgataaacacaatgaagagagaaagacaattagcttgaccaccgagagtagtgaatttctgttttcagatgttattcctggaaaatacagccttgaggtcaaacatagttcccctgaatcagtgaccttggaagataattggtgctgggaacagagcttcatagatgtaaatgttggtgctgaggacttagaaggaatcctttttgttcaaaaaggctactgggtcaatgttatctccactcacaatgttgatggttacctgactcaacctgatgggtcaaatgtgaatttgaaaattcggaaaggtttccagcatatatgtgtagaacaacctggtgtacatgaatttagttttgttgactcatgtatcttctttgggagttcatcagtgaaaattaatacatctgatcaattgcccatccatctaataggagagaagtatcttcttaatggacaaataaatgtgcagtctggctcacttgatgcattgcctgataatatagttgttgatattaaacatgatggagctggtgttattgattatgctacagccacatttaagtcccattcaaaagatcaaatggaggctgctatatttgagtattccgtttggaccaatctaggagaaaagcttaccttcattcctcgcgactcaaggaatgatgggcagaagaaacttttattttatcctagagaacatcaagtatcagtgactgatgataattgtcaagtttatattcctacattttcttgtcaactgggtgtatatattgaaggatcagtttcacctcctctttctggcgtccatatcagagtttttgctgctggagatagcagctttactacacttaaaagtggtgaattggttcttgaaacgaccactggtattgatggttcctttgtggcaggtcctctgtacgatgatattggttacaatgttgaggcttcaaagcctggatatcatttaaaacaagttgcgcctcattcttttacttgtcagaagcttagtcaaatttcagtacacatacatcacaaagatgattctaaagagcccattccttctgttctgttgtctttgagtggtgacaatggttatagaaacaactcagtatcaggagctggtgggacattcctgtttgacaatttgtttcctggaatgttttatttgcgtcctgttttgaaggagtatgctttctcacctccagcacaggcaatagatcttggagcaggggagttcaaagaagttgttttccaggccacacgcgtagcctacagtgctacaggtatagtgtctctcttgtctggtcaacccaaaggagaagtttcggttgaagcccggtcagagtcaaaaggctattttgaggaaactgtgacagattcatctggaaattatcgtctgagaggactactgcctgatactgactatgttgttaaagtggctaaaagggatgtgggcagttctaatatagagcgtgcatctccagattctattgctgtcaaggttggaactgaggatatcaagggattggattttatagtttttgaggagccggaaatgacaattataagttgcccacgttgaaggaatgggtccagatgaactacgtaaacacctgatggtagaaatcaggtcagctagtgacctaaacaagatagagtcagtcttccccctaccaattttcaaacttcttccaagtgaaggggcttatcaaagggcagacaccttctaaagcttcaatctggtctcccatcaagctcacttaaatttgaatctgatctcattgaggtcgacttggagaaaaatgttcagatccatgttggcccactgagatactggattgaagatcagctgaagcaggagctgactccggcaccagtattccctcttatagttgcatttctagttgttgcactatttcttagcatgccaagattgaaggatttgtatcaagccacggtagacatacccacaccaggactcactgcggtttcaagaaaagacgtgaagaagccgatgttgcgaaagaagacttattaaatctcctttccaaccataggagtcatacggtagtataactgctcttgagagtcttagttgagttactttgatagctttcacgttctctgataggtttggatgtttttctttatttatctggtggggcaaaatgcaagataggatgtaattaataattgttccttcattgttggtataatatggttttactttttggctgaggagaaaacgtgaatagaagcaatatgtatttgttgcttctgaatttttgttttattttgtttttttgcagccaaatgtattgagcttgaacgttttgaccctatttggaagtgcctgatttgtttatcatacaacgaaactaggttatgcacctt

SEQ ID NO: 93674 - DNA, 500 bp, Glycine max
  unsure (1)..(500): unsure at all n locations
  Clone ID: PAT_MRT3847_55600C.1
ttnncnnncnnnancnntcnnttttntgttttggaagatgaacatttttttctcttattcatcatttacaattacgaattacaatattaatagatcgggtgtagcactctcagcagccgagtttcttctactggcgttgataacctgacatgagagcttttccaattattattggggtgatattcttggatcaaatgaggcacatgaataataaaatcctctgggcaatttttttctgcgtctccaaatctccctaatcccatggtaagcttctgaaaatagaagtttgtttctcaaagctgcttttttattttttaggtcaatgggcaatgtgtttttaacgtataccgaagccactatcttgaatcaagattcaagacccatgccccgtgtcaccagctgatgctcccacacagctacattttggttcatcattcaaattttgccataggagtttaaccatagagaaacaacccagttaaaaattatcagcagccaaa

SEQ ID NO: 93675 - DNA, 567 bp, Glycine max
  Clone ID: PAT_MRT3847_55601C.1
ggctcgagttttctttttttacttggtgattcgtcactctgagacagacaccatttttctctgatgaaggcaacaccacctaaccaacctctctgtttcacttctcagatttgaacgagttatttttttttttttcgatttcccattcatttactattctcattctcttgtgttggactaatagagttagatcagattcatttccaaagggtggtacttggaagtgctagttcaaatttcaaagagctgaaagccaatcgattattgaatttcaaattttcaatattttccattgtttggattgggatatatggccatagctcggttagttcggcaagcaaagcgccctcatgggttgtgggtgaagatgacagccgtgaccatattgggtctctgcttcatctttgtgtgggggggtttttcgtcttcttcaacctctgtcaccacccaaagggagagctttgaggacattgcagaacccgtgtcctcttcctcttctcacaaacctcagaagttgaagaaagatgaatccaaaaagggtggtggtggtggaaagagtgagaaaaa

SEQ ID NO: 93676 - DNA, 491 bp, Glycine max
  Clone ID: PAT_MRT3847_55602C.1
acgaggtttgttactgataagcgctttctctttgactgtttattaaattcaggtttcctattaattccatatatgcttttatttttgctgtggtaacgttattttaaaatccctagtgaacccgagggtactagctcattatgcttaatgttctgcatcaaagtctatggcccaaactttttctttatagattatgtcatacattaaaccaagcttaattgcatttttggtctcctaactttttcaattttgtgaacttcatccctccatttattgttctcaaatttgaaccctcaactgttttaattgtaattttggtccatctattgacttaacattcagtgcataacgaaaatgctgacatagccatataatagagtgtcacatcatcatatatgtgctggtgcgtcaatgcataaatattggatgttaagttaatagatagactaaattaaaatagtatgggatcaaattggaaaaactaaaaatga

SEQ ID NO: 93677 - DNA, 321 bp, Glycine max
  Clone ID: PAT_MRT3847_55603C.1
ttgactcttcacaccaattttgatagaccgagagcatagggaggtgcgccttatattcggaaacaaaagcaatcgatacttgattgcaagaacctctcaatttcttactacttatctgggcgcgatttcttaagggaaagaaaatcactctctgtgctggccacagactacgtgaatcattttgtcccccatactaagtgtattggccgaacactctactatttgatataggacttcctgtgagatataaacttcttctgtctcttatatagttctctgtttaatatcaagttcaagctggagaaagcctgcattaatgct

SEQ ID NO: 93678 - DNA, 292 bp, Glycine max
  Clone ID: PAT_MRT3847_55604C.1
atccttagacaatggcacgaagaccggtggacccttcagaaccatcaagcaccctgccgaactggctcacagcgctaacaacggtcttgacatcgctgttaagctgttggagccactcaatgcggaggtccctatgttgagctacgccgatttctaccatctggctgccgttgctgcccttgaagtcctcggtggaccatgagtttcatttcaacctagaagaaaagacatggcctggtcaacgtcagagggttgcgtgaccaatgcccctgatggtactcagcttttgcga

SEQ ID NO: 93679 - DNA, 602 bp, Glycine max
  Clone ID: PAT_MRT3847_55605C.1
gggcttgcaaaccatgcacatagcctttttttacatcccattgttatttaaaggaaattagttagcatttagcaattgaaaacaaaacttcattatatacacagctttacatgtagctgggttcaattgacttgactaaaatgttgcatgattttcattccctacacccttagcaaatgataaggacacccttcaatgatatgaatatattatcaagcaaccagaacaagaaaaggatgtgaagtttgcccacaagtattccataactgaatacatgtatgcactatgcctttgatgctgactttaacctgaaattttccttccatgtcttccaagcctttttgacttcatccaactcagcatttggaatgcttgagtacttatccaaattctcaacccatttttcccaaggagagtttgatgagtctaggaactttgatacttcaggcaacacaacagatgtgtagaactcgtcaactgcttcgagaatttgttctgattcaaccatggacaccatttcttgccgtgtaaaggtccagcacttgctctcgttttgaaagcattttccctcaaaatcagaacttctgggggggcaaggggga

SEQ ID NO: 93680 - DNA, 441 bp, Glycine max
  Clone ID: PAT_MRT3847_55606C.1
ccacgcgtccggtgcgatgataggacaagaaccatctagatgttgagcgaagatctgtgtttcaagatgaactctcatgggagtccaatgttggttgaattaatagaccacctatatgcccttgtgggatccaacaggactaagtgggccagagggtcttcttactgaggcatttagtgatttatttctttcccttcctgactgaggccacatgtgcgagttttgggctcagtgagaattttgaatatatagcttgaatatatgacttgtggggcacatcaattttttatatatgcgtgtgaaataccataaattaattgatttttaccaatggaaacttaatgaaatgtgaaaacaacatggttgatgcttttgcttttttcaaaaaaaaaacaaaaggtgggggggctctagaggatccaatcttatggacacgggcat

SEQ ID NO: 93681 - DNA, 244 bp, Glycine max
  Clone ID: PAT_MRT3847_55607C.1
agctcgagcgacgctttcttggtaaaatacggtttcaagttgaacgatgtctatcctcgccgaggataatctcatacctatggatgaagaattggctggcatggctaaggtggtgctcattgctggaagttctactcagaatttattcagggttgttcagtggatgcttctagctccatgtaccacatgttattttggctgcatatgaaaggactaatttggagaggagtatgtagaagaaatg

SEQ ID NO: 93682 - DNA, 1864 bp, Glycine max
  Clone ID: PAT_MRT3847_55608C.1
caacgagtttgcttgcacaacataactgtatgatctgaaccaacttcactgcacaacacaactacacaagagggtttcaactatctactcctcttcttcacactctctgtgtgggataaagcaatctcaatctcttcttcataatggaaataagtattgcaaggtctcatctcgaaacacagggaatattcttttcaaatatttcaagaacaataggatgggaaagcattaggaaacttccatgtaatgtggctgcccagggttcaagacgggattttcacagattggcctcttcctgtcaagcttttactgcagtgtatcctagaaggtcttttatctgtagagcaaattctatgccaattagtttacaggaatctgcatcatatggagataattctattgaggatgaggatccatatacagacttggaagaggaagctttggcaaaaccacctaccagtgaacagataatgacattgcttgctgacacacagagagcaaaactcactaagaagcttagtgaggccaaccagcaaaaccggttcctaaaaagacagttgaatgtaaaggaggatgcattggtaaaattcaaaagtgaacttgctgtcatggaacttgaaattctggctttggtcagattagcagaataaatagctcaatgtgttattccaaaagccaaaagcaataccaaataatacaattgaatttaacgaagtcaaggttggaaagactcatacaatgattttccattgtgtagtttccaatattgctagtatgcgcaaatgccaaagcacttactatgtcctctcttatttcacgttcgagcgtgagcaatgggcactcctcccatccggaccctactgcagcacctcccacctggcctttctgctgctgacccaaggctttccccttcagtgttccggaggccgcgtcggttggagatcattctcttgggggtgggggtccggcttccgccgccgaaggctcccattattggtgaagggttaaccaaaaataatttgttagttgtcgagtaatgacccaaggagcaaaactctcaacccaacttactgatgcctaaccccaaaattgagtgtttctttctttgggttatttaccctctctctctttgggggttaggcgcgcgctctttgctctgcgtgttcccaaacacttttgacctataattatattttggtgatgcgtcgacagtaactttgcttgacacaaattcaaaacacatggtattattaccatccacgcgtccgcttcaccagcagcagcaccagttagaagaagaactctttctctcccaatgcctcttgttcatcaccctcccataaaaaagggtgacacacaccaccttgtctccctcacctccaccacctatggctcccttctcctcattgaccaaaaagacccaaacttgacccaaaaaaaccaaccccgcctcaccaaaacctcaaaccaaactgacccagcacactcactctccccagactcagtcatcaacacttgggaactcatggatggcttagatgaagaagaagaagaagaagaagaagaaattgccaatgccaagaagaagcctccttacacttccattttggacaaaccaagttcatgcaggtacacagcatttgatggttctgcaaggaagaaactgcttgattcctttgaatcactgaaaacttcacagacagcaatggaaaaggaaaactcttcttcttctccagcaccaaccaagaagccactttggcagcacttatccgaggaagctttgcttgctaagttggatccgagtgtggcttggagttacagaagagcattatcatcaaggaatctaggtagaaacaccttatct

SEQ ID NO: 93683 - DNA, 418 bp, Glycine max
  unsure (1)..(418): unsure at all n locations
  Clone ID: PAT_MRT3847_55609C.1
aaacaggaaatattttataattgaccaagcttattattacatggggaaaaggggggggggggtgttattgattacaaaattaatttgcttggatttggaaagtctgcantaaatattacctacaaatataactggaaaaactaaaagttaaacaagcctttgatgcaacaactgcaattaaacctttacttaaaaggttaaactttttgaacttgggctgctttacccggtgttcctgattacaggacagtttgaaaaaaaattttaagcactgccataaaatttgggacctttaaggaaacctccaaacaattcggcaggataataaaaaaactccaccttcacaatttttgaattctcatccaacgggaaaagggccatcccaaaaaccttaattttgtctccagggggggggggg

SEQ ID NO: 93684 - DNA, 832 bp, Glycine max
  Clone ID: PAT_MRT3847_5560C.1
attggttgagtttttccctctccctccttaacataagggtattataacgaaccagctgatttggattttgtgtcattcaagtcattggttgagacttgagcaaggaaggttagagttgtgagagcagagagaggtttctttcagttaagttcagatttgcctgtgtgactgataatagtaaaaagttgaaatggggaatcttagttggatgttggacaagttctgtatttcttcttgttcaaaaacctgtttctgtgtaaattccatggaatttgaagatgagtttgagagtaaggctttgattgcaagtgacagtgatcataaactaagactgaaggatgtagttgatggaaagcagacattggcttttcaattgaaacccaagatagtgatattgagggtgtccatgcattgccatggctgtgcaaaaagagttgagaaacatatctcaaagctggaaggagtgagctcatacaaggtagatctggaaaccaaaatggtaatgatttgtggcgacattcttcctttggaagtgttggaaagtgtatccaaggttaaaactgcagagctttggaattctccatgctagtaataaggaaaatttctgcacaaaacaccatcagcgtcaccagattctacaaaagtcatttttgttgttattattttattatactattaatagttaataccccgccacaaaaatagtagtggttatgggtgatattcttccctctgaagtgttgcagagtgtatctaaggtgaaaaatgcggagctttggaattttcaagctagtaaggaataattttggacacaacatccatcttcatcaga

SEQ ID NO: 93685 - DNA, 413 bp, Glycine max
  Clone ID: PAT_MRT3847_55610C.1
ttaattatacttttagtttttatatttaatttgtgcatgtaaagtataatttttctctctttttaatttaattacatgtatttaggtttcataagttttcaatttttaaattaactaattctcttatttcaaaatttcattagttaatagaaatgtaacgaatacattgttgatttccacgcgcaatatacacacagggattgatcaaataatgaaataatattgatataaataagtgtaatttagttcaaatttatcatatataataatttataaaaaagtaatattataaaaattaatttaattttttttgaagttgaatccatgtcattcaatcgtttttataaggcttttatttctgaaggataagtaaaaaaaaaaaaagcttttgcatcatacaagatgtaaaagct

SEQ ID NO: 93686 - DNA, 211 bp, Glycine max
  Clone ID: PAT_MRT3847_55611C.1
ggcaacttacagctactacttttgggactactgtcacatgaccccgccgggttcctacctcacctataaggacacttatatttctcccactggtggatcaggtgtctctacagtggcatatgaacaggtcaagatgaggaagatcgtgtctcatggagtactattctccacattccacgttgatgtcataaaggacttgcccgaggacctt

SEQ ID NO: 93687 - DNA, 188 bp, Glycine max
  Clone ID: PAT_MRT3847_55612C.1
ctaaattcctcagccgctccacgcgtccgtacggttgttagaagacgacagattgttacatcatctataacaatgttctgcctcactacaagctgcaggtgcctttatgcaacccaccaatgttttcattgccactctcaactcttaatctacacatttcttatattaaggattttggattagtaacc

SEQ ID NO: 93688 - DNA, 1406 bp, Glycine max
  Clone ID: PAT_MRT3847_55613C.1
cccacgcgtccgcccacgcgtccgcccacgcgtccgaagacgacagaagggggcagcaaattctgtgaagatgaagttcacggtgtcaaatctatcaagctctatgttcctcctcgtgttattcatagctcttgtctctcatacacacggaagcaagatcgaccaccatagaagcaacaaacatgttgccctcttcatttttggcgattctttcttagacgctggcaataacaactacatcaacgcaacaacccttggccaagcaaatttctggccctatggggaaacatacttcaagttcccaacggggagattctctgatggacggttgatatcagatttcatagctgaatacgcaaaccttccattggttccaccatatttacaacctggcaatagcaattactacggtggagtgaattttgcatctagtggtgcgggtgctcttgttgaagcttttgaagggtcggtaatacccttcaaaacacaagcaagaaactacaagaaagtagcagctttgttgaggcacaagttaggcagttctgaaactaaatcattgttatcaagcgctgtctacatgtttagcatcggatccaatgattatcttagcccgttcttgacacattctgatgttcttaactcttactctcattcagaatatgttggtatggttgttggtaacttgacttccattatcaaggaaatatacaagagaggagctaggaaatttgtgttcatgaccttgccacccctgggttgtcttccaggcactagaataattcaattagaaggaaagggtaaatgcttacaagaactttcagcccttgcaagcttacacaatggagttctaaaagtagttctcttacaattggataagcaattaaagggctttaaatttgctctatatgatttcagtgctgatctcactctaatggtgaaccatcccttgaaatatggtttgaaggagggaaaatcagcatgttgtggaagtggaccatttagaggagtgtatagctgcggagggaaaagaggggagaagcaatttgaattatgtgacaaacccaatgaatatttattttgggattcttatcatcttacagaaagtgcttacaaaaaattcgcagatcttatgtggggcttcaccaacaactcttcaaatatagggccttacactattggagatctcttccaactcccatgacttgtttacttggctcattgtttttcttgcaacaaattaagtcaaaatgttgatcattataccttgattgtgttaacaaattgcatgtataaccgcttggtccagtaataattatttacgtaattgatggtacaatacaattataaagcttgtgtaatttaaatgaattgaattttgaagaaaggaaatgtgatgaattgtgccc

SEQ ID NO: 93689 - DNA, 473 bp, Glycine max
  unsure (1)..(473): unsure at all n locations
  Clone ID: PAT_MRT3847_55614C.1
ccgtcttcntttggggtggaacgnataatagtttttttttttttttttttttttatttgaaaacaccctttattgaacaaaaaaaagcccctggtttggggggagaaagttctacaaactagggaacacgggcgaagagaaaccaaaaaaccacatttttttttattgttgggggtgttaaaaaggggggaaaaataagattaatggctgtaaaactgaaaattgtgttgttaaccccaaaaagaagcgccaataaacccaccggaaaagggctaacttttgaaagaaaaaaaattttaaaaaatattccaagtgtggggcaaaaacaattccttgtggattaggggggaaggtgtaccgcacaacaaaaaaaaaaaagggtgggttaactatcacggggggtaacaaatgtttcttttttaacgacgggttgtggggggtaaatccttaaaaaaataagacagttgggggga

SEQ ID NO: 93690 - DNA, 268 bp, Glycine max
  Clone ID: PAT_MRT3847_55615C.1
cttgttcacccttccccttctccttacttctcactctctttccacaacactccctttctctttccccttacccttcttctgtgtgtgatgatgtagatagagaataaaaagagaccagtgtgcagtgagaaagactttggcacttcttgtgtggctttgtattgttctctatgttggaatttgttgatgggtgaagagggagaagaggtgtcaagagataaggaccagcaacacatgggagcttatggatatgagtggtcgtttagta

SEQ ID NO: 93691 - DNA, 480 bp, Glycine max
  Clone ID: PAT_MRT3847_55616C.1
gggaacaggacaattccaaaaattataataaaccttcacaaccagcatttttttggtcaagacggaaaaaacccattaaattatgggctttgaaacaatcggaaaacgggggaagggaataaaaaaaaacaaggaacaccccttgccagttaggggccccacccaacagggccccacccatagtcccaatcaaaggggaaaaagagagagagccccatccctcctaaaaaaagcataactgttcctttccatccaaagggaaaaaacatgcaggttttgctcagggcttccaaaaaaggggggggtctgcaatcatggaagaaaccacgtaggggcccatgggggaagcgggccttttgccccaaaaataacccttccctgctttttttggggcccccccaaccctaacaaaagccccacggtttgcaaccccccaaaaaaaggggttgatgtcagcggtttcggggggtcctgtaaaac

SEQ ID NO: 93692 - DNA, 417 bp, Glycine max
  Clone ID: PAT_MRT3847_55617C.1
aaaaaaaaaaaaaaaaaaaaaaaaaaattataaaaaaaaaaaaaaaaaaaaaaaaaaaaaaaaaaaaaaaaaaaaaaaaaaaaaaaaaaaaaaaaaaaaaaaaatttaaaaaaaaaaaaaaaaaagggccgccctttttaagggttcaagttttccttccccttctttccaactttttatttttttttttggtcccctaaatttaatttatttgccctttttttaaaaacttcttatttggaaaacccttgcttttcccaattttattccctttgaacaatttccctttttcccaatttgctttattaccaaaaggccccgccccattcccttttccaaaaatttccccaccttaattgccaattggacccccccttttaacggccttttaaccccgccggttttggtgtttccccc

SEQ ID NO: 93693 - DNA, 245 bp, Glycine max
  Clone ID: PAT_MRT3847_55618C.1
aggctgcaccctctattatccctcaaaaaccaaaaccctaatggcagagcgcggaggtggcgaccgtggcagcgaccgtggcggttaaagacgcggctttgaaggacgagggcgcggacgtgacagaagcctatgccgtagcccaagtccccgccgagaggaagaggagaaatgggttccaatgaccaaactgggtcgactgctgaaggaagctataataactatccttgaacagatctaccttc

SEQ ID NO: 93694 - DNA, 349 bp, Glycine max
  Clone ID: PAT_MRT3847_55619C.1
cccatttttacgcgaggcacatgaatgaatcgacggggaaaaggcagagggtgatggagagtaacgaaccacctgcaataacactaggtagcaagcaagacaagttacaccactggacttgacaatgagaaaagaaggatgaagcagcagctcgaggaccccatccatgctaaaaactgaagactaagagggtaataataagacattcagagacctatgaacatcgaagaacaggcaacgaaaagctcacacaaaaagaaacgactgcaagaacgaacgaaaatagaagccctcagcgaaattatgaaacgcaaccgcatcaaaaaaacagggaaaggaaaacttaaac

SEQ ID NO: 93695 - DNA, 193 bp, Glycine max
  Clone ID: PAT_MRT3847_5561C.1
gcttttggggttgtagataagttgccccttctgtcaggtgtgttttgccttgtgatgttttcttggtatgggcaagttgattgccttgttgacattttggtagcactcggtttaaatggccaataattgtgaaaactccaaaagcctatccatctaacttgctttgtcatgaatttaaattttagggttgcgg

SEQ ID NO: 93696 - DNA, 265 bp, Glycine max
  Clone ID: PAT_MRT3847_55620C.1
ctagtctttgaacactcatcaccatgaccaagcatgttcttaccctaagtttaccaactattcagtggctgcttcgctctgagagagcaggcacagcaaaatgagtgccagatccaaaagctgaatgccctcaaaccggataaccgtatagagtcagaaggtgggttcattgagacctggaaccctaacaacaaaccataccagtgagccggtgatgcccacacacgctgcacccttaaccgcaatgccctacgtagacctacct

SEQ ID NO: 93697 - DNA, 362 bp, Glycine max
  Clone ID: PAT_MRT3847_55621C.1
taggagtaagacaagggccaaattcccctcgtggtagttcccaattcacctcatgcagagtcattgtctcaaagatattcttcattaatatgacttggaagaaagggaggattcgactttataaagttaactacaaactttggaactcccacaagtataatttttattctcgcaataaccttttctttatttattgtaacttttgaactttgcttgtcttgctttattttattttgtcatccttctttttttcacgtatctagcatgagatgatgtgaatatgatttttcgaaaaaaaaaaaaaaaaaaaaaaaaaaaaaaaaaaaaaaaaaaaaaaaaaaaaaaaaaaaaaaaaaaaaaaa

SEQ ID NO: 93698 - DNA, 272 bp, Glycine max
  unsure (1)..(272): unsure at all n locations
  Clone ID: PAT_MRT3847_55622C.1
caattttcgtacaatacaaacactttctctcggatttcgtttcatggaatcgccgcattcatagcacaactcttcaaaatgtattccttcaaagacaaagtatacagaaactctccatctatttncaactctcctcctcctggcccaggatagtcatattcgcaagaggataaacctgtgtgctcatatttatcttaaattatcccttccatcagttgtagaggatcgaagtcaatcaggattcaacatgaacttaaaccaattcaatcggt

SEQ ID NO: 93699 - DNA, 684 bp, Glycine max
  Clone ID: PAT_MRT3847_55623C.1
aattcggctcgagggctcattctactctttccctctcaatttcaaaagtttgaaacgcagcgtctcagttcaatcacgttcccatggacgacgaagctattgctaacggtaacggagctccgtcgcctccatgtgtcgtttcggtgtctgcattatccggctcccggcgccgcctatcgacgagcttcgtggagcggagccgcctccatttctcgtcgtcggagaagctcaagccaatggcgtgggtatcgctccagggaaggctcctcaacgccgacgaagccagctcggctcgaaccatcggcggcggctcttcagcgccgaactagccattgcttggaacctcttccctcccatccacaggtttctcgtagtcgcggtcattggcactgccgttgcacgctcccgaaaagaccttcaaatattccaactcaaaaactccgttcatctaagggaccaggtgctgttaaacatgcagcaaaagcttgatagtctttgcgagttggttaacaattctaaactacactcaaccaataagtcttgtgacaaggatggggaattgcaattaaatgagactcttggctctgggaaaattaactttgttgattgtggttgttggcattgtgagcaacactctgctttccttaatgaattaatggttgattctgttgcaagaacctctgg

SEQ ID NO: 93700 - DNA, 1688 bp, Glycine max
  unsure (1)..(1688): unsure at all n locations
  Clone ID: PAT_MRT3847_55624C.1
attcccnngggtcgaccccnacgcgnntccgggttgattgggctcccagacaactgtaatttgtaagtatgtgaccatgggtttcttcagtggtaattggaaaaattgcgtgtaggaaaaccagcccttcattctttaaatgagaagggtgctgagcaaaattttgttacacctgcttctagttctattaactcttttgggaatgtgatattacccaagttcaaaggtgtcccaagtatcataccccccaagattcattaaccttcgatgaagctgcactcctcaatgaggatgatactcacactagcaatataaggttggaaacagaggtgaagattatatgatttcaaagatatgataattttctgtgatgatgtgattgattatcaatccatgaaatctggcgaagatccaactttgggaattccagtgcatgaagagttgacaaatgctgcagatagtcccacattggttgattttttgcatgcagatgttacaagggaaaaagaagattccaataagagaaaaaaggatggctcaacatcatgttctctaaggaagaacagaagatgtttatggtggtgaggaggataaaggtgctaaaacctcaaggcagctgagaaaacaagcagctcgtaaacctgtaaacagttcactcaatgaggatgcctaactagataatgcggagtgccttgatgatagtgatgttgattctcacttgctgtgtagtgaagaatatgcatcaagaagtggcataatagggccatttggtttgttagctttagcatctgaggaccaaacagaacacactgcaattttcttcagaatatatagagctcccaatagatatttatgcctcatgtgcagtgaccaaagcaggtcttcattgaggcaggaccttgataaaaccccatatggaacaatctttgacattgaccctaatgtcaagacgatttcacttagaagtttgattgaccgctccattattgagagttttggggagaaagggagaatttgtattaccagtagagtttatccctcgttggctattgacttgaagataataatgaccttgacccttcttataattctaatggagatgaacttcaagaaaatgatgacgagtatgaagttgattatccatccaggaagagaagagtatcaaatagttcacagaagaaacctgtggctaaaagtggaaaaacatctcaaaagcctaagaaggctaatgatgatttagaaaaaactgaggaacctcccaaaaagttctctcattcaacccgacgaagaaaaagatgcgtggacaaggctctgctggaaattcctgaggatgaacttgatcgtctaaatatacctattaaggatattattttacttgaagaacatagggagcggctggcgaaaaaagaggcgatgacttcaaatacttcttccaccaaccaaagtggtggagattctcttcatgaggctggttcttataatgaaggggcttatgatgatggagcttatgatgatggggcttataatgatgaggagttcttaggttcagaagatggtagagacccatatgataatcaggccaatgaagggataacatcaacttccgttttactcaattaccagtctttcagggaaaagaagacacctaggggaaaatggtcaaaacaagaaactgaactgttttatga

SEQ ID NO: 93701 - DNA, 177 bp, Glycine max
  unsure (1)..(177): unsure at all n locations
  Clone ID: PAT_MRT3847_55625C.1
aacaaagaacaaagcaggggttttttccaccggaanaaaaaaagcataaaaatacccttatattggcgaccaagtaataaaatcatggcaagttccggtattttaaaagagaattctttttctcttaattaatagaataacaacttttggtataaataagctctgtacaaaatgatt

SEQ ID NO: 93702 - DNA, 289 bp, Glycine max
  Clone ID: PAT_MRT3847_55626C.1
cgtaaaatggacgcgctacgtaagtatcggatccgtgtaatagcgggcgccattcgttcgtaaaaaaaatattttttttatattaaaattaaaaatatataaaaaaaaaaaaattttaaaaaaatataaaattaaaatttaataaaaaattttaaaaaaattttatatatattaataaatttaaaaatatttttaaataaatatgctttttttttaaaagtgaataaaaatatgaaaacccttggtattaccaaaaataaatgctattgcagtaaaataatgcttttaa

SEQ ID NO: 93703 - DNA, 284 bp, Glycine max
  Clone ID: PAT_MRT3847_55627C.1
gtgatcccattgaaatattaaaactttattggtgcttcagcagtttagctttttcaattgaattaacgtgtaatgtaaatgctgttatttattctctttgatattttactttttattttcttttcttggggtatcccagaggttgaaaatgatggtgattttaaagttcatctgttctcttcatcatccgagttgcttgaaaagcttcatgaaaaatggagttcagtggagaaaccaccatacccagctatgtattctagtatttatggaggtatcatacttga

SEQ ID NO: 93704 - DNA, 555 bp, Glycine max
  Clone ID: PAT_MRT3847_55628C.1
gccaaaacaaccaaaaacgggggaacagtccccccaaaacagggaagagtccgacgcccgaaaggacgacaacccggggggggggcccagacggaaaggggggaaaaaaaaagaaaggggagaaaagggaaaaaaaggaaaaaaaaaaaaggggggaaaaatccaaaaaaggaaaaaaccaaaaccggaggaacggttgcccaaagagcccacgaaaagggggggggccaagggccagaagggcaaaaaatggccccaacaaaaaaaaagggggggaacccaaaaaaaggaaccctgaacacccccccccaagggggaaaaaaaaaccgaggggaggggtgaaaacgggagaaaatggaaaagggggggggggcgaaaaagaaaaaaaacgccaaacaaccggggggccaatggaaaaaaaccccttgagccacggctgccaaaaaggagcccgcccggggggagcaaggggtaaaaggaaaaaccgggaattggaaaaccaaaaggcccaaaaaaaacaaaatcttataatgggaaaaagggcccccgcaaaaa

SEQ ID NO: 93705 - DNA, 383 bp, Glycine max
  Clone ID: PAT_MRT3847_55629C.1
gctgcgagaagacgacagaagggtatatatattattaaactatgcataattcggaccatcgagctgacctataaaatcatgactactacttcaaaataatcatatttcatgttacaattttataatatttattatggtatgttggatgaggtatattaatgtgtgctttaatgttatatgcttataataaatataactaatttatactatcaactattatatcaaatatttaacataatagtttataatataatgttagcataatactatcgtaattttattataaatttcataatccaatatttataatgtatacgttatctgttacataaattaagattccaatacatattagctggtaaccgatcatgatgatatgcata

SEQ ID NO: 93706 - DNA, 236 bp, Glycine max
  Clone ID: PAT_MRT3847_5562C.1
ccaacgcggacgtcaaattcgacgtcagaaatcatggaccatcttagattcattcatcgaggagagactatcacatatggccatgggcacttttaagactctctgaaagcactcaatttactagacgtgcagactccgactacgataacgaagagaagacagagctctacgcaaactcgaagaccacgcactccaacgagataaaagacgttgacacaaaactaaaagccttagaa

SEQ ID NO: 93707 - DNA, 240 bp, Glycine max
  Clone ID: PAT_MRT3847_55630C.1
caactttgtcacatcttacacaacactgtctctctctcttctctttctctgcgattctctgaaaaaccagtacaagctctggagaaaccgccacagaaagacgagatctagtcgtggctggcctactcgacaaatggtatccccattaggtcatgcttcttcaccatacccctctcttgtctcccctcttgttacccttctctatatcgcctgcttatctcctttaactgcggcatgaat

SEQ ID NO: 93708 - DNA, 1683 bp, Glycine max
  Clone ID: PAT_MRT3847_55631C.1
tacgttttcatgaattcaacacaagggtacgtattagcggaatccacagtcggggaactacaacacaagagactgtaccttctttttgaagtctctgtgggttggggttttggagtgggagcaccaatggctttcttgatggcaattgtagtagtaggtgttgtcttggtgctctgtttttgctctgctctcttgaggtggaatgaagtaaggtacaggaagaaaggtttgcctcctggcacaatgggttggccactttttggggagacaactgagtttcttaagcagggtccaaacttcatgaaaacccagagagcaaggtatggcagttttttcaaatcccacatactgggttgtcctaccattgtttccatggatccagagcttaacagatacatcctaatgaatgaggcaaaagggctagttcctggttaccctcaatccatgttagatatcttaggcaaatgcaacattgcagctgttcatggctcctctcacaagtacatgagactagcactgctttccatcattagccccagcttgatcagagagcagcttttccaaaaaattgatcagtgcatgagagcccaccttagcaactgggatgacaaagtcatcaacattcaagagaaaactaaagagctaggtatcacatcatttctgatgcagagtgctggcatggaatctggctcattatctgactcattcatggcagacttctttaagctagttctaggaaccccttctctccctattgatcttcctggcacagttttccactgtgggttgcaggcaaggaagactatagtgaaaattcttagtaaactcctagaggaaagaagagcatcacatgaaacctaccatgacatgcttggttgcttgatgggaagagatgaaagtagatacaaactaagtgatgaagaaatcattgatctagtgattacaattacgtattctggttatgaaactgtttcaactacatcaatgatggcagtcaagtacctccatgaccatcccaaagctcttgaagaactcagaaaagaacatttggccataagagagaggaaaaagccagatgaaccacttgactgcaatgatctcaagtcaatgaggttcactcgcgcggtgatttttgagacctctagattggccacaatagttaatggggtcctaaggaaaaccactcaagacatggaactaaacggctatttgatccccaaaggatggagaatatatgtgtatacaagagagatcaattatgacccttttctatatcctgatccactaacattcaacccatggagatggatggacaagagtttagaatcaaagaactacttcttcatatttggaggaggcacccgacagtgtccaggaaaagagttgggaataaccgaaatttccactttcttacactactttgtaactagatacaggtgggaagaagtaggaggagataaagtaatgaaatttcctagagttgaggcacctaatggactgcacataagggtgacatcttactaactaggccgtgactgtgtgtacagtaatgagatgagatgtaacagattgtagggtatgtgtgtatgacaattatctaacaaatatatttagtaaaagaaagaaattaaatttttttttttttttaaaaaaaaaaaaaaaaaaaaaaaaaaaagcggcccg

SEQ ID NO: 93709 - DNA, 426 bp, Glycine max
  Clone ID: PAT_MRT3847_55632C.1
acgggtgcgagaagactacagaagggcagtacacagcgtcttaacaatgccagcattgatgttaaggggaggatcacgaggcattccaggctttctgggcacaccagcaggaattataacaacatcggcaccctccaaagcttttccaagctcttcatcaccttggtaccccactacctgcaatcccaattaacagaaaaagccagctagctcaatcaatagcactacaacattaaactacagtaaatcttgcacatccctgcaaaaggggtacattaacttctctcagaaaatgagttcaaccaattggactataacatcacactataataaagcttgcatccttgcaaaattcctactagaaaaactagattaatgcacctcacaaaaacagctcaaggcattgtgctacaacattaaagtaca

SEQ ID NO: 93710 - DNA, 557 bp, Glycine max
  Clone ID: PAT_MRT3847_55633C.1
ggcgattggatacagggaggatgcagatcccaaggctgaaaggggaggaagctgggaactgtgcaccaagttgccaagcaccaggactcattcctggcttcaagtggctcccaggaaggggcgagtgaaataggcatggaacagcccattcttatcacagacctctgagatcctagctgtgagagaccccatgagccccgtggacatttgagttgacaggaataactgcctagagtcttggcagagacagaattccaggcagcatggatcccagagggtctggtgcgggaacaactgcagtggagcatggccatggactcccatcccccaagactcaccatactcctctaggtgggtttagagtttgttagcagctggactgggaaagagcagggctgtcttacccatgggatggagccagtcttatctgaacgacctcttctgctggcctctcccagggtccctgccttgccacacatatttgcagaacagcctcagctgccctgctgaaatgcttgccagtggccaccaccatagctccttcactgacagccccc

SEQ ID NO: 93711 - DNA, 209 bp, Glycine max
  Clone ID: PAT_MRT3847_55634C.1
gagatgaacatttttaaattaatctctcaactcatccgaatatctatgagatagtcctgcttgtgctgtggatagggattggtgtctgctcaagtttatgatagatggcatgaattcccgtatattgctggactctgcattgagttgcgtgttggcttcttctcctgtttgcagaaggcaacaattcttgattgggtgtgtgggaggct

SEQ ID NO: 93712 - DNA, 433 bp, Glycine max
  unsure (1)..(433): unsure at all n locations
  Clone ID: PAT_MRT3847_55635C.1
gtgccatcctcctcaacaccaccaccacctttggtaatccccaacaacaaccacatcctcctccttccgccaccaagacaagccccaaactcctcacatcgtaacctcctctgtcaccacgcgccactgcaaaccaccaccaccactgagacaacaacccatcctttttgaaacaggatctggaatttcctggttgaacgacaaaaagaatgaagattaagaaggaagacatggaaatttggtatcaagcttgcattntaatgcttgcattttaatatcaaggtttcatgcgttgtgaaatttggtatcctagtagaaaggctcctgtaaatgaaaatttagaacccttgtaggctaagagatttatgatgtggcagggaaaggtgaagggtaattgagtattgaaacctaagctgggtaattgagtcttgaa

SEQ ID NO: 93713 - DNA, 250 bp, Glycine max
  Clone ID: PAT_MRT3847_55636C.1
cttaattattaacactaccttagctcaatatgggcaagcccttcactctctcactatcatcccattgattgctactcaagtcgagtgcctgcattgctattagctccagcaagctcaacgagtgccaactcaacaacctcaacgcgttagaagccgatcaccgcgttgcagtccgacggtggactcattcaaacatggaactctcaacaccctgagctcaaatgcgccggtgtcactgtatccaaactca

SEQ ID NO: 93714 - DNA, 419 bp, Glycine max
  unsure (1)..(419): unsure at all n locations
  Clone ID: PAT_MRT3847_55637C.1
cgcatgcgcccgacactcccagcgggcaaagcaaagngcacagatgattgagagtctcacgganagggaaccctagcaggagcagtgaggatcgccagggtacgggccccatcaagagaccccacacactgggacagaccatgggacatccgagcagagaagtgcctacaaacaagggccgaatgggaaaccgaccactcgaaccacgagacaacaaaacaactacggccatcaggagctgggaggagaacgggccccggagacaatctacctacttcggcaatggcaacaccacctgcatacattattcagagcgaccacttgcaagagctgggtccacactgacagatattgaaagggggagacgccaaagatcgcacggacgagagagccggcctcactagaccaagggcacatag

SEQ ID NO: 93715 - DNA, 380 bp, Glycine max
  Clone ID: PAT_MRT3847_55638C.1
gaccattgaaaagcctaatggcaatgcttcactgaagactgaaccaggagaaatccaaaagcaaggcaatggcccaaatgaaaaacaagtgacaaacatagaaaatgaaaccaaagggaatggtattcaatcaaagctttcgagttctgagggaaatggcataagggtcataacaatttcaggggaaaacagaggtgcacacatgcaaataaccaaatcccgaaagaaacaacaacaacccattcatcacaagatgggaaattctgatggtgagaaagtgagaacactatcttcgcctccaatgagaggtgtgtacgggaacagcaatgtgcagtgtgtcaacaactcaatgttgttccacactagtttaaccaaccatg

SEQ ID NO: 93716 - DNA, 343 bp, Glycine max
  Clone ID: PAT_MRT3847_55639C.1
atcagtttttctaaatccatttcactaattatttctgcccttgtctcaccaaaggcaggaaccaacacttctacctctctccttctgactctctcactctcacccaggaagtcagatgtcatatgcgccaccaagccctcctcatgagaatcttggccatcatagcccgcacggatcttcatccagctcgagttatcacgaccaaaaccttacgatttccaacatctgccgcattatgaagaatgctatgtctcccaacctcaagattgctaacgattccaaagacaccgtgcatgaattctgtactcatttcatctacttcattaccaacgaagccatttat

SEQ ID NO: 93717 - DNA, 385 bp, Glycine max
  Clone ID: PAT_MRT3847_5563C.1
ggcgtgcacttcagtttacagctcccgaaaatttgtccttcagaggtcgtggtggttttggtggtggcggtgggttcaggggtggtggtcggtgtgtcaggtgctttggatgtggcggttgaagcagatgcatttccctagtcctcaaatgtaaagtctgaatttgtggcacaaatatttttaaacactaaattgtgtgaaaaaaaatatatttaaacatgttatttaaattaaatttttctctactttccagatacaatgaaaaagaaatgactttttgatcatgaacggtggagggactaattttgttccatcacatttttcaaacggattcccattaaatatcttatccttttttttgttacacataatatcttattctttt

SEQ ID NO: 93718 - DNA, 462 bp, Glycine max
  Clone ID: PAT_MRT3847_55640C.1
tttttttttttttttttttttttttttccaaacatttcttttttatcttgcctccaacaatgagttagagatttcattgaacgaatacccatcagtttttcttggaaaagattctgtcatggttgagtgaacttttcctgtgtaaaaccctggttgacttggttcgggcaataacttttcaccattcaacattaaaattactgatgacatgtttggtctatcctctggtctttgttgcccgcataacaaaccaatatgaatatttcttattatttcagataatctggctgaattgcccaataagtcatctatgaattccattgaccttttctcagtccatagtctccatgcatgcccaaaaagatttaagttttggtatgggtcacaaaatcccctgatctttctcccacttataatctccagtacaattaccccaaaactgaacacattttgtttgactgg

SEQ ID NO: 93719 - DNA, 1170 bp, Glycine max
  Clone ID: PAT_MRT3847_55641C.1
ataacatagtcctcctcctttgtttttcgacatcacgacatcacatcgcagagaagaacagagagatccatcgatcaattaatttagaagacgacagttggtgggcgtttgtaagagcatataaattacaacggcttctagaagactactgatccgggttttggacattcatattttccttgcgtttccctttcattttccctcactttctcgctcgccaaacgcccctctctctcctccaatggccgaccagctcaccgacgaccagatcgccgagttcaaggaggccttcagcctcttcgacaaggacggcgatggttgtattactactaaggaacttgggactgtgatgcggtcactagggcaaaacccaactgaggcagaactgcaggatatgattaatgaggttgatgctgatggcaatggaaccatcgacttcccagagttcctcaacctgatggctcgcaagatgaaagacaccgactccgaggaggagcttaaggaggctttccgtgtgttcgacaaggatcagaatggtttcatctctgcagctgagctccgccatgtcatgacaaatcttggggagaagctgaccgatgaggaggttgatgagatgatccgcgaggccgacgtcgatggtgatggacagatcaactatgaggagttcgtcaaagtcatgatggccaagtgaggaccattcaaccataacctaaatttgaaaagcatataaagagaagagggacagtgcagataagttttgatgagaattctatttccattaggtccatcttgatttggggttattagcttttgttagttgagtgtctgtttttcttgtttgctttaactggtactacttctgctccctagttatcctacttgtttgctttgttccttgtttttagtagcttcggttagctgtgtctcaccatgctttgttactctccattttcatatttattttttggttattattatgaacctagaacaattggatgcatttgtgttttttacatgtggttggctaatgctgttaatattttatatcttttgccaaaaaattgttattatgatcattatgaattcaatgcaatctgcttgggtttaaattgtggaaattgttatgctcactgttttcatcaattgtgaatgatccaacattttacaatc

SEQ ID NO: 93720 - DNA, 277 bp, Glycine max
  Clone ID: PAT_MRT3847_55642C.1
ctgccctttttttttttttttattcaaaggatattttattatattggcgaggttttggggaggaagaacttttaaatttcaagagcctttacaaagaatcggcaggtacaaatccaatggcaccccaatgggggcaggggtcataaaggaaaactgcccaaaatgggaattacaagggacaaatttatttgcaccctcaagatattttggtttaatggtcggaaaattacaactatttcaaggattgaaataagttggggttttttattttttttta

SEQ ID NO: 93721 - DNA, 339 bp, Glycine max
  Clone ID: PAT_MRT3847_55643C.1
tgacacaattttttcacctttttctctattagtaggattcaaaggttgcagaaaatggtcaagattgcatcgtgtactttgatattatgagaaattccagataaatgtcacaatataattataattaaccaaaaaaaccttggttttacaactaaaatcatggtctttgactgttttgttttttaaaactttggtcgaattatatccaaagagtaaaaaaaaacatagaatttccaaacttcatgttaaaattaaaaatcttgatgttacatcaaaaagtatggttatggactgttcttttaaaaccttggtcgaattatatttgaagagtaacaacat

SEQ ID NO: 93722 - DNA, 276 bp, Glycine max
  Clone ID: PAT_MRT3847_55644C.1
aggtttccgtcatcactgtatggacgtcctccttctttgggggggggggggggggaaactgggaaggaatgagcccagggaaaaatgcggctagtattacaagcatgcatctaaatgaaagcttttgaattcgaacattgtatggtgtaggtgattactggtggatagcgagtatgaaggacttagtcatgaaatttgcgcagtcgtacatgtggtactgcccgaggttggtgggcatgttgatggcgtgctaattgtgccagtattggaggtagt

SEQ ID NO: 93723 - DNA, 276 bp, Glycine max
  Clone ID: PAT_MRT3847_55645C.1
atatgaaatcattgccatttgtgaatttccaaggggttaattataacctacctaaacatctgtattatgataatgtaatctcagcaccattatttatatcattatctctacagattgactgatatctctttcatactgaatttaaaaaaatatatctttgacacaatacaaaattaacttacttgatcctgtgttgagcatgaagaacattctcaaacatttacatatattaattttacttttttaactctatattttatcttgagataacaagaa

SEQ ID NO: 93724 - DNA, 448 bp, Glycine max
  Clone ID: PAT_MRT3847_55646C.1
gaaacggtgggaatatgcatgcatttagaattgttaaacacaatagcaataacttttttccaacatcttttaataattctctaaattattaaataaaattgttgactatttttatattgtcctaatatatgaaatatatatttttttttataaacttattgctaaaaagacattgaaaagaatacagtacatgatattatccgtccaataatcaacagcgaaagtataaaatattgcaaccaattaaagaaaacaacagtcaattatcaccagcgtcatctattatctgttattaggtgcatgcgatgttggttgtgtttcatacagctggattcattttgtagcaatgatagttcacttgtttataaattaaactaagaaatgattggagggtaagcgaacttggggctacaaaccaaccatagccacggccattatactgtagtct

SEQ ID NO: 93725 - DNA, 587 bp, Glycine max
  Clone ID: PAT_MRT3847_55647C.1
gaataaaaaataataattaaaaggagatgcaagtaaaggcatcaactatagaatacttggactgcatattaaaaaacaaaaaataatgtcatgacatcaaaagtctaaagattctaaaataaaacctattacgtaggcatagaaacggagaatttggttagtttgtttaagaattcaaattcaaactttattattgtcattgcccacaaaaaaaaagtctaaaataaataaaataatgagaaaatgaaatttcatattgttatgtataaaaaatcatgttgcactgatacaagtgtaatttaggaagcataatacctggaccaaatttatgattaattcaaaaaatggtagcttgataatctttccaaagtgctttatcatcccacgagtaagtagacatagcttcattgcaatgtgtccagtttctgacatcctccatctcagatgcaatttccaataccagtttttcaagaacatctctctccacctctattgcaatatcttctgtatcaacttggatatttagccatgaaccacgtcttgctaagtccttttcaacaagttgttctaacgttaaaggcgatgga

SEQ ID NO: 93726 - DNA, 413 bp, Glycine max
  Clone ID: PAT_MRT3847_55648C.1
ggtaaagtttcatctgcaaggaagatgttgctggtttaacacaatctttatctcggagtggggtgttttctcatctccaggaattgagtatcaggggatgccatcaaatagagaagttgctgacgccagggttagtgccacaacttcaaaacctggagtctatatcggtctcttactgcaaatcaataaaggagatatttgcaggagatagttcccacaacattgcacttcccaatttaaccaaattgcaactagcctcggtcccagaattaaagacagtgagcacaggaattttactcattaactctgaggatatattgcacatcaacaattgtcccagttatgaaaaacccagaattggccgagtatgattgattctggagattcagatcatgagactcaatgtatgtggc

SEQ ID NO: 93727 - DNA, 287 bp, Glycine max
  unsure (1)..(287): unsure at all n locations
  Clone ID: PAT_MRT3847_55649C.1
gtcncangcangcgnacgtgggctcgggattcggctcgatggcngntttctnccaggggnggagactcgnatangnatggtggcgcacnatcannatganagatccgntaaattcngctttctncggnggagatcgngttctnnaactacttccantgaaacccgaagntatgntnnntnanatnntcgttctgaanacgntagtgccatgagnntccaatgcgtaatntggagaanctcgcagngttgngagaagccccccatatgtncgagggnagancggagac

SEQ ID NO: 93728 - DNA, 168 bp, Glycine max
  unsure (1)..(168): unsure at all n locations
  Clone ID: PAT_MRT3847_5564C.1
gcacacatgacacngagagnttggacatacatnacntantaggcctatancgggntntgtncaccatagggagtggngtcgatctatgatcatgntggnctctgaacgcttgatngcacagngctcgcatagagtttcnnncttgtgacnaangtngtggagtcctac

SEQ ID NO: 93729 - DNA, 382 bp, Glycine max
  Clone ID: PAT_MRT3847_55650C.1
gtctctcttggggccaggcctgcattgatgttaacactatcttcgcagagttcagtgagtaatcccttctggattgccgattacagatgattgccaaatcatattaaatgagatgcgcatttgctatagctatgaaaaattactgcgccaggctaaagctccaagtatgtatctacaatccttcaaaaatttggtttctttgtgagtgtatggcgatgataacttaattggagttcatgaactatatcaatgcttacttcaggggtactgaattgaaaagccactaagttctttataatactcaccattactgatgggaatgacaaaactagcgcgactttgcaatttagaaagaaagcacatcgccgatctttaaagagaa

SEQ ID NO: 93730 - DNA, 734 bp, Glycine max
  unsure (1)..(734): unsure at all n locations
  Clone ID: PAT_MRT3847_55651C.1
gttagatctacatggccagtggcgtgactacagtggactgcgagaaacaagttagatcatggaggctgatacgttctctcatgcaactattaatccccacatgtaactgcgccaccattatagaagacggccaagatgtaacaacaacaacaaacgagaccctccgaaacacaagcaaatatacttattcaccatcatcgtcactgatgagctccaccaccaatatcacaggcacgatcttcggataccgcagaggaaaagtgagcttctgcattcaggcaaacgccaactccaccaacccaattctcctcctagagttggcagttccaacaaccatcttggccaaggaaatgagaggaggaaccctaagaatcgccctagagagcggcaacgacgacgatgacggcgacggcgacggccaagtagacacacttttgtccacgcctttgtggactatgtactgcaatgggaggaaggtggggtatgccgttaagcgcaggccctccaacactgatttcgaagcgctgaggttgatgcgttcggtggttgttggaaccggggttatgaagtgcaaggagttagtgaacaaagaagatgatcaacttatgtaccttagagctagctttcagagggttcgtggctcagacaactgtgaatctttcnantngattgatccagagggagacattgatcaggaactcagtgttttcttttttaggttcaggtgaactttt

SEQ ID NO: 93731 - DNA, 928 bp, Glycine max
  Clone ID: PAT_MRT3847_55652C.1
ccacgcgtccgttggaatacaccttggacttgggaatatctcgttttatgatggcaaatagccaaatactaccccatctttaactttacttcatactctcgcttcaaatttgtattttcataagtatcattaagatattactgaaacacactggaacatcaaggttaaagagactagttacagtctatagtgtactcttaacactcttcttcttactgtcaattattagtattattttcttacatcagccaataatttttttaagttaagccactaactcagttgtttaatttaaccttatttcgatctttgaagtcttttatatctttcttcttttttgttttctgttcatgtttccatcaactatccaggtttcttatgttaaatagaccaaaagcttccttcatttttttgatacccaacaatactaattgttggtgataatttctctttatacacatataagaccagtaaaacaagtgcatgtatgctaaaaggagagaaccttgtctcatgttgatcatttcaaatatgatctttttttatagctgcattggaacaccggttcatcacacgaggatccagcactcttctcaaatcccgaaacttttgatgcttcaaggtttgaaggggcagggcctacaccattttcatatgttccatttggaggtggcccccgaatgtgtttggggcaagagtttgctagactagagatacttgtgttcatgcataatatcgtgaaacggttcaagtgggatttggtgattcctgatgagaagtttaagtatgatcccttgttagaaccagtaaaagggcttgcaattcgacttcatccttcccatttctagtcaaataccttcatcatacgaataatccattgtttagaagttttctaagtagtcatcttatattgctatattagtattag

SEQ ID NO: 93732 - DNA, 694 bp, Glycine max
  unsure (1)..(694): unsure at all n locations
  Clone ID: PAT_MRT3847_55653C.1
ccggtnccggcccaccccggcctcgaccccaacacaatggcggccaccgcttccagaaccacccgattctcttcttcctcttcacaccccaccttccccaaacgcattactagatccaccctccctctctctcatcaaaccctcaccaaacccaaccacgctctcaaaatcaaatgttccatctccaaaccccccacggcggcgcccttcaccaaggaagcgccgaccacggagcccttcgtgtcacggttcgcctccggcgaacctcgcaagggcgcggacatccttgtggaggcgctggagaggcagggcgtgacgacggtgttcgcgtaccccggcggtgcgtcgatggagatccaccaggcgctcacgcgctccgccgccatccgcaacgtgctcccgcgccacgagcagggcggcgtcttcgccgccgaaggctacgcgcgttcctccggcctccccggcgtctgcattgccacctccggccccggcgccaccaacctcgtgagcggcctcgccgacgctttaatggacagcgtcccagtcgtcgccatcaccggccaggtcccccgccggatgatcggcaccgacgccttccagaaaccccgatcgggaggtgagcagatccatcacgaagcacaactacctcatgctcgacgtcgacgacatcccccgcgtcgtcgccgaggctttc

SEQ ID NO: 93733 - DNA, 240 bp, Glycine max
  Clone ID: PAT_MRT3847_55654C.1
tagggctcgtgcaagacttcgttgagcgctcgcagtatcgcagagcttgggtactacgcgaactacgtcgcgcgactctgctacatcgcgtgtgggtttacactgtaccgtcacatccgtgaaatgtacgtgtacgagatccagcatatgtactatagctccttcgatacccgctcggatcgtctcgtcatggttaccgctatggcctccgtttacgccgtcgcttactacttcgactca

SEQ ID NO: 93734 - DNA, 471 bp, Glycine max
  Clone ID: PAT_MRT3847_55655C.1
ccacgcgtccgatttgtcgagcgaacacgcaggagacaggaatatgctggatggtttcctcggcctgatcacacagagggcaagcaactggatggggcagacctctttttgccagtctatcagctgtccaaaccctgtttttgattgccaaccatacaaagaatttgcatcttaagaggcccaggtcttccagacacgtcgccaagggccaaaagggatagagccagtaaagagagcatcataagctgatttgctacaataagtaccatgagcagagaggcgccagatgtgttggtctgcgatgtcaggttgcagaactatcccatcaaccaagttccatagctgcagatactccactaggactgttacagacaatcctccatgaatatctaacacccattgacgatttgtgagcccctcgactactgttcttcgctttaaagcccttctagaaatcatttggatcagggt

SEQ ID NO: 93735 - DNA, 1585 bp, Glycine max
  Clone ID: PAT_MRT3847_55656C.1
ggttcaaacccaaaaatcgtctttgtttgcttactgatttttgcacctaaagtgactcagtccttcattcactctctgaatccttcactgactaacccaacaatgcctctgcgccctcactgagatcgtgcccttcatcaatcccaagctgtcccgccgtctcctatatcgcttcaacgtcatgttcctttaacattgttgaagtgcatcttaattccttaactggagctcagccctaatttaaacacagtgacgccaccgtagtgggaagccatcgttgtctcggcgaagaatcctacaagatttgggaaatggctgctgcacgagggttggtactgtcacgtcctgttacttttgtaactgccaatgccaaaaagcttgaagaagttcgtgccatcttgggcaattccattccttttcagtccctcaaacttgacttgccagagttgcaaggagaacctgaagatatctccaaagagaaggctcgaattgctgctcttcaggtgaatggacctgtgttggttgaagacacttgcctctgtttcaatgccttgaagggtcttccagggccttacatcaaatggtttctgcagaagcttggtcatgaaggtctcaacaatttgccacagtgccgccgccgtagtgggaagccatcgtcgactcggcgaaaagtcctacaagatttgggaaatggctgctgcacgagggttggtactgtcacgtcctgttacttttgtgacgggcaatgccaaaaagcttgaagaagttcgtgccatcttgggcaattctattccttttcagtccctcaaacttgacttgccagagttacaaggagagcctgaagatatatccaaagagaaggctcggatggctgctgttcaggtgaatggacctgtgttggttgaagacacttgcctctgtttcaatgccttgaagggtcttccagggccttacatcaaatggtttctgcagaagcttggtcatgaaggtctcaacaatttgctgatggcatatgatgataaatcagcttatgccttatgtgtattttcgtttgcagctggttcaaacagtgaacctatcacattttctggaaaaactccggggaagattgttcctccaagagggcctaatgattttggatggggatcctatttttgaacctgatggctatgaccaaacgtatgctcagatgcccaaagaagaaaagaacaaaatttccccccgctccaaatctcttgcattggtaaaatctcattttgctgaagctggatatacttttgacatcaagaacgtctgaaagctgaatgtggtaaattataggcaacatgctctttattaaatttcccttgaaattgaagggaaattgtttctagcagtagcaatgtgggaattattttgaacttaaatgttgcttttgtttacaacttatccagcaagagagaataaaaaaccaaaattagaaaaatataccaaaaaagggcgtagactacagtggttaagtatgtgaatttgtgtatgatgtacaattttttttaaccattagataagatttattcacaaaaaaaaaaaaaaaaaaaaaaaaaaa

SEQ ID NO: 93736 - DNA, 146 bp, Glycine max
  Clone ID: PAT_MRT3847_55657C.1
ccaacacactcaacctccacacaaccaaactttcctatctcaaacctctttatctctatacagacaataatctgatactataatcactcaatctcatatcaatttactaattcaataccttaatccatcacatatactctactata

SEQ ID NO: 93737 - DNA, 559 bp, Glycine max
  Clone ID: PAT_MRT3847_55658C.1
gcacacgaccaaatcatggcttcctctttctcacaaccaattcatccactttgagatcagaattggatcggactaccctcactcggttgatactctgcattaacgattaaactttgaagaaccgcacctgcaccatacaatgggagaagtgaagctactgggagtttggcctagtggattcgtttacaggatcatatgggctttagagctgaagggcgtaaaatatgagtatatactacgagaattcaacaaggctgatttctctgatttgctgttgaagtataacccagtttacaaaaaggttccagttcttgttcttgaaggaaagccaatcgctgaatccatggttattcttgaatacatagaggaaacatggccacagccacacttgcttccacaggacccgtatgagagggccgtggcaagggtctgggttagttttgcagaggaaaagagcgtttcttttatgtcattctttgtgagtgttggagaagagtttcagaaggcaagaaaggaagtcagagaagtgctcaaagtattagaagaaaccattggggac

SEQ ID NO: 93738 - DNA, 396 bp, Glycine max
  Clone ID: PAT_MRT3847_55659C.1
cgcggagtattcaaaggtctaaaagggggatacagaaccatcgtccaaatcagaaaaatactcccttttagacctttgaatactccgctcaaccattttactctgtctagctcttctaatataggaagtttcagaatcatcctcgttactatcgaactaattcgagtttcattgagtgatcctaccaatgcctttctgaatatttttcagagaaagatgaatcacacaaaaacgtagtttggctttgacagaccccacccccaccccactttctgtgtgagaatgttgttgctttgatcatccttgttcatagtaacatgatgattggctgtggaaaagttaatgaatgaaatgcttcctttgtatgcaaggattacacggggagccttttcattg

SEQ ID NO: 93739 - DNA, 224 bp, Glycine max
  Clone ID: PAT_MRT3847_5565C.1
atgtcatatagaagtaattttgttacatttctactttataccaggtgaataaattagaaatgtaacaaaattacttctatatgacataattttgttacatttctaatttattcacctggattagttgtgtatatgatactttataccaggccgagccgagttggcgtcttagctacgcctatatggagtcgcataagtgcttgctgttgtcacggacattgatg

SEQ ID NO: 93740 - DNA, 511 bp, Glycine max
  Clone ID: PAT_MRT3847_55660C.1
tgctccagttcaatcaagcaacaccaccatatatgctctacttcagtgcacacctgatatttcgaaacaaaactgtactgaatgcttgcagagtgctttgtcagaaatttcgacattttgtgatggaaagatgggtggtcaatatctacggccaagctgttctgttagatatgagacctacctattctttgagcccatagtcgatgcaccagctccagcaccacagcctgccactgatcatgtgaccacgcccattggagaagaaaagaggaacccatcacgatccatcattgtgatagtcgtgccaatggttgtcgttatcgaactcctggccattatgtacaattatttaggagcgagaagacgaagacgcaacaaacctattcaaagtgaaggtgaatgtgattatgatgaaggggaactggcttatgacattaaaacacatgatcgagcgggtgcatttgactttgccaacatgaaatgttgaaccaatgacttttctgccgcaaaa

SEQ ID NO: 93741 - DNA, 437 bp, Glycine max
  Clone ID: PAT_MRT3847_55661C.1
gggcccaaaaaaaataaaccttttctttttaaccggaaaaccaagggaaaacccagaaagggcccccccaaattagttaaaacttaaaacccctggaaattttgggggggggacaaaaaaaaaggggatttaggcataaacaacttggggcaaaccctaagttcggcaaaaggaagggacccccctaaaataaaattaggggacccaaaatctaaaactactttttgggaaaaaaaggggaaaaacaaaaatttaccgccaaggcccttttaggggggggctctaaaaaaaaaagccgttttttccgaaagcttttcccacaaaggggggggcttttttgaaaaacccggttgatttgaaaaaaacccccggaggagggttaagaagacactattcccctttggaaaaattttttaaaggcccccccaaaaatttcc

SEQ ID NO: 93742 - DNA, 161 bp, Glycine max
  Clone ID: PAT_MRT3847_55662C.1
ccacgcgtccgcccacgcgtccgggcagcagtcctgtatgataatagttctgatggcatcaaacttggtggaaatgaagtatggcagttccgattggcttatgcaactaaatggctatgagttgttcttataatttgtccttatcatgatcgtttcatttt

SEQ ID NO: 93743 - DNA, 270 bp, Glycine max
  unsure (1)..(270): unsure at all n locations
  Clone ID: PAT_MRT3847_55663C.1
cactcattaattgcaagaatggnacttcgttgcttggtgatgtccctttctgttctcttcactcttggtcttgcgagagaaagccatggccagagacgaaggattttgggcatgtggttgggcaaaacannccccattccaaagttccatgcgagatcttctaaagcctggccnggnaggggttgaattngtggataacctcntgcaattggaggaacacangtaaccggaaacttcntgcaanaagtnngncttcattcanggnaaact

SEQ ID NO: 93744 - DNA, 357 bp, Glycine max
  Clone ID: PAT_MRT3847_55664C.1
ggggggggataagggaaatttttcaattcaatgcttgaaaatcgggcccttgaaagcctttctctttaaacaaaaaaaaattaaatcccccccccctttgggggggggcccaagggccaaaaagcttgggttccttgactttttaatagggggttgatccctgaccaagggcattaagcagcccccggtgggaaaaaaaatggcccttaaacaaaaccttactttttcaggagaataaccccttgggttctattcgtgaaaatacctttgggtcccacctcggattttaaccaaagattttctaacccccctctctgaccccatcagtttttacccctttcttggaaaggggggatg

SEQ ID NO: 93745 - DNA, 391 bp, Glycine max
  Clone ID: PAT_MRT3847_55665C.1
ggctcgagccctacaaagaaaacagattactcttgttgatggtgatggagtcaaattaaagtttttcttgtggggagagcagattctccttgccaatcttttcagagagggaagcatgcttgcactggacaaaccatacgttaatatttcagtggactgtgatactgagacaagtgaagacttatgtcttgaatacggaagcgaaacacaactatatttggtgccttatattcaacatgaagaacaggtgtgcgtaacattgactccaaaccgccgtcatggttcacggaccttgggttcttttaattccaggcaggatcttaagtctttctcaagtgagcttgccccgtgattctcaggggaccattgatatcagtaattatccttttcg

SEQ ID NO: 93746 - DNA, 472 bp, Glycine max
  Clone ID: PAT_MRT3847_55666C.1
agattccggtgttttttttttttcttttgaactaccaaggcgaggtaccataaacctgccaaaaacgtatgaactattgtctaaaagcaccgtttgcgtaaaaccctgtcatggggacccatcttaaccttggagagagaacctgaaatgttcttttaaaacgggtgtgccacatactcggagcgcacttttaaacttacatttcaatatggctttgataaaatgacttgcgtttacccaacatttatatctggccgaaaggattggaacccttcttccacataaaagctacgggtatacgcatggattttctgaaaagcactttactaagcaaagtctaagagcgcgcctgaaggaggtggatatactgtgtattaaacaaattttttgtttactcacctcgggggaaaggaggatgccttcgaagaatctatgccaatccctgcagttttacttatagtgaaacataatt

SEQ ID NO: 93747 - DNA, 344 bp, Glycine max
  unsure (1)..(344): unsure at all n locations
  Clone ID: PAT_MRT3847_55667C.1
tcctctagagacagagcgcagccctttttttttttttttttttttttttttnaaaaacttattcccntaaaataaatttttcctaaagaagatttttattacatatacaacacccttctcaaagacttattcattaattataacttattcccttatacattatacttctctttctaattaaaaaaaaaataatctatttgctttatttacacttcctacacctttaaataaattaccacatttatttttttatttttcttcttttgttacaataaaaatttatacctttttgtatttaacacatacatctttcaaacatgtaattctattttaccatatatttt

SEQ ID NO: 93748 - DNA, 945 bp, Glycine max
  Clone ID: PAT_MRT3847_55668C.1
atgggtagtagcagtaggaggtgtttgagcttcaccacttggcgtgaccggtacttgcggtattccttctcccgggccggactcaaatccacaaccaccgatctcggcgacggcaccatcatgcattgttgggcccccaaggcccataaccactccaccacttcccttcttctcatccacggcatcggagccaacgccacgtggcagtggaaccacttcatctcccccctcacgcgccacttcaacgtatacgtccccgacctgctcttcttcggagattcccacacgacacgacccgagaggtcggagtggttccaagcgaagtgcgtgatggctctgctggaggctctaggggtccgccaaacaagcgtggtggggctgagctacggcggctttgtggcgtatgctgtggcggcgatgttcccggagagggtggagaaggtggtggtgtgttgtgctggcgtgtgcttggaggacagggacatggaggatgagggaatgttttgggttaaaagtgttgacgaggttgttagtgttttgctgccgcagacaccgcagaaggtgatgtgtacagagtaccggcaggagaggacagaactaattcaagcattgcataaggatagaaaactgtctaatcttcctaagataaccaagcctatgcaaattatctggggagagcaggaccaggtattcccactggagttagctcacagactgaagaggcacgtaggagagaaggcacaacttgtagtcattacgaatgcagggcatgcaatcaatgtagagaagcctaatgagctgtgcaagaatttaaaatccttcctcattgatccatccaagcaagaaaatcacagcaatggtctaaaggttgaccctcagaagcagaaaaacttttcagcattgtggatatgtatgtttctcgattattttatgcaacagctatga

SEQ ID NO: 93749 - DNA, 1023 bp, Glycine max
  Clone ID: PAT_MRT3847_55669C.1
atgggtagtagcagtaggaggtgtttgagcttcaccacttggcgtgaccggtacttgcggtattccttctcccgggccggactcaaatccacaaccaccgatctcggcgacggcaccatcatgcattgttgggcccccaaggcccataaccactccaccacttcccttcttctcatccacggcatcggagccaacgccacgtggcagtggaaccacttcatctcccccctcacgcgccacttcaacgtatacgtccccgacctgctcttcttcggagattcccacacgacacgacccgagaggtcggagtggttccaagcgaagtgcgtgatggctctgctggaggctctaggggtccgccaaacaagcgtggtggggctgagctacggcggctttgtggcgtatgctgtggcggcgatgttcccggagagggtggagaaggtggtggtgtgttgtgctggcgtgtgcttggaggacagggacatggaggatgagggaatgttttgggttaaaagtgttgacgaggttgttagtgttttgctgccgcagacaccgcagaaggttagggaactgctgcagcttaccttcgccaaccctatcaaactcttgccaacttgttttctcaaagatttcattcatgtgatgtgtacagagtaccggcaggagaggacagaactaattcaagcattgcataaggatagaaaactgtctaatcttcctaagataaccaagcctatgcaaattatctggggagagcaggaccaggtattcccactggagttagctcacagactgaagaggcacgtaggagagaaggcacaacttgtagtcattacgaatgcagggcatgcaatcaatgtagagaagcctaatgagctgtgcaagaatttaaaatccttcctcattgatccatccaagcaagaaaatcacagcaatggtctaaaggttgaccctcagaagcagaaaaacttttcagcattgtggatatgtatgtttctcgattattttatgcaacagctatga

SEQ ID NO: 93750 - DNA, 620 bp, Glycine max
  Clone ID: PAT_MRT3847_5566C.1
aacacacaaacggatgatatatatgatatactaatatacacatccttttcttaattttgtctctacaaaaacagtaataaaattactacttgattgacccaaactaacaagtaacaacacaccgtataatatctttgtacatacacataatttctttttgggtgaataaaatatttttgggtcgatcaaagattaatatcccgagacacaagcaattcagcacaccggcaagcccaacagtgttgattgtaaacatcattgaattcacggttgatgccatgaggtcatggatgaagtgattgagatttgacactgaagactatatagactatagagcgaaaaataaatataataattgagctaggcacatttttaattgggggttaacttagtagctagaagaatctagcagagggtgaacgaagatccatctccagggtccaagcgttccggtcctgaacgtgcaagtgccagaaggtttgagcgagtgcgtctgggtccattgtaccctcgcctcctcctccactgctttgctcccccaatgaatttcccctctgtgaagatgatgacgtcaaggttggtcctctgggtgggccaataacaccgtcaatgataacatg

SEQ ID NO: 93751 - DNA, 412 bp, Glycine max
  Clone ID: PAT_MRT3847_55670C.1
ccggcgtagaggaacccctcggtgtattccaaccccattgtatatagaaacaaggaggcaaaaacgtggggatattaaatggaattattcggtccttcattaagcctatccagaagccaaaggaaatgagatcggaattcctcggggaactctcaatcccacattctcaagaaataaggaggtaaaactgcccacatatgacacgcaattattcgctttcttattaggcctatcctgaacccaaaggaaaagcacatcggaattccttggggaaatccaatcccactatgttcacgacataatggaggccaataaacgttcaaatctgaaacgcaattctctgcctctttattaggcccaaccccatgcccaaggaactgagatccgaattccctcccgggtaccgggcttc

SEQ ID NO: 93752 - DNA, 274 bp, Glycine max
  Clone ID: PAT_MRT3847_55671C.1
accacaaggcctgacatggttctttttcttcttttggactcattctttcttgcataatatcaactgatgcttctggtctgtctaatggctattgttctgttcaatatgacaatgaatatgctgcacacaatgctatatacaagctaaatggcatgcttatcaatgattatcaagtctatgtatgccattctctgctaaagtaatacatttagaattcttttatcatgactaaaatttaataatgtttattttaaaaacttattatattcaacca

SEQ ID NO: 93753 - DNA, 235 bp, Glycine max
  Clone ID: PAT_MRT3847_55672C.1
aaaaaaaactcccctttttttttttcctttttttgcaaaagggaaatttatattttttggttaaaaaaaccaaggtggatttaactctgggatagacccgattaatggttttttaaaagcaaaacattgacgttgggtggaacacatcccaaattgtttatgttgatgttaaaacacagtgtattttgccttattactattttttgttcccctttttttaatcccaggggggggt

SEQ ID NO: 93754 - DNA, 463 bp, Glycine max
  Clone ID: PAT_MRT3847_55673C.1
ggatatctgcagaattcggcttttccgaacccatcctgctaaatttttcaagtttgcaaaaatcataagtgtgaactttatctactgatttacaagaattggtcaatctatttcataccactttttcatttcttctgttcgttttttatttgttctctaagattaattattatctaaaaatcaagaaatgtaataaatattttctattcttataaaataagtcttcatccttaaaaaaatagctatgcggttttgttaattttttatgattaatgtatgtgtgaactaattaacgatcaaattaattgataaatgaagaaccaatgtgatctttaatttcgtaaatgatacattaataaatatatgctacatcccataatatatcctctttttgtgattcatcacaccgatgctattgcgtttcacataatgatattgttgtatatgtgcttaaaaaatttaa

SEQ ID NO: 93755 - DNA, 763 bp, Glycine max
  Clone ID: PAT_MRT3847_55674C.1
gcaaataattactattttgtaaattccttttaataaaatttatggaatgtagtttaaaaattattttcatgatatttcataaataaattgggaatatctcaatcttccgtttctttcacaatcaaacgcacatacatatcctctgtaatgtaggggtcaaacaatagtttatctacaacgatgaacagatctagtttttatatattaattcagaacacatctttttaattgtttattatatataatatataatttaaattaaatttacatctcaatgattctcctccgcacttggtcgagttgggaatgttgtgatgctaattcaaacccaatcactctccttctctccctacctttctccgtctatgccaatctcttccggtaagcaattaattctgtttggtttagatgcaacttttgttattaaggacgttacatgcatcaaactttacttcattgtttgaaaatgttagtgcgtgaaccgtttgagaaaatgtccagctgggaacttctgcattgtttggatatggtttttcaacttttttagctctcatacatatttcctcaagggtattaaattttattccagtttttgccaactcattcatggaatggtggatgtgtattacatatacatgggcgtgttaaaatctgaaaacagaaaatggaaaaaatatgtttttgatgaaatgggggcttcgtgaattgtcccaaactgacctttaacatgctatgctatcataaaaaattccactagtctgaa

SEQ ID NO: 93756 - DNA, 334 bp, Glycine max
  Clone ID: PAT_MRT3847_55675C.1
cttaatttggttgtgtgagagaaagacctgagtgaaacaaacatggcagaggagaatgtcaggcaaccattgttggagaaaaagtactatgaggactgccccggttgtaaagtggatcaagccaaagagttgagtaagggacagggtgtttccattagaaatcttttgataatatggatggtggtgttgtgttctgcattgcctatatcatctctctttccattcctttatttcatggtaagggattttaatattgcaaaaacagaagccgatattagttcttatgctggttatgttggttcttcctacatgcttggcagatgtttgacatctg

SEQ ID NO: 93757 - DNA, 181 bp, Glycine max
  unsure (1)..(181): unsure at all n locations
  Clone ID: PAT_MRT3847_55676C.1
tatgcatactagcgtacgtnagctcgggattcggctcgagcgccgtcnnacgcnnnttttgtntatcncntcnnacgtnngtgcatcngcaatggtnangggacgccaaagagaacgtgtnannctctangtgangggtacaatccttggntacaaaaggtccaagtcnaaccaatnntcc

SEQ ID NO: 93758 - DNA, 190 bp, Glycine max
  Clone ID: PAT_MRT3847_55677C.1
acgcccacgcttgcgaccacgcgtccgcactatactctatctataaatatttactcacccgctaggggttccttttcaaaggaagcttaacttaccaacctaattttggaattccattgaatgttcctgtatttaagaatattattttattaaataatgatattattattaccaagcctaagcccctttt

SEQ ID NO: 93759 - DNA, 685 bp, Glycine max
  Clone ID: PAT_MRT3847_55678C.1
acggctgcgagaagacgacagaaggggcaagtaaaggtcaagtcaatgaatgaattgaagttttaactctttgtggttggtgttgctgtttgctttttccattccatcctccaaggccaagcaatgatggccaagaccacgctagattcgggatggcttgcagctaggtccaccgaggttcatttcacaggcactcaactcaccaccacgcaccctccctctgcctccacccaaccatggatggaagctattgtccctggaactgttcttgctaccttggtgaagaacaaagcggtgcctgatcctttttatggactaggaaatgaggcaatcttggacattgctgactctggaagagaatattacaccttctggttctttacaacctttcagtgtaagctgtcaggcaatcagcactgtgatctgaatttccgaggaatcaattactctgccgatgtctatttaaatgggcacgagatggtcctcccaaaaggaatgtttcggagacattctcttgatgtcactaatattattcattctgatagtagtaacctgcttgctgttcttgttcaccctcctgatcatcctgggagcattcctcctcaggggggacaaggtggtgatcacgagataggaaaggatgtggccacacaatatgttcaagggttggactggatggctccta

SEQ ID NO: 93760 - DNA, 457 bp, Glycine max
  Clone ID: PAT_MRT3847_55679C.1
aaaaaaaaaataggttattaaaacgacccaaaaaaaaccaccccccccccaaagcccgggaaagatctggggggaaaaaaaaaaggagggggggggggcccttttttataaaaaacaggaaaaaaggaaaagggcgggaaaagaccccccaccaggagggaattaaaaagaccttaaaaaacccaaaggggagggagataaaaaaaaacgggtttccgggaaataatcccggaataaattcccaggggcgaacccccgggagggccgggggcccccggcccagccaaaagcaccccccgggaaaaagaaccccaggggatgggggaaccaatcatcggaggcaaggccgttggagggggggaaaaaaacgacggtttcggcggggcccggggggacttccttgcatggaggggggaggcggcttacaagctgggcacgggataatagaacgggggga

SEQ ID NO: 93761 - DNA, 334 bp, Glycine max
  Clone ID: PAT_MRT3847_5567C.1
ctaacattgcgttttcttttttttttggaaggctactttaacttgttagtgtttatttttttaccctttccccccctatcttttttaaaaaacaaaaacaaccactatttttgcaaaaaaacaggatttttcaaaaacaattccaacatgcttgaaaaaaaacaaaactgtatacaaaccaaaaaatttgtactacaactgtttcaaaaaaagaaaacaaaggaacccacattgacgagaagtgcccctaaactccccacgtatccactccaagaccatactctcatatgtcacccgtggagcatctacaggtataaaccaatagataacatga

SEQ ID NO: 93762 - DNA, 243 bp, Glycine max
  unsure (1)..(243): unsure at all n locations
  Clone ID: PAT_MRT3847_55680C.1
cgagagaagttnngntatggctgntganagcgttgntgagtcnccagtnaagaagnaganagatgntggtgaanaaaatggtatctctgtttccntggacgcaganggtggcaaanaccctcttngtaacggtttntcatctgtgattcntgggtggntctctaanatcagtgcaatgtngccngnagaggctcactccttgaaggttganaagatttnnnttcaaggaaantcagnatacca

SEQ ID NO: 93763 - DNA, 399 bp, Glycine max
  Clone ID: PAT_MRT3847_55681C.1
aaaaagaaatttttaatagactttcagcctaaaaataaaggccggtttggggctttccttccttttaaggttattttacaaagatcaaaacgggattccaagggggggggtttgggcccaaaaaaaaaaaacttaatttctttttaacaacaaaacatcctagttaattagggccttagcccttataagggaccctttgggccccccccttgggacatcgtttccttgggttacaaaaaggcttaaaaaaaccccccttactgtttaccctgggaataggggagggggccaaaaattgcatgggcggccccaaaagctttggggggctgaacaggcgggggaaagatagggtgggaaaaaacaatgcccgaattccttttattttttgagccgaattcc

SEQ ID NO: 93764 - DNA, 768 bp, Glycine max
  Clone ID: PAT_MRT3847_55682C.1
gcggatataagaattctgttcctggtgaaaagttataagacaagctataatgttcgtctaaacatatggaattatcagtaactaaactttgagcctctatgtcaaaccatgaaactctgcatccggcaatggcagtatgtgcatcatagctaggttgaggaataatcattatgtggctgttataacgacaaagaatgactggttagcagtctcctggacattaacattggcagaacatatatgctgagtcaagaaaagttagagctcccattatgattgtttgctacatccctggtaccaatttgaacacatgtaaagaagcatttattctaagcctgggttttgaatttgaaaggccaaataattaaatatgatatatattgccccttggtatataatataggtttagctgctcctggacataaaaccaataccctctcatgcaaagttgtcaatttaacgctcagattagcatcagtagagaacttttgatctcagtagcttcatttactttgagtacttttgtcttaacgagaatgttaaatcctgtacgttccattattgagtactctccataagtgactacccttgtttggcatgaacttgaacccaggtagattcagtgaagggagaaatatacattgctttcaatatgagtcatttacctttcacagttaccttgcgggagcgtcctggatacaaatgggaaccctctgtagacaccagcaagcctacaccatatgatttcctcactcctgaccttcctgg

SEQ ID NO: 93765 - DNA, 445 bp, Glycine max
  Clone ID: PAT_MRT3847_55683C.1
cccacgcgtccgagctgcacaaattaatatccaacactctcaagctttccactttcaaactgtgcccgctcaatttgctttatctttccgaggtaatttcttttactttctttctgaactcaaataaatttctaatgaataccccatcctctcatatctctatgtatctgttttccctttctttgcattccatcttccaacgtcggtgcttgtctgaattaaacatatttctctgtatctgttttctgtctttttcttttttaatattcctgtttgtgttaattttcaatgtttcagagtcttgctttttcttcttcttttatcggatttttttaatagaaagattacatcatggatttttttaaaattataatctcattgatattgattgaacaatttttttgtttcataataatttggtttggatgtgatgtaacttgggttt

SEQ ID NO: 93766 - DNA, 248 bp, Glycine max
  Clone ID: PAT_MRT3847_55684C.1
tcgttttaatcgaacgtttgttcagacgaacgaagaagagtttatctctggctcaaactatgggagaaagaaagattgttcccttgcctgcactagaatcttcttgctcctctgcagtataaccctaggcatcttaatcgaggcgaactccgagatccgatagcgaggctggcgggtcttccagtgaagtaaatgacggatctaccccgccgtgccttattgataattgggacaccgagctgatgtga

SEQ ID NO: 93767 - DNA, 135 bp, Glycine max
  Clone ID: PAT_MRT3847_55685C.1
caaatcgatgggtcgttgagcgactagactatgtgtactcctatgtggagtcattcaatttctgcgcttactccagtcgtggtcgctataccgggacccagtgctacaaattcctcgatgtcatcggggggatag

SEQ ID NO: 93768 - DNA, 235 bp, Glycine max
  Clone ID: PAT_MRT3847_55686C.1
aacactgtttctcttctctgatccttcccgaatatatggatcctcctcaattattagatcacacaaaaaattttttatccccttctacatactacaaataatttctaatatcattaatttattcattataaatttaccctttcatctatcattataaattattatatattctacccacacccatctatttactactcacactctatttttcataaataatatacactatttcatt

SEQ ID NO: 93769 - DNA, 425 bp, Glycine max
  Clone ID: PAT_MRT3847_55687C.1
tttttgttttttttttttgaacccttccaatagaaaggtggcctttaattaacccaagccaccccacccagcaaaggcctgaaacttggttggcttaaccaaaatggaatcagggggttccgccaaccccacccctttaaaccccggttaattaaagccattttggccaccgcgaaccaaaaccccagttttggaaccaccagtggcaaaagaaggggggaaacttaaaccttggcccgaaaaacaggctccctagaaaggaggacccaggagtccagaaaggaacccaccttttatggaacccaacatcccttgatgaaccagcccgcacgattaactttttcttctgggcagccttggggaccttggctccggtaggatccttcttctcaacgttcttgatgactcccacagcaccagtttga

SEQ ID NO: 93770 - DNA, 233 bp, Glycine max
  Clone ID: PAT_MRT3847_55688C.1
gtcccgattcccaattcgacggacgcgtcacgcctgcttgcagatgaccgcagacaacggaatgggcaccaattgaccacaggtgcaatcaatcgggtttttgaagtgacttcacaccggaacatgaaaacaactattatgatgtatgacggtcactctcacgaatcccacgtgagctgtgggattctaaggacgatgccattgtcttcaagccctttaatttcgatctcctt

SEQ ID NO: 93771 - DNA, 329 bp, Glycine max
  Clone ID: PAT_MRT3847_55689C.1
cccacgcgtccttccacgcgtgcgccaacgacaagggatatgggaatgagcaagatgaccaacagccgaggtttcaaacgaagctcttgagccttgacacctctggccttcctttgtcttctggtaaaatgagtatttgctcgcatttgcttaccaatgaccccagcgaatgctgcactgacatttttggagagactagccgcattccactgatttttccccatttttacatttgatcatgctttcgaaatggatctatcaggggtttcaacgaatgccggaatcgataccaccttggccgggcgctctataagaaccactattacgta

SEQ ID NO: 93772 - DNA, 175 bp, Glycine max
  Clone ID: PAT_MRT3847_5568C.1
gaaaagaactaattcaaatataaagatgatgatatgtgtgtgtgtgttttatcatagagggagcagggtgctttcttatcaaatcattcgagcatgaactattaagttatatcctacaattagactgaaaattaacacatgaccaattttcatcctacgttctattccacatttt

SEQ ID NO: 93773 - DNA, 433 bp, Glycine max
  Clone ID: PAT_MRT3847_55690C.1
gaggaagctaaaaaaaatttcggggattttttttttaaaaaactctggccaaaaaacagccctgttggacaaataaaaaataaaaaatttagcgcggatttatttttcatcgcttaaaattcttgacataaccctactaaaaattctgaccagataaaaaacacttcgaattgaaaaagggcaattttttagcccttgaaattgaatttggaatccgaattctaatatctagggggagtggggacaaagggtttcaaaccccatggaccctttatttgcaattctttggatcatggtggatatgccccccccccccaaggatattgcactgacaaaaaaggggcgggggaggataaaaatgatcaggggggctctcccttgtatgggaaccagctttttcactaaaacctgcccaacaaaggccccaaaaggg

SEQ ID NO: 93774 - DNA, 287 bp, Glycine max
  Clone ID: PAT_MRT3847_55691C.1
tcggcctccggtgagcgatgagagatattatattggccgcacttgggggcattcgtgatgtggcaggaagccataacagccttgagatcgatgggttaactcgctttgctgttgaatacacatcaaatacctgaatgcccttttggggtttgaaaaggtagtaagtgcagaacagctagtggcttttgtgaccttgtacaccatcattttgtaggcaaaagatcgtggaaaaagctaaggtttatgaagcctattttagggacaaggcttcgcttgaacctcaagga

SEQ ID NO: 93775 - DNA, 366 bp, Glycine max
  Clone ID: PAT_MRT3847_55692C.1
ccacgcgtccgagaacacgatggctctgacgtactctattttagcaaccatagactgtcttttattcgtatctgctttctgcatgcctttagctacagaagcacgatgcagttactcactgggtattacacagcgcaccatatggcaaaggatacgagcatagagatattagatactagatagaaggacgtcgaaagtattatggatgctatggaaacaattaaggataaaggggttgtgactgcacctacatcgccacacgatgaaggactaggggctgggtaccgtccggattgttgtaagaggataaggccctttgggtccaatacatatgacccgcatgcactagaagtggtagcttttctt

SEQ ID NO: 93776 - DNA, 1111 bp, Glycine max
  Clone ID: PAT_MRT3847_55693C.1
cccacgcgtccggtaacatttttccccttcctctcgcccctcccagcttcgctgatttcttcgtttggaggataccctcaaaggtgttctactgtgaaagttagccaattttgaagatgaattgttataatcttcagaagaatgccttctcagcctgtgaagagatgagaggctctcttcccattgctgatcagaatggacctgtcttttgccctaagccacgccgagctggggttttaatgaacttgcctattcgaccagtaaaatggcatttaggtcaacaagctgaggggtctgattcaaaagctggggcagaactacttgacattgttctcaagagggacattgttcttaagagggagagttatgggggaagaatttgcaaatcaaataccttcatctcctccatatttttgtgggtctcctccagttcgggcttctaatcccttaattccagatgctcgatttggagaccgaaaagtactctcttatatcaacaatttcatcggcctttaggtttactgggctccatcttcagcatctcgccaaagcaggatgtgctaggatgaagtttggacttaaaccggctgctgttagagtagaaggatttgattgcctcagcagggattgccagaattccggcatccctgctgttgcttaaactccattcatagaagtgtatatagaagaagccaagtgccattacttataaaacgtgacttaactaaagaaagttttgaatgtttcggagggaagtaaaaaattcagttagttgtgtatatagcaaatgcttttttgtatggtgaggtgaatcatctcattgtgagtatccgtggcaagtttagggagctgcagaaaaagcaaaccttctgtttttgaagtttgatgtgtagagagcatgtctttttgtaatataaggaggttgtatcggagtgtcttttaaaccttttaggctatccccgtaagagtgttctgtataggaattggtgattttggttgtcgtccctgtaaatatatttaggtgactttgcaagtatgtctattatatttagttattcaactttgttttctgttcccaaacccattctggatttgtcaaaatgtttttttt

SEQ ID NO: 93777 - DNA, 718 bp, Glycine max
  unsure (1)..(718): unsure at all n locations
  Clone ID: PAT_MRT3847_55694C.1
cggacgcgtggggttcggccactgcttccagaaccaccccattctcttctccctcttcctcttcacaccccaccttccccaaacgcattgctagatccaccctccctctctctcatcaaaccttcattaaacccaaccacgcgctcaaaatcaaatgttccatctccaaacccccctcgccgccggccaccaccaccactgcagcgccggcaacatcagagcccttcgtgtcgcggttcgcctccgctgaaccgcgcaagggctcggacatccttgtggaggcccttgagcggctgggcgtgactaatgtcttcgcctaccccggcggcgcgtcgatggagatccaccaggctctcacgcgctcctccaccatccgcaacgtcctccctcgccacgagcagggcggcatcttcgccgccgagggctacgcgcgctcctctggccntcccggcgtctgcatcgccacctccggccccggcgccaccaacctcgtcagcggcctcgccgacgccttatggacagcgtcccgtcgtcgccatcaccggcaggtccccccgcgcatgattgcaccgacgccttcaagaaaccccatcgtcgaagcaccagatcatcaccagcacactacctatnctgacgtgacacattcccgatgtcgcgagcctctcgtgcacctcgccgccgccgtctatgcatccaaactcacagactgcggctatgg

SEQ ID NO: 93778 - DNA, 1216 bp, Glycine max
  Clone ID: PAT_MRT3847_55695C.1
cgtaattgaaactgtttgagtaagcaagatgcattagattattgttttgccattttttttaccgtaaaatggtgtcaccggagtccaacatttaatcaccaatccaagtagtactcttaccagacaggaaaggaaaattcacaaacctggtcaaaaacaaattcaatcagatgattacatggctttcttaactgatgtaattcactttaatgaagcaatagattgctttcctttatcactatgcctacaacaactacacataacgtgttaccctagagtaatatagaaaactcggatcatgggcttgtattcaaatgcccaactgctgatacttatgactacgacttgagtaattatttgctgccatgttctgtgcatctattataatcgtatatagcatgatagataatcccatccatatatccctcaaacaataacaacacatttttaagcatatttatctgagacttctcacagcaagaagtgtacagcactagactggcagctactcagttagcatacagcctgtaataagagccactcccacggctatattagatatcctgaagaataaaatgtgcacaaaaactcagcaactgatacaagacttccttgagccaaggaaaaaaaattccatgtagccacttttgcttcatgccatcactgcaaagttatgcagcttatcacagtgaggagctggcagattcctattccagctccgtctctgcatctccacctgacagtatcttctcagcatactcctataatccttcatcacactctcctcaactgcctcacgagcatcactcccgggcggataattcacatcaaacgccgccgacttcacgaagaactgaaccccgtgccgatccgtggtcttcggaatctggtagctgtaatgcttgtgcaaggaatactcaggctccgaaaacggcaagtacgcgagcagcacaataatcaaaaacggcaagagctgaatcagaagcatcacattgtgatgcctccctcccgatcctccagcattgaattcatgcctatgctgatgattcggattccccatcccgccgcgggttcggtaaacgtggttgtttcttccgaacacgtcggaccctccgaagcgcccactgaatagctcgtccggatcgcactcgtcttcgaagaaatcgcgcgtcgtcgccgttcttcttcttctacgccggaacgtgtttacctcggt

SEQ ID NO: 93779 - DNA, 361 bp, Glycine max
  Clone ID: PAT_MRT3847_55696C.1
cgacaggggttttaaacattaagtcttgaaaaccttgggtccaaaaccggggagcccgaaaaacccaaccttgaaaaaggggggaacaaaaggagggcatcctgccctttaacagaaaattacggaggtgacctaaaaagtcgccaaaaaagggccgcgggggagggatccattttacaaaaaaacaaacttgggcggggccccacccaaggggggaaaaaaagaacgcgggcggggggcgccataccacttgaataacgccccctaaaaacaatacaccggccttcgggggacacccacgggactgggaaagccctgggtttacccaaggggagcccggaaaaacccagccggcccccac

SEQ ID NO: 93780 - DNA, 524 bp, Glycine max
  unsure (1)..(524): unsure at all n locations
  Clone ID: PAT_MRT3847_55697C.1
ccaaaatataatttttatttctcatatgcattggtaaaaaagacacaatgttcacatgtgaatggcatttataaatataattactaatttttcagtaaatgaaagcatctttttactagtagatctcataccttccattttcaacatttctagtaaaaaatcactccatatgtctattgcccctggtaagcaccaatgaacacaatcattatatagtgtcatgttctcatttggccaatacccatatctattggggtgaccatctggtctcaataacatagcttgcgtcgtgtctagtaacatgaacttcaatcctttctttatgccttctttctttgcaattttgaactcctccaattgaagtcatgtgtaattctaaattatggccttctaactttgnttcgttattcctaaatggcttagttctcacgcaatttccacctttattccataacccatttncaagtgagatggtgaaaatgttctaagaaatgttatacccttaaaattctctaactgatgat

SEQ ID NO: 93781 - DNA, 220 bp, Glycine max
  Clone ID: PAT_MRT3847_55698C.1
ggctttctcaatgatcttttccccagctgttatcactgtcaaccttgccggtgccgatatggttgctccattcactgtcctcatgtccatggctggcttccccactaggaagaccaacaatgacattacctccattgctagcaacggtggaagagtgcaatgcatgcaggtgaggccaccaatttgcaagaataagtctgagactctttcttaccttgcc

SEQ ID NO: 93782 - DNA, 319 bp, Glycine max
  Clone ID: PAT_MRT3847_55699C.1
aagccaccgcacgaatcaacttcaataactacatgatgaatattcaaaccacgggcaagcacccaagttaccaagaatgagaagaaacaaaaccacagatgtctttttttataccactttttatacctgtaaagaaaaaatcaactatgtggcttcgaggaatttaccaacaaaaagcatgaaacccatacaatgccaaaagacatgaacagccagcgcaccacagtgcaaatttcaaatttgttacaagtagtaaccttacaaatttttacctggcttcatttttatttttttgggaagaacaacgcatatattctaa

SEQ ID NO: 93783 - DNA, 481 bp, Glycine max
  Clone ID: PAT_MRT3847_5569C.1
gtgggagtgggatacacatcaaaagagaggagtttaatggcacttgtttggaaaataattttccagatacacattcctttcctaaccacacaagaacctcctacagctgctggctgcttcctttgatggatagaagagcagtctccagcatcaatactgatcaagagtgtcctttggacgacactgattcctcctccgctctctttagctacataaagcaaatgctcatggaagacgacacccaggagagttacagtattttccatgattccttggccctccaacacactgagagatcattttatcaagttatcactcacaactaccctccttcatcttcctccccccatcatcagagtcctgagcaaagtctctccgtttcctcaagtgattctaggagtagcttgagcactaacagtactagcagctccgccgactcttccttcagaaagccttcccctctacttccacactctacttt

SEQ ID NO: 93784 - DNA, 430 bp, Glycine max
  Clone ID: PAT_MRT3847_556C.1
cttcatcctactttgctttttactactgctgaaccttctactgtgaagcaggccttaatttctcctccatggagacaagccatgcaagctgactttgatgctctaatggaaaacaaaaccttgacattgacttctcttccatcagggaaggcagccattgactgtaagtgggttttcaggattaaagaaaatttatatgggacactgaataggtacagatctaggctggttgctaagggatttcatctgaagtttggttgtgattattcagaaactttttctccagtgattgagctgtaactattcgactcattctgttcatagccctcactaatcattggccacttcaacaagtagatattaataatgcttttctacatggacttctaactgaggaggtgtacatggttcagctaccagggtttgaaac

SEQ ID NO: 93785 - DNA, 324 bp, Glycine max
  Clone ID: PAT_MRT3847_55700C.1
gcttgcagagcgtatcttccgaagcaaatgtgagaccctggataggatattactttgattcttgctctatgttggatacgaaatctggctctttgggggttataattgacggttgatactcaattgcatctgtattacagaaccgcacatgagattttgaactaatactggtcctcgcgaatgaagcaatgccaatagaaatacctctatatgtctcgataaagcatttcatctaatacgataaatgatatggactaatattcacttgtttaaaggataatggaatgaggggattttttgagactttattaaatatacatccaa

SEQ ID NO: 93786 - DNA, 218 bp, Glycine max
  Clone ID: PAT_MRT3847_55701C.1
attcaagaaaggcaggttattgataccatagcgaaatactactatattacacgctaagcacaaacccaaacaatgcttgctgggttaagagaaaataccctactacctccaacacccaagaaatgaacaacttggggccttaaagatctgaccggtgcactaatttagaactagactcttactatttagcgttgccattggctattatttcaccaaaa

SEQ ID NO: 93787 - DNA, 194 bp, Glycine max
  Clone ID: PAT_MRT3847_55702C.1
acgcgtacgtgagcgcagactccgagatcggccaaatgctctcgttccgaataatcaagaaaattttgaaaagctaaaagatcaaactttattcagacattcattcattgatcataatggggaagcttctctgagactgcaacctccgtcgccgaaccattccaaggttcgccgccggccgcgcttccatggcg

SEQ ID NO: 93788 - DNA, 242 bp, Glycine max
  Clone ID: PAT_MRT3847_55703C.1
aaaaacaaaactcaacccctaaattttgttttaaaattaatacgtgaatgacttaaaaaacttggggctgtccccccctccaaatgcagggggaggacattaaaaggcctttttggaaacttttttttttttgaaaacaaatgcagtggggaaattacttgtcaattttaccgaactaaattttttttttaaaatttggggaattgaatttgttccccacatttgttccttggaagcactgg

SEQ ID NO: 93789 - DNA, 419 bp, Glycine max
  Clone ID: PAT_MRT3847_55704C.1
tttttggatttttgagaggaagacgaataagtggaggtggaaacccagacgcactgcaaacacagacctcacgggcaatatatatttactgtcgacccttggttccttgcaaacatattagacgtgaagtgacctatcacctaaaagcacaccaatatgccagatatacttgaaaaaacttgcctaataggctctattgtaaagaaggaaagcttgaatgcaaacatagctgagagtatttcaagggcgttatacctaactaaccgctgcatgagatttctaagatctacgaatgaatgatcaacatgctgttttataaggttgtgaagccggggaagttttacaacagcctcaatgctctagcccgaaaatggaccctctgtccggaattacttacatcgtcgaacatactttctcta

SEQ ID NO: 93790 - DNA, 805 bp, Glycine max
  Clone ID: PAT_MRT3847_55705C.1
aagtaagtgagtaagctgtgacctggcttcactttgacatagaatggcgaaccgaggatgaaactggcagccgatatgaacattagcaaagcaggtagtccaaatccaattttccatcctagattttcttgaatgtacacaattacactcaatgcaatcatgctagatattgcaattgaggtataataccaattaaagtagctatccaagagcctctcatcattagatctttctttaattgtcagttgatctgctccaaaggctatggaacacggtctgacgcatccagctccaatagaaattaatcccattgaaaagaacaacaaagctagttggactgctgtagcagagttgcagcctaacatgtctgattcacaggtaggttttaggtcagggatcatggcagttaaccacaacatggttaaaccaagaaggctggagaaggaaccgatagcaatgacgaggaatcgacccaagtaagaatctgagaggaatgccccgaagatggacaagatgtcggacgcggcagtccaagtgtaaattacgcttgtgcccttcgcaatagacatgcggtattcgtccctcagatacagtatcatgttgggcatgattccgtagctcgccactttctccagagactcgttcactatgatgaagggcatggttcgtaagccaccttttctcatttgagaagaagatggagtgccattttctaagagcttctcgttggtggcaccagaggaatccatcatggcttgtcgtttctttgaactatgacgttgaactcgagccgaatcggctcgag

SEQ ID NO: 93791 - DNA, 135 bp, Glycine max
  Clone ID: PAT_MRT3847_55706C.1
acgtacggctgtgagaagacgacagagggggatctatttgtgtctatgcaaagaggaaacctacccttcagtgttctgttgtggctaaagcctaggtcggactatggagagctccaattagatcactccaaggca

SEQ ID NO: 93792 - DNA, 276 bp, Glycine max
  Clone ID: PAT_MRT3847_55707C.1
cacgtcagtacagctggggaatcacaccactagggggaagcatcttccactacctcttaaagataaacacgcatggtcgtcattggtcgcggtcacgttttgacattcgtggtcacatgtgttactatcatgcatctgtagatttccagcgcacaggtggttcgtcactgctcgtgaacatgttctggcacagtaacacgtgggggtgatcacatgacttggtcgtatagcgaccaccgtagttgtaattcatggacacgctcccactgtgctgca

SEQ ID NO: 93793 - DNA, 344 bp, Glycine max
  Clone ID: PAT_MRT3847_55708C.1
caaccgtaacgcgtgcatagcacagagagactcagccatggggcgaatacccgagaggtgggataggggattaagaacaaaccataccccaagtcacggttttgccgacgtgttcctgatcccaacatcaggatttacgatgttggcttgaagaataagggtgttgatgaatttcctttctgtgtcacatctggttagtcgcgacaggaaaacgtttctagtgaggccctggatgctgctcgtattgcttgcaacaagttcataggcaaatttgctggaaaggatgctttacacttgatagtccgagtgcaaccatttcatgttcttacgatcaaacagatgct

SEQ ID NO: 93794 - DNA, 268 bp, Glycine max
  Clone ID: PAT_MRT3847_55709C.1
gtggtgccttatcgctgtggttttcatcgtcttccttctcttatatttctttttttttttggtcttcgcggcacgccgaaacattggccggaaaaggagagggtcctgctatcggaatcgatctgggaaccacctactttgtgtcggcctctggcaacatgaccgagttgaaatcatggccaacgaccaagggaacagaacgacgccgtcttacgtcggtttcactgataccgagggtctcatggggtgatggggctaagaaccaagt

SEQ ID NO: 93795 - DNA, 238 bp, Glycine max
  Clone ID: PAT_MRT3847_5570C.1
cgatctagaactgttttatgaatacccatccccacatatcagacaaactcaatcgacatgcttctgattgtataccgtggtgccttcctctacctgaacaaagctgctctatcttgtgatggatacaatgacgctcggctactttctacattctactaccaacctcgggggtcaacataagcattcccaattagcatgcacgatcctgaacagtcccgatggctagtacaaaccataa

SEQ ID NO: 93796 - DNA, 112 bp, Glycine max
  unsure (1)..(112): unsure at all n locations
  Clone ID: PAT_MRT3847_55710C.1
tcangttaatacaattggcggtanattctttctgttccggaacatgttagtgctgcttgtganaanatctnccnatgnggatcttnctntaagttatngatctcactagtaa

SEQ ID NO: 93797 - DNA, 224 bp, Glycine max
  Clone ID: PAT_MRT3847_55711C.1
ggaacgaggaaaccccttgaacatatgcccatacagggcggcgtaacagaagagctgggttaaatcatataggaaaacagaggtatcccacccccaactaagaggaccggggggcctaaacgggctatacttaagccctagcgggatgaaggaaccaggaactgatgagggagcaagctcccaacaccctttgagaggaacacggcccctcccccccaaaacca

SEQ ID NO: 93798 - DNA, 379 bp, Glycine max
  unsure (1)..(379): unsure at all n locations
  Clone ID: PAT_MRT3847_55712C.1
gggggagtgaaggggggtgtggcggtctgggttgtgcagcgtacagtacagggacgttggttgtttgtattgttgttgggaaaatggaatatgagagagcaaaaagggaagacatggggtccgagtgagtgcntngggagagtgggttacgcgcgctgagtgtgaccgnncggggggtgngtgagttacatanncnctnnnntattagnnccgaggatgctcccaataggatcggtactggggaggggtggtggggggggggggcggatggggggggggncggggngaagacngnaggagggagggagggnngggggnggggggggggggggggggtgagnggggggggggggggggtggggngggggaagggaggggg

SEQ ID NO: 93799 - DNA, 243 bp, Glycine max
  Clone ID: PAT_MRT3847_55713C.1
tgcttccgcaaggaaagaattctacagtactcgccgataagataggagtacttccacacaccatgcgattttaaagacatctatttaatcactgtgaccaatttgaatagcagtgattgttggcaaagttttaaacaactcaacaagcttaatgcagaaactaaaaaaacattccaaacccgtaaaattagaacctattaggggttttccaaagcaggagcaatgtcttcctcttatcttcct

SEQ ID NO: 93800 - DNA, 350 bp, Glycine max
  Clone ID: PAT_MRT3847_55714C.1
tttttggctttttttctagggacaccgtgctctggataaacccagtttaacctgtgataaaaaaatgatgcgcgctatgccccccagagatgttttggatattctttcctccgatggtatcacctcccatcttaagagctccagcaagccggagcggggggtgaggactgatttttcagaaccacccaatatgtggaccttgatctatatgaacctgtctgaaatcctgggagggggctctctctggtgataaccaatcagtacaaacctggtctcagtattgggattgtgcagaagatgcaccatcacaaccagcgcattgttagccgccatcatatgatcggcagacc

SEQ ID NO: 93801 - DNA, 196 bp, Glycine max
  Clone ID: PAT_MRT3847_55715C.1
accattcttttgccccgggggagtggtaataattcacatgttcatcactatagacaggatgataatttaactatgctttctatagtgatgaacatgtgaattattaccattctttcgccccgggggagtggtcccgagccggtaattgtgcatacggatgcttgcgggcatattatgagtgccaaatgtgtggttt

SEQ ID NO: 93802 - DNA, 222 bp, Glycine max
  Clone ID: PAT_MRT3847_55716C.1
attcccgttcggcccgacccgtccgttacacctaattgctgtgaatcttttttatttttaaaacaaaatctgtttttaaaatgggcgcaattttttataattgggtggggaaataaaaatttgttcctttttagttaccaataaagcttttccaaaaggcatttcagtaaagtgtcaataccaaatattttattgttgtttcccccccactctttaaaaact

SEQ ID NO: 93803 - DNA, 330 bp, Glycine max
  Clone ID: PAT_MRT3847_55717C.1
gggcaagacttcccatggctggacttaaacagcgactatggggctttgcatcgcaggatgcactccaaaccctccaaaaggagttgagtcaccctacaaacttgaacataaagcatggtgctccttatcttgggtgtgggcacagacaaatggccacctctaatgcttggaagcgacagcccctgacccaagaggttgcctgctttatgacctttaattgagcataattgaacgcaactaaggcgtagactctccataggacctgagattaacctcctgtcgaaaacgctttttgtggaaactccaaacttggtgggaatgctaatactg

SEQ ID NO: 93804 - DNA, 484 bp, Glycine max
  unsure (1)..(484): unsure at all n locations
  Clone ID: PAT_MRT3847_55718C.1
cccacgcgtccgcccacgcgtccgtacggctgcgagaagacgacagaaggggaagggattgtcttctggaattccggcaattgctgcttttggtctttcaaaataaaaatgctaacagttttatcattcaaaaggaaatatgttcaagcgtcttttaatatgaaatttagaagacgattttacgttattataaaactaacaatttttatccttaaaaaaaactaaattttaatttatttatagttaaaatcactcaaactttaaactcgtttttttttttactccgcttggatgattgaagccacattatttagtcttggttttttttctagaagcaatgagactaaccattaaagtatagaaattatcaagataggttttgtcttttctaacaaaatcttatatataatatataattgtgttggtgagatgattaattaaatgtaaatatacaattttaaaaaaatattgntacattaattac

SEQ ID NO: 93805 - DNA, 151 bp, Glycine max
  Clone ID: PAT_MRT3847_55719C.1
ggtgctcatagagaactagcaggtcctttctaccaaacaagagcagagctcaagagtggccatcgagcaacaatgctgatctcgatgcctaaagcttgtgagcggggagtgctctgaatcccaatcattcggtgcccggaatgctggcttt

SEQ ID NO: 93806 - DNA, 279 bp, Glycine max
  Clone ID: PAT_MRT3847_5571C.1
gtgaaacattggtttccgatgctcacctacactcgtaatgctcgaaggctaccggatggggccacttcaacatagtgtctgacattactggccaagggaacagcgctgagggtgcgcctacttctgttaatgctccttacggtgcaagtataccttatggaaccgtggcatctgtgctagataataacgaggggactgaagcttgcagggctacccttgaaacaagggtgactatcccgccaccggagagaggactgaatgttatacagcatgaagtcc

SEQ ID NO: 93807 - DNA, 365 bp, Glycine max
  Clone ID: PAT_MRT3847_55720C.1
cccacgcgttcgccacccttacagtttctgttcgagtatcctactacataacaattcatcgtgcctacataaagggatgacttcatgaaaatattcttgtgttgatcacatttccaagccattattcatttgcttaattatgcacataaacaaatatatcactgctatactccacatatatatcatagtatgaatccaatcccattgaccctcatgatacactaatctaactttgccgttgattcaattcttacatctggatactttcatcttataccactataattaatccaagcttacctaacaactatattcaacatcttattcatcatcttcttctagtcttttctatcattcgaattcta

SEQ ID NO: 93808 - DNA, 531 bp, Glycine max
  Clone ID: PAT_MRT3847_55721C.1
catgcctggttttgtgtggacaatggaagatgattcttcataaaggcttgagtgatcacccggtggattgaggcaagcaaatctaatgcccctttggtttgccacatctagaatggcaggtacatgctcagtatgctattctgtagtgaatttactgttgcctggcttatatatatatatatatatatatagttgcagacttgcagttatggcttgtggttgagcttggtactggagagcttacacagaaagcttgagctcgattgccattcattttacactttggctgagctacgggatgccaattttactgatttacaaagagtctgaaactgtgttgttgttgtatgtgcgttagatgcagttattttattcttcatactataatatttgcgggcttcaatttatttgtatgttaactttgtctttcgtagtaggatgttggacacatttgtcattgttagccttcccaatgaataatattcgtattaaaatgcacccagccttggggtggttcacaagctcagcaag

SEQ ID NO: 93809 - DNA, 153 bp, Glycine max
  Clone ID: PAT_MRT3847_55722C.1
agcacaggcttatctttgcgggtaacatctagaagagggacgaaccctttcaaattataacatccagaaggaatctaccctgcacttggatttgaagcttcgttgtggcatgcaaatctttgttaatactttgacctgaaaaacaataacttt

SEQ ID NO: 93810 - DNA, 541 bp, Glycine max
  Clone ID: PAT_MRT3847_55723C.1
ggagggaaaggaaggggattaaattcaatatttcgttgagtctggtagccaaacttgtattctacagataatttcttccttctaagcaccaacccaataaggggcctaataccagatagattttcgttgttcttgtttttaggaaggttgaccaagcaaatgatgtctttgacaacaactttcacatgcctaattttataaaatagtactaataatgtagtagtggaactagtggcaaatataaactatatagcaaattacaaggtgacaataggagatgccgggacccacttttgaataggagaacagtcccagatcccttctttgctttgagacagaataaaatgcttaggaacccaagtttctccttttgattctctctctctcaagagctccctctgcctttcctccacagctttctttgcttctcttgctttttcccagtttttgcttaggatggcttggctcaactcactccaaataagagctgattcagttggccacacactctctgcatccttcacagtaggagctctcgtgc

SEQ ID NO: 93811 - DNA, 490 bp, Glycine max
  unsure (1)..(490): unsure at all n locations
  Clone ID: PAT_MRT3847_55724C.1
gctttgcttgagagggttgagtttgtcaaggcttggaggctcagtatntgcaccgagacctgttttggagcaagtgctaagctttggctgaatcttgagtaacttagtccatgtccaaatgggaacaccactggtcctttgtagaatctgtaggttcttcctgggtatcctgttgctgggtttggacgcatgtccatgtttgtcatcggcactttagccaaatacccttgtgggtaccatgtcatgggtaaccttcctcctgcaaaacaagcccaatccaaaaataactcattaagtcatagggagcatgtctccattattcatactttaatttctttcatagagtaaaatattttatatataaaaatatgcaataagactttattgttagtacttgatgattaaactcatatactaataataaagtcttattgcatatttttatatataaaatatgcaataagactttattattagtatatgagtttaa

SEQ ID NO: 93812 - DNA, 2423 bp, Glycine max
  Clone ID: PAT_MRT3847_55725C.1
gctttatattccgtccgaagcttcggctcaaggaggacatgtgccagttgtgcgaccatattgcttccaatttggtcttcttcaccctcttagggtttgcatcagattcccctaattcttgcttgattttgcgctttcgctagattttcttcaaaatgactcaagatctagagatgaaggatcgctcaacgccttccaactccgtttcttcgcctgctccatctactctgcagcatttgaaggagatagcgtctcttatcgagaccggttcgtactcgaaggaagttcgtagaattgctcgcgctgttcgccttacaattgcgttgaggcggaaattgacagcatccgctatctcttcttttctcgatcatgttctcactcctggctctgaagttcacgccaaattgtctgcgtatcttcccaaggatgatgatcatgagatggaagtggacgctgcaacatctgcgattcaaaccccagccaaacacttgttgcccgagctagaaatctactgttacctgcttgtactcctttttctgattgatcagaaaaaatacagtgaggccaaagcttgttcctcagctagcattgtttggctgaagaacataaacaggagaactgttgatgttattgcatccagactgtatttttactattcgtatagctatgaacttatgggagatcttgctgaaattcggggcaaccttcttgcattgcaccgaattgctcaccctgcgccatgatgagctgggtcaggaaacccttcttaatttgttacttcgtaactacctacactacaacctatatgatcaggctgagaagttgaggtctaaggctccacgttttgaagcacattcaaaccagcagttctgccgttatctcttctaccttgggaaaattcggacaattcagctggagtacaccgatgcaaaagagtctctcctgcaggccgcccggaaagctcctgttgctgcacggggttttcgaattcaatgtaacaagtgggctgtgatagtgcgtttactgttgggagaaatacctgagcggactgtcttcatgcagaaaggaatggagaaagctctaaggccttactttgagcttacaaatgctgtgcggattggagacttggaactgtttaggaatattgcagacaagtttgccactacctttaatgcagacagaacccataatttgattgttcgtttgcggcataatgtcatcaggactggtttacgcaacatcagcatctcctattctcgcatctctctagctgatgttgctaaaaaactgaggctgaactctgcaagtcctgttgcagatgctgagagcattgtatcaaaggctattcgtgatggtgcaattgatgctacattggatcatgccaatggttggatggtgtccaaagaaactggagatatttactccacaaatgagcctcagttagcctttaattctcggattgctttctgtcttaacatgcacaatgaggcggttcgagcacttcgatttccaccaaacacacacaaagagaaggaaagtgctgaaaagagaagagagagacaacagcaagagcaagagctggctaagcatattgcagaggaggatgacgatgatttctgataattgttttttttcaccctatgaattgctatctggataccttcatttccaacgtttgctcatcttttccttttgaagaactttcattatcatttcctttttcaaaaagtgaatttttcatttcctaagtggaagatctctgaaagtcagtttaacatatcgaaatatttacttttttttttcatccatgatgactgctatggtttgttccttgttaggagaattatgttttaggacctgaagaaaaaaaaatcaaatatttaggacgatgcgaattctgttcagaagttttattattagaaactgttaccctggaggatttattgaattatagcatgacaatctatttttctgtcaagaacgattcattttctttgtgccccgagatgaaatccttccttatgcatgtgtagatggggattttatgtaaacgtattagggcttttgaaaaaatgaggagaaaattgagcaaaggataagtgtggttatgcctatgcatgtgcaagcgatgatgtatgtgaaatgcccagcacaattttatttgcatctagtgcaatgcaagcatattatttgtcatggtgcactagtgaggtgatcctcgtttcggacttaaattggattgatcatattatttgcttgtgtttggaccaagctatttgcttcgtgaatttgagttcaatatagtgatctagaacaaatataccgtttaaaaagttattttaaacaatttattttatattaatatatgaaaaaattttttttgataaaattataaaaagggcttaatttatttataattatgg

SEQ ID NO: 93813 - DNA, 511 bp, Glycine max
  Clone ID: PAT_MRT3847_55726C.1
tcacgcacttacaataaatattccttgaatatagaatgatccgtcaaacaattcatgcaaattatttaatttttaactgatctgttgactgttgattcaatgcaggaaacacttcttaatttgttacttcgtaactaccttcactacaacctatatgatcaggctgagaagttgaggtcgaaggctcctcgatttgaagcacattcaaaccagcagttttgtcgttatctcttctacctagggaaaattcggacaattcagctggagtataccgatgcaaaagagtctctcctgcaggccgcccggaaagctcctgttgctgcacggggttttcgaattcaatgtaacaagtgggctgtgatagtgcgtttactgttgggagaaatacctgagcggactgtcttcatgcagaaaggaatggagaaagctctaaggccttactttgagcttacaaatgctgtgcggattggagacttggaactgtttaggaatattgcggacaagtttgcca

SEQ ID NO: 93814 - DNA, 803 bp, Glycine max
  Clone ID: PAT_MRT3847_55727C.1
ccggtccggattcccggtcgacccagcgtccgggacatgtgccagttgtgcgaccatattgcttccaatttggtcttcttcaccctcttagggtttgcatcagattcccctaattcttgcttgattttgcgctttcgctagattttcttcaaaatgactcaagatctagagatgaaggatcgctcaacgccttccaactccgtttcttcgcctgctccatctactctgcagcgtaagcatatagtatctttctctaaccacttccactgtgccgatttcgcattttcacaaaactattccagcttttcgctctttattttttcttttctttgctatttggatttgcagatttgaaggagatagcgtctcttatcgagaccggttcgtactcgaaggaagttcgtagaattgctcgcgctgttcgccttacaattgcgttgaggcggaaattgacagcatccgctatctcttcttttctcgatcatgttctcactcctggctctgaagttcacgccaaattgtctgcgtatcttcccaaggatgatgatcatgagatggaagtggacgctgcaacatctgcgattcaaaccccagccaaacacttgttgcccgagctagaaatctactgttacctgcttgtactcctttttctgattgatcagaaaaaatacagtgaggccaaagcttgttcctcagctagcattgtttggctgaagacataaacaggagaactgttgatgttattgcatccagactgtatttttactattcgtatagctatgaacttatgggagatcttgctg

SEQ ID NO: 93815 - DNA, 541 bp, Glycine max
  Clone ID: PAT_MRT3847_55728C.1
ggatcgcattgagatggaacttgtgcgaaccttttcatgtttctatcaatataagattggtagagtttaagagacagaggaagaaaagatgagcctgaaatgaaggtttattttttatttttttatgcagcttttcggatcttcaaaatccacaaggagatcttgatgggaaagcatgtgcagctgttgggcagagtagtctcatggctctctatgatctcatgtttagtcagcttgatgttacttcatcccaacttcttgtgaatgatgggttttttagggatacagctttcagaaaacaactttcagacaccgtgagctcgttactagatttaagggttattcccattttcaatgaaaatgatgctgatagtactaggaaggcaccctatgagggcgaactgtctgcaggattcttctggtatattctgggacaatgacagtttggctggtctattggctctggaacttaaagctgacctccttgttctattgagtgatgttgacggtctttatagtggtcctccatctgatcccaagt

SEQ ID NO: 93816 - DNA, 477 bp, Glycine max
  Clone ID: PAT_MRT3847_55729C.1
tcgttctttagattattgtcattggcggtggactcgctgggatgtcggccactttggaggcactaagtaatggtgccaaagtgattttgatcgataaggagccgactttgggcggcaacagtgccaaagcgagcagcgggatcaatggttgtgggacgaaagtgcaggaaaagttgggcattgacgacacagcggaacggtttcactcggacacaatggcagcgggcgacagagagaacgaccccggcctcgtcgaccttttggttcaccagtcagcgtcggctatcgattttctgacagaaaatggagtcgatttggccgacataaacctttgcggaggacattctgtgcccaggactcattggctgctctcgccaaaagaaggaaaaccgttgccggtcggagttgcaataattcgaactttaaacgcgaaattggaagaatggaaagcaagggatcccgaaagactgaaaatta

SEQ ID NO: 93817 - DNA, 567 bp, Glycine max
  Clone ID: PAT_MRT3847_5572C.1
aatcaagagaagcagaaaattccaagaactatatatatatatataatcgaattcttcctctcatattatgttgttaacatcacgtattcacacaaagcgaaacaaaacagacgcacactttatgccctcaccttcaccaatcccttgtttacaatacaaacagatatttctatgaaaagtttaaatttatgaggatatcttctccttaattggttgttacttcctcccactcgtgttaaatgactaattgaacatgggatgcatgctatcatgcaaggttaaaaataatcaaaataaaaaatcctagcaagttctaaaattgattctcatagtaaccacataagccctagaatttaagagtaatctcacttccagtgctctcttccccttcttgatctcttagtgctgccaaccctttcttctctccactctctccattccatttaccactctccgacttcccatccacaatgctctctgaccggtcgccactgctccgaatatcggactccggagaagtttgtgtctgtgctgctgtcttgtacatgtgaaaatgatgatgatgaa

SEQ ID NO: 93818 - DNA, 526 bp, Glycine max
  Clone ID: PAT_MRT3847_55730C.1
gtttgttggtgtttcacttgcttttgtcattcatgagtcagcacacccacatattggtaagttgattcgtctaggttcaaaccatatgcatgctcttggtcgcctcacatgtgtatcatgtctatcgaattgaatcaaattatagatactatcttgcattaatattgaagaatcatggccttatcactcatatattgttaattaaaaaactactttctttcaaatgagtaccttgaacctaaaaacgataagagactaggatcggctgtttatgatatctggatacactgaataagaacatactccatttctaaactttggaaagaaaattcttctgatgaacaacactaatgcggaaccctctatgaatgaaagaaacctttatgactcaatacatgtgcatatggagtattaaagtctaccagatcatcagcctgcctgacagaaatcacactagcatcatcagcatcagtctctgaagactgcaataatctacaacaaatgaaggaatgctaactgctcaaga

SEQ ID NO: 93819 - DNA, 386 bp, Glycine max
  Clone ID: PAT_MRT3847_55731C.1
ctatattaacccccttcacacgagcctcacggctcccatcgaacaaacaatgaattcaaaagccaaacccaccccctccacacccctaactcgaatctggaaaaattaccaggcatccactcatctcacctctccccacccacgtgccgcacccccatcccccccctaacaccaaaaccatcctcccccacacacccgccacacccccccagcaatcaattccctgcccacaatcccacgatccccccccccccccccccccccctcccgcacaacctgcccaagatcctcaccccctcccccccacgcacacccaatacccacccggcgcgacacccctgcacgcccccccccccccgcgcccaccccccccccccccgcccccc

SEQ ID NO: 93820 - DNA, 381 bp, Glycine max
  Clone ID: PAT_MRT3847_55732C.1
aaaaaaaatattggctctttattacccgggtcaagacattaaatgggatttaaggggaaaataaaatttttggggcccctaactaaatgggtttatttaaatggaactggtaccggaaagttcggcacaacatttccatagttttttaagatattttcccccagccaaaaaaaaggggtacatgccaaccattttggagcctaccgggggtttaaccctgggaaaaacccgaaattgggccatggcaggaatgcaaattttttcaggaaggaaaaaaaacttcttagcaaaagggatggggcctggggttggtttggcaaaaattggggggaaacaacccggctttatacattttgaacccccgaactttgattcttattt

SEQ ID NO: 93821 - DNA, 404 bp, Glycine max
  unsure (1)..(404): unsure at all n locations
  Clone ID: PAT_MRT3847_55733C.1
cccagcgtccgcggacgccgggggggggggggaggcggaatcttcatatccagcgaggggggccagacaccgtcactgagttatcaactttgcgcttgtgtgtggcggagcaaacgcgggagctccacagtgctcttgggtgggggcatccacgcgggtattctccgggacggcgggggggcgttgttacacattcacaggggcaagcagtgtttgagggggacattaaggggaacaggtgtgctcagcanacagaggcgggagagttaacaagaacccttctgcttgaacctcgtgcgactgtgaatgggaaacccaatcttcagattggggggtgggatggtaagtgcgcccatggggctgctataagcgacctggaagaaaggcaactcttatatttccaa

SEQ ID NO: 93822 - DNA, 348 bp, Glycine max
  unsure (1)..(348): unsure at all n locations
  Clone ID: PAT_MRT3847_55734C.1
ggtccggnattcccggtcgccccgcgtccgactgctgtcttcaaagtcctggctcggtggctttgtctcttgaaaagctggtgngnntggcttggcttggttcccggtcctttgcgctctgcggtcggcgctgtgtctctgtggggctgtcttttttttttcgttttttttttttgggggggggtttttcctctctcctttntcccctttcttttttttttttttcttttttcttttttttttttttttttttttttttttttttttttttttttttttttttttttttttttttttttttttttcttttttctctctttttctttttttttttttcttttttttttt

SEQ ID NO: 93823 - DNA, 286 bp, Glycine max
  Clone ID: PAT_MRT3847_55735C.1
ttcactatccgggaccatggtgagcacctccttcatgaggaggcaacctatgaccaccacaagcctatagactttccccaacgttggtgaagctctttttggtctgaaaagtggacgaggtggtcgggtcgcttgcatggcctataacaaggtgttgcttataaccccagtatgagaaatggagttagaatgcccatatgatgattacattgttgacaaggcagaggacgatggcatttaacttggctactcgtgcagggccggtgcttgcgtttcctgtggtggc

SEQ ID NO: 93824 - DNA, 211 bp, Glycine max
  unsure (1)..(211): unsure at all n locations
  Clone ID: PAT_MRT3847_55736C.1
gaanaacnnttgtgtgggtttnncnaaancagacggaacaagggcgggtcttttggggagcgggggcggcccccacgcaagcagaataggcctgggtggcacctaaaatataccttgtttttctgcggggcggatgaatcttatcatctatgctatacataatgatatactaatcgggtattgaacttatctctggctcagcaagtatgat

SEQ ID NO: 93825 - DNA, 304 bp, Glycine max
  Clone ID: PAT_MRT3847_55737C.1
cactcttctctacataatatttttttctaatcacaaccctaataataataaccgcagcttttaactagttacatccgccatccatatttcttatacacatcctttttaaggttatatcctcttcttcttttccctacataattacaccctctagcttactcaatatctcttcacaatatatttaataaaatatcttcatttttactaaataatattttgaccctatctcataattttttcattctttataattctcactcttatttctcatattaacaactttacattcatcaaaattcttttt

SEQ ID NO: 93826 - DNA, 321 bp, Glycine max
  Clone ID: PAT_MRT3847_55738C.1
aaacaaaaggcccaaaatgaccccatttttttaagcaatagaaaatccttcatccaatttacagggaaaaaggggggggggggggaaaacccccctttttacacaaacaaataactttaaaaaaaattgcccatgcttcccagttgctccccaggggcaaggaaataacaaaactggccggggtcctatccaggggattcccaagtttgggctggggtttatccccatttttattatttttttacggaaaggggggaccccgctttccatataaccccggaaaggggggggggggggttttaaaacccttaatttgggggg

SEQ ID NO: 93827 - DNA, 335 bp, Glycine max
  Clone ID: PAT_MRT3847_55739C.1
gagtatctggtgactcacactgcaccttatagactcaactctgtaactgcctacaatagcccgcatcgccgattagggaggccgcatctagagtcccttcttgaaataccggtaacaccggctggtacaatgaccaaatcctctgcgtccgactcggcttctctcaaaacacaatgcaaaccattgctgcacggattgacaagtccggcgccatgtgtaatagcacaccctgggcttaaatggcactgatcgaagcacacactgaccgacggaacccatagagatgaatgtggatgcaccagttagtacgcagagattgatccatttctgaaccc

SEQ ID NO: 93828 - DNA, 449 bp, Glycine max
  Clone ID: PAT_MRT3847_5573C.1
cgcgaagttattcaacagggtcagcaccaaacacgccaaaacaccacgccgttaacgttattcccaggcataagctggcgaaacagtcctctgcttcctccttttccttgtcatcctcgtcctccaccagttcaagtgcttattatttctatgattcctgccaaaagaacccttccttgaagaagaccctgaccaagacacaagctcagactttgttttctgcatcacacacgcacagaaactctcttcagccgacgagcttttctccaacggcaagatccttcccactcaaatcaacagcagactagtttccattcccaattccaattatgccccacgacaccaccacccccaacaacaacaacgcaagaagatgctaaaagagttcttgtcggaaccagatgaggacgacatcatcgacatcatcatcgaagaagaagaagagatga

SEQ ID NO: 93829 - DNA, 320 bp, Glycine max
  Clone ID: PAT_MRT3847_55740C.1
acttaatgcataagatattagtttgactttgagaaaacttacagacagggtctactactaacatacagggtctatggaccacctcaagcaaaggactctaaaggatcaaatggccaaaaaccctactgaagtgattcgcaaagctgatctgagtatacttcctataaacaaactacctgttgactggtatcgaaaataaatgatcttacctgactgtgatctcccttcagctgatcgaccacttacaccatctacaacaccttctatattcatacaacaaatgaaagccgtagcaacacataccatgatttttgcatcaa

SEQ ID NO: 93830 - DNA, 354 bp, Glycine max
  Clone ID: PAT_MRT3847_55741C.1
ctcctgtactacggcctaactcttactgacaataaccaacctcacgctaccccacttccctcgttccagaagccaacgggaagacccacgactaaggtgacgactccacctggtaccgacacccacattgacaatcaaccagccgatacgatgcatcgcactcacgaataccaaaaaacaaaacagggaattgcacctgcgccgaatagcactcatatgcgcctatcagcaccaagctgatgacctaacatgtaaggaaaacgacattaatggaagatgtgaacgtcactggttgcttgccttgaaggatgactcctattatagtcgatgcatatcatagcccatagacatgaa

SEQ ID NO: 93831 - DNA, 226 bp, Glycine max
  Clone ID: PAT_MRT3847_55742C.1
actgactcggaacacgcatggacatggccaagctagttctatgcctacgattccttctgaacagtggccgctccgctcggagagcggaggcacagcaaaatgagtgccagatcgaaaagcggaatgccctcaaaccggataaccgtatagaggccgaaagtgggatcactgagacctggaacccgaacaacaagccagagcactgtgccggtgacacccccactcg

SEQ ID NO: 93832 - DNA, 355 bp, Glycine max
  unsure (1)..(355): unsure at all n locations
  Clone ID: PAT_MRT3847_55743C.1
acggctgganacaagacaacagaagggggccttccaaacgattttattcatccttgttaccttgaaaggaactgttgcatgttggttgcaaaaggtttgtggtttttgtgccatcaataagagagaccctggtttattaacattgtccagccaataaattccttgatttccatgtctggaaattgagtggtcctttcctattaatccactggtaaatacgggttgtctgcattgcatcgtttactcgaatctcacagacaaatccataagtactttcataattcatatcacatctaattaagccctattgtgtatgtgtatggggagaaaaaggaaagggagtttaccccgcaat

SEQ ID NO: 93833 - DNA, 226 bp, Glycine max
  Clone ID: PAT_MRT3847_55744C.1
cgaggccaagaattcaagcaaggcgctcattgctggtgctgggaaaggagacatgccaacatatggggtaggaggcactgagtataactacaaccgtaaataaaccatcatcataaatgcatcttccaccactaactcccttacaccctttataaaacgccttaaacacaaattaattaccataaacaacaccatgaccaccactcactcctacaccagctaccaa

SEQ ID NO: 93834 - DNA, 262 bp, Glycine max
  unsure (1)..(262): unsure at all n locations
  Clone ID: PAT_MRT3847_55745C.1
ctaatcttcaaaatttaattaacaattttataaaccctttttgnnncccattttcatacatttacccatattatattttttatacaccaccttacaacaacttgntatttcaaattataactnccaattcactcttcaaacccaacttgtcaaactttcctaggaaattgaatgtgttccttgttttatcccattatcttttttaacatccccacattaattatctttcttacattccttcaaacaaaggattacctttttt

SEQ ID NO: 93835 - DNA, 177 bp, Glycine max
  Clone ID: PAT_MRT3847_55746C.1
gaacatggaacttgattggcagagcagttttttggtgaaaactgaattacaaaacacacaagttgactaaagacagattttttaaaccataaacattttttaaaaacaggactcgttctcctactcctaagggttgataatgcttttccacactcaaataaaccacggacccttggg

SEQ ID NO: 93836 - DNA, 522 bp, Glycine max
  Clone ID: PAT_MRT3847_55747C.1
gaatcttctcaagcggagctgctgattccaatcctggccgttcatcacgatcaagcgatatgggggaaggatgcgaacgagttcaatccggggcggttcagagaaggggtgtcaagagcgggcaagcatccattgggcttcataccgtttggagtaggtgtgcggacatgcatcggacaaaacctggcgctgctacaaaccaaactcgcccttgcaatcatactccagcgttttactttctgcttggcccctacttatcagcacgccccaaccgtcctcatgcttctctaccctcagtacggcgcacctatcattttccaactcatccactaactatatgcctaactcttcacttgtctatatttctaatgcattttttgccctctttgttcactctaaccattgctttctttcttcttttttttaatcctctccctctatctgtaccctctatctgtactatatattcaaatatctcttatcatttcatttgtaagaaatggaattcttccgttacaataa

SEQ ID NO: 93837 - DNA, 464 bp, Glycine max
  Clone ID: PAT_MRT3847_55748C.1
caacatcaactccgcctcctacggccccacgtggcgcaccctccgccgcaacctcgcctccgagatgctccacccctcacgcgccaagtccttctccgaaatccgcaagtgggtcctacacaccctcctcacgcgcctcaaatcagattcacagtccaacgactcaataaaaatcattgaccacttccaatacgccatgttttgcttgctcgtgttcatgtgcttcggtgaaagactcgacgatgggaaagtcagagacatcgagcgagtgctgcgccaactgcttctgggcatgaacaggttcaacatcctcaatttctggaacccagtcatgcgggttttgttccgcaatcgttgggaggagttgatgaggtttctcaaggagaaagatgacgtgtttgttccgcttataagagccaggaagcaaaagcgagccaaggacgatggtcgagtctcatacgttg

SEQ ID NO: 93838 - DNA, 310 bp, Glycine max
  Clone ID: PAT_MRT3847_55749C.1
gggcagcgccaagcagggaaaactgaccatcaagacgaccgacatggaggctgtttacgacatgggcagcaagatgattgatgccatgaccaaggagcgcgtgatggctggcgacatcatctcgatcgacaagtcctctggaaagatcaccaagctcggccggtcctacgctcggtcacgcgattacgatgctaatggtgtcgacaccaagttactgcagtgccctgatggggagaaccagaagcgcaaagaggtggtgcacactgttacattgcacgataatgatgttatcaactcgacgacacaaggc

SEQ ID NO: 93839 - DNA, 193 bp, Glycine max
  Clone ID: PAT_MRT3847_5574C.1
ttttcttttttttggggattggactggctttgccattatcatttcctttaaataatgccacgttgggcttatctgaaatagaataatatgggccacccaacattcttgtaaatagaggctaacacgttacatgttgcactaaactcaagagtcaaactgaattggccacaataaattgcatctgcctaggtgg

SEQ ID NO: 93840 - DNA, 528 bp, Glycine max
  Clone ID: PAT_MRT3847_55750C.1
cccacgcgtccaatcagactgaacgagcacataccggagtttacgtcaaagagtaaccaaggggagaaagggaaaatccttcgtgggagaagatgtgttaaaagctattagcgcttaaaacaccgaaaaagaataaaacctggaatgaatgcaaataagctaagcaccaaactccacctgagatgaagaccacaaggcgcaagagaagtcacaaaccttggcagaaccgatcgagaggttggagcccgccataatattttccccgattattccagctacctgaaactaggtctcctagagtgcactatccttacccaacactgcacccatgttccaaccaaagttgccttagagggggggggacccctttcctctaacttaaatggggtgggaatcaaccccttacctttcaccacttttcaaaactatgacatggacccctttggccattccaacgccatgcgcttgggttcctcaaaacctggcttggccaaacgcatgttttttcacaccaaccacatattggaa

SEQ ID NO: 93841 - DNA, 221 bp, Glycine max
  Clone ID: PAT_MRT3847_55751C.1
gggcggccggaataataatctaaggggcccgttttaaacgcccttcccaagggaaaccccgcctgaatcccaaatgaaacgcgccctgaaacaacccatttttcccggcgggtgtaaaggaaaaaagccccgtaaccgttcctctttccaaagttttaccccccgatagtggaaatggctcccccccctttctcgccactttcgccgggggggcggggggg

SEQ ID NO: 93842 - DNA, 637 bp, Glycine max
  Clone ID: PAT_MRT3847_55752C.1
cgtgtcctcttaacaaccttctatgggacaaagaagataagatcttatgcccattgtgcaaaggaatccaaagggatcacaatactagtgctcaacttggacaacagcaccactgttcaagtcaatgtggccttaaaatttaacaagttaccataccgtagagtgggtgaaccagccagaagagagtaccatttaactgcaccagacaggaatttacatagccaaactatgttgctaaatggaaaaatgttaagtgtaaactcagctggtgaaattcctcctttagagcctctatatgtaaactcaagaaagccaataatagttggtcctctatctattgtatttgctcatataccaaatgttcttctttcggcctgcagctaagctagctcagtggcactaggtgaaactgaaaattggtttcacttggtggttgataaaataagcgataatagaatacaggacaattctgttttcaatttattggtgatagttgttcttttcttctccacgcctaatggggcctataggattttgactactagctttgtttgttttccgatgcttaccattcagttgctatgaccactacttcaccttcccatccaaggtgggttacacgctcccttacgcaagg

SEQ ID NO: 93843 - DNA, 288 bp, Glycine max
  Clone ID: PAT_MRT3847_55753C.1
gggctggagaagacgacgaggggacctacccagtgcgaagaaaagaccatcaaagtttcacttagccttatccggttagggttcggttttgacccaacctttgacgttcaaaccttagtttgatcagttgacattggtgagaacctttgtcttaagagtagttatgttgaattaacatcaaattctactgcttcatcctttgtgatgcaagctgatactcggtctggtcaaagagttgtgcatattccgtacagacaaatggaggaaagctgcaccgtcaggatgaaa

SEQ ID NO: 93844 - DNA, 743 bp, Glycine max
  Clone ID: PAT_MRT3847_55754C.1
ccacgcgtccgctagcatccggtttcgccagcccttgtggcaaaaccaccctagcctgccgaaaccaaaccaccctagccttctagcctacgccctctgcaccctaaatcgccagtcaaagtggcgaaaaccactgtatgactatgtcgccagctccggcgccggtgatgactcctcagctcgcgttgtagctcgcgactgatctcgcccaagcagagattcgccgtctccagcttccggccggaaccgcgtcccctaattgtttcgtttttttgtgtggttttcgagagttgaaattcgcgttccggcggcgaaacgatgtcgtcgaaggtggtgtacgaagggtggatggtgcggtacggccggcgcaagatcgggcgatcgtttatccacatgaggtacttcgtgttggagtcgcggctgctcgcgtattacaagaggaaaccgcaggataatcaggtaccaattaaaacactgctaattgatggcaactgtagagtggatgatagaggcttgaagactcatcatggacatatggtttatgttttgtctgtttacaacaagaaagaaaagaaccatcgaattatgatggcagcatttaacatccaagaagccctaatttggaaggaaaaaattgagtatgtcattgatcagcatcagggagcacaaccatcaaatggcaacaaatatatttcttttgagtacaaatctgggatggacaatgggaagacagcttcttcctc

SEQ ID NO: 93845 - DNA, 519 bp, Glycine max
  Clone ID: PAT_MRT3847_55755C.1
aaaattaaaaaataaattatgaataatatgaaagttaaaacaattacagtacttgtccaatttgatagttgtttatttttgctttctacaagacatatcaaagataattttgaacattattgacattggccaccgagctacggcatccaccttgtcctgctggacttcttgcacaaacaatagtgtagttgcttccacacattagcatttccagggattatgaattggctaaagaatgttgcaggatatatagatatctttttttggccagcttccaggatgcatttgatgtatgaaaaatatcaagcagattgccacattatacttcaagatggtacaaggtctctttactaccaggattactattagtttctggagtcttaactgcttcactctccaaatattgaataaagtccattaccaaaggatcagtccaaggagctcccagtggagcttcatcaccagcaacccaccctagatggccacctttgggtgtcactattaacaagcagtttggat

SEQ ID NO: 93846 - DNA, 614 bp, Glycine max
  Clone ID: PAT_MRT3847_55756C.1
atttcgcgatctagactttcctcactctcgtcgtcgtttccccgatcccggcgaatcgaactccaacggttctagaaatcggcgaagaccaactgcgactagcgccaatgcggagttcgaattccgaatcctaagacggaaactggaatcgctggttccgcgatcctccgtctccggcgccggtgatgactccgcaggtcgcgttgtagctcgcgactgatctcgccgaagcagaggttcgccgtctccagcttccggccggaattgcgtccctgaattgttccgtttttttatttgttgttttcgagagttgaaattcgtggtgcggcgaaacgatgtcgtcgaaggtggtgtacgaagggtggatggtgcggtacggccggcggaagatcggacgatcgttcatccacatgaggtacttcgtgttggagtcgcggctgctcgcgtattacaagaggaaaccgcaggataatcaggtaccaattaaaacactgctaattgatggcaactgtagagtggaggatagaggcttgaaggctcatcatggacatatggtttatgttttgttgttttacaacaagaaagaaaagaaccatcgaattatgatggcagca

SEQ ID NO: 93847 - DNA, 160 bp, Glycine max
  Clone ID: PAT_MRT3847_55757C.1
ggctcgagcgaaactactgtatgaggcgtccgctcagcagaagcgagaaagaggggtgtggataatcatcttcttgcactggcgccgaagtcactggagggatcgatggcactggcactccctgctattgatacaggggcatctagcgggattggtgctg

SEQ ID NO: 93848 - DNA, 324 bp, Glycine max
  Clone ID: PAT_MRT3847_55758C.1
gctttttaaattaatcgtgtttttacttaattagatactcttctatagcaatgatttccaactctggcttacataagaattgctggggaagtttgaagggggaaataaaagccccgaggtgcagtccaggctttgatagtttttaaaattcaccagtgttgagaaagaagtgagtttagaaataggcatcctaaataatgacatcactgatttcagtggccacaattactctgctgtgctcttttggatactgcagctgccttatagagacttagtgagttttgaggaagcctattgacattctgtatttgattgattctgaaa

SEQ ID NO: 93849 - DNA, 293 bp, Glycine max
  Clone ID: PAT_MRT3847_55759C.1
attcggttggagctggggccgttctttttaaccaatatataattaaggactttagcaggtttcacagacacaaatgtatctttgggtggcagtggctatactggggaggtgggaggtcctcctactagcctgggattccccatggaccaccaaaggagtttttttgatgctgcaggatggcaacttccttattcttacaaaaggtttttttgtttccacctcaaaccaggaggaggattgaatccttgaaggaaataaatttggaattaacctcccttggttaacttcctttt

SEQ ID NO: 93850 - DNA, 377 bp, Glycine max
  Clone ID: PAT_MRT3847_5575C.1
aataactaccaccaatagtaacaatgagtcgcacacacgacgcagctgctgcagtaagaagaggcgttgacaacgtggagtctggcatccataaaggtgtcgataaagtagaacgcggatttgcacgtgtgcaagaagatgcttctacagctttgcaccgaggcgttcaacgtgtcgaaacgtacacgactgctttagacaactacatccttgcgcaagccacacgcctgcgaaatgatatccaacccctccttcctaccatctctactactggtctcatctttgctggttctttgcccttgagcttctatttcaactcattgagtattaagagagtggttggcgtgcaagactatggcttccctacaaacctcgta

SEQ ID NO: 93851 - DNA, 475 bp, Glycine max
  Clone ID: PAT_MRT3847_55760C.1
actcttgggggaacccggggaaccccggaggaacccggaaggggacccaacggccccaaaagggagccaaaaaaaagccggagaaaagcaggggaaaaacggggcccagggggaaaccggaaaaaaatcggaatcccacacaaaaaccaacccggaaccaaaaagagaaaaaccgggggaacccagggggggcccaaagagacaaaaaacgaaagggaatcgcggggggctcccaagcgggaaaacaagcggaaaaacggggatgaaagaagcggcaaaaaaccggaaaaaaaccggggaaaggcgggtcgcaaagggggcccctctgggccccggggaaacggcaaaaaaacgggggaccccaaggggccgtccctgaaaaagccgaaaaaagaggacaaaaaggggcccccccagggtggcaaaaaaaagaaaaaagcgggtaaaacgggggaaaaaaccggaacaaaacaaa

SEQ ID NO: 93852 - DNA, 275 bp, Glycine max
  unsure (1)..(275): unsure at all n locations
  Clone ID: PAT_MRT3847_55761C.1
gaaacggcggaggaccaagnggcgccccancacacggaggcaacacaacacacanagagacgtttggtctaggcatctacgcagcaccacccaccctggaccaagtcggcaacagagagaaagagaaggaaaaacacacacacacacacacacacatcgtaaactaacatttgttattagaaagaagacatggctcaacccaattccaacggggaactgaaaaaaaaccagcaggggcaagttcaagaacaacagcagcagtgggcggcggcgca

SEQ ID NO: 93853 - DNA, 536 bp, Glycine max
  unsure (1)..(536): unsure at all n locations
  Clone ID: PAT_MRT3847_55762C.1
cattaaggatatttttatatttttaatgaataatgagagatacaagatacaaatagggaggggcaggattcaagtcccaaactctcctaacattttaacctgcacgcgaattcattcagcccgtgagttatgctgtttgaaatgaaaagcctcatatcgaattgggctccatatttaaaagccttaacccacacgggtaacgggctaaatgggccactacgggccgtagcacaggcaccttgttctaactcatgcaatctcttagtcaaatatcattatgaaaagctccttaaaaaaaaaaaaaaaaantttggtatgcctgggtccaaaagcgtcgcgtcattggattggngttgggttgctttcattggagcttgcaataaaaaagttgaaaccaagttcatcgcccttaatttgcacatgctcacatgcacgtgcctttccacctgtttacctaaatacggatcaaaagaactaaccattcttttcttcccttggcgaattaaatcgggcactagtcactagcgcactacacc

SEQ ID NO: 93854 - DNA, 380 bp, Glycine max
  Clone ID: PAT_MRT3847_55763C.1
aaaaagaaaaaaaattgggaaaataaaagtcccgcgggccccatttttttccgaaaaacccaaaaatgcccctgggccgaaactttttattatccccttatttaaaaaaaaacgccttgggggaaaattttaaaaaaccccccaaaaagcccttgcaaggggccggcatttttttatttgaaaaggcctacgggggggtttaatttgcccagggaatccgggggctccccctacggcccccatttttgcgaaaaatgccccaaccgcaaagaaaaacaaaacgggccactcggttaaagggttgaccccccaatcaaaagcgcccccccccaaaagggcctgggccaaccgaaccgcccccctttgggaaaaaatgattt

SEQ ID NO: 93855 - DNA, 102 bp, Glycine max
  Clone ID: PAT_MRT3847_55764C.1
aacaatcacatttgaggtaatattaatgtacacaaagatatggtgttgagtgttgtactaatgcattattgaactgggctgaacaagttatgatgggcagta

SEQ ID NO: 93856 - DNA, 780 bp, Glycine max
  Clone ID: PAT_MRT3847_55765C.1
gctcggattcgggcgatgttatttttttaatattagcagcaaaaaaagagattaggatttggtgttgcgcagccgcaggcagatatggccatggctttggtgagcctcagcaccattctcacaccgccttcttcttcttcttcttcgttttcttctccaaaaccttcttcttcctccatcgttcggtttcgccctctcactccccttcctcgctttcggaggcacctcgttcgtatggctcccgatgaggagaagatgactcgtcgctcccctctcgatttccccatcgagtgggaaaggcctaaacctggacgaaggccggatatattccctcaatttagtcctatgaagacacctttgccgcctccgttgcccgcagatcctccagaagaggatgaagaggaggaagaaaagaaagaggaagaggaagaacctgaaaaggaggagccagataagccagacaagccagaaaagcaatagtgtgtagtaaatgactggtcttgattccctccagttatccttgatatgccgagccagactgctgattgctaaagtgaatgtaagggtatcacatgaatacctatagcataaaattttttagctttcttcaagttttttctagccgctaatgtgcccttatatgagttagctcatgcaagaaggaaacaaaaagaaaaacaattttgtgctacgaacatatttgtaggcagtaatttttccctactttatcgattaatttgcaccttcatcatcacaaaaaaaaaaaaaagcggcccttcg

SEQ ID NO: 93857 - DNA, 632 bp, Glycine max
  Clone ID: PAT_MRT3847_55766C.1
catatgagggagatatttcagaggcactacttgtgctacaacctgcacctcccctattctgactgagcatattaattctttcccttctccttgcccttttgccattctttgagtttgagttatttttattagaatgtttccattctgcttgaaaggaacgccaagccttggagaccttttgtgcaatttcaatagcagcaaatcctgccatacgatgctggcgtccattaggtaggaaaccaggacaatcatactggattctcttgccaatggagtccgctgcctgtataagagcagtcttctgctttgtaagaactaattcttgctttctaagttttccctttcttaaagactcacgaaaaggaggttgcctgtaaaccttttcacatacattcttgggatgcaacctcttgcaccagtactccttaaaaagtggatcaatatccccatcaatgtcaaaccagaaaaattcactgttaaattttgaggctgtgtaaagagcaatctctttctggtaaaaggcaaggcactgaagcacaaacttatccattgaatccaattccaaatccaatgcagcatcattatccttgaccgcctctttgtatcgttcacaacatggtagcatgaaccct

SEQ ID NO: 93858 - DNA, 187 bp, Glycine max
  unsure (1)..(187): unsure at all n locations
  Clone ID: PAT_MRT3847_55767C.1
acccagcgagcggaggcgggcaancagaccaacnagcgncagggaccccgccacagagaaacaagggccccgaagggccaggacgacgccagnagaacggacacgaacncacgaggggcagccagcagcaccaacggcggggagggaggcaaggagaacncacgcgccggaccgccgggggccaccc

SEQ ID NO: 93859 - DNA, 239 bp, Glycine max
  unsure (1)..(239): unsure at all n locations
  Clone ID: PAT_MRT3847_55768C.1
tttcnctttnttttttttttnnnnnnnncgngggaaaccaggggttttgttcacaaagtgctctaaagctaaattcatctaggccgggacactcaagttccactcaaacccaattcacggcacaggatattactgtcccattacataaatcaaaattagttaacgggggttgttagaaacctgaaaggacgctcagcaagaaatccattaagatattaagaatttgggctgcctcatta

SEQ ID NO: 93860 - DNA, 787 bp, Glycine max
  Clone ID: PAT_MRT3847_55769C.1
ctctttgatttacattcttctacctttwaatctttctttccagcttgtcccattgcacactgtatagtttcagtgagagtcaccaaagttttawaaaawggccaccawawawaggaaaagaaagaaaaaagagagcaaactatggatattatttcttggccttttgttgaaagaaaacttgagggaggcttcaagcattaatgatgatgactatgatgctgtctatatggtttttgttttttcccctacaatctctcdctctctctctctcttttactttttttcggtgggttcaccctcttctacccatgaggatcctggttgtcagggtctggccaataagaagagtacttcaaccattcagcttcttgtgcatttgtgatggatgactcctctttgatttcagttgaagtgcaacccattatgagttcctccaaaccagacgcagaccttcctccaagcttatgatgttgttgctgctgttgctgaaaattttcattttggagcattattctagagacatggtaagagttgtcatcgagaatgatggaagtgtggtggaggggaggaggagagataatggtagagatgggatgtgacggcctactaatatgaaaagctgagtttgaaatttgatgatgatgagcatgttgttgtagttgatgatgatgaggagttacttgtgctaggkgccgttcatgcacttcttcacatgaacctgatgcttgcattacttctcttgctgttgaagcyctcctattccacctgcattctctcatcaagcttt

SEQ ID NO: 93861 - DNA, 770 bp, Glycine max
  Clone ID: PAT_MRT3847_5576C.1
gtccggattcccgggtcgacccacgcgtccgattgcaatggtttacgagaatccgttgcagctcttcctataatgacacacgacgtgttcgtgagcttccgcggtgaagacatacacaccagcttcaccggttttctttttcaaactcttggtagaaaatgcactattgtggtcttctcaatcaactatgctttctcaactattcgaaataagtagtagatgtactttgttacgtgaatgcctaggtggagggagcataatcatcataatttctagggataattatattgaggagacatggagtagatgatgtttaccaagtccagactttagatcaagaacatgttgttcaattgttttgcaaaaatgctttcaaaagtaattatgctatgagtgattataaaaggttgacttgtgatgtattatcacatgcccaaggccattccgtagcaattgaagtattgggctcatccgtgtttggacgagatgtttcacagagagaagaggaaattatatgaaggatgatgtttaccaagtctagcattggaccgcgaacatgtggtttagttgttttgtagaaatgctttcaaaagtaattatgttacgagtggttatgagaagttggcttatgacgtactatcacatgcccatggtcattccttagcaattgaagtattgcactcatctttgtttgatcgagatgtttcatagtggagaagtgcatctgttaggttaagagaaatatagtaaaacattatggatgatgtact

SEQ ID NO: 93862 - DNA, 269 bp, Glycine max
  Clone ID: PAT_MRT3847_55770C.1
acattaaaaattaatttaacattaaatgaaactggtaatgaagactttttacattgaacaatgacgtgacaaatatagaagaagtatatgaaagaaatatggactagcaaagaatctagatgtccgagctaacgagtgagcgactagctaggttggcttgtctacagactaaactcaatgaagagttgttgataagacagtttatgtttacttgagagaaaaatacaaccaaactcagtgagaatgtgtgggaaggcatttgatgttat

SEQ ID NO: 93863 - DNA, 144 bp, Glycine max
  Clone ID: PAT_MRT3847_55771C.1
ctaaaaattcacaaaaaacttttcaaactttttacaccaagcaacaatagttaatttgcgattcataagacgacgagaacctcatatcttacattcaccaacccaacctaattcaatatttcctatccaacttatcctcataat

SEQ ID NO: 93864 - DNA, 561 bp, Glycine max
  unsure (1)..(561): unsure at all n locations
  Clone ID: PAT_MRT3847_55772C.1
nnnnnnnnnntctcttcttttctctcgccnncncncaaaaccaaaccggggtaaaggcataaaggggaaaaaaagaccccccccaccccccaaacccaaggctctctgacgcaggccaacatccacaagggggggggaatccacccctttcacttcccggaccccccccaaggggcacacccccgaaggggggccaacaccaaaagcacgaccctcttaaggggccggaaaagggaaaggggggaaagcacgggccccatggccagcccaggcccaaggcactgacgtcaaggtgaggcacccccccacgaagagggagggcccccccgaccacggggggagagaagggaatgagccccaaaccgcccgaacaacaaacggggggagcccaccgcaccggctaaagctcaaagccccaaaaccaacttcaccattgccccccccttacacagaaccccacacccgggggtccaccgcgcggagggccaaggaatacacagcccccaccgagagggccccgccggagcacacccctagggaccccagaggggggcacccagg

SEQ ID NO: 93865 - DNA, 225 bp, Glycine max
  unsure (1)..(225): unsure at all n locations
  Clone ID: PAT_MRT3847_55773C.1
cangcncgcgtacgtnagctcggaattcggctcgagntcatatgngnnctncccgcccaannctgaggatcgggtggacantctgnannanangnnggacccnntnnangtgctcaagccctcgnntntcgacatcacgnacaggtgctgtgagngaccacggctgatctnacattgcgnaattgncaacaagntncagaacattgtctgngtgnngannatgat

SEQ ID NO: 93866 - DNA, 385 bp, Glycine max
  Clone ID: PAT_MRT3847_55774C.1
gccccctccggcggctcggaattcggctcgagattaaaatagccttcagcagaatttttatggctgcaaagttcccttattttgggggcgaggcaattcatcaattccgcgttgcctgagataatggaaccctcaccatacaacagttcagatgcatcgtcattagaggctttgcatgcatgggagtggcactttcaccaagcctatattcagagtactgctgcgcgttgtcacttcactgcttaatggagcatgccatcggcggctatgactccggttttggagatctggctacaagctatccggacgtactggaactcacctgtgatgctgatgaatgcaatggggtgggctcgaaaatggatgtaaaggcaatgccaacatt

SEQ ID NO: 93867 - DNA, 216 bp, Glycine max
  Clone ID: PAT_MRT3847_55775C.1
ctcaagcgtacttactcaccaactacgctattctcaaagacgctgcttcattcaactgtcacgtatcggtgctccattcaccagatggcagtgccagacttaaattctcaacatcttaacactcatcacttccaatcactcccaacacaccaactattctcatcactatccctgcatactctcataatctgagatactttcacaccttttaatcca

SEQ ID NO: 93868 - DNA, 498 bp, Glycine max
  Clone ID: PAT_MRT3847_55776C.1
atgtcggtttctttagaagcgttggcaatggctggcgcaagtgatgtggaatttgccatggatattgaagaatgggaacgcaaagatttggagcagtatccaccaccccatttactagcccatgaaaaagaagggaacaatggagtatatggccttcctaccacccattttcttccgaatcacaacacatgggaatatgacaaggaagaagaacatgttgaagcttttgcaatggctggtgttgattgtatggagaatacaatcaataatgtttgtgcattggaacagagtttaagtcccgaggctgagaaaaggcactgcaacattactactagttcgagcttggacgatggcatggcgattgagtgggtgaaaatgaagatgcgtgaatgggcctcagctgctgcatcaaacaatgacaccaaagctaatcttacagtttcagagatacttcttataatggataatcatttcatgcgaccaaaaccagacacatga

SEQ ID NO: 93869 - DNA, 474 bp, Glycine max
  unsure (1)..(474): unsure at all n locations
  Clone ID: PAT_MRT3847_55777C.1
ctcgagccgcgagaagacgacagaagggggcgagagacacgaagagaggtccttggatagtagtacgtggagtacgttttcaggttcagccctttgttttactgttaacgtctccaaaatttggtttacaaaagcaaaacgccataagaatcagaaaaggaaacaaagaccactggttttgagtctgttatctgctgctttacctgatttagcttacaaacacacacctcgagctctgtgttgatcgtttgcagatcacagtgaccattagtatatgaatttctaaggtcttgtcatggagtggaatgcaaaatctctcgggcaatgggactgggagcacttattcttcaatacaaaagcagctgagaatccaaggttacaaccaactgattgtagcagtgaagcagatccagaaatcaatgttggactgttgtatccatcangtggtagtgcttgttctggctctgaactaat

SEQ ID NO: 93870 - DNA, 820 bp, Glycine max
  unsure (1)..(820): unsure at all n locations
  Clone ID: PAT_MRT3847_55778C.1
aattcacttttgccaattagagttaattcagtataagagttctcacttttgaaatcttgtcagattaattactctagcaagattgaagaatgtctacggaagatgataataacaaaccttaccaagtacccaaagaaaattattcagttaacagtcatcgaagactatttaacaagtatgcttgtgcttgtgtgatgactgcctcgattatatctgccatatttggttacgctatgggagtgatggctggagcactgatattcataaaggaagatcttcaaatcagtgacctacaagtgcagctcctagcaggcatcttagacgtgttcgcagtatcaggagccatggctgcaggaagaacatctgattatataggtcgccgctacaccgtcattctagcctcactcatcttcttgttgggctccattctaatgggctatggcccatcctactcaatcttaatcattggaagatgcattgttggaattggtgtgggttttgcattgatcatagtaccagtttacagcacagagatttcatctccttccaagagaggctttctcacctctctcccagacctttgcatcaacttggggttcttgcttggctatgtctcaaactacttgtttgaaaaattgcccctgaaacttggatggagaataatggttgctcttccagcaattccttccctcattctagtcattctcatgttgaattcggtagagtctccaaggtggttagtgatgcaaggacgtatagctgangccaggaaagtgcttttattagtctctaatacaaacgaagaagctaaacaacgctt

SEQ ID NO: 93871 - DNA, 261 bp, Glycine max
  Clone ID: PAT_MRT3847_55779C.1
gataggaattaggatagagtaaggatgagaagaagaaagaagggggatggaaaataggagtattgtagagagtggagagaaataaattgaaatttaatatatttatgagaacgacacaaaattcgatagtagattgattaaattaaatgggataagtaatgataagtggaaatgaaaagctaaatatcagaacaataaaagggaaaggattaggtttaaatggataggatttgaacggtcagaaattaaaaagagtgagtt

SEQ ID NO: 93872 - DNA, 350 bp, Glycine max
  Clone ID: PAT_MRT3847_5577C.1
ggctcgaggccggaggtgctggcggggggtactgaggtggtgaatgaggtggaactgatggtggctatggtggctaatttttgaacgagacacaaatgttgaaactgaaccatttcatacattcacttgagaaatcacacaaattcattttattgctatatcggagactgcgattattatcacacaaaatagctgaccatgagcacctatcatcaggtgaaacaaccaacaaggcatccaagacatcatctatgactgcctaacacaagcccctccatgacaaatacaagaaccgcgtggataacttccaactgatgttcctggatctacattttgctacgaatgatagc

SEQ ID NO: 93873 - DNA, 188 bp, Glycine max
  Clone ID: PAT_MRT3847_55780C.1
gggacataaaccaaaggagatgagtaaaacattgtggacaagagttataaaatgccatctatagatacctaaaactatgtttttgcgttttgccctatttcccttcactcttgggatctaatgttccttggccaaaacatgatcacttgaacctaaccttccttaacatgttacctttttggagattt

SEQ ID NO: 93874 - DNA, 426 bp, Glycine max
  Clone ID: PAT_MRT3847_55781C.1
cttgcaccttttttatattactctaacagcccctcaattggaatagccactagaggcgacgagtgtggctaagccacctatcgagggtaatccatccggcatgacgttcgagagcccactcactctactgggtatcagataagagaccgcagacgaggacttggataacaacagccatttggtcctagaagtgaacacgcctcacaccacaaacgcgagtgctcagtcccaatggctaacgcatctaggacgatgaccaatctggccaatacaccgatgatgtctgacaagacagaaatactatggcgactctggcactcttaccggacaacctaagctagatgctgagctggctatggcaacaaacagaacttagatgttggtgaacagacctgcacatgacgagtactagaaaaaaatgctgcc

SEQ ID NO: 93875 - DNA, 410 bp, Glycine max
  unsure (1)..(410): unsure at all n locations
  Clone ID: PAT_MRT3847_55782C.1
cacaaatatcatctcgatacacataccaaaaaccnaaataaaatttatacccattctcctctctgccctctaatctcttctctttcaataaatttacttatcatcttttctacttattctacattattcctggcaccggtacactacaaaaacattttccccctcacatctacctcattatctactcttaatattacattatcaactcatctttaaagaaaaatatctttactaaccactttaaaccttaaacatcctctaaaccaaaatactcactcaaaaaaatgttataaaactcactacctccatctttaacacccaattaaaacttacctttacatcacacacaaaacatccaaaacctcaaattttcaaagctttacaccttcctctacccaaattccaacctt

SEQ ID NO: 93876 - DNA, 1545 bp, Glycine max
  Clone ID: PAT_MRT3847_55783C.1
tcacgagatctcgtccgcttatattgcgtcgtttttgggtgtgcgactattgtcccttctcttcctttcgtcggttaccataattctctctctctctttcttcttctccctcttcttcacactgagttgactgagtcttcgtaactcgctctctactctctctgctactcatcgcattctctgcatttctcctccgatcacattttctctctcttcatttgactatagctgactcggatttcggagaaagctcttagggatctcaatacaattcttggtactgaaaggaagaatgaggactccagtaaggcatgtttatccaagccttctgttgataatgctgatgaaaatattgaagaatggcaaaagaaaaagaacagttcctccttggtttctccagctgttaatggaaatctggctgtgactgctaattccagtgcagaggttgtaaatgcagaagtagaatatattgaatctgagaacttgaatgatgtagacgatgctgatacttgtctcaagactctcttggctggacttgactcaaaggattgggtcctggtttgtgacacactgaataacgtacgtcgattgtctatatttcataaggaagcaatgcttgatatgctgggggatgtgatcacatctattgcaaagtccctgaaaagtcctagaagtgctgtttgcaaaactgccattatgacatctgcagacattttcagtgcatataatgatcgtatactagattcattggaccctctcctagtacaacttcttctcaaggcttcacaagacaaacgctttgtatgtgaggcagctgaaaaagccttgatagcaatgactacttggatttcccctatttctttattgccaaaattgcaaccatgccttaagaataagaatcctcgtatccgtgcaaaggcatcaatgtgcttttctcgaagtgtttctcaactgggggaagaaggcataaagacatatgggattgacaaattgatccaagtagctgcatctcagttgagtgaccagctccctgagtccagggaagcggcccgaactctacttctcgagcttcaaaatgtgtatgagaaatctccatgatctcatcaagccagctactcctactgtcaataatgatgcatactgtgaatgaggagaatccagaggtgagttcttgggaaagcttctgtcagtcaaaactttctcctcttagtgctcaagctgtacttcgtgtaaccaccagtatcgctcgggagggtcttgtttcatgacacgcacattaaacctcactttgcggctttcatcatttccttgtttgcttatcattttcttctgtaaatacagtgcgacaattgagatgattgagttgagttgtcgtcgaagcacgtattgagcccaagatttataatgtgtattctattattttccccctagctgttgttacctatattacttttgattaatactactactactactagataatggaccgggaaaaattatgagtataatctttggtcttgtaactgtttttggatgattatggtt

SEQ ID NO: 93877 - DNA, 879 bp, Glycine max
  unsure (1)..(879): unsure at all n locations
  Clone ID: PAT_MRT3847_55784C.1
aattggaaatttactatttttcattaaaaatgggcttagtgtaaccataatttttttttttttttttcaagaccaaagattatactcataatttttccagtgcgatgcacggtccatttatctagtagtagtattaatcaaaagtaatgtaggtaaccacaaatagggggaaaataatagaatacacattataaatcttgggctcaattgtcgaactgtatttacagaagaaaatgataagcaaaccaggaaacgatgaagtccgctaagtgaagtaaaaatgtgcgtgttatgaaacaagaccctcccgagcgatactggtcacacgaagtacagcttgagcacttagtggagaaagctttgactgacagaagctttcccaagatctcacctctgaatcctcattcacagaatcaccattcacagtatgctcattgacattattatgatcattattgacaggagtagctggcatgagatcatgagaagatttctcatacacattttgaagctcaagaagtagagttcgggctgcttccctggactcagggaagctggtcactcaactgagatgcagctacttggatcaatttgtcaatcccatatgtctttatgccttcttcccccagtcgtgaaacacttcgagaaaagcacattgatgcctttgcacggatacgaggattcttattcttaaggcatggttgcaattttggcaataaagaaataggggaaatccaagtagtcattgctatcaaggctttttcagctgcctcacatacaaagcgtttgtcttgtgaagcctgagaagaagttgtactaggagagggtccaatgatgctagccccgggaatnccggtccggtaaccgcgaggcgttacc

SEQ ID NO: 93878 - DNA, 215 bp, Glycine max
  Clone ID: PAT_MRT3847_55785C.1
cccacgcgtccgcccacgcgtccgcccacgcgtccgcccacgcgtccgtacggctgcgagaagacgacagaaggggcaagccattggtctgtttgctcaagcgacctgtgctcttgagtttggacttccaagaccgttcaatcagagattactcgtcttgcacgttggtgggggtgccgtaaaacgacgagtacagttcaaaacaaataagtttc

SEQ ID NO: 93879 - DNA, 541 bp, Glycine max
  Clone ID: PAT_MRT3847_55786C.1
gagggggtaaagcatgggaaaaaaacaccaatagctcgtggggatgctgaggttttcatgaagtttgcaagggccggttacaaggagaaaatatgggatcatgctgcaggcgttatcatcatacaagaagctggtgggatggtaacagatgctggaggacttcccctagacttctcaaaaggcttatatttagaaggccttgatcgtggcatagttgcttgttctggagccacactacatgcaaagatcattgatgctgttgatgccagctggggctcttctagcctttgagtctgcttctattaacttacatgtatacatggcaaaataatgtcaataatgattcatcttttattttctgttttacataatttcttataaattcccctacctcaccatcagtttatttttgatgtattgctaacaacatatgagtttgttagtctgcaattgtattatttggcattataataacgcctaattgtcataatttcttagcatactgaatgccatgtactgaaaatgattcttctttagaggg

SEQ ID NO: 93880 - DNA, 394 bp, Glycine max
  Clone ID: PAT_MRT3847_55787C.1
catcagacttctacaaggtgcttcgatgcagtcactttgggcacagtggctgggcgatggaatggcaagccaatggttgtgattatgcatgctgttaatgctgccagaagtaaggggggattgggtcttactagctgcatgcgcaatgccagctcaggaccactccatgatcatatgtggaggatctcagtgcatcgaatatgatctacagggatgggagtagctctgcctaatagaggtgtgaggccctaatcctggttctgcaaagatgcagatgtgagagcagactgtacacttgaggagcttccgaaggtcacttaagaatgcttcctaagcatcatagaaggagctgctatcctatatggcatatttctcatggattttccaatagcta

SEQ ID NO: 93881 - DNA, 179 bp, Glycine max
  Clone ID: PAT_MRT3847_55788C.1
cccacgcgtccgtttatatctcacactgtatgtatcagacgtgccattgtcagttacctcgatataggggattcgcatgctcaagcgtcatcaattcactactaagattctatttcaaacattcgcagctaatatgtactctgatcctttataccatactatgactcaaatgatattaa

SEQ ID NO: 93882 - DNA, 190 bp, Glycine max
  Clone ID: PAT_MRT3847_55789C.1
cggggcgcggcaacgcaatagtcatcaatctgtgtaggtgccgcttaaccaaaatgaacgtctcatgtttattaaaagttacaatgatcgaatcatgctagcatcaggcagtctttatttaagctctcactatcctcactttatttatcgctgacagtctcgataacatattctcatgctttaattcact

SEQ ID NO: 93883 - DNA, 325 bp, Glycine max
  unsure (1)..(325): unsure at all n locations
  Clone ID: PAT_MRT3847_5578C.1
aaaannnnnnnttttttttnnnnnnnnnnntaaaactttaagggaaacaactctttaggcaaaattgaaacaccagggctgcttagtgtcaactgggacaaaagataccaaatgaccaaacccaaaattttgaatctatgctttttaaaaaagttttctttaaaaataaccctagagctgcctaagaactaatactcccccaagtgcccccgcattaaccccccgccgaggaacaagcttgatcattatcagatcctgaaatacccccctaccattgagattggcatgaaaaaaattgaggacaacaaccctttgtggttcattg

SEQ ID NO: 93884 - DNA, 289 bp, Glycine max
  unsure (1)..(289): unsure at all n locations
  Clone ID: PAT_MRT3847_55790C.1
cgggactattactacaannnttattggtttttttacagcaatcaacggtcttcagaacaaagaaggctgggggcccaaacgcatgccgttgttaaaccagcattaacggatgacatgacaaaataaaggcacccacccacgccttcaatgctccaacagtggtgtgcacgggattgcaaaaacgaacgcctgaggaagcataggcataggagcgaccgggagcgccggaaatacccgagacttccattactcggacagcttgtcttagcccaaaagggggggaccaaaa

SEQ ID NO: 93885 - DNA, 423 bp, Glycine max
  Clone ID: PAT_MRT3847_55791C.1
tactcctcagtggccgcccttctccttttttttatttttaatattctttttttttttatcttctcaacttttaattaggggggggggttttttaaacaaaaaaaaagggtttttcttccctaatattgtaaaaatttttactaaattccatttatccccaccctgggtcaaagttttccacaaatattttctttcctacccctgggaaaaatgtttatcaaataatatacgcacacccctactttttatcacggttcccttattaactttttacttctttttttttcccccaaatcccccggtgtttttatgccccacccttttttttacaacctaagggtgcttcctattccccttaccccctaatgtcctattaaaaccaagggccccctcttcattttgtagggactttttcccccgcgg

SEQ ID NO: 93886 - DNA, 348 bp, Glycine max
  Clone ID: PAT_MRT3847_55792C.1
caaaataagttggagcatagagacacatccttctaggaggtgactaatataaggcggggccaaattcgtcttaaggcaaagcatctccccgttggaaccgaaaggacgaataagggaacatggcaaatggaataaaggcaaggctaggcttgacattttgtctttgacggtgcttagagaacagaacaaaggcgaaacctgtacttgataatattatcctctacttccaggtttctttttccccccattcaatcatcaaaacaatcctctttagcaacaatggcaggggcaatcccaaaactaccccttgaacaaaaccaaaaaggacccaaataaaattctattacc

SEQ ID NO: 93887 - DNA, 229 bp, Glycine max
  Clone ID: PAT_MRT3847_55793C.1
ggcttggactacgcaaaaatggtacccttggggggagctaaaatcaagtggacggattaaaacagggtttacggatattatgttacaactgtatctataaaccttgtaattaacctattagcccccactgacacactaaataaatgcgccatgtattacttgtaatatttgatcaagaaagtaatccgttgctgatcagcgcgattaaaaaacggcttttaagcctaag

SEQ ID NO: 93888 - DNA, 954 bp, Glycine max
  Clone ID: PAT_MRT3847_55794C.1
cccacgcgtccggaatttttgttaataaataattatatcagcaacaaccaatgggctatggtgtgtaagcaattcacaacttccgtccttcgttctaagcaacactctcaattcgtatataataaaacctctttctttatattctcttcacgaggaacaccgacacataattcctacataaaactaaaacctgtttctaagttctagtctttttttttccatgtatagcttcaccaagttcagaaagctgttttgttctgtgttgttttcatggctctgttttggaggtttggccatggcagcaggtgaaagtagcagcagctccagagacctagaccagacaccaacgtgggccgttgctgctgtctgtactgttttcatcttggtatccatagcactcgaaaagagtctccacaaagttgggacgtggcttgtacaaaagcacaagacggctttgctcgaagctctggaaaaggtcaaggctgagttgatgattttaggtttcatttcactgcttttaactttcgggcagagttacattgtcagaatatgtattcctgaaaagctcgcagacattatgttaccatgtccgtataaggaagccaaaaaggcatcagatagtgaagaggaacatcgtaggaaacttttgtcctatgagcgtagatatttagctgctgatactgcctcgttcaaatgcagcagggagggacatgagccacttttatctgtcaatggattgcaccagttacacatcctcatattcttcttagcagtcattcatgtgttttacagtgctatcacaatgatgcttggaagactaaagatacgtggatggaaggcatgggaagcggagacttcaactcataattatgagttcgccaatgctgcttcaagatttagacttactcatgaaacatcattcgtgagagcccataccagttttttgactaggat

SEQ ID NO: 93889 - DNA, 758 bp, Glycine max
  unsure (1)..(758): unsure at all n locations
  Clone ID: PAT_MRT3847_55795C.1
ctactttagaatcatcgtgtgattctgaggccatttctgccaangttttcttggctaattttgggatcttggtaaggcttatgtcncctaangcctgaagagtttagattgagcaggcatagtcagccacggtctgttttgctgttactagttttggggattcctgagtagatgactcaggtttgacggtagctatttgggtcaatgacccttcaaattttggtttatgggttgatgacccagtctgggtaggtgacccagaggatgatgaggttgtgttcttgattactgactctggtagagccaagaaaacttcttttcctttactacttgttctacctcctctcccggaggagctggacaccttaggaggcatcaatatttttctgtaaaaattcacgtgtgaggtagtcaggtagagaatttgaggtgtccttgaaatattctatgtcaaaatcaaagacacttaaaattgcttgccatcttgcaaaaatttgttttgaggcaaggtttttaacatctttttgtaaaatatctttagctaatttacaatcaactctgattaaaattttttggtttaataaatccgattgaaatttggaaatgcacaaaacaattgctaaaacttcttttttaacagttgaatattttaattgtgcaggattccaatgttttgatgtatatgcaattgtagacaaaggatcaagctgatgttttgatgatgccaaaggatcacatgcgtctcaaagctttattca

SEQ ID NO: 93890 - DNA, 373 bp, Glycine max
  Clone ID: PAT_MRT3847_55796C.1
caggaaaggggtttttttttttataacaagaaaacaaggggtttcctaaaccccaggggcaactggaaagggtggaaaaagcaaaggggaaatttgtgagatggcaatctttttttaatcgattacaagcccacctgttttttttaaacccggaaaaggggatttaatagcaaccctgccttaggctgcctaaggaggggttgcaagcgggccccttaaacaagggtttgtaatgcggggggcgcttaatgccccatgaggggatcgcattatcccgggggcccgggttggggtaccagggggggccgcatcactggcatatcaccatgagatttgctatcttgtactaaacgagagggccagggcctgaaaa

SEQ ID NO: 93891 - DNA, 263 bp, Glycine max
  Clone ID: PAT_MRT3847_55797C.1
gaaaattcacaattttgattctcatattttaaaaaattaatgatttcgatgcaatcttcaattttatttacgttttattttatttatttcttacattatagttaattaaatcattttttgatgatatattaaattgagaattggactaaaattaaaaaatttgtaaaatagaaggtcaaatctttttattttgaaatagaagattaaaattgcatattctttaaaacagatgtcaaatgtttttattttaaaatggagagact

SEQ ID NO: 93892 - DNA, 262 bp, Glycine max
  Clone ID: PAT_MRT3847_55798C.1
cctcgagccgactcggctcgaggttcaaggctaacagaaccaagcccgctaccatgccagacacttcacttgatcaccacacgttaccttcctaatattttgatcaatgttctattcgtatgacaaaacttacgtgcagttcctgagatgtgttaggtcgtgttctctaattagagtgttatcttgtcaactttgctagtaaggtccacatttagagtcgactctagtttctgaggtgactttaattatgaatggaaaaaca

SEQ ID NO: 93893 - DNA, 305 bp, Glycine max
  Clone ID: PAT_MRT3847_55799C.1
gggggggggtttttattttggaatccgggcccggttcctttttccccacccccttgccccacccggaaaaacctggcccttgccggaagaaagaccatttctgtttaaagggggaaatgttaaacgttggcaaaaaaaaacaaaaagcgagccctaagggaaaaaggtgaagccctaaaaatctaaaaaaaaatacaacccacattattagggttaaacccccgggccacttagaaagggggaaaccccaaattcaatggggaaaaatcaaacccccctttccagggggaaaaccgtttgggccc

SEQ ID NO: 93894 - DNA, 248 bp, Glycine max
  Clone ID: PAT_MRT3847_5579C.1
tggggagctcatggacaatgtacagcagctgacatcttggataactgcttgcaggctaattgcatcggatgttggcatatgtggtcgccagctgtgtgcttccagagccagaggcacggcctactctgagagttggtactgctcggttgcaggctatcaccgccatggggccggacggatcaactccgttagcatctgctctgaagtgggcaccaatagtgatttggtccagtgacttaactccggtc

SEQ ID NO: 93895 - DNA, 300 bp, Glycine max
  Clone ID: PAT_MRT3847_557C.1
ctgagatggttactgtggggactgaaaggcattgaaaaatattgttccccctgttctgtttgctggctcagattgtttgcttattctaacggaggtgcctattttcgctcttgttctattgtggagtgcactcattgaatttatttcttatttttcttgtgttgttattctctttttttattttttttttgttcttttttttttcttttttttttttttttttattttttttttcttttttttttctgtttattattttttctttttttttttttatttttatttttctttttttttttt

SEQ ID NO: 93896 - DNA, 1451 bp, Glycine max
  Clone ID: PAT_MRT3847_55800C.1
ggctcgagcttgggcgcttaggataaccggaagggtgttggaagatggtaatggaaaggattctgtggcggaaggaatttcgacgaaggaatatccaaaattctcggctttctttaagaagattaccatatacttggatcagggtttgtaccaggataaccatgttgttgtgtgggatagtgctcattcggcggctgcgcagcagcgtgatggttttgaggtgaagaggaaaggagataaggaattcactgcggtggttaggatggcgatgaattattcgcctgacaagtttgtggtttcaccgcaactggctagagttttaggggttgagtttgactcgcgctctaggatcatagctgctctttggcactatgtgaaggctaagaagctgcagagtcccaatgacccttcgttcttcatgtgtgatgcttctctccagagggtgtttggggaggagaagatgaaattctctgtggcttcgcagaagatatcgcagcatttgtcacacccgcagcctatacacctggagcataaaatcaagctttctggaaatggtccagccggaagtacttgctatgatgtgcaggttgatgtgcctcttccacttgagaaggatatgtctgcgttcttggcaagcactgagaggcacaaagatattgatacttttgatgaattgatctctgattcgataaagaagattcatgaacatcataggagacgggcattctttctcggctttagtcagtccccagcagagtttattaatgccttgatagcttctcagagcaaggatctgaagctcgttgctggagatgtgagccagaatactgaaaatgaacgacgtgctgaattctacaatcaaccgtgggttgaggatgctgttattcgctacctgacccggaaaaatgctcgaagtgatgctccttgaaaaatctgagagaaaattgtgaaatagtattctttttatttgagtggtggaggtggttagttttctgataccactttagggtcttgtcccaacattgccaaagtttctattccatccttcatttatgttttggagcagagtactgacagagtattctcgagtcaagaattctgatcgcccctggcttattgttggagtccctcaactgttgtatccatatttgtttctcatctactcttcctactcacccattccagtttggtaaaatgagccatgagcaatgagctaacaacttatgtagagcatcaagtcttcccaatggtatatttaagttcctagtttggataaagtaattcaatttcaatgaaattcaaaatttcctttttcccaggcatgttagaatgcaaggattacactaatgtctccgcacttcaggaagcttcattttactgtatttacttccattccatattattatttatttgttctccccaaaaaaaaaaaaaaaaaaaaaaaaaattaa

SEQ ID NO: 93897 - DNA, 303 bp, Glycine max
  unsure (1)..(303): unsure at all n locations
  Clone ID: PAT_MRT3847_55801C.1
tncnctagtcacagacaccgacacatatctgtcttccgtaagcaggnactaaatatggcngangtgtctggaatgntcagagcantatgaganacnaatgcntcatgtcgtctaccgngttggtgaccntgatcgcaccatcaaattttacacagaatgtntagggtatgaagctnnnangcaaaganatagcccagaggagaaatatcgaagctggcntngattngcccanaagaantcattngtngtgaatnaacagagnagtanggngntaccgcggattacagttgcgaggcatttgac

SEQ ID NO: 93898 - DNA, 113 bp, Glycine max
  Clone ID: PAT_MRT3847_55802C.1
tttttacgctgaagccctgtacttgtgatatggtactctagaattcgtacctatctgacgggactcataaggtgcaccaaaactatttgcagtatttgttttactgaactctc

SEQ ID NO: 93899 - DNA, 427 bp, Glycine max
  Clone ID: PAT_MRT3847_55803C.1
aggactcaggcaaagcgccatacccgaaccaaacgtgttcttcgtgtgccctaacctctaccgccgcgcagatggcgcaaccgtcggtgttctccaccaccatgatgaagcctccgagacgtatctgcttcttgatggtgactgatggcactcatcactgaaatcctcactcgtcactggtgacattctgtgatccgacgggtggcatcacagccgcgtggcgaaggaggaatattccttcatcgttccaatccaattcttagtggtggagattcctttgtttgatctcatttcattccttttttatggattattatcattcgcaatctctccatggctgatgtttttttattttaaatttcatccttacatttaggatttgattaagctacactctatctctttggttgaatcatgtttggatctg

SEQ ID NO: 93900 - DNA, 358 bp, Glycine max
  Clone ID: PAT_MRT3847_55804C.1
ggtttcctaaaagatctattgcccaaatgtttccactgtcaaccatgccggtgccggcatggttgctccattcactggcctcaagtccatggctgacttccccaccagatagaccaacaatgacattacctccattgctagcaacggtggaagagtgcaatgcatgcatgtgtggccaccagatggcaagaataaggttgatactcttccctacctaccagaccttgatgatgcacaattggcaaatgaaggttaatatcttcatacgaagggatggattcctagcttggaatacgagttagagcacggtaatgtgtaccctgagcacaacatgtcaccatgatactacgatggtcgc

SEQ ID NO: 93901 - DNA, 557 bp, Glycine max
  Clone ID: PAT_MRT3847_55805C.1
ggggaaaaaaaaataaatcctttaataaatcccctggccttaattgtttaaaagtaaaataaaaaacttttaaaagcttgatcttaacttgaggggaaggaaagctaaaaaaaaagggggggggcaaaaaaaaagggaaaaaactttcctccatcaagtttggagggttggaccttttgcccaagcagaaattacctcccagcctttattaaaaggatttgctcgtattgcatgacaattggaaaaaaaagctccacccctataaaagggaaccatgttttttttgagggggtaaaagctaaggtactttttttgcttggccaaaacttttttggggggctccaaatccatttccggttttggaaagctaaagccctccccaatgctttgggggcaaaccctttggggcataacatccacttcatggaaattgaggcccacaaagggtaggcccgtgcaaggggggaacaaaaaaagggtcacacagggggagatcctggaaatgaatctgggttgggacattggggggttaacctgcctggggtcttgttttgttt

SEQ ID NO: 93902 - DNA, 382 bp, Glycine max
  unsure (1)..(382): unsure at all n locations
  Clone ID: PAT_MRT3847_55806C.1
gttgttgttattattgttattattattattattattattataaattatgtagggtctagcggaagaccttttttaatattgtgatgacaagagttaacactgatatttcttatctcttaatttttttctgttgtcatgcatgtttgttttgtcatcatcatcatcatcatcatcatcatcattattattattattattattattattattccaaattgaggacgggtttttggagttagctgacccttgccggatcgtaatcctttgtcccgtccattgcaacatgtgtgtcacttatgacatttcatttttggttttcattggcattttttctttaaggttgtcctaagtattgctttaaaattctatttaattntatttt

SEQ ID NO: 93903 - DNA, 376 bp, Glycine max
  Clone ID: PAT_MRT3847_55807C.1
gcacgaggtttggattgagaaagcgagtgggaccaaacagtggctttgggagttagttacagctggggttgagcaaatgcgcataagtgtggacaagacagattgtatcacattcacaatcacacacatgcccaataatgcctccatctagaggcatctacgtctacatctacattttacccacattggaaaatgctctttcttgatcccatcttggtcttgtagctgtatatgtttcttccaaaatctatatatcaaccaaaggtaaatgttacctaaattttgtatcacaatatatatatatatataggcacaagattactagactgaaaaaaaaaaaaaaaaaaaaaaaaaaaaaaaaaaaaaaaaaaaaaaa

SEQ ID NO: 93904 - DNA, 474 bp, Glycine max
  unsure (1)..(474): unsure at all n locations
  Clone ID: PAT_MRT3847_55808C.1
gctgcgagaagacgacagaagggtatccatagccatctttcccaactaaatttgtcttaattgtgttaacaggtttatggagtcaatttccagaatctagtggcctgtttgattctttttatttttttaaacaaaaaattatttcatagaactatttcacagactaaaaatatccaaaaaaaacctgttttatgaatattgttttgaaaattaaattctgaaagcttacaaatgttctctgattgcagctgaggtccgggtggtgatggtggtttgaagtgagagtagggaatccacgaatataggttaaaggaaacaaaaaaatttgtgttcctaattttctactccaaaaccggttgtagagaataagttttcaaaacagttaaaaaatagacagactgcttttttggtgtaaactaaaacatggatacagatatgcatcaaggattatntcatttgtgaccacgaagtaat

SEQ ID NO: 93905 - DNA, 151 bp, Glycine max
  Clone ID: PAT_MRT3847_55809C.1
tctacagaggaagttattaagttccatcattgagggatgcagtatcgatgcagtgatgaacatatgcagacctaagcacagtgtcagtcactggtgctgttaatgaaagctacttcatcgagattagagttgcgtgagtgctgatattact

SEQ ID NO: 93906 - DNA, 398 bp, Glycine max
  Clone ID: PAT_MRT3847_5580C.1
gcaaaaaccggtgcctttaatgaaactttcagccaaaatgggacaacggttttcacttccttaaccaaactttggcccgctgggtttcccaaaccttggcctttaaaaaataccttcccttgacaagatttcattacttccccaattcttcccttggaaacccacgctctctgagaacctccccaaacgggttaattttttggccagcagcagctggtgctccggccctggtgagggccttattgccccctaatgggtttcccaaagcgttggcaactcccggcatttccagaacaaatcttacaggcccccctgcgattacccccggaccgggagaaaccgggctaagccttccctttggccggccaaaacttccatcagatttttgggggaaaggg

SEQ ID NO: 93907 - DNA, 231 bp, Glycine max
  Clone ID: PAT_MRT3847_55810C.1
attaattcatcactgtatgcatattctaaacttgttgggaacggcaatagaattgaagcctctggatttggttcattggttctaaaggcttaattggttaattagtgggattagttttttggttcatacatccttttttctttttggtacgttgttgagatattgtcagatttgatctggtcactttttacttcccagaagattacacactgcgagactttctcaccccat

SEQ ID NO: 93908 - DNA, 248 bp, Glycine max
  Clone ID: PAT_MRT3847_55811C.1
gtgaattggaacattcttcactcttgagggaattaagagacaagatatggcaattggtttcatggaggtgcagcttgtcaaagcaaaaggcctgcataacgctgatatctttggtgaaatggacccatatgttctgatacagtacaatgaccaagagcagaggagtagtgtcgctattggtcagggcacaaacccagtatggaatgagaaatttatgttcaaagttgaataccttggatcaggtgata

SEQ ID NO: 93909 - DNA, 553 bp, Glycine max
  Clone ID: PAT_MRT3847_55812C.1
gtgctgcctgttcctatagggtcagttcagtaatggtgcggtgctctcttcaagtcctgtgagatggctctaaagggacagcgggaagtgatcagctcagtgcaaattagtactttcatttcatttaaggacttagacaacattcgagtgcttgtcatcaaattggagggagttctagaatcattactgcagaatgcaatttttgccattaaaataaaaatgaggatgaagtgaagtttgcaattgacgagattaagaagaaaatagaaacattttcagaaactatggagagtttaagtgctcatgctgataaatgcagtcgccagatacggagagcgaggactgtggttatacaaaatataatcaagaaaccagattgaaatttgtttactttctcttgctggattcttcctttgcttcaaataggtagactacttcagtaagatgcttataaagataaatgaatatagaacttgtacagaacattctgtactttctaatttctctgtatagatatttagattataaatgattacaaatatgttttctgctt

SEQ ID NO: 93910 - DNA, 2062 bp, Glycine max
  Clone ID: PAT_MRT3847_55813C.1
ggtaccttagtttgcataaaaggatttgaaaatcttgtctgtctcactctcaaaggaatttatgcaacaagacagcgacacaaagttcccacttccagatctacttctgttctgtcagtcaccacagatagtttaactccactcacctctcaccgcaaccttaacttactatgtacctttcttcttcttttctttgtgtaaagtttaaaacttgaagcaaaaccaattgccccatttgccatttggtggtaataatcgatcgatggagttcactgaatcttacaagcaaacgggtccctgttgtttctctcccgacgctcgcttcattgccgttgctgttgattatcgtctcgtcattcgggagaccgtttctttcaaggttgtgcagttgttttcatgcttagacaagattagctatattgaatgggcccttgattctgaatatattctttgtggtctctacaaaaagccaatgatacaggcttggtcactgacccagccagaatggacatgcaagatagatgaaggacctgctggtattgcatatgcgaggtggagcccagatagccgccacatactcaccacatcagatttccagttgcgtttaattgtttggtcattgttaaatacagcttgtgtgcatttacagtggccaaagcatgcttccaaaggagtttctttcactcgagatggaaaatttgcagcaatatgctcaaggcgtgattgcaaggactatataaatctgttatcttgtcacacatgggaaatcatgggcaattttgcagtcgacactctagacttggctgatatcgaatggtcacctgatgatagtgctatagtgatatgggattcaccacttgattacaaggttctaatatattctccagacggaaggtgccttttcaagtatcaagcatatgaaagtggattagggattaaaagtgtgtcctggtctccttgtggtcagtttctggctgtgggcagctatgaccagatgctgcgggttctgaatcacctaacttggaagacatttgcagagttaatgcacccatctacagtccgtggtccttgttatgctgctgttttcaaagaagtagatgagccactacaacttgatatgtctgaactatgtttgagtgatgatttttcccaagggcatgatgattctcctgaagaaccctttagagtcaggtatgaggttatggaagttcctatcaatttaccattccaaaagcctcctgccgagaaacctaaccccaaacaaggaattggtattttgtcatggagcactgatagccaatacatatgtactcgtaatgatagtatgcctacagtactttggatatgggatattcgtcatcttgagcttgctgcaatattagtgcataaggatcctatcagagtggcagcttgggacccaacatgcacacgccttgttctttgcaccggaagcactcacttgtatatgtggaccccatctggcgcctattgtgttcatgttcctctatcgcaatttactataacagacctgaaatggaattctgatggcagttgtctacttcttaaggacaaggagtcattctgctgtgcagctgtacccttgttgccagaatctagtgagtacagctcagatgattgatgatcacgagggaatgaaacaaaatgatggtaaaatatgaatgaccctgtatttctgtgcatctggtagacaagactccaaggtttaagatcatacaaagtcctgttggtgtaagggtgtgtttggctggagtattttaagaagggaaagtaattttcaagagaaaaagaaaaggcttggttgttattgttgcctccaattgatcagggaaactatggtgatcaagcattttcaggaggggcaatggagcaaagctatgtagtagcatttggaaaaattcaatggccatctcggcccttgttgtaggagcatagattaaattgaacattaaacagcattctgctttcctgtttgatttttaaggtgtaatgctgttgattgcaatgccatctatttatctatgatattttaaacttaaagtgc

SEQ ID NO: 93911 - DNA, 359 bp, Glycine max
  unsure (1)..(359): unsure at all n locations
  Clone ID: PAT_MRT3847_55814C.1
ggccgccnccaanncaaaattttaaggcgtccctaaaanacgaacaacgccaagaagggggaccggggaacaaaaccaaaggagcgcggccacaaaccaaccaaaccacagacgaagaccacacaaacaagcgcccagagacacgcacaaccccccacaancgaggcccccacccagaacaagaacacaagacagggaaaaaggaaaaagagagagacagaaagagacacagagagagacagagagacannaacggccagcccccgcgaacaaggccgccgaaaccaaacaaaaaaaaaggcgaggcagcaaggaaaccacggaaacagccgccgccgccggcaaggccaggcacacgg

SEQ ID NO: 93912 - DNA, 301 bp, Glycine max
  Clone ID: PAT_MRT3847_55815C.1
ttcttttttttttttttttgcggtcaggaaattaacaaattcccccattggcgggttattaataaccattgaaataaacagatgaggctttaataaaacacttcctctttagggatcattaggctttttttgtatcaattcgaaggtcactatcttcttcctttcgataattgggaactttttgtgatttcagttggtccagaaaaatatgatttcacctatccaacaacaggaattttttctgaattcttgaggtcactatctgtctcctgatttctttgaccaatttgttcagaggaag

SEQ ID NO: 93913 - DNA, 657 bp, Glycine max
  unsure (1)..(657): unsure at all n locations
  Clone ID: PAT_MRT3847_55816C.1
ccacgcgtccgctttaatgttgtcaccacatcccaccctccacgaagctgcattttgcattgcatcaccatgttgtggatgttgaaaaaccagctttaagtccctccaccatattgattcaatgccgtctcgaggtgcttcactcaaactcctccaaccaccgtatttggactccaacaccctggcccacaattccccttgatgctgaaataggttccacttccatttgccaagtaatgctaggttgaaagtggttatatctttgattcccagtcccccattgtcctttgggaggcacactgtgtcccatttgatccatgctatcttgttttgctcatcagcaccatcccacaaaaatctcctctgtaatctcaccaacttgtccaccacctttttagaaaccctgaaaaaaagaaaaaaaaaataggaaatggatgttaagaccggccgtataagagtcactctccccccgaaagagaggtgtctttgtttccatttcgctaattttctctcacacttgctaatgatagggtcccatgtctgagctcttcttggatttgctccataggaatccagggtangtaaaaggaacaagantatattctnncatgacttcgtcaacagcaacaaactgatggatgatgcagctttcctact

SEQ ID NO: 93914 - DNA, 642 bp, Glycine max
  Clone ID: PAT_MRT3847_55817C.1
tccacgcgtccgcccacgcgtccgggaaaggcctggcgttgcagctaatgcaactttgtcggagcaagatactaggaaggggtggtctagtggatctcagcttcctccagtagatgattcttctgccatagcagaagatgcatttgcctcttcgacttttcgtcgcacacccccgggtcaggtacctggatcccaaaatcaaatcaatcatagcctgggctcctctcaacctcatgatgcttggaagatttcacatcatccgtctaacatttttagtaatagggggcgagcaaggaatcttatgatccctcctatggacaacattcgcaatacagataataacccgtattgggttcgaccatcaatgtcgaggatggaagctcggccatcagttttgccagcaccttttgaaatgaggccttctgtaaatgtgaatgtaactagaccgcccatcataaatccaataaatccattgcaaaaacatgttaggagtcagttcaatgcaataaatactagtaatcctattgcaaaccatgtaaataaatcttcatttatgccaaaacagtcatttgacagtgttgagaacaaggatgcaagtatttcaaagatacatcagttgcctaatcagcttcctggagtaat

SEQ ID NO: 93915 - DNA, 141 bp, Glycine max
  Clone ID: PAT_MRT3847_55818C.1
ggctcgagcgatctcggctcgagtgtgtcaggattagcaggtgcgtcgctctcgaacgcagctgtagaatttcggtcaacaggattcgtacgtcaggcttctgatggcgtccgaagaggatggggcccgtttctgaaggga

SEQ ID NO: 93916 - DNA, 576 bp, Glycine max
  Clone ID: PAT_MRT3847_55819C.1
aataaatattttaaaaaaaaaaacttattcctatctttctattctttttttactacatcatttatgctataaataatattaaaataaataacatattatattattttaataatacaaatattataatattaaaataaataatgcgtgttcaattttgtaggggagtataatattggtgatgagttgcaaaaaaataagaaaaaatggaataaaaagatgaaacttaaattaatgtgattttaggagtgaccaggagtcgatttggttcaatttagatgattttccaatccaaactaatcaacttaatttgtttagtttagtattggatgattggttttgcttaattttttttatcataactcgaaataaaccaacccaatttgtgggatttgtttttgtttggatctcgggtttcataaaaaaatgttctaaaattaagaagaaaaaaaagtaaaagaaaactcatgtacaacaactatattatcattaagtaaaaaaaaaaaaacaattacaacatgcgatagtaggtatctaatagcagtggtcaacaactataatatgttttccaatatcagt

SEQ ID NO: 93917 - DNA, 368 bp, Glycine max
  Clone ID: PAT_MRT3847_5581C.1
gggccttaaggacctgacacacagacccataagggtttaaatttttttatgaaagtccgagagggtttaattttcttacaaagattaattcgccctttgggggggaccaacaccaccacccacaaaataaaaaggcaaagcgggtattaaaggaaggattggcaaatgaaaagggcccccccaaaattcaccaagggaacccaagacgcaaggggtgaccccaattttacccatgagggcaaaaacccactgcccttagagaaaacccaaggctaaagctttggattcactcatttaaggaaatgaggcttagaaacaactttggggaggaacagggccttctaaagccttacaaagacagccaaaaa

SEQ ID NO: 93918 - DNA, 481 bp, Glycine max
  Clone ID: PAT_MRT3847_55820C.1
gctcaagccgaatcggcttggagcttcgtatcactagaaatagttactttctttcagccactgaacaccgtgcactataagtctatagctaaacctttttgttgtagttgatgatgtgttatacaccaagtctattaagtgtgaatggtatttttaatccaaaaaatgtggtgttctttttggccaatttgaatctcactcaatattgaacatgtgatggatttcttgaattcttgtagggtttaattataaaacctataagattatgatccttgttggttcaataggaatatgtcaattgtatagtcatgagcctgaaaattcatttttattgagacccctgtgggaatatcctccaaagcccttccttgaaatccttcattattaatgttgcaaatgtgtcaattggtatcttgtgcacactgtatggtatgaaaattctcgaataggcaatacaagtctttgatgctgtcttgtttaa

SEQ ID NO: 93919 - DNA, 247 bp, Glycine max
  unsure (1)..(247): unsure at all n locations
  Clone ID: PAT_MRT3847_55821C.1
gtctctgcctcnctcgcanncccncccctnnnncctgctcgtgccnctncccgggcnncnnanngcacnttccaagnttgagagctctcancnntcctcganngttngcgcccaggntgacgttcactnanttccangtnantcantgcggaggntgncagcnnntaaannactnaacttttgccgangntttcatgttcgaangnncntcggncatcnctgancggagantgcnatgcanntnncn

SEQ ID NO: 93920 - DNA, 334 bp, Glycine max
  Clone ID: PAT_MRT3847_55822C.1
agctactatcatggaaggctattctgtttgccattattggactaatggtcagtaatcgctcgctagaggatggatacattctgctcagggaccctagaggctgacatgttgctttatattcggagagtgtcttcaaatgctctcaaattggacaatgaccgtggctctgccatgcaatacgcattttgtgaccagatatggaactgtggacagtgtcgatgaattattaacctgagcgatagcccattacgagatatatgggttacgcgttactctctgcatatccttgcacacttctgctttcataaggtacacagcttgattggggacagct

SEQ ID NO: 93921 - DNA, 640 bp, Glycine max
  Clone ID: PAT_MRT3847_55823C.1
acgcccacgcgttcgcacaaattggaacgatgttgttcgatcgtttggccttctgctgttcaaagcacacaagttcatctcaaagaaaatatccaacagtaatagaagagctgcgccaccaattttctctggccaatcttaagaaatcaaccaacaattttgatgaaaatggagtaattggatatggaagatttggtaaagtatacaaaggttgtcttcagcataatgatggttctgattattcagtcacattaaaacgattgggcgtgaaagatagtcgaggattggaacagttcaagaatgaaatagagttgctctgccagcttcgccaccctaattgtgtctctcttataggattttgcaaccacaaaaaagagaagattcttgtgtacgagtacatgtctaatggatctctacatcaacacctacgaggtggcctattgtcatggaagaaaaggctagagatttgtatagaagcagcgcatggactacactaccttcacactggagctaaacgcaccatcattcaccgtaacatcaaccctagcaacattcttttggataacaacatgaagtcaaaacttactgatttccgccttagcatacagggaccacgttatgggtcaaagccaaaaccaat

SEQ ID NO: 93922 - DNA, 1891 bp, Glycine max
  Clone ID: PAT_MRT3847_55824C.1
cttcttccttcctccttctctctctcagcttctccccttcccaccctttctcccccactcatctcctgcaacaacaaacaaacaaacaccaccaacaacaaccactcctcttctttttcaccctcgaatccacgcttcctttacaccgcgtttggatctccgttaaacaaaaccattaaaatgtagcgagagaaaaacaaaacagaaaaagaaaatcagttaatttattaattttatttttttatggctttccacgaccatctccagcacgaaatagcgttccagcgtttcacggaggagcaagagttgaccgagaacagagacatgcagcagaggctcccacctccgacatggctcaacaacgttaacgcgcgtcaacagaatttcctcgacaccgagaagagcgtggatcggaacaaccgaagcgagagcaattgcgaatccgaggatttgagggaatacaaagcggacattctaggtcaccctctctacgatcaactgttgtcggcgcacgtctcgtgcctcagaatcgccacgccggtggaccagcttcctaggatcgatgcgcagcttcagcagtcgcagcgcgtggttgaaaagtactctgcacttgcacacaacggggtcgtcgatgagaaggagcttgatcagttcatgacccattatgttctgttgctctgtgcctttaaagaacaactgcagcagcatgtccgtgttcatgccatggaggcagtgatggcttgttgggatctggagcaatctctgcaaagcttgacaggtgtatctcctggtgaaggaacgggtgcaacaatgtcagacgatgaagatgaccaggcagagagcaatgccaacttatacgaaggaagccttgatggcggtgaaactcttggatttggtcctcttgtccccactgaaagtgaaagatctttgatggaaagagtcaggcatgagttgaagcatgaactaaaacagggttacaaggagaagattgtggacataagagaagaaattctacgaaagagacgagcggggaagcttccaggggacaccacatcccttttgaaagcttggtggcaatcacattctaaatggccttaccccactgaggaagacaaggctagattggtgcaggaaacagggttgcaattaaagcagataaataattggttcataaatcaaaggaaaaggaactggcatacaaataacccctcatcctctagcaactccaaaagcaagcgcaagagtagtgcaggagaagccagtaaccagagcttcatgtgaacggtcgcatattttgaacaaaaattattggtattgttctcccttttaatgcatgctcgtgggattcatagatcttacggtccagcgtgaacgtgatggattctggatgaaaaagggaaattcatgatatataaaaccactgtattggttgaattacagaaaattatccctggtattgttgtatatgaggctgctgcatgccgcttgatatctgatattgatgcagtcgcattctattcgatttaatgggtagcatgctgatattattctgcttatttaaaaatattatggatccaattagtataactcagtggataatgcatctaacttgttggatgctgatacgtacatataaatttttctacttatttttttaaaaaatccaattagtgtagttcaattttttttattaacaaatttaattgttagtttgttaatttttgttagtaggtaattgaatccaatcctttttttaaaccaccatatggtattactattacagttcacaggttttcgataaaaaagaaaaaaacaacatagaatccttgaatgcggtgcaaattaacgatcagttttatttgttacacacataagtgtcctacatctgata

SEQ ID NO: 93923 - DNA, 1400 bp, Glycine max
  Clone ID: PAT_MRT3847_55825C.1
ctcaccacaaatccctccacgttatcaccaatcccaccgttggatctcgatccatccatcctttgtcaacctttccaaaaagtctttccttacaaagtgcttttccaaacttcttcttccttcctccttctctctctcaccctttctcccccactccctagtcagctagctcctgcaacaacaaccactcctcttctttttctcacccaaatccacgcttcccttacaccgcgtttggatctccgttatacaaactcattaaaatgttgcgagagaaaaacaaaacagaaaaaaaattcagttaattattaaattttgttatggctttccacgaccatctccagcacgagatagcgttccagcgtttcacggaggagcaagagttgaacgagaatagagacatgcaacagaggctcccacctccgacatggctcaacaacgttaacgtcaacgcgcgtcaacagaatttcctcgacagcgagaagagcgtggatcggaaccgaagcgagagcaattgcgaatccgaggatttgagggaatacaaagcggacattctaggacaccctctctacgatcaactgctatcggcgcacgtgtcgtgcctcagaatcgctacgcccgtggaccagcttcctaggatcgacgcccagcttcagcagtcgcagcgcgtggttgaaaagtactctgcacttgcacacaacggggtcgtcgatgagaaggagcttgatcagttcatgacccattatgttctgttgctctgtgcctttaaagaacaactgcagcagcatgtccgtgttcatgccatggaggcagtgatggcttgttgggatctggagcagtctctgcaaagcttgacaggtaaatttccagcgttatagaagtcttttttccctccctagataccgtgtcttttgtactcattatttggtctgcaaacaaaacaaggagagagaaaaataattgatggaaaagaaaaaggaaataaaaaagaatgaaatggagaccacacactccaccgttcctcatctagtggctccaaaagcaaacgcaagagtagtggtgcaggtgaaacaagtaaccagagcttcatgtgaatgaacacctgatttgaactgaaaaaaaaaatagatatatctctattcttcattttatgcaacaatggtgagattcatatatgaccggagcttagagggaaaaacatgaacggaaatggtggaatatggatgatgaaggagtaatttgtgataccaacatttacttggggggattaattaattacttggttcaattacagaaaaacctagtattgttgtatatgaggctgctgagttgatacctgatactgttgcaggcactatctatttggttcaatgggtatctatgtattactattacagttc

SEQ ID NO: 93924 - DNA, 1551 bp, Glycine max
  Clone ID: PAT_MRT3847_55826C.1
atggctggaatttgctgtggtgttgttggagaaggtgacactccggctccactcgagcccactcctcgcccctccaggcgccggagtttggacatcttacctttaaaatatatcgccgacatgcccatgccgccgccggaggctttacggaagcgtcccaagctcaacctcagggactgcgataacgcaattgaaaattgcgacgaatccactggacacaaggtgacgaagaaggaatccaaagtagactacgacgacgacgtcgtttcggaaactaagaacgtaactgtttcggaagttgaagaagaatctcccaagttcggcgtgacgtccgtttgcggcaggagaagagacatggaagattccgtctcggtgcggccttgcttcacccaaggcttccactacttcggcgtcttcgacggtcacggttgctctcatgttgcgactatgtgtaaggagcggctacacgagatcgtgaatgaagaaattgaaagcgcgcgcgagaatttggagtggaaactgacgatggagaacggattcgctcgcatggacgacgaggttcatcgccggagccagagcaaccagaccttcacctgcaggtgtgagctccagactcctcactgcgacgccgtcggatccaccgccgtcgtcgccgtcgtcacgccggacaaaatcgtcgtctctaactgcggcgactcccgcgccgtcctctgccgcaacggcgtcgccatccctctctcctccgatcacaagccggatcgacccgacgaattactccgagtccaatccaagggagggcgcgtgatttactgggacggtccgagagtgcttggtgtgttagcaatgtctcgagccataggtgacaattatctgaagccgtacgtgatttcagaaccggaggtgatggtgacggagcggacggaggaggacgagtgtttgatactggcgagtgatgggttgtgggatgtggtatcgaatgagaccgcatgtggggtggtgaggatgtgcctcaaggcgcagaagccgccggggtctccggggagtgacgtggcggctgacggttccgaccgtgcttgctccgatgcgtcgattctgttgaccaagttggcgctggcaaggcatagttcggataatgacttcgttaaggacgggaagaccaaatcagagggaggaggggcgtgtggcttttgcttaatcaaatggaaaatttgtgtcgacaaaggtatcaatcggccggtcgacaccccttttctttttgtccataatcgaatctataaattggattttcctttggttcgtgtctctaccaatttctattttaagtttattcttggaaatattggatcaaagttcatcattcaatttgcaagggcttttgtccaactctcccaagattattccagttcgataaatttttatattttttgttctgtagttttgcttgcagtacaacattggatatggacaacattagtcatctgcagttttaccagacgagcaatggaaagctttgctattgttacaaaatttcaaaaccaaccattgcattaa

SEQ ID NO: 93925 - DNA, 434 bp, Glycine max
  Clone ID: PAT_MRT3847_55827C.1
ttttttttttttttttttttttttttttttttttttttttttttttttttttttttttttttttttttttttttttttttttttttttttcccaaacaaaaacgggcaacttattcttcttcagctttcccaaacccaatggtaacaggggcgggggaacaaccgcccccgtgccctttgaatgggaaccgggaaaattggaaaaacagagcgatttaaataaccttattttggggaacccaaggcaaagaccgggcccctaagaacaacaaaggcaaggcccaacaaacccccaaccccaaaaaggaatggcccacccttctcttcgggcctttcctggggtggaaagaaaaacccacgttggggggcttaaacggggggccccccaggacccgaaagcccatctatggcaccccctacccgttaagcagggc

SEQ ID NO: 93926 - DNA, 334 bp, Glycine max
  unsure (1)..(334): unsure at all n locations
  Clone ID: PAT_MRT3847_55828C.1
gggaaccatggggagcacctccttcatgaggaggcaacctatgaccaccacaagcctaaagacattacccaacgttggtgaanctctttttggtctgaaaagtgaacaaggtggncgaggcacttgcatggcctccnacaatgtttttttttttaccccanaangagaaangcaaanngaaagcttatatgatcgcttcaacgctgaagagggagaggaanaaggcattgaaattacctactccncaaaggccagaaattgggataactgcgttgggaaaactggggaagggaacgggggacaatcacacgggaagtaccttgaagatgagcaa

SEQ ID NO: 93927 - DNA, 1631 bp, Glycine max
  Clone ID: PAT_MRT3847_55829C.1
gctcctttccctctctaataagggttcctctttccttctctagcacaatttacaatctcaatggctggaatttgctgtggtgttgttggagaaggtgacactccggctccactcgagcccactcctcgcccctccaggcgccggagtttggacatcttacctttaaaatatatcgccgacatgcccatgccgccgccggaggctttacggaagcgtcccaagctcaacctcagggactgcgataacgcaattgaaaattgcgacgaatccactggacacaaggtgacgaagaaggaatccaaagtagactacgacgacgacgtcgtttcggaaactaagaacgtaactgtttcggaagttgaagaagaatctcccaagttcggcgtgacgtccgtttgcggcaggagaagagacatggaagattccgtctcggtgcggccttgcttcacccaaggcttccactacttcggcgtcttcgacggtcacggttgctctcatgttgcgactatgtgtaaggagcggctacacgagatcgtgaatgaagaaattgaaagcgcgcgcgagaatttggagtggaaactgacgatggagaacggattcgctcgcatggacgacgaggttcatcgccggagccagagcaaccagaccttcacctgcaggtgtgagctccagactcctcactgcgacgccgtcggatccaccgccgtcgtcgccgtcgtcacgccggacaaaatcgtcgtctctaactgcggcgactcccgcgccgtcctctgccgcaacggcgtcgccatccctctctcctccgatcacaagccggatcgacccgacgaattactccgagtccaatccaagggagggcgcgtgatttactgggacggtccgagagtgcttggtgtgttagcaatgtctcgagccataggtgacaattatctgaagccgtacgtgatttcagaaccggaggtgatggtgacggagcggacggaggaggacgagtgtttgatactggcgagtgatgggttgtgggatgtggtatcgaatgagaccgcatgtggggtggtgaggatgtgcctcaaggcgcagaagccgccggggtctccggggagtgacgtggcggctgacggttccgaccgtgcttgctccgatgcgtcgattctgttgaccaagttggcgctggcaaggcatagttcggataatgtgagcgtggtggtggttgatttgaggagggatcaacgacaatcatcaaactacaacgacgttaattaattgattgattaacggagacgagaaaccaaaccaaactaaggaatcacaaatgaatgagatcgcccttttaaccataatgggcacaccctttgttttcaggacttcgttaaggacgggaagaccaaatcagagggaggaggggcgtgtggcttttgcttaatcaaatgttgattgtaatgtaatgggattttaggtttaaaaaaaaaaaaaaagaaagaggaaggacattgttaactttggaaaatgaaaaaaaaaatataggaaaattttactgtagggaaaatttgtgtcgacaaaggtatcaatcggccggtcgacaccccttttctttttgtccataatcgaatctataaattggattttccttt

SEQ ID NO: 93928 - DNA, 954 bp, Glycine max
  Clone ID: PAT_MRT3847_5582C.1
ccacgcgtccggtgtaatataaacaggctttgactgtagagagagagagagagagagagagagatgagatttgtaggttacatagcgcaatggagaagcgcagcgaaggaggcgttggatcgcacagccatcactgtgaaattcctgtgctggcttcacttcaccggcaactacctctgttccccatgtcacacctatggggttagcatgctccccaccctcaacgtcgccggcgacgttcttctcgccgaccacctctcgccgcggctcgggaacatcggccacggagacttggtgcttgttcggtcccctctgaaccctaagataaggctgacgaagcgcgtcgtcgctgtggaaggggacaccgtcacctacttcgaccctttgcactctgaggctgctcaagttgcagtggtgccaaagggacatgtttggattcaaggggataacatttatgcttcccgtgattcacggcattttggtcctgttccatatggtcttatagaaggaaaagtgtttttccgggtatggccacctgatagctttggaccactactcgagccgcgaaattttaaaggagtgcttatggttagtcatcttgcgaaatgcacctaattatacatgcatggagcatcaatgattttcatgaaggtgctatttgcaagagaaacatctgacgtgcatgctcccttttggcaagataagacacatgttttggggtctgtttgagtactgtgtagtatcaattactggtgaaagaatagaatgcaagcttaacatggagaagaattggttaggaatcatgtattttattcacaattttctttttaaattatatgctgggttgggtttccttgtttttccttacccaatgtcaatttataccgcattatgattattttatttgttatgttgaacgttgctttttatgtcttcaaaaaattgtggtgcccc

SEQ ID NO: 93929 - DNA, 1662 bp, Glycine max
  Clone ID: PAT_MRT3847_55830C.1
ggctcgagctccctctcccactttctattaacacccctctttccttctctacctctatttaactaattctacaatctgttattacttttgcttgcatctctctgtgttcaatcttcaaagacttgaattcttcttacttaggttctgaatggctggaatttgctgtggtgttgtcggagaaggtgacactccggctccactcgagccaactactcgcccctccaggcgccggagtttggacatcttacccttaaaatacatcgctgacatggcggtgccgccgtcggatggttcacggaaacgtcccaagctggatctcagggaccgcgataacgtagttcaaaattgcgacgaatccactggacacaaggtggtgaaaaaagaagccaaagtggaaatccacgacaatatttccgaaacgaaaaacgtaactgttgcggatgcttcggaagttgaagattctcctaagttcggcgtgacgtcagtttgcggcaggagaagagacatggaagattccgtttcggtgcggccttccttcacccaaggcttccactactttggcgttttcgacggtcacggttgctctcatgtcgcgactatgtgcaaggagcggttacacgagatcgtgaatgaagagattgacagcgcgcgcgagaatttggagtggaagctgacgatggagaacggattcgctcgcatggacgacgaggttaatcgcaggagccagagcaaccagaccttcacctgcaggtgcgagctccagactcctcactgcgacgccgtcggatccaccgccgtcgtcgccatcgtcacgccggacaaaatcgtcgtctctaactgcggcgactcccgcgccgtcctctgccgcaacggcgtcgccatccctctctcctccgatcacaagccggatcgacccgacgaattactccgagtccaatccaagggagggcgcgtgatttactgggacggtccgagagtgcttggtgtgttagcaatgtctcgagccataggtgacaattatctgaagccgtacgtgatttcagaaccggaggtgacggtgacggagcggacggaggaggacgagtgtttgatactggcgagtgatgggttgtgggatgtggtgtcgaatgaaaccgcatgtggtgtggtgaggatgtgcctcaaggcgcagaagccgccgtcgccgccgggatctccggggagtgacgtggcggcggacggttccgaccgggcttgctccgatgcgtcgattttgttaaccaagttagcgttggcgaggcatagttcggataatgtgagcgtggtggtggttgatttgaggagagatcaacgacaatcatcaaactccaattaattaacgttggcgagaaacaaaaccaaaaccctttgttttcaggacttcgttaagaacgggaagaccaaatcagagggaggaggggcttgtggcttttgctttatcaaatgttgattgtaatgtaatgggattttaggttaaaaaaaacaaaggagcaaggaaattgtaactttggaaaatgaaaaaaaaaaaaaacataggaaaattttactatggggaaaatttgtgtcgacaaaggaatcaatcggccggtcgacgccccttttctctttgtccataatcgaatctataaattggattttgctttg

SEQ ID NO: 93930 - DNA, 135 bp, Glycine max
  Clone ID: PAT_MRT3847_55831C.1
ctgtaaacaagaaatcctgttgattctgaaaccccataaccgcattggtttcagcttaaaacgtaagacgaaataaagtcctacaaactgtttcaaaacatcaaaaaggagagacctgtggccctaacaactggg

SEQ ID NO: 93931 - DNA, 792 bp, Glycine max
  unsure (1)..(792): unsure at all n locations
  Clone ID: PAT_MRT3847_55832C.1
ttgcatgcctgcagctgtgattttcagttctgcaccccaccagataggaatagtgcctcttcgccatacattatctgttcaaaggtacactttgaccagctcgtttgggaatcatacaagttgctcacactccacttcatttcctgtaaaatggaacctaataaacatttggcatgtactaaggcacatgaaatgatggttatcaagtcaaaacagaatatagaatgcataaatgaaagaagcagcaagcaaaagttacactacaaaaggaattagggtaaaataagtgatttgggaacctttccaaatttgggaaattgaataaagaagatcttaatgcatgccaacagaaagcaaaagaaggttctattgaataaacaaaaattagtagagatactgaaaccataatgaacatgatgctagctattttataagtcaatcactcaattcattataagatggaaagtcaatgatagttttcttcacctgtactgaaacatgaatttagcccccttgctaaatatcgagtacccgggtgtagtctgctccgacgagctgtgagagcaacaacaccttctagttgacccgagcttccaaaacttcgacattctgcaaacccctacacatcaagaccaagtgagacaacagaatgcacatgtgaattttccgtcttaattgctctatacactgtactatctntggtacagcactgctataaaaaaaatagttgagccagagcctgtgcaagcttggaggaagataaagaaactaatagctaacaagaaactaaca

SEQ ID NO: 93932 - DNA, 392 bp, Glycine max
  Clone ID: PAT_MRT3847_55833C.1
ggggggcaaaaaaccccccaaaataagaggaaaaccccaaaagaaaacgtctcacccccggaaggaaaaccgagggggggccacaaaaggggggggccaccttggggagtgaaaacgcagcccgaattccgaaataacggacccgcgcaggggggcccaaaaattttcaaaaggggcaccaaaaaaaaaaggagggggccagggtaaacaaagtctggacggggaaaaccctgggggaacccaaataaaaagccagggggaaaaaaccccttatgcccaccgggggaaaaaccaaaagggcccaaaccaggggactttccaaaaaggggcccccccataagggaaataggcccacccccggagggggccaaaaacccccggggggggggggg

SEQ ID NO: 93933 - DNA, 495 bp, Glycine max
  Clone ID: PAT_MRT3847_55834C.1
ctatctcgatcgaactgtccatggtcctgtcaccctagcacaaaagcaagcagtgttagtagtaggcttggttttagcgcagctgcttattttgtgtgtgacccaggggtaaggttaagggtaagttaattcaatataaactgcttattgggtttaggtaggtctataaggtttggtctttggggctggggtacctaaacccagtgttcccatggtcttgtgtgggcattcggttccgtgtcttgttttacgtggtggcacacacacacacagctccacagacaaaatcgtggggtgacgcacccaaacgtattagcccaagcgaaccccccgtggtggtttgcaacttacgcgacgaccaccgtcattcactaagcggccaaatcgacaaccaggggcaggttactgcaacaggtaccctaaggttgtagtggctaagccgcccccaagcgatacacagctaaactggggtggggaccatgttttacacaagga

SEQ ID NO: 93934 - DNA, 451 bp, Glycine max
  Clone ID: PAT_MRT3847_55835C.1
tgggacaagctcttccatgactgctatagccttcctgtttatccttctaagcacttatacctgcactgcctatgctcaatccggggtatgttctggaagacttggctacttcttaccaacccctcaagaagttgtggccctctacaatcattccaaccttctcacgatgccaatctacggtccaggccctcaactcctcgaaccactaacaggttccgccattgagcttttgctggacattcctactgacaacctcagaaacctaccatctagccctgacaatgcacactcctgggtgcaagaccacatccctagctatgccaacaatgtctgattccgatacgtttcagtgcgacatgaagtgatacccgaacactcatttgctcaaattctagtgactgcgttgtgaatcgttcagaggggcctctcttatgctggccttggaaccgag

SEQ ID NO: 93935 - DNA, 449 bp, Glycine max
  Clone ID: PAT_MRT3847_55836C.1
gttgattttcttagagacccttgtatagaaattctccaatatgaaaagtatgaggagaaagtattgtcttctgagaaccagaacaattcagttcacacaaatcaggatccatgtggagcactattaaaatggatacttccattagataacactcttccccctgctacccgcccgttatctcctcctcaattttctttgaattcagccattttagaagttactccatgtctgcattaccccaaaatacaaattcaccaagtcctcctttaaaagccgctagttctaagccaagctttgatattgaagattgggatcaattcccatctcagaaattaagaaaaaaaaatggagttgaagaacttttatcttttcgaggtgtttcattggagccagaaaggttttccgtttgctgtggattagaaggtatctacacacctggaagaaggtgg

SEQ ID NO: 93936 - DNA, 434 bp, Glycine max
  Clone ID: PAT_MRT3847_55837C.1
cccacgcgtccgcttttttccatttaccctctcctttttttcttttcacaagcacaccacaggggccggcaatatatccactggcacatttctctacattccacctgacattcctcaaacacactcatttgcctgaatttctactccgacatctgctataatttccagctttgagagaaagaatgactattttaacttgcattcacgcttaattcatcttaacatttgctgtgctgacggtaaaccactatacacacgagaaggtgtgcaaaatagtaaacaagcatctgactatgcctgaaactgatgtggtgactctggactcaaaattatcaactcttggtgctgattccctttacacggactagatcaagatggcactagaagcaacatttgctattgccattgaagaggacagtgcacacatcatctat

SEQ ID NO: 93937 - DNA, 454 bp, Glycine max
  unsure (1)..(454): unsure at all n locations
  Clone ID: PAT_MRT3847_55838C.1
caagggaggacgacggncngaaaccaaaaagggacnaacgnncncagcnggcncagacnccaaggcaaacggccgncagagcccggcagggccccgcggggagggcaccaanaaacgcgaagacgtttttttatgtaaggaacgaagcgcatgacagtgtgatggttgcacccgccacaacacttgggggagggaccattgtaaatggaagggaaaacccctatatacaaaaggacaagaaggttgtattgaaagaagcggaacaaaatttggacggagccttgccccagtgggcacagaagacgatggaggggatggcacaaccgggaacgaggtgcacaaatataaggctccgggccttaaagggacaccggaaaccaaggcaatatgggcacaaaactgccaccggaaccagaaaaaaaaggaaatccagagtgaaaccccgacctttaca

SEQ ID NO: 93938 - DNA, 260 bp, Glycine max
  Clone ID: PAT_MRT3847_55839C.1
agggttcaaaatagttgatggagtaataatattaatattttgatccaaaaagaatggagccatgtcacacttgcggtcttctagatatgaataattgttgcttcctttgcaaatcactattaatctattattcgcgttcttttgcttttttatatttggctgcaactgaagcaaatgtggttttgttggaatgatggagatttaatattatggtttagtgaagctttgaatttggcttggggagaggaggggggagaagt

SEQ ID NO: 93939 - DNA, 206 bp, Glycine max
  Clone ID: PAT_MRT3847_5583C.1
aaaaaaaaaaaattattttaaaaaaaaaaaaaaaaaaaaaaaaaaagagagaaaaaaaaaaatatgggcggccgccccctaattttttttcttacccaccaattaattaattcccggcccctgcctgcataccaaccttccttatatatagtgagtcttataactgcctgtatcattgtcatacactgtttccttcctgaataaaa

SEQ ID NO: 93940 - DNA, 454 bp, Glycine max
  Clone ID: PAT_MRT3847_55840C.1
aaaaaaacaaacaaagcctctttgatttgagtgagattatttgatatttattaaaaaccaaaaggggtgggaggtgcgtaattcatccaaatttggggatattttggaattgcgggacaccagattgtaaacccctgttaccctacaggcccttaattcatagttgaacttgcaagatgattgggggaaaccctgtaatactacaaggcggcctgctatactccctcggggatgagaagctgaacggatgaaaaaggaggcataaacctaggggcgctccctgacacatatcaaccaggaatttttcgtccttggacatactgggttctctaaaataatgcaccagttggatttttttttcaactgggcagcacttatagccccgaaaattacagccgtttaactgtcgagcccgccttcgctaaaacctgacagtatcgattatacaccacag

SEQ ID NO: 93941 - DNA, 365 bp, Glycine max
  Clone ID: PAT_MRT3847_55841C.1
gggaacaaaacctccattggtgattttccctattttaaaaccccccccattttttgtaaaaaaaggggggcggggggggaacaacacaattttggaaaaaaaaacaaaaaaaggggtgttttttgggcctaccaatcctatgcccattttttttgactatttttatgtcccccaaaaacatttaaaaaaaaaaatgtgtcccttaaaaacccccaaactttgggggttgtttatgaatccccccctaaagggcatatattggtcccatgggtggtttttattaaacgccccccctatttttgctgtctttccccacccaatttgaatacattttttttttctcaaggaaatgtttttctttcccc

SEQ ID NO: 93942 - DNA, 416 bp, Glycine max
  Clone ID: PAT_MRT3847_55842C.1
ggctcgagtttcttcttaagtgtgctgcgtgcagcccaaagggtggggcacctggattttatgtcgcaattctgggggctgctgggggaattggtcaacccctttctttgctgatgaagatgaacccattggtttcacttctgcatctgtatgatgctgccaacacccctggtgtcactgctgatgttagccacatggacactggtgctgtggttcggggctttctggggcagcaccaacttgcgagtgcactcactggcgtggactatggtgatcatacctgctgtagtaccacggaaacctgtgatgacaagagatgatttatttaaaataaaggctggaattgtgaggaccctctgtgaaggaatagaccagatctgacgcaatgcaatcgtcaacttgattagtcatccagt

SEQ ID NO: 93943 - DNA, 414 bp, Glycine max
  Clone ID: PAT_MRT3847_55843C.1
gggtgtgggggtttttttttttttagcggaagaccaacatcagaccacaatagtttatggattacttctcagccaacaatggccattgaaggccgaaatcagacccccaaaacgcccgatgatgaagtcgggaaacccaaaaacaaatgcgaatgtagttgaagggctgacaaacaaagcggggcggcgcttacaaatgcttggcagtttcttaacccttagaagccagagggcttgagagcgacgagagccaatactctgcacttgcagaacgttctcgagcccaaggatccggatgagaccgttgggggatgcaacctttagcctcttaaagccccttcacacccctcgaaagcttcactgcaaccaaacgttggcagctaccaccgggtccatttgcgtccatcgtaattt

SEQ ID NO: 93944 - DNA, 221 bp, Glycine max
  Clone ID: PAT_MRT3847_55844C.1
agaaagatacaacaatggttcctttgaggaaaccaaacctcctagaaatagcactctcgtttagaaagaaaattagcttgtaggttctcaactaatttggtgtctcctccttaggcaaagccttcatgactaaaattttaaataattatagaaatcaagattttgctgaaaaaaaaaaaaaaaaaaaaaaaaaaaaaaatttttttttaaaaaaaaaaaaa

SEQ ID NO: 93945 - DNA, 148 bp, Glycine max
  unsure (1)..(148): unsure at all n locations
  Clone ID: PAT_MRT3847_55845C.1
ctgnngagtccccacgtttcttaatcagtgggacctctgtggttcgcaaacctgggaaccatacactcaacncnnctatcttcggtctatttctttttggattttattaaggggatttttgcnnncgattttcggcctattntggctt

SEQ ID NO: 93946 - DNA, 501 bp, Glycine max
  Clone ID: PAT_MRT3847_55846C.1
ctaattaactcacttttatatatacaacctcctccttcatcaatgttactgctctattattctacacaaatcctcttttttcattcattcttgctcgtttaccatttataacaaactcgtatgttgtatcctcccatttacaaattttcatgccgcacacagacccgggcgaacaaagatcccttattttgatgcactttcaaggataaaataactcgacaaacaaaagctcattccaaatatctggaaacccagggagacacccatgcacacaatcagaatagctagctgggttagccaattgctttggattcaatgggatccattgctctcttgtaaattgatgagcgcgcatcctttacggcatttgtatatctgcgtaatgttcacaaaagctctaggctctttggattttctaaacactcctccgatcacttgcattatcccttttttaaaatcataaccccaatatgcgggatcatcaatagctgcagcttcatt

SEQ ID NO: 93947 - DNA, 585 bp, Glycine max
  Clone ID: PAT_MRT3847_55847C.1
ttaatcatcaagaatacactcacatacatacatacatagaacacctctattgttataaattcctagctatatattttcttaagcagccacaccatgcaacgtaacatggcaatgagcttcttccagcgcaggttcttcagccagcaaaggcgaacacaaatggtggcaaggcgagtgttggagccgtgtgacgtgttcctgaaccataggagcatggacacaaagaaaacagtagccacgttgctctatgaccatttgaagaggcacggtttcaaccctttcttggacaacaagaacatgaagccaggggacaaactgtttgagaaaatcaatagggctgttatggagtgcaagattggggtggcggttctctcgccacgctacacggagtcctatttttgcctccatgagcttgcacttcttctggggtgcaacaagaaggtcattcccatcttctgtgatgtaaagccttcgcagttgcgcgttgtcaacaaccctaagtggtctgaagatgaacttagacgcttcagacgggctcttgaggaggttaagttcaccgtgggactcacgttcaactcctcaaaa

SEQ ID NO: 93948 - DNA, 392 bp, Glycine max
  Clone ID: PAT_MRT3847_55848C.1
tttttttttttttttttttttttttttttttttttttttttttttttttttttttttggtttttttttttttttgggtgaaaaagggcccaaaaccctaaacctggtattataaggcaagaatcctggcattacatggttaaaactaaagcaaggaacgcgccataaggaacatttccggggggggtgggattttacatcggggccaaactaggggaaaaataaaagccccccagtttccgacagaatagtttattggggccaaagttataccaaatacggggcttttttaacctttaggttttcaaacccctctttgggcattatggcagcaatctccttaacctccagttttgggggcggcctgaaaacttttttttcttccaacctatt

SEQ ID NO: 93949 - DNA, 1923 bp, Glycine max
  unsure (1)..(1923): unsure at all n locations
  Clone ID: PAT_MRT3847_55849C.1
ccacgcgtccgaaagaatgatctcaagcacttctaatgaattgaatcacttctactgacttgaactacttagtcttccgttacctccacgaatcaggttttactcattctgcacttgcattcgggtatgaagcagggattgataaatgcaaaaatgatgatagtgtggttccaccgggtgctcttgtaactttcatacagaaaggaattcaatatcttgagctggaaacaaacttgagtggtagtgtttctgatatggacaagcttttgtcatttctacaaagtgtggatgttatcaaaacaatatagtgaaagccagaaaggaaaatctacgtcagcataaatttgaatcaaataaaataataaatgacttgagtcaggatgacccaaggagggaggaaactgagaaagagaggaaagaaaaggaaaatgaacacacattggaaaaaattaggttagagaaagataaggagccgccaaagcctgagtataaagaaatacagcacaccgatcaaaaccatacagagaaacctgaagataagattactgtcgaaaatctagaaaatagagcacaaggaggggctgagccaatggagatctcccagagccccatgtcgtcgcctgatgatactccatgtggttatgtaaaacttttgaaaggtcatacatcagaggtttttgcttgtgcatggaatccatcagctccacttcttgcatctgggtctggagattcaacagctcgaatttggaaaattgctgatggagcttgtgactctagtgtgcaaaatgaaccagtaaatgttgtggtgctgcagcacttcaaagaaagcaccaatgaaaaaagcaaggatgtgacaacacttgactggaatggggatggaacactattggcaactggttcctatgatggccaagcaagaatatggagtagagatggggagttgaattgtacactaaacaagcacagaggtccaatcttttctctaaagtggaacaagaagggggattatcttcttagtggaagtgtggataagactgctattgtatggaatataaagactggggaatggaaacaactatttgaatttcacactggcccaactcttgatgttgattggcgaaacaatgtttcatttgctacatgctccactgataaaatgatacatgtttgcaaaattggagagaatagaccaatcaaaactttctcagggcatcaggatgaagttaatgccattaaatgggatccatcaggttctttgctggcttcctgctccgacgatcacactgcaaaaatatggagtctaaagcaggacaactttttgcataatttgaaggaacatgtcaagggggatatatacaatccgatggagccctacaggccctggtaccaacagtcccaatcagcagctagtactagcaagtgcctcattcgactcaacaataaagctctgggatgtggaactagggaatgtactgtacagcttaaatggccacagggatcctgtatattccgttgcattcagccctaatggggagtacctggccagtggctccatggatagatacctgcatatatggtccgtgaaggagggcaagattgtaaaaacatacactggaaaaggtgggatatttgaagttaattggaacaaagatggtgataaagttgctgcttgtttttcaaacaatatagtttgtgttttggattttcggatgtaaagtatataggataggattacaaactgctactattcatttcctatgtgctagttgttacggcttttttgtacagggccattagctacatttccctacttccaatttacccggttttacttggtgttcggtttattagacgggtaggtttatttcaaaattattaaaatggtgtaggatttgaattncnatttaaagaattataangggg

SEQ ID NO: 93950 - DNA, 546 bp, Glycine max
  Clone ID: PAT_MRT3847_5584C.1
aatgagtcatcgtctagctatctcgatcgaactgtccaaggtcctgtcacgggggggggaaaatgtgaaaacgggattaactaagggtcaagaaagcggtataatggtatagaaacatgttaaaacgattccaataacctaacggttatcaaaacaatgattagatatacagtatcaccaaaaaaaaaataatatacataaacgaatagaatacgctaaatggtgaagtaagaagtggtgttggtagtattagtggtggtacggcttgtgcaattgatggatgtagaagtgggtgttatcataataccagtggtatcagaagcagccagtagcaggggacagcacaccaaggcaagacatacccggagagccgtaaggacaaaagtccccggggtgcacaccagtgcatccagggcaagaaatacacaactgattggcgcgataaagcgctggtacaacgcggcatctatctaatacataggtagctgctgggcgaagaggggcttaggtgctgcgcagacggcaacggaggcggaaagacgatgt

SEQ ID NO: 93951 - DNA, 796 bp, Glycine max
  unsure (1)..(796): unsure at all n locations
  Clone ID: PAT_MRT3847_55850C.1
tttctattacatgantcattcatatatctggatagagaagtaaggtttgctaaaagatgttatccgattccttagtggtctaactgaaaaggctaacagaagagcaaaaataaacgaagaaatgtaagtggcagacagcatataattctatagccaatgagaagttgccaactcagcactgttgttggaattggttatgcagaatcatttagagatattgtggcttggttatcttcctcttgggcctttggtttgtgcctgcttgctgtgtatctggttgctgctgctacattccgtgaataacatttttgttgaaaaaaagtgaaaattgatatgctagaagaattagatgatgtcctaaatgctgatatcaatggcgtgcatagtcctaaatggtgaagcatttgttttttatgtagaggtatttcgcactgcgccttttcgtgctcgggaaatgcacaatgacatgatcgcttaaaaaaacaaaaaaataatcgatgtcctattcagtactcgatgaaataggataacagctcccttcctatttcgaaacgtcaaacacagttaagccctggcatcaataagatatggggcaggaaggggccaatcgtgtgaaaataacttatgcgagaatgaaaaattaaatcttagccattctaataattaataagaaagtcattctccttagatatatcgggcaagatatcaactaacaaactgataccacaagaacaagccttttacatttagcaacaaaaattatctgaatacaaagtacatggttaattggatcact

SEQ ID NO: 93952 - DNA, 637 bp, Glycine max
  Clone ID: PAT_MRT3847_55851C.1
ccggggtcacccacgcgtccggaaagaagacgacagaaggggaacgaacaaaacaaaaaaccttcacctactactttataaaaaccgtcccttctcttctcctttcccaaatcaattattcatcactgtgttgtgttgtgttgtgttgtgttgttccttcgttcgttccctccactaagcaaaacccaaaagacattcattttcgtttcgtttgtatagagcatggccggtggttctatcaagagacattgtttctccgaagaggacgatgtggagcctgggtattctgggcacaaccacttccatcattaccaacacggttttatttctaggacattgggttatggcactttctacaaccgacgtgtgaggagccattcgattttctcgccgagatctgggagattttatgatgccagattcgaagaccaccaaccccactttcttcaagcttgttctctttgcaagaaacctctcggggataatagagacatcttcatgtacagaggggacacgcctttttgtagcgaagagtggagacaagagcaaatagagagagacgaagcaaaggagaagaacaagaacctttcatccctcgatgaaggcttttgagaaaaaaggggggaagaaattctgt

SEQ ID NO: 93953 - DNA, 154 bp, Glycine max
  Clone ID: PAT_MRT3847_55852C.1
gagtaaaagctataccatgcaacacggcaatatgttgacatatgcttcggacaagcataactacgatgaacagagaaagatgctaaacgacattaaggatagcattgataaactgatagaaaaggataccaaaaaggcatctttgccaatgaaa

SEQ ID NO: 93954 - DNA, 107 bp, Glycine max
  Clone ID: PAT_MRT3847_55853C.1
acggctgcgaggagacgacagaagttggcagccaagacagcaacaaacgccagagattcttcctcaacacaatcgaatacgaaaaagcttccgattctaaacccaga

SEQ ID NO: 93955 - DNA, 350 bp, Glycine max
  Clone ID: PAT_MRT3847_55854C.1
aaaaaaaaaagaaacttgcttttcttggaagctggtgctggtccccccacagacaacgatgacatgatcgtcgggggctacacctgtgaggagaattccgtcccctaccatgtgtccctgaatgcaggctatcacttctgcgggggctccctcatcagtgaccagtgggtggtgtccgcgggtcactgctacaagtcccgcatccaagtgagactcggagagtacaacatcgatgtcctggaggggaatgagcagttcatcaactccgccaaggtcatccgccatcccaactattacagctggatcctggacaatgacatcatgctcattaagctctcctcacctgcggt

SEQ ID NO: 93956 - DNA, 261 bp, Glycine max
  Clone ID: PAT_MRT3847_55855C.1
ctgcttgttatcttttacttgaaaccctgttcgtagtggggggaaatgctttcttctccgagcacacccactagattcctttgattctttctttgcttagaattccacagtatatggggactgttcttttcaattactccccacctttgggattcaagggtttgatcatggtggcagaagactcattgcttgggcacgcggacatatggaggtacatgtcatgctttacggactccggggaccttaaagctgttatagagc

SEQ ID NO: 93957 - DNA, 1546 bp, Glycine max
  Clone ID: PAT_MRT3847_55856C.1
cagaaattttttgagagaaaacccatttcaaatgtctaataaaataaaattgtttccaaggctaataaaccaaatgttctaccacaaactcagtcttaaacaaaatataatcataagtctgaaaatactaaatgaaactactaaaaagtctaccaaaacaaatccttgaatccctccatatcatctcaaatcaacaatcccgcaaaaaagagaaaatgtgatcttgaaaatcaaaattcagaagaccccagaaaatactagctcgttaagccccaaaaaagcagctcacacatgacacgatggagcatatctcttcctctaccagagactgtttcattcattcaacgacatcgagccaagctgatcaacttcagaaccagatgcaacctcatgcaggacctgcattgcctccgacacctttgtcttcaggtcctcaggagattcaatgagattgattacttctgactggtccatttccagcaacatccctgtcacctttgctgtatattggtttggtgcgagtcgttccacaaggggatatagatgttcacccaacatcatgcgctgattttctggggtagcagaggcaagagctgaggcaagtgtggtagacaatgctccaggacgctgattatcattaggggctgcagtgactccagaaccatcaaagggcataggcatcatgggacccataagaccgtgaggaactaaagatggatccatgccatttcgaccattgggcatgtatctaaatccttggttggagttacgatgtagcatctggttctgttgcacctgttggaagtttccatttctacgaacacccgtcctctgcccaagctgaccctgtctctgaaggtggtaaggcataatgaaattgggggcgacaccaggccgcattccaggcaagatttgctgctggaaagaaaatccagcaggctgtggtggcataaagccaggtgtgccttgaccataatacaactgttggggggcaagtctcggtgcccctggatgatataaaggaataccagcaggcagaggtgccattccaccaggtgctcgaatttgagcaaattgagcctgtagatgagccttcctctcttctttgcgctgggccacagcaacatatagaggctttcgtccaatcaacttgccattcatttcattcaaagctttacttgcttcctcaggagtagaaaaggaaacaaaaccagaccccttactccgtccatttgaatcaatcatcaccttgcaagatgttatagttccaaactcagaaaatagatccttcaacttctcatcactgaaactgtcatcaagatttttcccgcaaaaccgaatccccggtaatttttgtaatctactgattctttcctgcccaattttggctttcaactgggcctctctttcggctttcctctgagctctccccacatataaaaccctgtcattgttaatagtagttccatttaacctctcaactgcagcagctgctgaatccggattctggaaattcacaaaaccaaaacatctagacttcccattc

SEQ ID NO: 93958 - DNA, 432 bp, Glycine max
  unsure (1)..(432): unsure at all n locations
  Clone ID: PAT_MRT3847_55857C.1
gcttgaccaaattgatattcaggatcattgatattctagagagagccagagctatacatatagagaaagaggatgtttggcacacggattgctccttagtaagatgcgaaacctacctccggggaccttgcacgctccctcgttggtcttgagcataatacaaatgataactcgtctaatgattttcacacgattttganaagcaccaccccatcaggtgatgatacatgccattgccgctgccatctctctatccttttcttatggcctaccatccaccgcttggatttggctaccaatcgattatcccaagtcaagggggatgcctagaattctgcgcagagatcgttaacttgctgtgactaggctggctagactacttcaacctcgaccttttgaagcacattagctggcgaaaagagagaggatcct

SEQ ID NO: 93959 - DNA, 603 bp, Glycine max
  unsure (1)..(603): unsure at all n locations
  Clone ID: PAT_MRT3847_55858C.1
ccacgcgtccgcttctttctctttctctctgatgggttttggaagcatgtacgaggaacatcttatactcaaaggttcacactcacacccctagcacccatagcttatgggcatgccaaagttaagctctttctcccaacaagtgcttcaacactacaacgtgtgtgtccactgaaaaaaaaaaagaaacagaagaaaaatgcgagacctgaagctagttgaacgcttcaagagcacccaagttcatgccctcaactcagaagcaactagcagaagaaacaaggccacagtgggagccagagccagagccatcacaatcagatcattggtgtcaaagtccaaatccaacaccacaacaacgtcaacaacaacaacaacctcagcagttgcaaacctcgttgttccccttcagctcccttctgctgacactctcgaaccttccatagagcctcaccttaaacccatcaacctcgtggaggccttgtctgaactttaccaaaggctagagtgttggtgccttcagtctgagaaaaaaacatcactttgggtgggagcagntcaccgcttctgcgcagcctcggaaatcagaagcttctgaaaagg

SEQ ID NO: 93960 - DNA, 481 bp, Glycine max
  unsure (1)..(481): unsure at all n locations
  Clone ID: PAT_MRT3847_55859C.1
nncgtccgaaaaaaaaaaaaaaaaaaaaaaaaaaaaaaaaaaaaaaaaaaaaaaaaaaaaaaaaaaaaaaaaaaaaaaaaaaaaaaaaaaaaaaaaaaaaaaaaaacaaaaaaaaaaaaaaaaaaataaaaaaaaaaaaaaggggggggcgccttttaagggtcccaaattttccccccccgtggattccccaacttttcttttttttttggccccccaaattaaaacccctggcccggttttcaaaatcccgtttggggaaaaacccttggttttccccatttttttcgtttggaaaaatcccccttttgcccgggttggttaatgaaaaaaagccccccccgtttcgccttttccaccctttggcacccctttatttgaaagggcccccccccttacgccggcatttaacgccgggggttggtggggttcccccccgggttccccttttctttggcaggccctttgcccccgttttttt

SEQ ID NO: 93961 - DNA, 300 bp, Glycine max
  Clone ID: PAT_MRT3847_5585C.1
ccggctacggccaaaccggctacggtcaaactggtagcgaataccaacaaactggacttgctggagctggattagctggaactactactggctacaatgaaaccagcacccttaacaagggctttgtcgaaggacaatccaccacccaaactggtgttattagagaagaagttattgttgaacaacccgtcattgttgaacaagaagttatcagagaaactgcccccgttgaaaacagacacctcttcactgaacaacaacaattcattgaacctagaactttctttgaaagaagtcgat

SEQ ID NO: 93962 - DNA, 373 bp, Glycine max
  Clone ID: PAT_MRT3847_55860C.1
ggctcgagcgatattgctgtaactaaccctattcatcaactgagtcagagaatgaatctgtggacggacgagaactcgttggttattgatgtgtctgtgccctcctgcgacctatacttcatctggcccaatgacgctgctccgaaggcgcagaagaacttgatcagctatggtggcgccgttggttatcgcctgattgccaacattgaggccgccttatagacctgcacctaccccatattgtggcagttctgttacaactattgcagctccactctccttgggtggggcgaccgttactacaaaggcgacgacgacaaagccaaggcagaggccaaggccgaattcacctacgccgtcgaacaggaccacc

SEQ ID NO: 93963 - DNA, 1000 bp, Glycine max
  Clone ID: PAT_MRT3847_55861C.1
tctggagcttacaaagatgcgcaaggaaagtgttgaaaaggcttccataatttgctccctgaatgaacttgattcattaggcggttgtgaagggaataccccagagcaaatcagtgcacaattagaaagactaaatcagacaattaggcgtgagagccaaaggtactctgaatcaatcgatgatctcaggatgctgtataagaaaaaagagcgtaagattataaaaaggcagcaagtttacaaaactcttcgacagaaattggatgcttgccagagagccttagagttacgaaagagaaagtttcagagaaatgcaacttatctgaagcaccagctttcttggaaatttaatggccatttgagaaagaaggggattagtggacttatcaaagttaactatgaagataaaaccttaatgattgaggtacaaatgccacaagatgcatcaaacagagctgttcgagacactagggggctttcaggtggcgagcgctctttttcaacattgtgctttgcattggcgcttcatgaaatgacagaggccccttttagagcaatggatgaatttgatgtcttcatggatgcagtaagccgaaaaatcagcttggaccccctagttgattttgctgaggcacatggatcacagtggatattcattactccgcatgatactagctcggtgagggcaggggacaggataaagaagatgcaaatggccgctccacgtttttgatcgtttgtaatttgcttaatttatggcatcgggaaaccctatgaaaatgtattttttgattttgcgtttaatcatgtccattcatttgatgattatttacttcaactttttattttttgttgtggcgtttgtgaggggcatgcttaaggcagatttatacattttatttatgtaatgtaaatatgtataggttaatcgttcaaagtatattccaggtaagtgcttcgctttgattggtgaaaaaagaaaaacataaatttgcctttc

SEQ ID NO: 93964 - DNA, 166 bp, Glycine max
  unsure (1)..(166): unsure at all n locations
  Clone ID: PAT_MRT3847_55862C.1
gccacgcgtccgnccgagacgacgagcggaggggcagggtatgatttgcgccaatccattgagatgtggtatgctgcaagtggttatttgtctgcagaggggtgtcctgtttttaggatgaccgagcgcttgttttccgtgcattttgtgtgcttttgggggctgt

SEQ ID NO: 93965 - DNA, 314 bp, Glycine max
  Clone ID: PAT_MRT3847_55863C.1
ctctctattaccaacacaatagggcctcgtgtaatttctgactaaaaaaaaccccaatatacttttcccaaaaggatgggcgatcattgtacaataggctattcaataggcgctgactaggaaacgttccttttgtacttgcataaacaaatcattataaagaggcttcctgcccttgcaatttagtaaaagttcttagtgattccctctctgatttcactgtcattttattacatcaaacctttttatcccaccaacacaaccttctaactcaatttcacttgcactgtcgtgatctttccactattacttga

SEQ ID NO: 93966 - DNA, 634 bp, Glycine max
  Clone ID: PAT_MRT3847_55864C.1
cttgtttttttttttttttttttttttttttttttttgggttttttttttttttttttttttttttttttttttttttttttttttttttttttttttttttttttttttttttttttgggggaaaaaaggaaacttttttttaaaaccaataaaaggggttgcggggaaaaaaattagataactaaaatttggcactgaaattttcaaaaaaatagcaaaaaaaaaatttccccaagaaatcacaaacttttttaaaatttttactaaaggggaaagaaaacccaaatttgggtgtaagcaaaaaaaagtttgtaacaaaggccaaaatcaaattaaattgggaaaaaaggggggggggagtaaatttttccaccaaaaaatccacccttggggtgggaaaaaaaataaaaacctgggaggtgggggaaattttttttactggcaacccccttggggttgcggaaaaagggacccggaagggcatccccaaatgaccctttaaaaaaaaaaacccaaattttttcaaaaacttgggtcaccctggtaaagcattcaaaaatttttgggggggggaaggggttataaaacatgccaaggggctcataccacaatgacctggggaaaccgggaat

SEQ ID NO: 93967 - DNA, 279 bp, Glycine max
  Clone ID: PAT_MRT3847_55865C.1
caacaatggtaatttgagtctgctaaggtgagtatctgatttgctatcaacatcagttgattgtatttcaaattttgcaataactcattaagccacttggaccttggccactggccttgttgaaaacaccaactttactatcatatcaatgtaatctgttttcttatagttaaaaaaaaaaaaaaaaaaaaaaaaaaaaaaagttattaaaaaaaaaaaaaaaaaaaaaaaaaaaaaaaaaaaaaaaaaaaaaaaaaaaaaaaaaaaaaaaaaaaaaaa

SEQ ID NO: 93968 - DNA, 125 bp, Glycine max
  Clone ID: PAT_MRT3847_55866C.1
aattgaagtggtgagataaagtcatggtcggacatcctctctagagacatacttctgttgatcaagtgcaattgtatatgcaattgtatatgtaccttgtagtcttggttacctccaccgcatag

SEQ ID NO: 93969 - DNA, 1134 bp, Glycine max
  unsure (1)..(1134): unsure at all n locations
  Clone ID: PAT_MRT3847_55867C.1
gggggagtaggccagatgtacantattgagaaaagtcatgaggatgatattagtggtctgaaattttcaagtgatgggagaatcttattgtcaaggagttttgatggttcattgaaggtttgggatctgcgcaaaacaaaagaaccgttaaaagtatttgaggatctgccaaatcactatgcacaaacaaatattgccttcagtcctgatgagcgactctttttgactggaacatctgtggaaagggagagcatgacaggaggtttattgtgcttctttgatagagtaaatcttgagcttgtttcaaaagttggcatatcacccacttgtagtgttgttcagtgttcttggcatcccaaactgaatcagatctttgcaactactggtgataaaagccaaggtgggactcacatactatatgatccaaccgtaagtgaaagaggagctcttgtatgtgttgcacgtgcaccaaggaaaaaatcaattgatgactttgaggcaaaacctgtcattcacaatcctcatgctttaccactatttagagatcagcctagccgtaagcgtcagcgagagaaagtactaaaggatccattgaagtcccataagcctgaactacctatgacaggtcctggctttggtggacgagttggtactagtcaaggaagcttactgacccagtatcttctaaagaaaggtggtatgatcaaggagacatggatggaggaagatccaagggaagctatcctgaaatatgctgatgctgcagcaaaggatccaaagttcattgctccagcatatgcagaaacccaacctgagccagtttttgcaaagtcagattctgaggatgaggagaaatgatcgggttaccaagttattgtatcacaaagatggctaacaaggggacggtaggcaagagtgtactgtactttatttcgagaggctgggagaagtttcgctaatgcaatgatgctgttgaaattgtaacacctctaatgttttagtacctcatgtctgtaaattagtcatgtaaaattgaattttgcaaactataaaatgatacatttacgaattttaaatattttgttatactcctatgcaatgatttggcatggcgtgatagtgccctcccaagcc

SEQ ID NO: 93970 - DNA, 402 bp, Glycine max
  Clone ID: PAT_MRT3847_55868C.1
ccagccaaccctggccttttaattttttttttgggaaccgggattaaaaatgggaacaaaacccccacccgggggggcctggggtccggaaaaaaaaacccccccgattttcctttggcacaatttgggccctaatgggccccccccaaaccttcgtgaagtgtgggcgtaaacccccttcaaaaaatttccccggggggggctttagaaataaggcccggaaaaaaaaccctccctttttttttgaaaaaacccccctggggggaaagggttttttggatttaaccccgggggacctaaaaaccttttgcccttaaaacaaaggcaaggggaattccccctggagtttgttttttaatgcccccaaggggggttacaaaaaggtgggggggggcaataaaa

SEQ ID NO: 93971 - DNA, 501 bp, Glycine max
  Clone ID: PAT_MRT3847_55869C.1
cttgaatcgccatgatcttcacacaagggattactccttatataccagccgatttccccatcgctatggctaaaaaacttcacccgcatgttcctgcccataatggtgacagttgatggaagatttggccctggtgatccatcaaatgtcgagccgtttaccacaggaagtttgtcaacgccaagaaccttgtaatcagggctgactaccttcccagcatggtaccctccatgggagtgccaaattgggatcacggcgtctttggaaaactgagctatcgaccctgggtcatggggatgcttgggtatgaacttgaaattatccttgacagtaaggttcatgatttgctttgcggttctttggtcacacatagtgtattttgggaagcgtttcgactggacaagcgtaatggccacacgaataccgttgactcagggatgaggatcccatggatgaccgatttagtcgtaagggacaacagggttgaggggcacctgggtg

SEQ ID NO: 93972 - DNA, 293 bp, Glycine max
  Clone ID: PAT_MRT3847_5586C.1
ttacaagtatttgccataacctttttaatgggatgctcctttgatattacttttgaaaaatactgggcccgggttaaacttccaagatttttttaccatccctcaaaaaatttggttctttggggggggattggggagataacctaaataggggtcattgatattggcaagcctaacttaaggggtcttaaatggaaaagctttttacctggccttaccttcccctttcctgttggttttgccaaacctggggcacctttgcaattaaaaaagttggccaatgggattttttt

SEQ ID NO: 93973 - DNA, 386 bp, Glycine max
  Clone ID: PAT_MRT3847_55870C.1
gatatttacagcaataaatgataggaattattctataattttataataagaaaaaaattgagcttctaagtttgagtttaagaatgtttaagctgaagtaggaagggagggacaaggccaggttgagtaaaaatctggtaagggaaagagtacccagaagaccaccatgggttcatgtttaggtggttggttgtgagaccttaactatgctttgttattattccttgttctttcatcattatttggcttgcatttaaataatcatgattttaaattttcttctgtgattgttcacatgcaagcagttgtacttgatatgctctccctctctctaattgttttgattttcagttgggtgcagcagattatattgcagtagctgaaaa

SEQ ID NO: 93974 - DNA, 491 bp, Glycine max
  Clone ID: PAT_MRT3847_55871C.1
aaaatcatgattcattcatctagctagttcatgtaggggacagtcatacagaaagagacaagaaacatacataactaagtcagataaatgtaagaatttggttatataaaaaagcatagttttctgacaagtacctcaagatctcactgagaatttgtctcattcatatagtcagatctagagtactggccattattttcccttgttcatcacatcgatcttgttgtgcttccttgatcaacctgctgctaggattagaggatgaggataattgagagcacaatgagagtgataggtttgtgctatcaacttcatggttatttaatgttccttcttcagcatcattaatctttgagtttagttttagtgacagatccaaatcaagggttggatgatctgaagccttccttttcagtgtcttcaattctggttgatttgttgttgggtttataggcatgagattttgtgctatttgttgcataatattgatt

SEQ ID NO: 93975 - DNA, 711 bp, Glycine max
  Clone ID: PAT_MRT3847_55872C.1
ttcagggatgcactattttgagtggagatgttatcataagtcatctggcagcatactcaaagcctatatatgttgtttttctgacagatgtatatggggtatatgatcgcccaccaacagaacctaatgcaatactcttaaaggagattgccgttgctgaagatggaagctggtcagttgtaaaaccgaagttgcagaactcaattgaactaactgttgctgctcatgatacaactggtgggatgaaaacaaagatagcagaagctgcaatgatagccaaacttggaattgatgtctacattgtaaaggcagcaacaagccactcattaagggccttaaatggagatctgagaagcagcatccctgacgactggctcgggacggttgttcggtccttgagataaatcttctgtttcaagatatgttacatagctaagaatcatcaatatgaagtagtaacttttggccactgcaagaatgtgacagttagttgtattaacaacaattacagatacgtgtcttcctgagtcaactcacaaatcccgtatcaaatgctaaatgaattactcatgatcatttgacatttgctattttatcctagaatttaccttgatgtgcaattaaggtcaactacatgtattatgcggtgtcagtgaagttgggtaaaaaccaaaatttcaaaggatatacaattgttctgcaatttttttt

SEQ ID NO: 93976 - DNA, 584 bp, Glycine max
  Clone ID: PAT_MRT3847_55873C.1
acgagaaatgtcaagagcagcaatcatatccattgccattctcctaattacaaggtctggagctctggcttcaatatcatgcgccacagttattgaggaggtagcaccttgcactagcttcctgcaaggaggctcaaagcagccctcggtggcgtgttgcaatggaatcaagaaactaagtggtgaggctgggacccaccaaaaccgaacagctatatgccagtgcctcaaggaaggactggccaccattggaaattatgatcctaaacgtgtacctcaagttcccaaagattgtggactgtctgctacacttcctcctattgacaagaatactgattgctctaatataagctttatgatgtgaatgttcagtggtggggtactgcaactggaaacgttaccaggaaatgtaacaaaggaattataaaaataaattgcctaccatggttgtactatcggccatgaataaataaaaatatcttttatatgaatatcagacctcccttcccagctgaaccaaaaaaaaaaaaaaaaaagagaaaaataataaaaaatgaatcgatataatatgtaccttaattatt

SEQ ID NO: 93977 - DNA, 301 bp, Glycine max
  Clone ID: PAT_MRT3847_55874C.1
tcggagaccagaacttaagtctgtaggcctggcactagtgatcaaagtggcggctctctctcggtccccttagaaaagactaataccactcaggccctatgcgagctggatgcatctttgtgaattatgttcatgtgttgatgataacctgtggaacatacttgatatatgcctaattgcaaattattgtggagaagttgaccctggtgagtgccggagatgatgaaaataatagctggcgccattgaactgagcacaggggaaattgcacgaattgaaaatgacttcattgaaatttcgg

SEQ ID NO: 93978 - DNA, 259 bp, Glycine max
  Clone ID: PAT_MRT3847_55875C.1
tgatgatctgatgacgcagcgcctggcattagtgcgtctccttcggaggacaatatccggtatttcaatgtgatgatccttggaccgactcagtcgccatatgaccggggagttctcaagttggacattatttttgccagaagaatatgcactcgctgctccaacaggttaggtttctgacaccaatatctcatccgaacattgatcagcttcgcaggatatgtgctgacattctgaacactaagcggagtcctgcccc

SEQ ID NO: 93979 - DNA, 339 bp, Glycine max
  Clone ID: PAT_MRT3847_55876C.1
aaaaaacccccagaggggccaattagaactaaaaacgacggatccgtcaatgtagaacgtaatcataaactcctattcggggccaaagtttgacccctttggcactttcaccattaaattgacccaatacaatattcaacaatacacatagaaaaccctccggggccgggggacccatttctatacccagcccttggccgggccccgaacgggggtgaccccaagcgcgggctccggggcgcgaatcttggcgtagcctaccttttcggggcctccaacctcggtttccgcgggggggacatcctcaaaggcggcgtgggggtgcccccggggggaaac

SEQ ID NO: 93980 - DNA, 373 bp, Glycine max
  Clone ID: PAT_MRT3847_55877C.1
cacaatcgtactatcatactctcaagcattttacattctcaatctcgaacgctaatatcagagctagcttcacaaccacctttattaacgtcataggactacgcgccacattaatgtcattcatctaatctcggcttacttaagaagccgtgaaatacctacttattgctaagtatacttgtagacaagctgaaactatgagtaatgagaatattacatcctgcgagcggaataggctcctctcaaactaccatgagactgtgttacaggtgattcagtgtctagtacccttaagcatacgctctattaagcttgaaagtatatctggccatattattgatagcatttgtgcttgacatgaacaatttcttaa

SEQ ID NO: 93981 - DNA, 500 bp, Glycine max
  unsure (1)..(500): unsure at all n locations
  Clone ID: PAT_MRT3847_55878C.1
agctcggaattcggctcgagatctttgttgactttaaactttctttttatctccacncacagttatgcattgtatgacttactcaactgtttcttgttttactttgtttcaaatgattttggttcctgttgatctgagaacggttacttttaagagaaattaatcaatctctccatgatcctcccccttttttcaactcgttgaccttgcagattctacaagacagtggagctagaaagatagctacaacatctgggaaagaaattcaactgaaggaagaagtatcctatgatttgcaaaagcttgcaacagagggtcttgtacttgacagtattattcagctcgaaggcgctgatatagaaaagaagaagcatgtccataaagatgatgatgaggacgaggacgatagagtgaagaaaggaatgggatttgacaaagaagaagatgaggaggaggataaagatgaacacaaaaagatggttggaaaggatgtgcatggt

SEQ ID NO: 93982 - DNA, 342 bp, Glycine max
  Clone ID: PAT_MRT3847_55879C.1
cccacgcgtccgcgaaaccacgatggacaggtttttgatgaatttctgattggtgtgcctggtaggtaaaatgcgttgaacagacaaacaagtgttgtgtcgtctttctgagtgttgagttgtgataggctgagaaatatgagcatggatatggcttgtagtttgccgcagtcaagagtgttgcatggaggtctggggacgagttacagacacagatcagtatgtcagttaggctgctttgattttagagggagaggttttggttgtgcttcttttggggactcgagaagtgtttcaagactgcagaggagcaggatgaatgtttctgctttgtggaataat

SEQ ID NO: 93983 - DNA, 377 bp, Glycine max
  Clone ID: PAT_MRT3847_5587C.1
agaaaaagaaacgatatagaccgaactttattctgatcgctacaccattaccaatcattaaaagcaaaaatacacgcatccgtgtccttatcacacgcctcacaaggccaaaacgcttgtacttgctcactggcatgacgtgaccgctttattctaaggatgttggtacaacacaaatcaccctagtgcacgagagccattcccgacttaatctatacgtttgtccctacccactaataagccagcattagacttaattaggggctatctctgcttgaccctagctctcccaacacctgagtacacattccatggggtgcaggaccactttgcaccacattagctgccatggatatactggcgaccacccatttaaa

SEQ ID NO: 93984 - DNA, 233 bp, Glycine max
  Clone ID: PAT_MRT3847_55880C.1
tccaaggttaatatcccaataaaaccttattaaatattttaagatacaaggaatagaagcacggttcccattactgttgctgggaacatgttttccctggcttcagtttccgtcccaattggcattgcttactgggaaaaagagaaccccaaacacaacaagtgttcccagagttgcaaaatccagagagactcgtacaagaaacaagcatgccacgccccttgcaaactcct

SEQ ID NO: 93985 - DNA, 966 bp, Glycine max
  Clone ID: PAT_MRT3847_55881C.1
taccagtcttcctttctatttatttccatctcagtcctttctctcttcacactccactctcttcttctattctattcttttctctctaacaacaaatttaggaacaaaccggggatcttatcaagggcgtttttgtaattttaccctccatgctcacttttactcactcgaaccccaccaacgacactcacttcgtcgccggcgccgccaggttcttctccatggccgcggcggcggttactccggcggtgctcttcacggccctcgccggccttgctgtcgtcgccctcgtcttctgcggtgccagtaggtaaagaaaacctaagaactctttctcgaatgaacgaattagagagagcatcgtcgaaatctcgcaatcgcaaaaaccctagctagagagagagaggatactgttttcgattccgattttgtcacactaaaaaggagaaaacaaaaacaaaaccaaaaaaaagtgtacatagaagggagttatagatgaatccccttagacgaagtcacaattcgcaatcgtcgtcttcgaattcctctccttcgtcgtcggcaatcggtcttcgtcgtcttcctcctcgtcgtggatccatttgcggtcggttctattcgttgtcacttcttcctcaccagcctcttgttcgtcctctgatcggggtcgtcttaaatcaccatggtcacgcaggaaaagaaaacatgtccttacacctcagcaatggaaaagcgtgtttacccaggatgggagaatacgggatggtggaattaagttcttgaaaagagttcgcagtggacgtgttgatcctagtatcagagctgaagtttggccattcctacttggagtctatgacttggacagtacaaaagaagaaagagatgctataagaactcacaatagtaatgagtatgagaaactccgcagacaatgccgccaactgctaaagcacagcaatgggaact

SEQ ID NO: 93986 - DNA, 859 bp, Glycine max
  Clone ID: PAT_MRT3847_55882C.1
cctagggaacctcagtcaattgtttcatttaggtttaggagaaaataagttagaaggaaatattccttcaagtataggaaattgccaaatgttacaatatctatatcttaggcaaaacaaccttagaggaaccatacccttagagatttttaatttgtcatctctaacacaggtgttggatttgtcacaaaactcattgagtggtagtatcccaaaagaagtaaacaacctaaaaaacatcaatttgctagatgtgtctgaaaatcatttgtctggtgagattccgggaactatcagagaatgcacaatgttggagtacctctatttgcaagggaattctttacaaggaatcataccatcctctttggcatcactcaaaagtcttcaacgtttagacttgtcacgaaatcgcttgtctggatcaattcctaatgttctgcaaaatatgtctttcttagaatatttaaacgtgtcttttaacatgttggatggtgaggtaccaactgaaggtgtctttcaaaatgcaagtgggttagtggttactggaaatagtaagctttgtggaggtatttcaaaactgcatctaccaccatgccctgtcaaaggtaagaaacagacctgcctccctctttcgacgtcgtgtaccaaccccgccaccctccttcgacgtcgcgcaccgcctccacctccagatctgatcgcgcgcgaccctttcgcctccaaacacatgcacccttgcaccttcaacgacgccgccgtgccgcctgcaccacctcgtgcgttttctttctctttttcgtccatctcctatgtttctatgttcttcttttttgtttcgattatgcattgtgttcatgtt

SEQ ID NO: 93987 - DNA, 3762 bp, Glycine max
  Clone ID: PAT_MRT3847_55883C.1
atccccgggtcgacccacgcgtccctccagcttgtcacccaagtgggggcttcagagtgatggaacagctttcgggcttgctgggttgggctctggctgcattctgctggcctgcccgttccaagttgtgagttgagctacgggacttgagcgaaggcccaagtttctgggttcctagacttgagggcacagcgtgaggctggtttaacaaagcagcgaatacctcaggcttccaacagtggagggataacaggctgctgcaacagcagtccacaatggcctggtgagccttcctttctatttatttccatctcagtcctttctctcttacactccactctcttcttctattctattcttttctctctaacaacaaatttaggaacaaaccggggatcttatcaagggcgtttttgtaattttaccctccatgctcacttttactcactcgaaccccaccaacgacactcacttcgtcgccggcgccgccaggttcttctccatggccgcggcggcggttactccggcggtgctcttcacggccctcgccggccttgctgtcgtcgccctcgtcttctgcggtgccagtaggtaaagaaaacctaagaactctttctcgaatgaacgaattagagagagcatcgtcgaaatctcgcaatcgcaaaaaccctagctagagagagagaggatactgttttcgattccgattttgtcacactaaaaaggagaaaacaaaaacaaaaccaaaaaaaagtgtacatagaagggagttatagatgaatccccttagacgaagtcacaattcgcaatcgtcgtcttcgaattcctctccttcgtcgtcggtcgcaatctcgtcgtcgtcttcctcctcttcgtggatccatttgcgatcggttctattcgttgtcacttcttcctcaccagcctcttgttcgtcctctgatcgggtccgctcttatatttggatttttccttctttttggtgatggggctacctccagcttgcttaaatcaccttggtcacaaaggaaaagaaaacatgtccttacacctcagcaatggaaaagcatgtttactgaggacggtagaatctgtgatggtggaattaagttcttggaaaagagtgcgcagtggaggtgttgatcctcgtattagtgctgacgtttggccgttcctgcttggagtgtatgacttagacagcaccaaagatgaaaagagatgttaaaagaactcaaaatagaaagcaatatgagaaactccgcagacaatgccagaaactcttgaagcaaagcaatgagagaaataagttaaatgaagttggtgaaatcagctatgaggaagatggtgggagcctctctcatgattctggttctgctagttctgatgatgcagcaagtgctagggaatctctttcttgtgaggataggagccctgatgttgaatattctgacaatccatccagtgccctgttggaaggagatgacgttcctaatgccaacaacactgatgtttctacactggatactgatttttctgattcagactcctcagaaggacctgaagtaattcagaccgttccttctgatgatgttcaggaacagaatgatctcgagaaagcttctgagggaagtctcttctcccttcaaagcaaaattcccatcaaaactaccaacttctgaagatttttccacctggcaacggattatccgacttgatgcagtacgtgccaatgcagaatggaaggcattttacccatgtcaagctgcagcatcagacaggaaggaatgtcgtgaaaatagtgctcagtggttgaagtagttccgtcgcctcagagctgacgtaaggctccatgcagttcgcctctatggacttggagaagaaaaaagaataaaggactgctataagggctaatactagaaagtaatagaagaaactcccctgacaatgccggctacatcaaaagctcaggaggctttctggtgttttgtcggattcatgaagaaggcacggcaaaattttaagcttgatgaggtgggtatacgcaggcaactggatatagttggaaaaaataattaagtttaaggatgcccacctttttaggcatttggaaaagcttcaggctgaggattgcttttttgtctataggatggtggtggtaatgtttcgaagggaattgacatttgaacaaactctttgcctatgggaagtaatgtgggcagatcaagcagcaatcagggcaggtattggaaaatctgcatggagtagaattaggcagcgtgctccgccaacagaagacttactgctttatgcaatatctgcttcggtgttgcagaagaggaaattgatcattgagaagtatagcagcatggatgagatcattaaggaatgcaatagcatgtcaggacatcttgatgtttggaaactgcttgatgatgcacataatttagtggtcaccctgcatgacaaaatcgagacatcattgtcatgactacaataaacaggctagtttacaatgctatcataaaaaaatatttggctaccagctttctcatgtgcttctaaaataagcactggatccgcaagaactattgcatgctattctgagttctgctgcttaaacgtgccactgcttatttgcttttttttgtgtcgacaatggtggctaatgtgtggatgttgttttcaaatgggaatgttgtctttttgattcgaatcaggagatcttttcctcttgggctctactaactttcgtgccatctgaatatcttcgaacaactcatcgcttctccaggatgcttgattttcgaaggttacgtgaagagatgaaattcttaaacagttaaagttttacttgattgcttttagaatcaatatcatttagcttttgattcaattagtaactgtaagtttgatttttccatgggaccaattaactgtggttaacattaatttttttttaatagaacaataacgggttaaggttttaaggttggaatagacgcttctgtcatagctgcgtgctaaattatgaccctgatttatacttatttgcaagggactatttacgaaaacgttggcataatttgagaactggaagtttgtagatttagatggcatctttctcttttctttattttcacgcaggacaaaatgaaaatagagacatcattccgatgacctgcagttgatacttttacaaactattagtttataataattgaggagaagaactttgatttcaagctgccagatttctcctctatttcaaacaattctgcatatttccagtatatattggaaagagaactctggagccctatgctgtcttttaccactgcttattcgagatacattgcttttgacaattttggctcttgtgggtttctgcttaagttaagccttgtaggcttagtattgcctcatattttgccactgcttaatgcttatttacgaggcttagtttcgactatgttgccttaatttggggcattgaagctggttagatttagatggcatcttcttttttttacctctttatttttcacgctggctccatccttttcttttcttttcatttctttttcaattctgatttgggacacatctcggagcacctttgcgaaaagcaggagtggtaggtgcatgtaaccgtttgatgaagaggctgagatgtgctcgacaattatgatgttgtcctttttgactgaaggctcaactcatgagtccttttgactcttttagctgctgaccgagttgcatatc

SEQ ID NO: 93988 - DNA, 269 bp, Glycine max
  Clone ID: PAT_MRT3847_55884C.1
gggagggggaataaaccaaaatatatggggatatttaacattttaacaaaaaaaaaaaaaaagtatttcccaggtggtaatggggggtgggttatacttattcaccccaaggaaataaaaaatttattccagggggggtttgggggggtcaaaaatacctaatgggaaatttaaaataaacctttatgctgaaatatctgttgtagaaagggtttcttaagagaaggaatttgttttattaggaaaaattttggataaagcggaaaaat

SEQ ID NO: 93989 - DNA, 202 bp, Glycine max
  Clone ID: PAT_MRT3847_55885C.1
cgctgcacaacatggatacggttacgcgccacaagcgttttatgggtttctcgccacaagcggcttatgggtacggggcacaacctgggtacgggtgcgctcctcctcctcctgttgctgcatcagttcaaagaccggggaagaacaattcgggaattggattgggtgcagtgatgcttttatgttccttttttggactttt

SEQ ID NO: 93990 - DNA, 151 bp, Glycine max
  Clone ID: PAT_MRT3847_55886C.1
tatggaattcagatcataattatgcttgaatgatattcttcacattgtttactacagtggtttaaggggggctccggctcctcttgcaagagctgagggcttatacttacagtgcatgctatgctggtttctgtttatccatacatagata

SEQ ID NO: 93991 - DNA, 361 bp, Glycine max
  unsure (1)..(361): unsure at all n locations
  Clone ID: PAT_MRT3847_55887C.1
ttaccaccacccatttttaatttttcacccccaacaaancccacaaggcgaactgttacaaacactaaccctctctcacacaaatacaccaatcctatagcaacatctatccctgccccttcacgcaaaaaagttaatatacatcgcaaaactaactccaccaccccctcgctactatcaaatggatgatacataaggagaaagcaaacaactccacccataacaaataacctaaccgaaaaaaaacttaacctacccctcctttccctacaagaaacttactaaacgctcatcaagaccaccccgctcactattggattcatccagctaacagatgatactcatcatacacaacaccacc

SEQ ID NO: 93992 - DNA, 574 bp, Glycine max
  Clone ID: PAT_MRT3847_55888C.1
actattatcatcaaaggaagctcagctcagcaaaaaagcgacacaccttgacctcttggtacaatttcttctcccatgcatatagcctctccaccgtggaacagtgcccaacacttccaactccattaaccccaaaagcaccaccattcagcttcggactcgaaccccaagcccacaatgatggactcaaactccacccatagctgtgcactttacctaccacaaacacaacccttcaaaatctaaaaaagctgaagaaaaaattcaatcttgaaaaataaacataaggggtcaattcaaaataaggttaactcccatttcccacaagtaaatctcaaagagattcacactccacaaaaggggttaacactaaaccctccaaaaattgttacatgcaagtgaggctggcttacatgctttactgttatcagaaaatccagagtttggaacttcaaggagcaaagaaacatgagaaccagcatcagcagctttgagaaaatagtcatcaagctctttgataacttcaacaagatccttagtactgttccttgacaccaccattgcaagctcacta

SEQ ID NO: 93993 - DNA, 147 bp, Glycine max
  unsure (1)..(147): unsure at all n locations
  Clone ID: PAT_MRT3847_55889C.1
gtcactagctctgtgcattcttctctcgcnctctgccttccacacaacanannanagnaanntcccaagatagtagaagatggcagacactgaggatattcaanccncgngtgtgtnacaanggaacangaatggntaangcaggat

SEQ ID NO: 93994 - DNA, 507 bp, Glycine max
  Clone ID: PAT_MRT3847_5588C.1
gtttatttttgtttaacacaacacatttaatagaaaatcaagcacaccaaaatcattagaatcgatcaagtaatagaaagtttgaatatcaaacctcattcttgttattgtaaaataaataaatccgcacgaacaaagttgataataaggctagagcagagagttcacgcacaaattttaaagaaactttttttaatccacaggcaatggggacatgggacacagaaaagaggataaatatgtgtttaattttataaattaaggagaagatgtacttaggtaaataaactagtgaatatccatcccgtgtgttgcaagctaaaattagtatcataaattgaaagacaaaataaatttaaacagaacggaaatcatgatagtcaaattgaaatatatatatatatatatatatatatatatatatatatatatatatatatatatatatatatatattatatggattaaaaatactacgggttagtctttaaaataaaaaattaccag

SEQ ID NO: 93995 - DNA, 178 bp, Glycine max
  Clone ID: PAT_MRT3847_55890C.1
gatagcaataaccagagcatgtcaatcccctagcagtatatgctgatgatatagcaaaagtagagtgaggttcagcttagataaatacacatactagaaggctcttgaggcaaagttctgcaatggtgttgaggtactctgctctgatggcactgatgcgctccttcgtcgtaatatg

SEQ ID NO: 93996 - DNA, 1145 bp, Glycine max
  Clone ID: PAT_MRT3847_55891C.1
ggctcgaggcgcgccgttgacacgtgtcgacgcctcagggagaaagccctggaagccaagggagacttgtcacgctttctggacaatcacgaccacgcacgtgcggctgcacatgtggatctggttgttcaggatagtgaagaactcatggaggaaacaggaacacaagcacagtctaaagataataaagatgaggagggtaagtttcaagatgatagtgaagaactcgtggtggaaacagaaacagaaacagaagttcagtgtgaagagaataaagaggagggtaaggttcgggatagtgaagaacatgtggaggaaatggaaacagaaacaggagcagaagcgcaacctgaagagaagaaagatgagggtaaggttcgggacagtgaaaaactcgtggaggaaacgcaaacagaaacagaaggacaatctgaagagaagaaagatgaggagggaaaggtggctgtgatgagtagttctgtgagtgagacctatgattcggattctgtggctgtatcgatgaagaaaaggaaggataagaagaagaaggttacttccgcaaggaaatctttgtcgttacaacaagagcataagaataagcattataagactagagggaaagttgccaacgaggaggaagttaccagcttcaaaactacgagtttggggcagcaaccacagagaatgaagcagagttcactggctgcaaagcgtaagagattactttggacagcagaagaagaaaaagttctcaaggaaggagtatcaaagttctccacagaaaatcagaatatcccttggaggaaaattttggaatttggctgtcgtgtatttgatgagactcgtactcctgttgatctcaaggataaatggaagaacattatctccaagaaaagtagaagtactgattgtagttatacttttgatttataaaaagtgatatttaggtaattattttattatttgttgttctatcttttatgctctttcaattttggggttttagctggcaagtacatgtataaactatatgaaagaatttttaaagatggaattcgtaaaccatcctttgttacattgtaaaggaggtctatgcaaaaaaattctctttagtgttcaaaaaaaaaaaaaaaaaaaaaaaataa

SEQ ID NO: 93997 - DNA, 533 bp, Glycine max
  unsure (1)..(533): unsure at all n locations
  Clone ID: PAT_MRT3847_55892C.1
aaagaatactatctgccagtttagagatatcgaaggattgactatggaaaatgatatcatttccaagcttccagatttcatttgtagctgccaaccaccaaagtttccatcttctagcagtagccgatgatcctgcagtaggtgagtgctggagaaaatccatgggtctacagtggatggttctgacttccttcacccaggataggaactcccaccacaatatgctaccttgagtagtgcatgaattttgaaatgaccagcattctggagaaaatgaggaaggtggaccatgttttctaacttttatgtttttggattatttggaactttgattgggatcctacaggaatgtgttagcatcttaaaacttgctaatcttataaccaggagctaataattatatcttattttatcatacactaggaatttcaattaaaccatcatcctattctataaggagctcaggatttcattctctgtttcggatatctttatctttctataatttgtatataattatatntagatatact

SEQ ID NO: 93998 - DNA, 314 bp, Glycine max
  Clone ID: PAT_MRT3847_55893C.1
gttgggggagaaccttgcaaaaacatgaatttcaactttccagagatcaaatgggtgtcataaccatataatggggctcttaaaaattgttggctctgaagggttaagtttaatcaaaacccgaacttttaattttaaaccattccctggttccaatccaacatcacgaagggtggaaccaccactttctcgcgcaattcacttgttgttttttttaggcctcaactggttactatgaccgcacttttttttgtcgggttttacaaccctatgatgcaaacgggcattgaacttgggggaaaacaatttggccc

SEQ ID NO: 93999 - DNA, 350 bp, Glycine max
  Clone ID: PAT_MRT3847_55894C.1
ggtacaagcagagagttacaagacatatgtaacggttttttccgtttttactatgcacatgttaagccctattaaatagaaactgagagatcaattctgatgagcttcacaataaccgcgtgttcagagaaacccatgaagattgggtcaaaactttacgatgatggacgacgtaaaagaaccgtggcatggataactgttagtgcccatatcgttactgcagtgatctggctccgaatgctggtacttgcattggccatttgccacatgggttgggtggctggccctggcggtcactttgtcttttatgttattactgacttgacttacactcttcttgacgactgtta

SEQ ID NO: 94000 - DNA, 226 bp, Glycine max
  Clone ID: PAT_MRT3847_55895C.1
aaaaaacatttttactatggtaagaatatcatgctattcttattagattatttaatgtgataaataattaaaataactattataaatatcacattatttttattctctataaacttgtataaatatttccaagaatatttatgattaaccaaatagattttatgcatccctaagtattatgatttccaagattcatgactcttggaaatcatgatttttggacata

SEQ ID NO: 94001 - DNA, 764 bp, Glycine max
  Clone ID: PAT_MRT3847_55896C.1
tttttttttttttttataaatattaataactttcagccaataaaatatatatatattaatgtataattaacattcctctcaaaatacatggaaatttccctagagtactttccaaaaactagaggggtcataacacagccacatgaaagaacaataaaaatcagcattttaaacaaataattcaatgtaaatactaataataggtctgcctcttcatccattgtgacttctgagccttcctaataataccctcctgtccaatttaacttctgatattccataaccaccagagaaaagagaatgaaaaacagctagatattagctatgggaaacactatgcagagaagtggccattcctttccactttgtaaagactagagatcaaatcatcctcacggaacaattcagaacaaagccgtaatctctaatttgcaaatttgttcttcaaataggccagctcccagtcgacgcatggaactaactgtgttaggataggagtccaagatccacatttgcctccaaattcacattaaaatctctcaaataacacaaaagaaagtataaattgcttcaacatgaatcacatccaggccttgtgacgcccaaccaaatacacactaaagggcaaagaatgtaggcataaattaagagacaccaaagattatatacacaacagccaattgcatctgcaagcagctaaaatgcacgtcactgactctcatcttgattgtcactataaatttactaagtttctagaaagaagc

SEQ ID NO: 94002 - DNA, 577 bp, Glycine max
  Clone ID: PAT_MRT3847_55897C.1
gacgggtgcgaagagaccacctgaaaggagacactcagcacaatcagagcctcatcctctaccatatcaggcgcggacttacttccaccatcaccatacgtgcgttgccctaacactacccatacttataacccatcctcctagaaacctggtgaccagacgcctatttcatcaccacccctgctctttcagggggcacgggtcctaactctctgggtctcactgtacctatcacaaggccctggcggtggcgctcggtaggagacacatagccgataacaattgaccttaaactgcaaactaccttgctattattgcctgcacacaactccatttgcctgtaatctaatcacacgcaggctataggggaacaatcctatatatcagtctactggtcagcacatctattatcctgttaatagacaggcaccttgaactcactatagggactacagagacttcttaaaattcatgtagaaggctaccgtatagctacacctgatttattgaaacctgctattagagctacactacattacaatgctaaagacctgccttctctagccggtttatggac

SEQ ID NO: 94003 - DNA, 483 bp, Glycine max
  Clone ID: PAT_MRT3847_55898C.1
ttttatttttttatatgggagcaatatattatttcacgaataacaagattcctgtcttgaacaacataagaggggacgcaagtttgtgtttcacgaaacacaaaaagccccgtttgatcaacatgggggatacgccttgagaaaaacaaggcccctcttgggcgccaaaataaggggaagagaacctcggccacaaaaaaaaaaaatgccccccatatcgtaaaaagggggggaaaaaacccccagtccaacctttcgagctaataattgctaattcttaaaaaggccaaaaggacatgtccagtgccccctcaaactgtgaagcgatacacgagaaaatttggaaggaaaatttgaccacttttacggacagggtctaccagccccttgaactggtggccactcctctttgccccattttttaaccagacatttgggtgaaacttacagatgcccacatccccatttgcccaatgaacaacc

SEQ ID NO: 94004 - DNA, 268 bp, Glycine max
  Clone ID: PAT_MRT3847_55899C.1
tgtttttttttgtgattatacataaggggggccaccgccaaattggtttgagatattcaattaggagcgaggtctgagacctacttaagttacaacactcagtgaaatgacgagggcccacgctttctttgccctactttaaactattttgcagttttctttattcggtgtattactttactagaaaggccacaatcattttttaccgatcccttgctgggctacactggctcctctagctcccacggaacgacgacagcccttattt

SEQ ID NO: 94005 - DNA, 1217 bp, Glycine max
  Clone ID: PAT_MRT3847_5589C.1
aagaaggaattatctatttctaaatattttggtacaattaacaatcttagcaatccttgatcaaagtttagttactcgacttattgcttctctcttgagttttgatcatgtgtcatcagaatagtccttttctttttggtcaatataaacaaagggctaagcctttaaggaacaaattcaagttcaagaatagttagccattactcttcacctccaatcccttatcttgcgtttgcgtaatcagaatactccgaagctgcttttgcaacctctcttttacttgttggttataatcaatgtttctacacacactctccttttcagccaggagttccaaccttctcatttcagcagcagctatctccaaattgcaagagtcaccactgctgcttctaagttccacaaaagaggacctcagcgtgtccgatgtccgacacgcgtccgtgtcagtatccaacacttagcatgtcagtatctgacacccgatacgacacctgtactacattctatattttgaacattttaggtgttcacgtgtctgcgttcatgttgtgtccggtgtccatgtcggtgcttcgtagatccgcaatatcaagatattttaactgtccgcaaaccgcaatgctaccaacagccggaagtggggccgcatctgtccgtgaccgatatttaaaaccttgaacgagtgatttacaacaacttcaggtaatatgttcaaccattgatagcaagtgaaactgttttactttcaattatgacattgttacctcgttgactctattcctcaaactctgaacttccactttacatttcaccacaaacctctccgcgatttccttgaactccttcatttccatcctctttgcctcgtaatagtaatctctcttcacgcgcaattcctcaatctcctccacctcgttctgcatcgacctcagttctagtgaaagcgattcgtgcttggcttcgaggttctcgatttgagacttgagagccagaagcttgaaattctgcgacgcaattttctgatcgagccacgagcacctctgttccgtggctctgatgttagcgagctttgaagccaaaacgcgtgacttgttcccttgcaattctttctctgcctggagaagagagaggcgttgcattcgagcgcggtccatgtggtggagccgttcgtggaatgcggaggaaagcgccattgctgctgctcctcctcgtgc

SEQ ID NO: 94006 - DNA, 393 bp, Glycine max
  unsure (1)..(393): unsure at all n locations
  Clone ID: PAT_MRT3847_558C.1
gaattcggcacgagggagtgtcaattttgggatgcaaatttagagtaccaaataccaatgtctggaatgccaatatcaagacacttatgaggtatttggtttttcactggacctaatattggtccagactcccgaacatcaagcatctcttcactaatatgcttagtagaaaattgcacatacctaataagtaggtttgaaaggttcggataactaagcatatggcttaaatttataaataagaacctaggaacatctttagccatgttactcatcaagttgcttaaagctcacacaaatagtaaaaaaagaatgatttagtgagctactcattggcgacccaaaatcctgtcattnngttttctagttcacaacnnnnnntaannnnngggg

SEQ ID NO: 94007 - DNA, 575 bp, Glycine max
  unsure (1)..(575): unsure at all n locations
  Clone ID: PAT_MRT3847_55900C.1
gacccacgcgnccgcagagaacaggagccaacccaacaaaaccagacacagcagcgaaccatcaagaacgggccaagacaccctcacaaaaagaaaggagaaagaacggagagcacgcaccagaacagagaaaggaaacggcacaaacacggaacacagggaccgggccctncgcagggagaagggcaggacgaggacaacaaaggctagactganggagaacggaaagaaagcagagaaatagggaaaagagtgggcgtcagcaagccctactacgagggagactcaagacatagatgaagctggtatacaggaggacgctaacaagcgaatagactggacgaaaacggcccaaagactgggacaaagacccgactatggaaaggtgactcgaagctacatcacgaggcagtatgtgatacattaacgtaggagaaagcaccaggaggagaaagcctggtgaaagaaatagtaaaggcaggcaaagatgctattacagaggatgtaggatatggagaaccggttacttatactgatgaagagggtggacagatattgggagagggaaagctctt

SEQ ID NO: 94008 - DNA, 235 bp, Glycine max
  Clone ID: PAT_MRT3847_55901C.1
gacttgctgcggtgacaactgagagcgcggaaacacctgcaagtgcggcaacagctgcgaaggctgcaacacgtacccatacttgaactacaccgagtcaaccaccaccaaaacctcggtcatggcagcggcaccacattatgcttaataccagagtactcaaacaggtgttaccactcacaacgacagccttccatgctgaactaacagcacctactaccccaacacttacaaa

SEQ ID NO: 94009 - DNA, 566 bp, Glycine max
  Clone ID: PAT_MRT3847_55902C.1
agtttccgtcatcactgtatgacgtcctccttctttctcagtgacaattacaaacttggtagagggagaaaaaaatggggcagaaagagcgttaattaggagaatagactaggaaaagggtgtcacgttcaaggttcacgtggatcgatctcgctagctcatcgtagactgtggtgagacgcgtattgaaaggtaaggtatgccttcgtcggggataatcgtcgcatgcccaaaatttgcctcggatttaatggaagtcttgcgtactatagtttttgggtcttaatgcgtcgaagacgtcaacacgtttctattcagtctttggtttaatacgcgtgtacttgcaaccgtcaacccgatgtgtttgcgctcctgtaggaagtgtcacccgcgccgccggatgtctatcgcatactgatatggcttacgcgtttgactcttcgtgttgggtctgggtggtttggttgggtgtcttatcggtctctctgggttttcgtaacgtgtgaaagtccccatgtttgggaccaggttcagggacgctgggatcctattgtcattttaaaaat

SEQ ID NO: 94010 - DNA, 372 bp, Glycine max
  Clone ID: PAT_MRT3847_55903C.1
gacccaacgcggtctctattccttttgcgttagtcttctggtgggagagaggcgcttatcacagagttgtgaagcttctatgcttgggctaacgatctcacataggcttataggattgaagatagcatttgaagacgcttaatgccccatagcattgtatgcttgacaaactgtgtgacacctttgctcataagcccttttctgaaccacacaaatccaatgaatgcctgccattcatactcattttcaaaaaacctgtgaaggttgctttgacataccgagataaccttgagatttctatgcttccagaggtgacttatgatgtgaaaatcttgacaaacatagactcccctagctctatccatggactgg

SEQ ID NO: 94011 - DNA, 728 bp, Glycine max
  Clone ID: PAT_MRT3847_55904C.1
agaaagagtacgctgcgctgcaaaaccagcttcagctgcttaagcagaagcaggtggcgctaatcgacactttgcggcaattagagacagaaaaggttgatctggagaacactgttgttgacgagagccaaagacagttgaatgatcaagaggcttcctctagattgaggcaggagaaatctagtgcaagtgcaagtgagtctgaggatgataacgagagaaatgatgcagccgaggaagaaacagatgaagatgactccgctttttttgacactcgtgattttctatcatcatccaattcttttaaaagtaatggatctgatattagggcctcatctttctcttcagatgatggactctatacagttgaatcagaggaggatgtagatccttcaattaaatctgttggaggcaactatccttctgttaaacgacgtaagaaattgcctgaccctgttgaaaaggagaaaggcgtcagtctttggtcaatgattaaggataatattgggaaggatctaactaaagtttgccttcctgtttattttaatgagcctctctcatctctgcaaaaatgttgtgaagaaatggaatattcgtatcttatagaccgtgcatatgaatgggggaagaaggggtaatagtctcatgagaattctcaatgttgctgggtttgctatatctgcctatgcttcaactgaagggagaatttgcaaacctttaacccatta

SEQ ID NO: 94012 - DNA, 180 bp, Glycine max
  Clone ID: PAT_MRT3847_55905C.1
ttgagctgttggttacatacatgggggagaaaactgttggggagggtctgacatgcgtcaaaaggacatacacaatggtgtaactgagcgatgcgacctaaattttgaaactcaagatacatacatgtcgacataacttaagttctatggaggctggggaagaccaggtgtattgaggca

SEQ ID NO: 94013 - DNA, 390 bp, Glycine max
  Clone ID: PAT_MRT3847_55906C.1
tttttgttttttttttttttttttttttttttttttttttttttttttttttgggggggaaaactcttttctcatttgaatatttggttcccttaattaagaccccccccccctttttttttttccctcccaataaaaaaagcaaatttttttttttccctttaaagcttttttaaagtttaactaaaagtttcccatggcccgccctttggggttgttattgcttgccgctaaccccaaggggtgaagaacttcattggatgataatggggcccctctaaatgatcaaactttaacaactgtttccaaattcctaacaaccaaaatctcaatttcccattaaaatcattccaatctaatagggtggggtttccaccagctgatcgagga

SEQ ID NO: 94014 - DNA, 229 bp, Glycine max
  unsure (1)..(229): unsure at all n locations
  Clone ID: PAT_MRT3847_55907C.1
acgcgtcgtgaaacaagatggaggatcacaagatcggaaaacatactctatgccttacacacatggacagctagcacagaagacttctctcaagacaattttacggggccagccatgctcttgtgtacatatgtaagatatgcataattgatgtctcttgtggagcaccatttcaacacctaggtatactgtaacatacatgacattgcattatgnatatgtattgtat

SEQ ID NO: 94015 - DNA, 753 bp, Glycine max
  Clone ID: PAT_MRT3847_55908C.1
ggccttccgcgcgagtgctctctcgaccagagctcccgtcaacaagcgattcttcactccttcggcatacaacatgaccatcaaatcgtacttcgacgtctcgtgggagggccccgaggtccaggtggacaagtcgggcaatgtcacctcccagggcgcaccaaagactcaatccggtcgcatcaacttcgagctgtttgacgacgtcgtgcccaagacagtagagaacttccgcgccctctccaccggagagaagggctttggctatgccggctccaagttccatcgcgtcattcccgactttatgctccagggcggcgacttcacccgcggcaacggcaccggtggcaagtccatctacggcgagaagttcgcggatgagaacttcaagctaaggcaccagaagcccttccttctgtccatggccaacgccgggcccaacaccaacggctcccaattcttcatcaccaccacggtcacttcatggctggacggcaagcacgtcgtcttcggccaggtcccagacggcgacgtcgaatcatacaaggtcgtcagggcgattgaggcagctggaagccaatccggacagatcaagtacaagaacgtccctactatcaccaatgcaggcactgagtagacacttggttgctttgggccacgcgaaacgaatctcatgcttcagcatagtcatgtcaagtagaccatacttcagcgcgtatacgcagtagttgtatattactccactttccaact

SEQ ID NO: 94016 - DNA, 716 bp, Glycine max
  unsure (1)..(716): unsure at all n locations
  Clone ID: PAT_MRT3847_55909C.1
ggcntaattgcttttnntnnnnnnnnncctannaaattgaaacaagggcttgttggaattttcactcccagcctgaattcaatcacagcttaggatccaacttcaataaaagggcccgttgggaaaataaaccaataacgatgggaaaacaaaataaaaaacaacaatcaaaaaacgtttttttttccaccttacaaaaagggttcccaacaattgcctcccttcccaaaaatttaaattcattcaaattttttaaaactgctggggttttttgggatcagggttcaactcaaatggggggggggagggacatcaaaaaggattccagtttggatttggccccacccgataaaaccccaatgcttttaaacacgtcaactaaaggcaattttttaacccttgttagggcccccaggggaagtaagttgcaactttgccaaggaatttttaaaagaaattactttaacccccggcgaaattgatccaaggttcaacattaacatttttcctttggccagcntggataccttcccctggttttaaaacccttttgttcggaccccaaaaaatcgccnaaccaggaaaaagtttacctccagttcaacaaaaaccnnaggtagggatccaacctttcctaaaacttgacctaccaaccnannnagngggggcaaagggggatccattgttggcccaaaccaattaggcctccnggnnna

SEQ ID NO: 94017 - DNA, 161 bp, Glycine max
  unsure (1)..(161): unsure at all n locations
  Clone ID: PAT_MRT3847_5590C.1
ccacgcgtccgcgacaattacatccgcattatgaatctgaacaagctcatcatcatcaaccgacccaacaggtaaggtcccagccccagtccgaacaattgcaatcacaacccctgccacaatccccacgtgtattgcaacaacctcanaatcctcaatat

SEQ ID NO: 94018 - DNA, 757 bp, Glycine max
  Clone ID: PAT_MRT3847_55910C.1
aagtctatgtttgttattttaaacattgtaggtaagtattttcttgtggatgcgggatataccaatggtccgggatttttagcaccatattgagggactagatatcatctcaatgagtggattggaaacacccctcaaagttacgaggagttatttaatcttcgtcatgcaagtgcccgaaatgcaatagaaaggtcatttaggatcttgaaaaaaagatggagtatattaagaactccttcatttttttatataaagacacaaataagaattatcaatgctttttttgtgttacacaatttcataagagacgaacaacaaactgatcaacttttagaagttcaagacttagaatttttatctgttgttgatgaagagttagtccatcaatcaagggaagaagcccttcttaagtcttcacgcagccacacaactattcaagctaccgaggaatggacaagattgatacattagctatgaatatgtttgctaactatcaagttaggagaaactttgcttagggatagttcttttttaaatgtaatttgctattgctgacaaactttgtgtgctttgttactattgtacttttctattgaagatggacttttatgtactttgctattgcataaaaactttgcttgaaataaaaaaaaaaaaaaaaaaaaaaataaaaaaaataaaaaaaaaaaaaaaaaaaaaaaaaaaaaaaaaaaataaaaaaaaaaaaaattaaaaacccttaaaaaaaataaaa

SEQ ID NO: 94019 - DNA, 558 bp, Glycine max
  Clone ID: PAT_MRT3847_55911C.1
aaaaaagggggggctgttccaaaatttaatttggggcccaggggttaattccttgactaaaactggaaagctaaaattttctttcctcctaaaggggttaggtgttgaaatacaagtttttccaaggaaagacaaactttttcgagggaaagttccttggttttttaaagggggctttttttaaaattgaagctccccttttgggggcaaaccttgggaaccttcttacaggggccgttcccaaaaaggggcgggggtttttaatttaggcttgagtaacccaatgcctttttctaaaaaagtttttttgggggaaaatccaattttttttttgaaaactcattaaggggaaggccttgaacttttggccattccccattggcccaagggacggggaatgaattaatcacccccgctggaacattgggggaaccattaaaattttctccctttgacccccaggggccctggggggttccaaaaacccaatttttaatttggtcccaagccgcccttgccgctggtggggcacttgaaagctttttatctttgataatt

SEQ ID NO: 94020 - DNA, 289 bp, Glycine max
  unsure (1)..(289): unsure at all n locations
  Clone ID: PAT_MRT3847_55912C.1
accggaggggacggcaaaaccattataaggatagtttgagaaccacatggggtgctaaagggtgttggttgcttcttttccttgtggggttacagctggacgcatggaactgagcttttttcaaagtgatcagtcatcaagttatgatgatgatgagtattcaaaccatgctggatctctgatgtcacacgctaatgcctctcatgcactgtgaaatatangctgaattatgcactcagatgtagagctgatgtcacacgctacagncagacagtgtcgtgtctgacac

SEQ ID NO: 94021 - DNA, 560 bp, Glycine max
  unsure (1)..(560): unsure at all n locations
  Clone ID: PAT_MRT3847_55913C.1
tttnnnnnaaaattgtgttatttttttacnnnncccaaaggaagnngnnggggggaagggtaaaaattgaaaaaagaccggttacccccctcccaacaaggcccaaaattaaaaagaaaaaaattataggatcctcggggccctatcaaaaacaagtcaaaggcaccgagctgatgcccacaacaaggcccagcaccatctttgaaaaggaagcacaccctctatggaggtcaaaaccacttggtgactttaaacaccccttctctaaaaaaagggcccccacaatccaaacagggaacaaaacaaacaaccaaaacttcccacctgaagggcaaaaaaaaaaacatccaggggggaaccaattgacctatgaaaaacaaactagttaaagcctcaagggctttaactggaaaaaaacccccccaaaacgtaaaactactttatgggaaaccccaaaaaaaaaggttcgggagaaaaaaaacccacccccaacccaaacttcgttaatgggaaaaacccttgaagggcatcttagggcaggcgttaatgccccattttcc

SEQ ID NO: 94022 - DNA, 446 bp, Glycine max
  unsure (1)..(446): unsure at all n locations
  Clone ID: PAT_MRT3847_55914C.1
cccacgcgtccgcccacgcgtccgctactttctcttctctcttgtcaccaacctcgatggaaatagacatggacatggacttctccggttacagcacaatcaccaacacaatcccctcttctgatgatgactatggttgcaactggaaccattggtcccccgtcgtcaactgggacgccttcaccggcgcccacgacgacttccaccacctcatcgactccatcatgtgcgacagcgccgccgcggaggaggacaacctcagccccgacgatcacgccgccagcaactcccccttcgcctccgtcacggaggaggaggacgacgacgccgacgaagaaaccggccccgtcgacgattccaagggcctgagagtcgtccatctnctgatggccgccgcggaggccctcactggtgctcccaagagccgcgacctggctcgagtgata

SEQ ID NO: 94023 - DNA, 362 bp, Glycine max
  Clone ID: PAT_MRT3847_55915C.1
tcgttagatacgaaattggtttttgtgttctgatcgcgatgagagccacttggaacaataaccgtatgacgaggttgtataggatgcgccgagagaacactactttatccatgtcttgcaatcctccttgtcggatgcagttgcttatactatcgcttaagcagacgaaagaggcaccccactggtacattttaccgctttctgattgttccatttggcccaatagtgaatgcgaataagaagacactctttcgcttcatgaacaggataaaggctcgggtcttctagccatcaatataaaaagcagatctccatggtacatgtgttaagcatgtgacaaccatatcatatgccagtctctt

SEQ ID NO: 94024 - DNA, 367 bp, Glycine max
  Clone ID: PAT_MRT3847_55916C.1
gggaaaattgggaaaacccaaaaccaaaaggctaactagaccaacaaaaaaaggcggggccagcctgggaaaaaacaagaacgggggcaaaacccccccttttttaaaaaggggggaaaaaaacgggcccaaaaaaaaaccggcccccaaaaaaaaaaaacctgggaaaaaattcacggggaacaaaaataaattccaagggcggcccggaaaaaagaaaggaaagcccccggaaattggggcaaaaaaagccctggggaaggcaacaatcccggaaacaaaacaggggatcaaaaaaaaaatagggcctaattgggggggaattttcggccctttgggtccttaacccataaattggggggcccct

SEQ ID NO: 94025 - DNA, 462 bp, Glycine max
  Clone ID: PAT_MRT3847_55917C.1
attgcaagcaactaaaatatctaaatttacatttaatcactgcaaatccattacaaaaaccaaagatgaacaaaaagataaattccatgttgtaaaaaagaaacatcacgattcctacctcggctatcaacatctatcacagtagcacatgggcatcccattgtaatatatgagtttatgactgcacagctttattttgtttgatgcaagctggtgccttgaaaccttggcatttccacatttatgtagcctcaataggcatcactctgtcagtggatgactccactgtaaacgaaggcatactattaacaggattattgcctgtgttcgttctagtcaagggaaaacttctggctcttatttcttcctttggctggcctctatcttttcaagggcaaatgcttaagggcaacttttttaactttaccctttcctttttttttacctataggaaaataaatc

SEQ ID NO: 94026 - DNA, 1744 bp, Glycine max
  Clone ID: PAT_MRT3847_55918C.1
cgatattatcatggataagattggcattgccacgggagatatggtttactaacagagaaaattaaattcggcttcagcatctctcatcctctctctacttctcaaagaaagacgcacgcagcgttctaaaaccctaattgggtatatgcaaagagggctttgtagcatgtgcttaaggtatgttttaaacattgcttgtttaattgtcatggtggcattgtgatgcaaaatgtgtgtgagctcatactgagaaggagctcatctgctaagtccatttgaagaggatgtatggaagggcatcatcaggtcttgataggtttaagaaggctcagaccttggaaccattctctgttgctgtcaatgcttcttccagaaatggtgcccaaccctctagtaaagtagttggccattcatctgctttgcctccacaggctcaggcttcttccaaccaatcccaacaacatgcatttcagaagactgtaggagtggaggcagccccgttgttggggcagaatcagcaggtgactcaggttgggggagggcagtcgacgtggcagccgccggattccccgatcgacccacgcgtccggcacatggtacatttgttgcaaatgagcggttgaccaaggatttgccagttgagcttgaagtgggacaatcattgcgatttgctgcatcaacaagagcatacatattaagaaagaatgatgcagctcttttccctcggcctccaccacctacagagattaatttcccaccgcctcctgacccatctgatgaagaagctgttgtagcttataatacgctactgaatcgttatggcatcaacaaggctgatttagtgtccaaatctggtgagtctggtagttcggtaagtggcaaaaataaagattaccaaactgaaagaccatctaagagaattaggaaaacaagagtttccttcagggatcaagttgggggagagttagttgaggttgttggaatttcagatggtgcagatgtagaaacagaacctggtccagttggtgttaaagaaggaagtctagtcggtaaatatgaatctcttgtacagattactgtaataccaaaggggaaagagcagtcctctgtcaaggaggcagattcatccccaaaaggtgtgactgataaactacaagaagtattgaaaaagatcaaaaccccagtcaaaactgggatttatgatgacctatatggagaatcattatctgtcaaagttggatcttcctgggcatattcacctgcactcggaactggtgaacgggctccagataaggaggatggtgcggggagcggaaagtcagagagtaatcctaatgctgttgatggagacgatgatgatttgtttgggtgaccattgaacttatacagactgggttgtgagataaatttgtagtagttctgtttgagtttgacatcgtagggagttgaaaagatgcaaaatattatgttgcatgcttcttttgtcctcgggagttaattgttccttccaacgaatccatgattattgatgttttccgctgcatgcccccacttactctaaaagacagcaggttcatggttaaacaatgtgttatccttgtatggacccattaaatagctcatttaagtagtggttttgtccatactttctagtatgcacatactagcatgtcatcactaataaggattgactttctagccacatggtcacgaaggagcaaatgttgatatttgagtattttgt

SEQ ID NO: 94027 - DNA, 340 bp, Glycine max
  Clone ID: PAT_MRT3847_55919C.1
gtgttttttttttttaagcgtaaacagattgagattctcaatctaatgttattcaacccaaaggtaaacagattacaatctagtttatatagtcgagctaacagtcaactaacctgagttagttgatacaactgtcacttagctgtctcgtccctacagggttgtcaataacaaaccaactaccaactacagaaaatagactacctgcttatgaccagagagggaaaatacactttcgaggtatggatactccttatactcttataccccccccccccccccccaaaagcttatgaggggttggaagaatgtcttttaactactttgaagcttggatctg

SEQ ID NO: 94028 - DNA, 312 bp, Glycine max
  Clone ID: PAT_MRT3847_5591C.1
gtatctattgtgtgatagtgtgcagacgcaactggctctgcttatattgtcgtcctgtgtggagtctagttttgtctctcacctgaaaacaaaatgcttcggtggtaacaaaactcccggaagctactcgcaatccttcaccagcagcggtggctgtgcgacaaaacgaaacttgacctactctaagtcaacattcaccagaaaccttgcccaagtgattagcaccttaccaggctaaacccaactcttctgaaataaacttgctcttatcgaacggaaccatttcaaaaaatcgctactgttccaagaacc

SEQ ID NO: 94029 - DNA, 2041 bp, Glycine max
  Clone ID: PAT_MRT3847_55920C.1
cccacgcgtccgctcacgcggccgcccacgcgtcgaagcacgggtccggcaagaaaattaaattcaacatctctcttattctctcattctctctctacttctcaaagacgcacgcagcgttctaaaaccctaatcgggtatgtgcaaagagagctttgtagcacgtgcttaaggtatgttttaaacattgcttgtttagttggttccttttgatgtcatggtggcattgtgatgcaaaatgtgtgtgagctcatactgagaaggagctcatctgctaagtccatttgaagaggatgtatggaagggcatcatcaggtcttgataggtttaagaaggctcagagcttggaaccattctctgtttctgtcaactcttcttccagaaatggtgcccaaccctctactaaagtagttgacccttcctctgctttgcctccacaggctcaggcttcttccaaccaaccccaacaacatgcatttcagaagactgtaggagtggaggcggccccattgttggggcagaatcagcaggcgactcaggttgggggagggcagtcgacgtggcagccgccggattgggcgatcgagccacggtcaggtgttttttacctggaggttttgaaggatggccaggtgctagaccagattaatctggacagacggaggaatatctttgggaggcaaatccagacctgtgattttgtgcttgatcatcaatctgtctctcgccaacatgctgcagttattcctcacaagaatgggagcatatatgtaattgatttgggatctgcacatggtacatttgttgcaattgagcggttgaccaaggattcgccagttgagcttgaagtgggacaatcgttgcgatttgctgcatcaacaagagcgtacatattaagaaagaatgatgcagctcttttccctcggcctccaccaccaacagagattaatttcccaccgcctcctgacccatctgatgaagaagctgttgtagcgtataatacgctactgaatcgttatggcatcaacaaagctgatctggtgtccaaacctggtgagtctggtagttcagtaagtggcaaaaataaagattaccaatctgaaagaccagctaagagaattaggaaaacaagagttgccttcagggatcaagttgggggagagttagttgaggttgttggaatttcagatggtgcagatgtagaaacagaacctggtccagttggtgttaaagaaggaagtttagttggtaaatatgaatctcttgtacagattactgtaataccaaaggggaaagagcagtcctctgtcaaggaggcagattcatccccaaaaggtgtgactgataaactacaagaagtcttgaaaaagatcaaaaccccagtcaaaactgggatttatgatgacctatatggagaatcattatctgtcaaagttggatcttcctgggcatattcacctgcactcggaactggtgaacgggctccagataaggaggatggtgcggggagcggaaagtcacctgttgatggagacgatgatgatttgtttgggtgactattcaacttatgcagactgggttgtgagataaatttgtagtagttctgtatgagtttaacatcgtagggagttgaaaacatgcaaaatattatgttgcatgcttcttttgtcatcgggagttaattgttcctaacgaatccataattgttgatgttttccgctgcatgcccccacttacactaaaagacagcaggttcatggttaaacaatgtgttatccttgtatggacccattaaatagctcatttaagtagtggttttgtccatactttctagtatgcacatactagcatgtcatcactaataaggattgactttctagccacatggtcacgaaggagcaaatgttgatatttgagtattttgtaccacaaatccatttgctgcaactttgaagcgtctattcaaaaaagggtggtgtatttatagttttacaacaatgaagcgtgtatttaaaatttaaaaaaaaaaaaaaaaaaaagg

SEQ ID NO: 94030 - DNA, 1283 bp, Glycine max
  Clone ID: PAT_MRT3847_55921C.1
cccacgcgtccgcccacgcgtccgccagtcaccaacaaaacaaaatccaatggcgccgtctgtcgcaatcaacggcgctttccccagcgccagagtcactcctccttccgtcaccggccgattcgccgccgtctacagcgaggtccaaaacagccgcatcgaccacgccctcccttttccctccgttctcaaaaaccctttcatcatcgtcgacggtccccaaagctccgccgccggcaaccctggcttattcaaatggttgaaactgagttggagaagagaaagcaacagggcacatataaaggaggatttagggggcagtcccactttttcggctatgaagggagatgtggcttgccaactaattttgattctacttactgctatgcattgggttatggtgctgcagccctccttcaaagtgggaagactggattaatatcatcggttggtaatttatgtgctcctgtagaagaatggactgttggtggaactgcactcacttcattgatggacgtggagaggagacatggtaaattcaagcctgtgatcaagaaggcaatggtggagcttgaaggggcacccttcaaaaagtttgcctccttgagggatgagtgggccctaaaaaattgctacattagtccaggtccaattcaattcactggcccaggatctgatgcaattaatcacactttactcttggagcttggtgcacaagcttaagacattctgaagcctttttgatggtggcaattcatgttttttgggaactactacaaatataatagaccggagattagtcaagtgattgtgtttttcactttggaactttgctagagaatagtttatgctttatcaacatcatcgacttatatttatgttttgggaatatgtcgttccatgatcttttagttcaatgtttaatcgtctcgtcatttaggtacggtaatagtgatgtaaataggaggttgagacatgagtacctgagtgagaaaattttaaggtggattgtgtttgcataagatatggaaaaccaaatggtcctgtttcagtgctttgtatattggaactctgcgaggttgaccacggtaaccacagtaacgagtaatgtttctcgcaatttactcttgttttatttttctccatagcattcactactagatttttgtaggagtttttgaaaagtttaatagtttgttttctagaaattattatttacatacatttgttcaatgtagaactctggctgttatggtttatacatttacttcggctttaattca

SEQ ID NO: 94031 - DNA, 151 bp, Glycine max
  Clone ID: PAT_MRT3847_55922C.1
ggattcaacgaggcgtcgatttcatatcggtatgggtgatgaatcaacacgagtcatccctattactgcgtctgccatcagcactaacccttctctatcgtgagatgtccgcttactgcgctccacgtctcatcacctgctcctgtactca

SEQ ID NO: 94032 - DNA, 602 bp, Glycine max
  Clone ID: PAT_MRT3847_55923C.1
tagctagcatatacagatggatcaatatctgtcatgctgtctagtgtactctttccatcttctagaagtttcttgcattccttttgatcaccttgctcaagctttaatattgctatttgcatcttaatgtaaagaataggttcttctatgcgctgctctctagtatcttgaagtttctgaataacccctccaagataaccaaccgcagcttctttctcagcatactgccgagaaactataacagcgaaatgcgcaagcttgagaaggttgattttggtctcaaagtctgtgatgaaattgtgatataattgtattaatgcatcaccggcctggaagacggcgagagccacgaactgctcaagcttgagggtaagctggtgccagagcttgttctggtatagatccgccagcgaattgtaccaatcggagagctcaggatgcgcgttgcgcagcgattccaagtattgcagagcagccatggcattaagaaaaaaaaactcgatagcactgcgtcccctcttctatttttttttataccctagtttctttccccttctgtcgtcttctcgcagccgtaacggacgggtgggtcgaccccggga

SEQ ID NO: 94033 - DNA, 1853 bp, Glycine max
  Clone ID: PAT_MRT3847_55924C.1
gttctatgcgctgctccatagtgtctagaagtttttgaatctcctccactatcactttgttaatttcacacagtaactttgacaccatctcattctctctccatcaaaacatatatcaactagtgccatctttcacaaaaaagaaatttctgaagtgaataaaaatggccgtatctaagaaaattccagatacatagtttgtcatcacctctaaagcgtaaaaacagccctgtttccaaccaagttaccatgtctctaggtatgcaggcatagaactaacaatttctaagccaagtacaagggactgctctttccagcaatcattcaaaaagcaaatgaagcatataaagttagctacattcattgcccatgtcacttggaagtctcttcatcttttgtcgccttaggatgtattcccttcaacttaagaaattgttacaaagaacagaaaccaaattaaagaaaaatcacgatccaattagatcaggtgtttcagcctcaatggacagcaatgcagtgtgaacttttccagtccaactgtccagtcgatcccgtaaggatttgatctgttgaatacccagaactcttggctgcacccaggaaacatgcactgtgccctcaacttgatcaattataccctcaattagatgaacagataggcttttcataaggagatgctccacattctctatagaaagttttgtgcgctctgcaattacactcaagggaatagttcgatcttccgaaggccgactgaatataatctccatcagacacagaatgttgatcttttccaacaacttttgctcattttgaactagtgcttggttgggctcttaaagcagcattatgcacccgacaataatgcttgatatcgtactatagtcaccagaattgaaatgcctgcagaatatagtaaagcaattcctccttcttttccccataagggctcttaattataggaatgggcaagtagctctccaaaaagttgtagatgttatccccaagaagggtcagagagggcacaaatcgaaatgccagatccagcttgaatgaatcagagagagattccactgatgtgtatgccaaatagagaagggcacttttgtagaactcagcaaattcttggcatgtcttatgaaactgagatgatacccagtaatagctagcatatacagatggatcaatatctgtcatgctgtcgagtgtactcttcccatcttctagaagtttcttgcattccttttgatcaccttgctcaagcttgaatattgctatttgcatcttaatgtaaagaataggttcttctatgcgctgctctctagtgtcttgaagtttctgaatgacccctccaagataaccaacagcagcttctttttcagaatactgccgagaaactataacagcaaaatgtgcaagcttgagaaggttgattttcgtctcaaagtctgtgatgaaattgtgatataattgtattaaagcatcaccagcctggaagacggcgagagccacaaactgctcgagcttgagagtgagctggtgccagagcttcttctggtacagatccgccagcgaattgtaccaatcggagagctcagggtgcgaattgcgcagcgattccaagtattgcagagcagccatagcagagcggttcttgattcacaccaacccgcaatcccactggtcgcgtgggcggacgcgtgggcggacgcgtgggcggacgcgtgggcggacgcgtgggcagagcagccatagcagatcggttcttgattcactcccacaggcgataccccccgtgtaccttctttattctctttttcataccctaactccttttttcttgtttgtttttt

SEQ ID NO: 94034 - DNA, 3095 bp, Glycine max
  unsure (1)..(3095): unsure at all n locations
  Clone ID: PAT_MRT3847_55925C.1
gcttactatttgaatcgaaacgtgtcagctgccgctgggaatccactaccggatgtcactgactacattcggtggctttgacatgatttaatctccatcagacacagaatgttgatcttttccaacaacttttgctcattttgaactagtgctggttgggctcttaaagcagcattatgcacccgacataattcttgatatcgtaccagatcaccagaattgaatgcctgcagaatatagtaaagccattccacctttgtccccagaaggctcttaattataggatgggcaagtagctctccaaagttgtagatgttatccccaagaagggcagagagggacaaatcaaatgccagatccagcttgaatgaatctgagagagattccactgatgtgtatgccaaatagagaagggcacttttgtagaactcagcaaattcttggcatgtcttatgaaactgagatgatacccagtaatagctagcatatacagatggatcaatatctgtcatgctgtcgagtgtactcttcccatcttctagaagtttcttgcattccttttgatcaccttgctcaagcttgaatattgctatttgcatcttaatgtaaagaataggttcttctatgcgctgctctctagtatcttgaagtttctgaataacccctccaagataaccaaccgcagcttctttctcagcatactgccgagaaactataacagcgaaatgcgcaagcttgagaaggttgattttggtctcaaagtctgtgatgaaattggcagtttaagcaagcggaagaaacagctaagaagctagacttggatgggctcgttgttattggtggagatgactcaaacacaaatgcatgcctccttgctgagcatttcaggagtaaaaatatgaaaactcgtgtgattgggtgccctaaaaccattgatggtgatttgaaatgcaaagaagttcccacaagttttgggtttgatacagcatgcaagatatatgcagaaatgattggcaatgttatgatagatgctcgatcaactggaaaatattaccattttgttcggcttatgggacgtgcagcttcgcacattacactggaatgtgctttgcaaactcatccaaacattactattattggagaagaggttgctgccaagaagatgacactgaaggatgtcactgactacattgttaatatcatttctaaaagagctgaggataattataactatggggtcattcttatccctgaaggtctaattgatttcattcctgaggtccaacaccttattgcagaactcaatgaaattctggcccatgatactgtggatgagggtgggttatggaagaagaaactcactgatcaatcattaaagctttttgaatttttacctaaagcaattcaagaacaattaatgcttgaaagagatccgcatggaaatgttcaggttgccaagatagaaacagagaaaatgcttattcaaatggttgaaactgagttggagaagagaaagcaacagggcacatataaaggaggatttaaggggcaatcccactttttcggctatgaagggagatgtggcttgccaactaattttgattctacttactgctatgcattgggttatggtgctgcagccctccttcaaagtgggaagactggattaatatcatcagttggtaatttatgtgctcctgtagaagaatggactgttggtggaactgcactcacctcattgatggatgtggagaggaggcatggtaaattcaagcctgtgatcaagaaggcaatggtggagcttgaaggggcacccttcaaaaagtttgcctccttgcgggatgaatgggccctgaaaaattgctacattagtccaggtccaattcaattctctggcccaggatctgaagtaattaatcacactctactcttggagcttgaagcacaagcttaggcataatatgaggtctttgttttgacggtggcaattcatatttttttttgggaactatttcaatatatatttgatctgtgactagtctagtgattgtgtttacttgtgaaattaatcagttaatgattcttgagttggttgatgagtatgaattggtcaactcaaaagttgcatacaacatcggcaatttattttcatgacaatcattccgattttgcctattatacaagtaactaaaagctttatcccaatgaggtcagttacattggatagctacgtagattgcattaatgcaattgagtttgaataaagaccaaaatttcaagaataattttgggaaaaggtcgtcccatggtcatttagttcaatgtttaatcgtctcgccatttagggacggtaaaagtgatgtaaataggaggttcaagcatgagtacctgagtgagaaaattttaaggtggattgggtttgcataaaaaatggaaaaccaaagggtcctgtttcagggccttgtaaatgggtgccctcagtagtgagtaatatttctcccaatttactcttgttttatttttctccatagctaactactagatttttgtaggagtttttgaaaagtttaatagtttgttttctagaaataataatttacatacatttgttcaatgtagaactctggctgttatggtttatacatttactttggctttaattcataatagataaatatggataatagtttagggagattctagaatgagtttgttataattctgttagagattgtgagtatctctctctctatatactatgtaatcacaatgaaagagcatcaatgaacaatcagaaatattatctttatccctttagctgtaggattaggagtaatggtagaatacatgtttctctcacctatcacattatcccaacatacagaagtgaccaaaaaagagagaaatttagtgtacaaaccggtatccacattgtcaatttttccaataaaagaaaaaagaccatataaattccatatttagcaataacattatccttaaaacttccatatttaggccctcacatttatcttcanagtgcatagcggcaagaatgccgtgactcaccatcataccttacactttgagcagtgcag

SEQ ID NO: 94035 - DNA, 211 bp, Glycine max
  unsure (1)..(211): unsure at all n locations
  Clone ID: PAT_MRT3847_55926C.1
gggtttgggntnntnannaaccaaancaagaagcatataaagacataatgggattgaatgtgttctctctatatgagatcctccatttgcaaatcagagtaattagaacgcaaaaaagcttgcaagcacaccactgaaggctatgtatatttcatgggggtttacaattccaaaccctggtgctgaaaataaccatactcgctttggatga

SEQ ID NO: 94036 - DNA, 610 bp, Glycine max
  unsure (1)..(610): unsure at all n locations
  Clone ID: PAT_MRT3847_55927C.1
agttgtacccttgtggcatcgtgataaattcaatagtgacttcgaaatagtttatctataaaatctaagaatgagttattcaatattttttaaaaaagtgttttaactttttattattatcatatattataccttcaaaaagaaattcatattttatactcaagaattagatgataaaaaaatttaggatcttgctaattacataaaaaaattgtattgaatattacattaaaaatacattataaattatggcaaaaagatattaaaaacacttttgaaaaaaaaatcatttttaattcattaaccaacgtgtatttgccaaaagtttatgttaagaaatttataggttttacttttcaataaactttattctttctcaagaatttaataacggaaataaattcatatcttacactttctgaataaaataaatcattttcttatcatttaaaatttaggaaattttgcctaataaatttacgcttttatgtctgcaatatataaaccttcatagtaacagttttaaaacatttctttacatttntgaatgtttgccaaaacttggtttgttattttattttgtaggttgaaatatactntgattttttta

SEQ ID NO: 94037 - DNA, 253 bp, Glycine max
  Clone ID: PAT_MRT3847_55928C.1
tgacgtttatatgctacaataaatccaaacactcagtccccacctgtgtctgattaagttttcccatgtatacatttatgctattctcatataataattaaactccttcactgcgcctatacattttactctcattttaaccaatataataaaaatccaacatgccatcaaggctttatgcacaacgccgcatcaccaaacccataaacctaagagatatagaaatgtaacagctttattaaccatatccctt

SEQ ID NO: 94038 - DNA, 300 bp, Glycine max
  Clone ID: PAT_MRT3847_55929C.1
ttttaagactgcgaattatggaaacctgcttgcacaaaagcaatgactatgtcatttaaaccaaacctcgtgttctgatgcatggagtttggaatttctgaagcgaaccgggactcacatgagatatcatttgtgataactggatggactgccactccaatgcaggatgttcaggctacaacttgaaaaggattaatttcctcacatgaacagctgttcccaggaccctaattgggttaaaaatccacaaaaaaccttttgtgttaaaaaaggtggaagggggaaactgactttccccca

SEQ ID NO: 94039 - DNA, 568 bp, Glycine max
  Clone ID: PAT_MRT3847_5592C.1
ccgaccagcacgggcagcgtgtagtagccgaaccggcgccggggcgcgggcgtgtagatctcgatgcggtagtcgaagtcgaacaggcgctcggcgcggtcgcggaaccacaccaccgggtcgaacggggtgagcagagccgcggcatcgacccgtcgcggacgccccgcgtcgcggtgcagccacgctctcgccggacgaccggcgatctgccagccctcgacctcgacggggatcagttctcccgcgtcgaccagctgacggatgccggcgaggaccgccggacgatcgcggatgcgccagtaatcggcgaggtcggacgccgtggcgatgccgtacgcgacggccgcccgccgcgtcagctcggtgatcgcctcggcgcgaggaaccgtcgtctcgagcgcggacgccggcaggacgtcggacgccagggcgtatcgccgctcgaacccgcgtcgcccggagatggcgacatcgccgaacagccagaggcgttcgagaccgttcttgacgtcgtcccagccccaccacggaccgcgtgatccgctgcgggcgtcgtggtcgatct

SEQ ID NO: 94040 - DNA, 257 bp, Glycine max
  Clone ID: PAT_MRT3847_55930C.1
ccgagggatgctcctttaggaagaatgtagactgagtggattgccactctttttttgtttgtgacttgtagagcttcacgtaatgccttcttttgttttggctatgacgactatcgctaattttgctaaaccctctatactggggcacccaccctctccagcacctgggggagtgcaactaactgagcatttctctttactgcattggggggggggtggctctccttttgtgcttcatgactgctattgtgtgtctc

SEQ ID NO: 94041 - DNA, 1640 bp, Glycine max
  Clone ID: PAT_MRT3847_55931C.1
atcgtcccattcggctggcggtggaatggaattactctgaatacaattttgactagcaataagtgcagcacagagagaagtgcgaatcagagagagaaagagaggcatggctgctgcaggtccagaaaacgtccctcctttcatcgccgctcagcttagccacctcctctcccacttcggtcttacagtcaaggttgaacaaatgtggtcgagtgacaaatacaactccacccccctcgatcgcttcaccctcctcatcccctactgcttagacttcatcaaatgggatgttatatacgacgcggaatctccgaacaccgcccccgacgttatctttagccccgaagacgacgatttccacccctttcacatgtttccttcctcctcggaacccgctaataactgtttgtctgattggaactacaaagaccccacgcgtctcttaaccctaattcagtacttgagggatcaatatgtgctttatcagaggaagcgcgtcggagaagttgacgacgaccggttgacattcgaaatcagtactatcttgtccagggagggaatagaaatgcatatgagttctggtgctgagaagtcagaggaggttaaatttgctgtgcccctactggacatgaatataaacaagatggtggcttgctgtccctggagatattcccagaggatatacttacaggttgtatatcctgttggaagaaaatatatgtcagtgccttcagctcctcgcctgaagttagtatcttctcctgagctgaaagctgtattttccattgatgatgtcaagctacctccttggttggacgggatgtgcttggcagaatatcttccaaatctagaagaatatcttgggaaacaggtcttagaggctgtttcattaattgaagttagaaggcacttcattgaagcattatccagtccgttaggaaggccagttgaagctgatgctgtcttttgcaggaaggcaacttttcttgctgcatctggtgttttctcattcctggtacacctcctaattccaactcaatttccaaagcaacagccggctattatgcttcaaagttcacagcattttaattcgcaaatggcacctatgaagtcacgtgttatgtctgattatccatggagtccgagatgggaaccatcaatgatggctgagcgtatttgtgattttctggcagatgaggccttgaacttcaagagacaatgcagtgagggccaagttcagtagtaacaaggccatggcatgttcagctcaatcccaatgtcgtggcaatctctagacctgttcattggaaatgtctttttgctcctctttgtcaacgcaatttattttggatccagtttaaatgaattgccatgggaatttttcttgtattttcaccatcgtcaaatttttgtatctcgtagtgtatgttcttttgacaaaaaaatttactaggatgaatggccttggtatacttatcgaaaggcttaaatatgtttttggttcctgataaatatctattttttgcgtttggtccctaataaattcttcttttggatcaggtccctaatatttgaaaaattggcttaagttcctattgttaaggagtccgagatgggaaccatcaatgatggctgagcgt

SEQ ID NO: 94042 - DNA, 281 bp, Glycine max
  Clone ID: PAT_MRT3847_55932C.1
cccacgcgtgcgctcacgcgtgcggaggcgatctggcttccagattcgactacatgcgttggtgttccttattagcacaaattcgctcactgaacaacggggttagttaactgttgagattaacaaggcgttcttagtcacacatgaagaatcattgcatttggtgaagctatacatgcgcacttgtgctactgatcgctcacgaccggtcctgctgcctatttggagcaatatcttataatgcgcaggctgtcgcaaacctggcagactcgatagctgtt

SEQ ID NO: 94043 - DNA, 606 bp, Glycine max
  Clone ID: PAT_MRT3847_55933C.1
caaaaggaaagggttaaaactacactccttctttcaattactggatttctggggtcgaatttaaataaaacaggccagtgcatatcctatatcagagcagaattataggtcaaaaaccccccccgcccataataagaaacttttttcacaatctaaaataatggaaatgattactttctacaatggccttgaagcttgcaccaactttggaaaaagaggacccaaatccaggtctctcgtaaaacataaacaatttagaaggcccaaacttgcgggggaaaaaagacgctgagtgaatatcaactcacacaataatctttgtattcataatgccatcctttcattatgaacgtttggtccctgttggcccagtcccaccattctggcctattacaacaacttatttgtgctcaccaacgatctaattccctttgtaaaggatggctttgccaaaaactcacaggcaagatgccgaataggggctggtctaagtgagcccataacaaatgttttattcaaaagatctgctgcaacaattgctccatggtcaataactggcgtgccaagcgctgaaccttgagcatgataacgaaaggccgtttcaaa

SEQ ID NO: 94044 - DNA, 273 bp, Glycine max
  unsure (1)..(273): unsure at all n locations
  Clone ID: PAT_MRT3847_55934C.1
ncgntnttttttcgtncatgaacgcngnantcggntcgangnttcnngcagnttctnggntcttctcnacanagactccanntntctggngctccatnccatntatccttnctnnatcattacatcganctccaggtcntgtcttgcatgcatgnngtncttcnnnatgnacggctcccangngcctactctgggtcaaatccacgaanagcaaggtcgtngnccatncnntgtcnnggtcatcgagnatcnngtccgccgcnagagtattgt

SEQ ID NO: 94045 - DNA, 306 bp, Glycine max
  Clone ID: PAT_MRT3847_55935C.1
gagtatcacaacttggtttacaccaataattggaagacaaatgttatattcactctattttttttttaagtacacttccattttattttaatttaaattttttactaccattaatatttcgaaaagtaatttttaagatggggggtgagtttattcaagttcaaaaagtaattttcggaatgcgaatatggagggagattgggggggagagagcaggagcggggaggggttgagcgtttgagatgtagggggggtccgaatgttagacagagaggccaatcagacaagaaagacgggaacaagata

SEQ ID NO: 94046 - DNA, 401 bp, Glycine max
  Clone ID: PAT_MRT3847_55936C.1
gcgaagcataggtcgacgcgtacaggttgagtgcgtgaccagcaacgttgcctgacagacagccggctactgtcaagggtgatgatggaagtccggtctatgaagctgctgcatttgctaagaattcgagtcacaccgtccaatatagcatcttcaagagtggcgacattgtagcggtgcatggctacctgggactggacgatgaggatgtctatcttgaagacagcttcatgacagagggacttgtctggtttacaggcgggagatgactacaaccgtggggatagatgcacaaatgagacactggttgctccatcagaggaaggagatcggtacgccaatgcacgcttaagaggggcggttgcatccccgtatactaaagctgatgaggcttatgtgac

SEQ ID NO: 94047 - DNA, 291 bp, Glycine max
  Clone ID: PAT_MRT3847_55937C.1
attcaaatttatagtatctatatcatttcggatattccaaaaggttcagattgccctactgaacacgattccagagcctacagtattccctaacatttcaactgccttcccgtgatatggactatacacctgcgaaatacccctttattatacatacactatgcatagtctgtttctataacattctaattttttaacccgaactaacttcatcgataggaacatgtatcaggtcactctctttctctctttaggaattaacttcccttacaaattagatgatgaaaagga

SEQ ID NO: 94048 - DNA, 431 bp, Glycine max
  Clone ID: PAT_MRT3847_55938C.1
cccacgcgtccgcccacgcgtccggcttttttcatttgggcacacatggggttaaaaagttaatgggtctttaaatctttttatattattttttatttctacatataaaaaaaaaaatataaaaattgttgtattggactgcccataactttatgtcacgggctacttatatattactttcactctctctcctattatgagtcaaagctcatgaaaaaattgttgtttttttacaggaggggcttgtggatatggaaatttgtacagccaagggtatggcactaacactgcagcactcagcactgctctattcaacaatggcatgagttgcgggtcttgctatgagatgaaatgtgacactgaccccaaatggtgcctccccggtagcataatcgttactgccacaaacttttgcccccctaactttgcat

SEQ ID NO: 94049 - DNA, 911 bp, Glycine max
  Clone ID: PAT_MRT3847_55939C.1
ctgcgagaagacgggggttctaagagaactaggttaaggttttactgagaagaagatggagcaggaacacccaaaccttgaaagcttcttatcatgggcagcacagcttggaatatcagactcaacaacacgcaccaaccaacctcagcactctctttcctcatgtttgggttcttctctatctgtctctcattttcctcattctggcgggagaggtttgggtgctgtgagagaccttaggaggggagagattgttctcagagttccaaaatctgctttaatgacaagagagactgttatggaagataaaaagctctgtgatgctgtcaatagacactcttctctctcctcagctcagatattgattgtttgcttgttgtatgaaatgggtaaaggaaagacttcaaggtggcatccttacctcatgcatttgccacacacttatgacgtactagccatgtttggtgaatttgagaagcatgctctgcaagttcagtttatattagaaatttaagttaatcttgttaggtggatgaggcaatgtgggtcacagaaaaagccatgcttaaagccagtggatgaggcaatgtgggtcacagaaaaagccatgcttaaagccaaatcagagtggaaagaagctcattctctgatgcaagatctcatgtttaagcctcagttttttacatttaaggcttgggtttgggctgctgcaacgatatcttcccggacattgcatatcccgtgggatgaagctgggtgtttatgccctgtgggtgacttgtttaattatgatgcacctggaatagaaccatctggcattgaggatttagatcgtttgctatctaacacttccatccctgatactatcgtattgaatggagacaagaatattatggtagatgcagaacagc

SEQ ID NO: 94050 - DNA, 728 bp, Glycine max
  Clone ID: PAT_MRT3847_5593C.1
ctcgttgatttctctctctccgacaacccaattccagagagagagagaggattcattcaaccattccccctgatactcagtcacacctggttgtagttctagtgagagaaagtgaaatagaaagaggagagaagaagaagaaataccaaaacagaaaaccaatggcgagttttagggttttttgaacacactgcgatgatggaaatgcctgccagaagatccaactactcgctcctcagccaaattcccgacgaccagttctccgcctccgccgccccctcctcctccggcgacggcaagtccgcccgcgccggtaagtccgaccgcgccgccttcgactgggacctcgtcgccgatcaccgggccgccaaccggatcggaaacctctactcctcgatcggcctgcagcgccagtccagcgggagcagctacggcgagagctcgctctccggcggcggcgacttttatgctccgacgctctccacggcggcggtcagcgacgtcgacgccttcggatacctccacgacgagcggagcaagttctcggaggtgggcgccggcgaggatcgccggctcctcctccgggaagagctgggcgcagcagacggaggagagctaccagctgcagcttgcgctcgcactgcgcctctcgttgcacgccacgtgcgccgatgatcccaatttcctcgatccgggtgccggacgacgccgcgccgcggctctcgtcg

SEQ ID NO: 94051 - DNA, 196 bp, Glycine max
  unsure (1)..(196): unsure at all n locations
  Clone ID: PAT_MRT3847_55940C.1
tttcctttcaacaccccttgtttatnttgtactgaatgccacccantgataacaatttntatcttggagttagcntttatggtaggtttcctctttataacncagtgtatnaaatgtgcatatttnatgtgataattgttgtganttatttnttgganngaaagtataaaaaaaatgaangattagttggatgttg

SEQ ID NO: 94052 - DNA, 521 bp, Glycine max
  Clone ID: PAT_MRT3847_55941C.1
ttgggggggggggggggggggggggggataaaccaagatgataagatgggagcatagggatagaaaaatatgatggctgacaacaaggtaagtaattaggtatgccgataaaataagcccctagatctccaaaatgattggcggataagaaagtcataaggcaacaaaatgatgattgtagtaaacgggttgcaaggagcttaataatgatcaattaaactagttaagcttcgaagggaaagggaagtaaaatgcgccacattaaaccacttcaaataacagcagatgagtggtaaatcgcgtatgcgtcttaaaattgatcataattagattaaacggtaaatttggggcggctaaataattggaaggtaataatgatttggtagttacactaactcgaggcgaatggcgattattggctcggggtgaatatacgaaagtatacgggtgggtttgcctaaggaaaccccctaatataagttacaacctttttagtagagatggggctttgcagaacgcta

SEQ ID NO: 94053 - DNA, 715 bp, Glycine max
  Clone ID: PAT_MRT3847_55942C.1
gcttcagcggctatgcctcgttaattcttccgatcttatttcacatttcatttccccatttttctcgcatttccttcaattagggtttcttttttcttagctgttgcaattgattttcattttactcacctggttcggttttcacatttgtttaaacttgttacacctctgtcacgattgatgtggtccagacttgatgctttgatcccatcattaatgaccacagtgaagttcaaatgatgcttgtttcctggccatttctatagttttgtgacgtgattgagaatgtggaactttgcatctagtttaattgctggaagtgtgggtctgaaaaatgattctccaaaaccaactcactctgcttcagaattttctgatgacgagacttccatggttagcagagaggaaaggctagaatgcccaatatgctgggaatcctttaacattgttgaaaatgtgccttatgtcttatggtgtggtcacaccctttgtaaaaattgcatccttggattacaatgggccgtggtgaatttcccaacactgccaattcggcttccgctttttatctcctgcccgtggtgcaaccttttgtctctccgtttagtttaccagggaaatctgaaattccctcacaagaactactttcttctatggatgggtgagaacatgaacggtgatagagtgaagtcacattctactgtttgcggggatcatc

SEQ ID NO: 94054 - DNA, 1148 bp, Glycine max
  Clone ID: PAT_MRT3847_55943C.1
tacggctgcgagaagacgacagaaggggacgcacacatggtgctggcgctgtcactctggtcttctcctttctgcttcacccattctctatttttgcgcgcaatcgaatgtggaactttgcatcgaattgcattgctggaactgcgggactgaaaaatgattcaaagcctactcattctgcttcggaatgttctgatgatgaaaactctgttataggcagagaggaagggctggaatgcccaatatgctgggaatctttcaatattggtgaaaatgtgccctatgttttatggggtggccacaccctttgtaaaaattggaaaaaaaaaaattcaatcttttaattctcactctatcatgatttttgcgttcaattgcttccaccttcggtttaaacttggtacacctctgtcacaaatgatatgtttcaaacttgatgctttgaccccgtcattagtgaccacattgaggtccaaatgatgcgtgtttcctgactatttctatagtattgtgacttgattcagaatgtggaactttgcatctagtttaattgctggaagtgtgggtctgaaaaatgattctgcaaaaccaactcaccctgcttcagaatgttctgatgatgagacttctatggtaaccagagaggaaaggctggaatgcccaatatgctgggaatcctttaacattgttgaaaatgtgccttatgtcttatggtgtggccacaccctttgtaaaaattgcatccttggattacaatgggctgtggtgaaatttccaacgctgccaattcagcttccgctttttatctcctgcccatggtgcaaccttttgtctctccgtttagtttaccggggaaatctgaaattccctcgcaagaactactttcttctttggatggttgagagcatgaacggtgatagagtgaagtcgcattctactgtttgtgggggatcatcaaccagtctggccaataattaaagacagtttaaccaatggaagccaagaaggccatggcatcccttggagagggcaagtttgccatacagagtcttcaagttccaatcaatatcatggcaataccagtaattacctaagtatagaaacactgcatacatcactgcggaagtcggttggttttatttgttcat

SEQ ID NO: 94055 - DNA, 288 bp, Glycine max
  Clone ID: PAT_MRT3847_55944C.1
aagaggggacctcatggccgggaaaagaaaacccatgacccggggtgggaaaaaaccacccttgcataaaaggtaaaaccccaccaccgggggggggggcccaaacatttagagtaccccccggcagtgggggccaacccccccccaagggcacatctgttcaaagccaacttggacgagatgatcacccccccccttatcatcccctattgcgggaggccacaccagaaaggcgccgaaaccccccccgcccgggggggtgtcataaaagggagccagccacccccc

SEQ ID NO: 94056 - DNA, 152 bp, Glycine max
  Clone ID: PAT_MRT3847_55945C.1
ctcatgtgcgcatgatttctctctctgcggtgccatgacgtaaccaacggagccatgcacgtcagcctcatttgcgatgcacgcaaccaccgtaattcacccgaagcgctatctcttcgagcagtgcctctggcgaatctcgcgctgcatct

SEQ ID NO: 94057 - DNA, 479 bp, Glycine max
  unsure (1)..(479): unsure at all n locations
  Clone ID: PAT_MRT3847_55946C.1
tcgggcatgtttgcatcttggaatagattggcaattttactttgtgatcaaattgtaatgtcataatgctgtattgttttgtcatttgcagtatgttgatagtgagattgtagttcaaggctaggcaggaagggtcccaccactgagttaataattttggattaacttttgtgctagttcatgagaatatgtaacatgcttaagtgcaattattttagtgtattctatattctcttttgatgcatcttgtccaaatcctctttaagttggcagatttttccctctatcgattatccaatcatagatgattcatattgaatacaagcatgcttaaagtgcaaatagagagagatattgntttttttttgttctcttgaatcgtgtggtgctactttctgtcgtagaacgtgaagtgtggtgaatctgtttgaagctgaattcaatgataataagaataattttcttcgtgcttttcattg

SEQ ID NO: 94058 - DNA, 248 bp, Glycine max
  Clone ID: PAT_MRT3847_55947C.1
ccgtcgggcaaagaggacgaccacccgccagagaacggatgcatatctaaagcaccagctctcactacctcagacacatgattcagctagaacaaggatgggcaagcacaatgacaagctcaataaactcacttcctactgctcattcacaaatatactcaatctcacatgaattaccttgcgatcagaatatctgcctcaacgcacttccccatattagctcaaccaaatactacgtttctataggc

SEQ ID NO: 94059 - DNA, 266 bp, Glycine max
  unsure (1)..(266): unsure at all n locations
  Clone ID: PAT_MRT3847_55948C.1
agnatcancanncccancgcgtgcagancanaggganacgcagccataggncgaagacccncgaggtgttanaggcgaattaagancnnaccataccccangtcacggttttnccgtggtgttcctgatnccaagatcaggattcacgatgtttgtatgaagaagaagggtnttgatgagtttcctgtctgtgtccatctggttacttgngngaangaaaacgtttctaggtgaggccctggaagctgntcgtattgtcttgcaac

SEQ ID NO: 94060 - DNA, 396 bp, Glycine max
  unsure (1)..(396): unsure at all n locations
  Clone ID: PAT_MRT3847_55949C.1
gggggggggtgttttttttttctattttcattcggttggcttgtatttatatattaatattatattcaaatgaaataaaaagatattaaaagatactaattataagaatttgaaagggaaattataaagtttttatatgattaatcaatttttttctaccgggggggggagaaaattggctcctttggnccnggaanagcnnccnncaaaaggaccgggggggcccagngaacgccccggcagaaganangannncnnngaanggagggnnanncgngnnnaagnaagcacgaaacccaacaagaaagngccggaccgggccaangncnaaggaangcaagaaaccanncggnccagnanaaagagggagaaacggggcncccacgggaagaggag

SEQ ID NO: 94061 - DNA, 239 bp, Glycine max
  Clone ID: PAT_MRT3847_5594C.1
cttcaatctcaattgctcgatcgcgtgattttcgattcgtgtttttatgattagatttttccgatagtttgcttgatccgtgttttattctgtttttacaagtttccaattctatgctttggtcgtatgccctgattcactctctgtttttattgtccgtacgatcttgagcacttagccgcattgatcctacttagttcgtgtgatttaggattatagctaattaactgtttgatttt

SEQ ID NO: 94062 - DNA, 988 bp, Glycine max
  Clone ID: PAT_MRT3847_55950C.1
ccatgcgtccgtaccaattcgccatcgccatcggaattcggcttgtgaagaatggtaatgctgaccaagcaagcctcaagcctcaaccttactaaaccctacactttaaccttactatactctacactgcaattaattaatcaaccatcatcgccatcgccatcgccatgggtcacgaacactccaagttgtcagaaggaaaaggatcgcgtcgtgcccgcttcaaagagcgtctgcgtcttcactttcgccgccgcagaagcggcaatggctcttccgatcacaagctcctcgacgccgataacttcgccggaatcgctctcctcgccctccttcgcgcggagatgaagttcaaggataaatggattgcgtgcctttccctcggagaacagactttccgtaccaacacctctgaccacacagacaaacctctttggaactctgaaaagaaacttcttttggaacagaatggggctcatgttgcaagaatttctgtcttcgagaccaaccgaatgtccagcaatactcttgttggatactgtgaggttgatctacttgaatttctgaccaaggattctgattctgacgtcgaggtattcaaccttttagatccatcagtgcctggaaaagtggttggcaacatttccatttcatgcactgtagaggatccgattgaaacggagaaaggcttcgttagacgcattttatctatagtggactacaatgaagatgggatgctttcactttctgaattttctgacctgattgatgcttttggcaatcaagttgcaaccagcaagaaagaagagctgttcaaagcagctgacaaaaatggagatgtgtgttgtgagcatggacgagttggcttcccttcttacttttcatcaagaacgggaaccattattgaattgctgtcctgtgtgtggtgaggttcttcagatttctgaccagttgaacagcatgatccacttaactctcttgtttgatg

SEQ ID NO: 94063 - DNA, 514 bp, Glycine max
  Clone ID: PAT_MRT3847_55951C.1
gggtgctggtatttgtaaaggatgggtttgggtcacagataaaaggttggggagtttgattacatggatatccaaccgaacttttgaatgattaaccatacttaaattaaaactcatcccatccatccagctcaataaacattagtataattgggtggaatagattgcatttagatatgaacatatgatggattaacgggttcagttgccacctagtcatccctaatttatttggaggtgcaaaataagggtaggactgatgtatccaagtttaacaggaactgtgtagcttggtgtttttggcgtggtgcaactcctgtctttttcctcctgattacagatactattcagcagaatagggaagttagaaggtttctctctgattagctcgttaaaattagccccaaaaaagactagaaaagagacaattttagagaagtatctaatatctaatgtgtatgaattcaaattcagcaagaatgcgttgtgctgaagtagtgctgacctggaaact

SEQ ID NO: 94064 - DNA, 303 bp, Glycine max
  Clone ID: PAT_MRT3847_55952C.1
agggtaataaatggaggatcaaaacaagatactgcttatctatggctactcaggactagtcaactccctgatcacactatatggtaagacttctgaattttagggtccaaacgctatgaactccttctaacaataaatctaataccaggaataaaatgctatgcttagaccaacttcaggtttttagatactgagaaacaccgatatattgaattagcataagacggctataccatatgatactcaactggcggaaacttataccattacactgtctacagtttaatcgcatattgagacttt

SEQ ID NO: 94065 - DNA, 303 bp, Glycine max
  Clone ID: PAT_MRT3847_55953C.1
ttttttttttttttttttttttctcaaaacaattctttatatttgggggggtttgtgcacaaaatccgcctaatcgacccttataagttcccccggttgcaggaaatctattaagataaagttacttacctttaacaaaaaaaggcaagtccccatactattttttggcgaaggtaattacatcccccaaaatttcctatccttttaactaaacaatgtttagtgaaccatacacttaaaaattttaaacgacccgattgtctttcgaatcctccatcaaagaaccataaaagcgttgtttgt

SEQ ID NO: 94066 - DNA, 1101 bp, Glycine max
  Clone ID: PAT_MRT3847_55954C.1
aaattatcaagatagtgcccccccatgtatatagagaatgttctggacaaggcatgatttttctacttgctatctttctatttttctttccctttgaatctatagaactaaaaaacactttaacccctgggagtgagaatctgcatcatcgaattttacaagcacaagccacaatcctcgcaaggaacagaaccgataaattctcatcaacatgttcggagtagttttcccgaaccggagcttccccatggacatctcaaccttcgctcaaatcgacaccttccactgggtcctcgacatgaacaccttcgtaggcgaggcgtacgaccaggtccgcgagctctgcatcttcctcctcaacggcttcacgctgccgccggagaaggcgctcgccgtctacatccagtcgccggggtcgccgttcgtgttctgcggcgccgtcacggtggcgcggccctccgccgtgctgacgctggcgtggccggagccaggcgccggagggccgctgcagctgacggcggacgcgcagccgctgtcggcgaagatcggggtgtcggtggaggatctggcgtcgctgccgtcgctcgacatggcggcggagaagcgaatcgaggggctggcgatgaaggtcggagagaatcttttcaatttcatgcaatcgttttgcggcgtggacgggtcgaagctggttgttccgatggatatcttggagcggtggttcaagaagtttcaggaacgggccaggcgtgaccctgagtacttgaagggtttcgcttcgtaagtctttattttttatctgtaggaatcggcgaccgtataagggagtttacaacaattcaaccaacttagctagattctcttcctttgctttgtaattctgaaattgaaaaagggttctttttaattttttgttgctttttttttgtaatttaatggtgtaagatgataatgatagataatagaaatgggatatcatgttgtattgtgatcctaatttagaagtgtttttctgaaaaagctgtgcttcaattcatgattttgtgcccatactgaaagtatttatgggggatttgttttggaaaaaattgaagctttagtgtt

SEQ ID NO: 94067 - DNA, 335 bp, Glycine max
  unsure (1)..(335): unsure at all n locations
  Clone ID: PAT_MRT3847_55955C.1
aatgggggggggtgtcatactttcaattactaanggcgcatccctacaaaattaatctaaactttaattataaaaccgaccactctactatatccctccttctacacacttctcataatatcccacctataatcactaacactttctcacaatcacaaacattttctacctacaatccattttaatataattcttaaaaacctaatctttatctcctctttcttatttctcttcaccacttaattccaatcctttgattatctttctcaaactttttttatttaaaaatttttatcctccatattttacaataccttttcaacttcaacaatctt

SEQ ID NO: 94068 - DNA, 298 bp, Glycine max
  Clone ID: PAT_MRT3847_55956C.1
gaaatccaccatatatatgactaactgactgtgcatattgatcatatatatggtggatttccttccctggcctcttgctggatgacgcaacttccttctccttccatcttcccttattcttatggtgtacatattcaccatatctatgtacaaggaattatgctcattatccttttacactccgttctcctagcttcaacatgacatatagcaaactatttgccttttcaatcgcccattgttctaccattacagttttaccttttgtacttgtcttgactgtcctttaactattcat

SEQ ID NO: 94069 - DNA, 185 bp, Glycine max
  Clone ID: PAT_MRT3847_55957C.1
tattattacagggggaccaagcacgatagcttctctgatgatgaacatgatcgatcacggcatcatcgtcataaatatgatagctgctgctttgatgatgagcaccactatttcatacaacacgttggatgatactgtcaacatgacataacatttctatttaagaaatatttcattatatacat

SEQ ID NO: 94070 - DNA, 232 bp, Glycine max
  Clone ID: PAT_MRT3847_55958C.1
cactctatatatcaaacaatactccaacacaccacataactagggttagttattatcactatttacactacctctctcactgactcctttagctgagtcttaaatctagctatatatacatacaatcactcacagtctcatacacatcatacactaaaaattacaacctcacacaatacataacacgttaccaaatatccaacaaaacacacatcaacaataataactcaca

SEQ ID NO: 94071 - DNA, 1171 bp, Glycine max
  unsure (1)..(1171): unsure at all n locations
  Clone ID: PAT_MRT3847_55959C.1
ttacggctgcgagaagacgacagaagggggaaacgtgaaagcaaaacagagaagaggagctgcggaactcttcacttcatctcagcgagacagatagaaaaagcattaacgatgagatttcacggtaactttattatttgccgttatctttctcggttgcgaaatcaattcaattcaaacttcgaattcccactcccgaatttccggcatcgagctccattcttcctccgttcttactctgccgaagtgccagctcaactgtctccggagctcttaaacataatggagcaaagactctccgctattgagtacaggacttcttgtcttaacaattttctaaatcagccagaagcatcaccatcagagtatgcaagagctaacaaggagctgcggaagctaagtggctctgtggaccttattaaggaattgagggccaaacagaaggaaattgatggcttgaaggcactggtggggaggaggcttccttgtttgcgatggatatctttagaatgtatgagaagtatgctctcaagaatggctggaagtttgaagtagtagatatagcctcaatctgatcttaaaggatacaatgtacatgtttcatatattaatgcgcaataaatatgacctgattttcagtgctttacaagtgttttgaaatattgattgtggcatccaccatgcattgcaaccttctgttagcaagaattgaatttcatcttgcaactgatgtactttgaactattctttctcaggaggctagtgcagcaattgctggagtcggtgtttttgggaaactaaaatttgagagtggaattcatagagtccagagtttagttagcatctctcagatataatctatatgtctgtagctaaatctagttttggcaatcactaacgttcttttgtaacagcgaattcttgtgacagaaaagtcgggatgtattaataccaatgctgtttctgttgcaatccttcctcaggctgatgaggtaattggcaatcaccccttatgaatcaatgccctgtgatcagaaacttgaatgtttgttgtttttaaaactataaaaaagtgcgttcaactgttggttactctaaaaatgattataaaggaaaagacttnacatacaanttatgtctctatttntctnctttggttctgttaggttga

SEQ ID NO: 94072 - DNA, 220 bp, Glycine max
  Clone ID: PAT_MRT3847_5595C.1
taagagcacctccagttatacacttctgatcttccagttgtgtgctagatacgcaactgcatttgcatgtctgcatttatatccattcaagtagtctgtgatcacttgtatcacttgctctaaacgttctagcttattatgaattatacttttcactgaaattcctattattttaaatttatgcattatatgaatatcttttataattaccagtctatat

SEQ ID NO: 94073 - DNA, 209 bp, Glycine max
  Clone ID: PAT_MRT3847_55960C.1
attgctttcaaatttgtccattcctgattcattatgatttctttgatttggtgtgagtgtgattgtgtgcgcgtcttccataaggttcatcatggaacatttgattaggtgtgcatttttcaacaaagttcatcatggacatttctgactgtaaacgaaagtacttactatattggaaaattccacgacgttattgattttcctctttg

SEQ ID NO: 94074 - DNA, 476 bp, Glycine max
  Clone ID: PAT_MRT3847_55961C.1
ctgcttttagtcagcaaaggttgagacttttaacacataacaacaatgtcttcttctggttatgctacaagcagtgctttgttttttctgtttctggctgtgtttgctgcaaaagttagcttttgcttttccaccaaggtttatgtagtgtacatgggaagcaaaagtggggaacacccagatgatattctgaaggaaaatcatcaaattcttgcttctgttcatagtggaagcattgaagaagcccaagcttctcatatttatacctacagacatggtttcagaggctttgcagccaaactcagtgatgaacaggcttcccaaatttctagtatgtcaaggggaagtttcctgctgctatattttctttgccttttctcaacttcttaattttaacctcagaacttggcttaataatgatttgatttgtgacttgtgcgtccaaatttaaccagaaatgccaggagtgggttatg

SEQ ID NO: 94075 - DNA, 224 bp, Glycine max
  Clone ID: PAT_MRT3847_55962C.1
gtaaatggaacccggcatagtgacatcactgatcctaatggccagaacagagacacatataggcccaactgcaatgagtgcatgggcattcatatagatagtcctggtcataatttatcataccgatcctgacatatttagaacatggaacaaatactagctcatccatgaaaaaattcgtcatcactgcatagctaaaaatcccaaatttattatggataaac

SEQ ID NO: 94076 - DNA, 955 bp, Glycine max
  unsure (1)..(955): unsure at all n locations
  Clone ID: PAT_MRT3847_55963C.1
gggtaagccggtcccccctttttttnnnggaacccaacaataatgatgtttccgcacgtagatcaaatcgtctttacaataatcaacagaaaacttaacctaatatccccttgtcttctttacaataactgggttctcctccagacacgatcacccacgtacaattgaggaatgaaaaacatcaattaaagaagaagaaaaaacaaccttaaagtcccgaagcacttcaccgccatgttctttttatactttggtgaagcccttcgaggccgttattcgtaaacttgcgatacttttttttcttttattagagagggcataacacgcgcttaaatgggactgcgacgagtcgactcgccctgggcgcggtgagtccgaacacgtcactcgtgtccaactcgctgggtttcattccatctggtaactcccatgtgaagcagtgaagcaagtgtgccatggccagttccagcgtgtaaagacccagttgcattccggggcaggatctccgacccgacccgaatggaatgaactcaaagttactccctttgaaatccggcacgtgcgggttcagaaaccgcgaaggcttgaacgcttccgcgtcctcccacgcgctcttgtcccgccctatggcccacgcgtttatcatcacgcgcgagcccttcggcacgtggtaaccacacaccgccgcatcctccgcagtctcatggaggagcagcgggataggtgggtgcagccgcagcgtctccttgacagcgcattttagatataccagcttttcgaggtctgattcctccacgcgccagaccaagcccaccacgtcggcctcgagccgctgcacgcgccggaggtccgctgggcttgtcattagctccgccattgcccactcaattcccgacgcaacagtttcgggtcctccaaacatcacgtccatgatgatggctttgatgttgtccct

SEQ ID NO: 94077 - DNA, 176 bp, Glycine max
  unsure (1)..(176): unsure at all n locations
  Clone ID: PAT_MRT3847_55964C.1
cgcacgcagatcctttattccnataatccttccttacnctctctncnaantcacgactctttncnatcanatccgcgacacncaccccaccannacctngcncaacccatnccatgancgcntggctcaagaggatccagtggtcgttgttcctaggaatttnggtnnctggtagg

SEQ ID NO: 94078 - DNA, 328 bp, Glycine max
  Clone ID: PAT_MRT3847_55965C.1
atgctcaaaacaaagtaataatggtggtttattataacaaatcatatgacaaatatggtggtctgagccatacacattatatgctttattgactgtcgctgttttacacagcatcaaaattggttaccaggtgcggacatgcgtttgccaaaatcagtgataaaaaaaaatgacccgatttcctaggcatgtatgctgaggttttggcctaatagaaccactggtgctatacttaaaaacgtgatctgagtgagacaaattcatattataatcacgtgcaccttccttgattgttggccaaaatgcttgaaccattttttattatccg

SEQ ID NO: 94079 - DNA, 231 bp, Glycine max
  Clone ID: PAT_MRT3847_55966C.1
aaaaaacaaattaaataaggtcagcctctttttaaattcctaacataaccaccactcataataaatccaatttgttcctccattataaaacataaattctaacttccactcactttcaaacacctatttcttctaataaaccccttaaattaccctccctaacccccttttaaaaaatacccatctttgaaaccctttgaataaccaaaattatcacacttatctcacttt

SEQ ID NO: 94080 - DNA, 418 bp, Glycine max
  Clone ID: PAT_MRT3847_55967C.1
ccatacaacataggtttccaaaaattaccaaaagctgaatttaatttcaacaatctaataatgacaacttcttccattggcagtgaaagaaaaaagagaaaacttctccacattgaatttaatttaataatgtttctaattattttttacaaaaatttactagtattatatgttattttggtaaacagatctacaataaataaaaaattggttcaaaacgggtttaaaacaagttctgcaatcaaccgaaacaaaaccgatttaaatttgttttacaaaaaaatcataccattttattaattaataaagtgaattggtttaaataccaaatcataaaaattgttcatgattttttttctaattagtttctcaactgctcttgagaatttatttttaaacaccaactatattttgagac

SEQ ID NO: 94081 - DNA, 577 bp, Glycine max
  unsure (1)..(577): unsure at all n locations
  Clone ID: PAT_MRT3847_55968C.1
gaggctcgaggaaaagaagagaagaaacaaagaaagacgaagaagaagaagactagagaaagagtttgggagagatcttgtaaataaggaaaccctagtttttcctttttttgggttaattttcccattaattttcagctccaacctgctactgttaccaataaggaatctcttgtcattgcttcaatcgaacaagagtgaacgagttttgtgggattgtgtattgttagaaagctgcaaagatgatgtccaggtcgtatacgaatcttttagatttggcctctgggaatttcccggcaatgggggggagggagactagggagcggaaacggatgccgagagttatgagtgtcccggggtttctcactgaggtagatgatgatcaggcagttagtgtttcctctgataatccatcaactgttactacggatagaatgatcattgtggctaaccagctaccgttgaagggcaaagcgaaagaggaccaacaagggtggagtttcagttggaatgaggattcattgcttttacagcttaaggatggactcccngatgacatggaggttctttatgttgg

SEQ ID NO: 94082 - DNA, 372 bp, Glycine max
  Clone ID: PAT_MRT3847_55969C.1
gcgtacgcacgctcgcaattcctctcgagtgctgtggagtacacacctaactattaacttcctgtgatcccattgcggcagtggtgacaacaccatccttgaactctgtccaaggaatggcgctggggaattcgcaacctcctacaatcgatgaaaatctgcacagcaccaacttcattatgtatggccttgtcaccatactaaagttctttgcttacatcatccttttttgaaggatgcagctgcatctacttctgattgctaagtattcaatatatcctaccatgatatgtcacacccattgctccgactgtatcaagaagttataaggttttctttgtccttcgttaaaaaaaaaaccacgcttatgct

SEQ ID NO: 94083 - DNA, 166 bp, Glycine max
  Clone ID: PAT_MRT3847_5596C.1
ggacggaaaacaaccctctttcattagtagcctggaacgataccttccctttttcccaaccaaaaaaaaataattaaaaaggaactcactagatggacttttgatacaaacaaacttagattttgccaccaggaccgacctttggtggaagttggggcccttcttg

SEQ ID NO: 94084 - DNA, 236 bp, Glycine max
  Clone ID: PAT_MRT3847_55970C.1
tttttaacaaacatgctcaaacagggtttctaatggagttggcagcctgtttggtagaaagcactcaaattttgagctgctagtcacctaggaacaaaaccaaggatttactgaaactgtaacctcacactagccttttgtaaaaatcattcatgcaaatgaacgcgaggggctgtttcaagcctggggtgataagtatatttagaacacccacgttgtgctcaggaggaatgcta

SEQ ID NO: 94085 - DNA, 347 bp, Glycine max
  Clone ID: PAT_MRT3847_55971C.1
aagcttggagcgcggagagcggccgctttattattttacattgttggcatatgttggaacaagggctcataaattattaagggggcgaatgagaaaacaacataaggaagtctattacatgacttgtcaacacaaaggggaaacaacttaaagtgatagtggggccccgagatgaacgcagggcattacatgtcgcaatatctaggcaggatatattgctgaaagggggaagaacctctgagaggaatacaggcgattttggagcttaaatgtattgaattctgctatgtggcgtccgaggagatttttaaatacgtctccaaagataccaacaatgttgtatccct

SEQ ID NO: 94086 - DNA, 1302 bp, Glycine max
  Clone ID: PAT_MRT3847_55972C.1
gttaggtcaggcagagagtgttctatgaagcgtgtagctgcctgataattcaaggtagtagaaggtcgcaatggagctttactcaaatcaagcaaacgttccagtttgtcctcgtacaagcttaccctatcaagctctgatttgatgggatgatcatctgggtggaccccggtacaccttaggttcaatgcaagaagggtagatgtgactttggcgaggatgaagagggaatgagcccgttgaagagggggcatttgggagagggtttgagggtcggagagagacaaaaactcgttaaagtgcgttcggagttcccgaaccggttatggattcagtcaacaccactctctccaaccttcaacaactccgaacgcactttaacgagtttttgtctctctccgaccctcaaaccctctcccaaatgccccctcttcaacgggctcattccctcttcatcctcgccaaagtcacatctacccttcttgcattgaacctaaggtgtaccggggtccacccagatgatcatcccatcaaatcagagcttgatagggtaagcttgtacgaggacaaactggaacgtttgcttgatttgagtaaagctccattgcgaccttctactaccttgaattatcaggcagctacacgcttcatagaacactctctgtcctgacctaacaacagagcagagggaaaatatgaggaacattagtagaggggagagaccaaagacaaaccgtctgggtcaagcaggtcaaaagaggaagtatcaatcgtccgaaaaaccatctgttcaagcggctgccaaggagtttcttcagaaagcagcccgggagcttctgggtgataacagtggcggtattaagggaccgttacaagttgacattttggataatgatgatgatgaactgcctttgccctgattttcctgaaatttgcgtgcgtgaacaagatggagctgtgtccatagaagggaatatcaccatagcattattgctttgccatgcttttggggatggcttctattcttttcttggcgacacaaaaactcaatactgttttatccattttagttggcaactggatgccttaaagatgctgacatgtttttctagtatccaaaatttcagttttgcttaacagctatccggttaatatcgaagttttcaatcgaaaaatgcttgtgattaactatgtttttatttttttgttttaagttttgatttgcagttcaacaatgtatatggctcaattaatcccgagactttttttctaaagtaagaataagaagattgttaagtttat

SEQ ID NO: 94087 - DNA, 824 bp, Glycine max
  Clone ID: PAT_MRT3847_55973C.1
gaaagtcctttggaggttgctcattcgttttctctgtaaaaagaaaaaagtaatagatttttctcattttttttcttcggttcttcttttccttgtccgagtcttctttaccggtcaaacagagactctgttgattagagaagagatttcatcaatcaccggaaggtgaaaacattaggaaaattaatttcaatcaaagcaaatatacaataatacgatggtcgagtttggaacgagaatgggatccatatggacggtgttgttttgttttgcatcggttttcgcgatcgtttctgcagaacgaagcattgtgaaaatggaagtgccgagattcaatgtcaccagccgagagcctcaacagagtttcctcaccaaagctttgaatttcttatggcaatctggagaatcagggtaccaacacgtgtggccggatatggaatttggatgggaaattgtgttgggtacttttgttgggttttgtggtgccgcgtttggaagtgttggtggagtaggcggaggtggcatattcgtccctatgcttagcctaatcattggatttgatccaaaatcatccacagctatctcaaaatgtatgatcatgggtgcagctgtgtcaactgtttactacaaccttaagctaaggcatcctacgttgaatatgcccatcattgactatgatttggcacttctcattcaaccaatgctcatgcttggcatcagcattggagtggtctttaacgttgggtttcctgattgggttgggactatattgcttattggtctcttcttaggcacatcaacaaaagcattctttaaaggggttg

SEQ ID NO: 94088 - DNA, 589 bp, Glycine max
  Clone ID: PAT_MRT3847_55974C.1
accggggagttccaaagctgtattgtaattagggactctgacattatagacgaacatgttaatgttaatgttagtgtccctcgtgaagttgagagcactgatcaaacaattgaggacacagatcggttttcattctcaacagctaccaactcaaccgtgtacctctcgtgctcagacattgatgaagatggaacctcgttgtccccacataaagacaaagctttgttttctccaaacacttgccaagcttccaatataggagcactgcagagccagcaggctaccgacaatgaagagcaccaccagagatgcttagaaggtagccctgttccaaactctcgaaacatttctgtgacgcacgcgacaatgaatcgggatgtttcgggaatggaagagagaatgagcagttgctgtgtctttgtaccgaagaaaatcacggaggattcgctgctatcggtggctctgtggagttcgcttattcaatcaaaacactgagaaaagtgtcaataggagttgcgagcgtagccaggggcctaccaacaatgaagagcaccaccagagtcgcttagaaggtagcactgttccaagc

SEQ ID NO: 94089 - DNA, 490 bp, Glycine max
  Clone ID: PAT_MRT3847_55975C.1
caaatgcgtggccagtccttagtttcaacaaatgatgccatgcactgcattgaaactgctgaatgctgctgcatagcttaacctttttttttaatgttatttttagcgttttgttttggcaagtggccatggaataggatcaatgtattgcccatttgtgatgcatcatggtggtgtatgacctgacctgatatcatactcgagccgcacaaagttcctttgagcatcatccggcagaggaggtggtagacaaggttgtgaaggaagcaataagcaagccatggctaccattgcccttaggactcaaacctccttccatggatagtgtgttggctgagctctccaaacaaggcatttccggcatccctcttggcaacaagcgttcttctactcctaaactccgctgacatgtatgaccgaccccaccactagttgcaacctgggagggaaatttgagaaacaaaataattacaagagtcaacagggcgtt

SEQ ID NO: 94090 - DNA, 312 bp, Glycine max
  Clone ID: PAT_MRT3847_55976C.1
gggataacacattagatgtcattcactagcctttaaacaaaatgggtacctatggtatcctggctatgaagccctttggttggtaaataaccctaaaaggaaaaaaaaaaaaaaaaagccttttttggttaccaacccccttttgggaactcccattttggattggccaggggttcaaacaatttttttaaaaatttattaccaaagtgggatttttttaaaagggtgaaggctttttttaaaaaaacttgaacccgcaattggtttttttttctccaaccacgaaaactctttttttaaaccttttttttt

SEQ ID NO: 94091 - DNA, 428 bp, Glycine max
  Clone ID: PAT_MRT3847_55977C.1
aaaacaaaaaaaaaaaagcctgccttaactttcagggaaagcaatacctcaaaaggggccgggtcataaaaaccctcatctaaaaaaacggacccatagcaaagctagcttaaaccaccccctggggaagaccccgaacccttaggggcccaaaaaattttggaaaaaaaaatttcggggtcccccccgaggccggacgggcaggcccctaaaggggaaaaattattatggtaaaaaaaaacaaacccgccgggggccaaagccccaggggcccccgccccttaaaaggcccctggtaaaaacaaacaaaattgggggtaaaacccaccatggggacaaaaaagaaggggtattaaaaaaacaaggggggaagccggggccataaaaattattttgggacggaacaaacatttttacttgggaacaaa

SEQ ID NO: 94092 - DNA, 192 bp, Glycine max
  Clone ID: PAT_MRT3847_55978C.1
agaggatgaaactgaatatttatatgtatattttttgagagagagagagagatttgtttgatcggtcaatcggaaatagtttatcatatttctggcacctaatcaattttgatggagaagcaatatactaaaaaaccacaattttttaaagagggaagggaatcaaatcgcgcaattctgatcacctcagag

SEQ ID NO: 94093 - DNA, 187 bp, Glycine max
  unsure (1)..(187): unsure at all n locations
  Clone ID: PAT_MRT3847_55979C.1
gagctcanctgacggcggccgcccttctttttttttttttttgaattttataactagaattgtgcccctcccccaattataccgggtcagttaaaataaacaattcatattgagattgtcggggcaaacctagagtttttggtggaaggattagtaaagaaactgttctaaaacatccctaacttat

SEQ ID NO: 94094 - DNA, 267 bp, Glycine max
  unsure (1)..(267): unsure at all n locations
  Clone ID: PAT_MRT3847_5597C.1
ccngtttagagtgtcccattgnctcctcagtattacagtgnagtgctctaattggttatatggnattgttatttgggtatatggagtaaaacaccgtnctananggactgtgtntatgttcttcttagataagttatatnttncntggcaatnngngctganctcacttagcagtctntgatccctgtaancgaaaaggggagttngttattatgagactctgaagcgagtcaanattgaattacagatntctgaaaatgaaaaagc

SEQ ID NO: 94095 - DNA, 568 bp, Glycine max
  Clone ID: PAT_MRT3847_55980C.1
acagaacaaataatatttatttcccataccgtcccaaggaaatatacagggcaaaaaacacattgggttttgtttccaaaaacagctttttttttttaaaaaaaataaaaaaaaaaatatgagggattcccggggcccggggggcaaatttttgaatctgtggttttccctttccgctttatgttatccttggaaaaaataaaaaattgtttgaaaaatttccccattaattaaagctttcgatttcctttatccaaagattaaaatccggatttccagcgcggccttattttcccaggctactttagggtttactgggcaaatgccacattccctgtaattgggtaatgcataggctcctaagtaaatggcacctaaaactttgattttgaaataggccaaaacaaaaaaatgtttggccggtctaattcacatacatgatcttccggagcatcaggaaggcccttatttctttaggggtcgcggtgtcttataacccaatccctcaaaaactccttgaaaattttttcaggctcaagacctttttgaaagcgctccctttaaaaat

SEQ ID NO: 94096 - DNA, 943 bp, Glycine max
  Clone ID: PAT_MRT3847_55981C.1
tgagatagataaaataataacatccactcataatatgcttaatgtttagatattgatgtgtgctaagcatagttgaacaaaaacaattaaaatataacattgtcggtggattcatggatttttgatgtaaagccaagctaagctaaggttgacacttttttacaccaacttttctctctctctgtgtacagcctaagcttaagcttatccctccccacttgttgcctctgccgtatgttatagccaaaagggtgtgtgagagagagaaacataaacacaaccaaccatcaagggaagttagagagagagttgagttgtgttgagagagatagagagatagaggagaagatgaacggtggtgaatcttacggtgctattgagacacaatacataaggaggcatcacaaacatgaaccaagggaaaaccagtgcacctctgcacttgttaaacacataagagctcctgttcaccttgtgtggtcactggtgagaagatttgatcaacctcagaaatataaaccatttgttagcaggtgtatcatgcaaggggatcttggcatcggaagtgttcgagaagtgaatgttaaatctggccttcctgccacaacaagtactgagaggttggaacaactggatgatgaggaacacattctcggcatcaggattgttggaggtgaccataggctgaggaactattcttccataatcaccgtccatccagaggtcatcgatgggagacccggtacaatggtgatcgaatcatttgtggtggatgtgcctgatgggaacaccagtgatgaaacttgttactttgtggaagctttgatcaagtgtaacctaagctctttagctgacgtctcagagagaatggccgtgcaaggtcgaaccaatcctatcaaccattaagcatgtctaggggagaatgaaattgggttcatacaaa

SEQ ID NO: 94097 - DNA, 1579 bp, Glycine max
  Clone ID: PAT_MRT3847_55982C.1
tgagatagataaaataataacatccactcataatatgcttaatgtttagatattgatgtgtgctaagcatagttgaacaaaaacaattaaaatataacattgtcggtggattcatggatttttgatgtaaagccaagctaagctaaggttgacacttttttacaccaacttttctctctctctgtgtacagcctaagcttaagcttatccctccccacttgttccctctgccgaatgttatagccaaaagggtgtgagagagagagagagagaaacagaaacaacaaccaaccatcaagggaagttagtgagagagagagagagagagagagagcggaagatgaatggtggtgaatcttatggtgctattgagacacaatacataagaaggcatcacaaacatgaaccaagggaaaaccagtgcacctctgcacttgttaaacacataagagctcctgttcaccttgtgtggtcgctggttagaagatttgatcaacctcagaaatataaaccatttgttagcaggtgtatcatgcaaggggatctaggcattggaagcgttagagaagtgaatgttaaatctggccttccagccacaacaagtactgagaggttggaacaactggatgatgaggagcacattcttggcataaggattgttggaggtgaccataggctgaggaactattcttccataatcaccgtccatccagaggtcattgatgggagacccagtacaatggtgattgaatcatttgtggtggatgtgcctgatgggaacaccagggatgaaacttgttactttgtggaggctttgatcaggtgtaacctaagctctttagctgatgtctcagagaggatggccgtgcaaggtcgaaccgatcctatcaaccattaagcatgtctagggaagaatgaagctgggttcatacaaattacatgatccattgctctctgatcctagttcaagtgtggacattggttggagtattccttccatgttcccagaagttttggaacttttttcctctgtatcatggatacattccccttaccacccctcttgcatttttagctgtgtaatcactcttttgaacagctaagtttctcttcttcaatatttgtaagatgagattcagggcctcatgaaaacacagggatgtaggggggaagtttttacctgctatattctttctggattttgtggatggtgtgttacctatagttatttgtaaatatttttgttgaaccaaagacagtttcttcagttttcatgtttcatgtttagtagcaactttttgccagatttatgtgctggcacaaggaaactccaaatagtggatactgccttgttattttctttaataagtagtgtagcttttgtaagaagttatctattccatattctccttgtttaggactatgttcagaacacttaatcaaaatgattttgtttctggctcaaaaaaaaaaaaaaaaaaaaaaaaaaaaactcgagactagttctctcctcagattttgtttaagcttgaaatgggaatacaagtgatacagatttttaatcattcgtaacttataa

SEQ ID NO: 94098 - DNA, 708 bp, Glycine max
  unsure (1)..(708): unsure at all n locations
  Clone ID: PAT_MRT3847_55983C.1
ccagcgtccgattttgtttctccttcttctccttgttcgttccttcttgggttctcccagcagcagcagcaccaccaccacacaaaccaaacccacctccacactccacccgggtcaatgacccagagcagaaagcccagaaagcccaacccgcaagcccgcgaagcccaacagaaccacccttcttcttcgttctccagctccggcatgaaactcatcgtccccctccagggcgtggttcagggacgcggaggccttctcctcgggactctcgtcccctgcgcgctcttctacttcctccagctctacctcaaacgacgccgttccaacttctcccctccctccccctccgaacccaccctcccacgcacctcctcccgctccagtttgtcgacacgtggctccatttcccgtgtccgggtctccaagctcgccacgcagatttccagacccgacgagtcgctctattacgtcgggttggagagggtttcgcgagatccctacgacgcgttggagaatcccaatgggattattcagttgggcttgtcggatacaagctgtgcttggatttgataggggaatgggtggcacggaacttggaagggtccatcaggggcggtggntggtctgggaataatgggattgtgccgtatcagacgtttgatggggtcatggaattgaaatggctttgtcagattttatgcatca

SEQ ID NO: 94099 - DNA, 312 bp, Glycine max
  Clone ID: PAT_MRT3847_55984C.1
atcaatctcaagagacagatcatataattttttttagcaaaatccatggcagatcttcaagaaaaactggatgctcttaaaggtcttggtggtgtgctaaataacctggattaaggtgaaacctaacaccaccattgcaccctcttaacccattatttccaatagccctgctctaatccctgaagggaatgcttttgttgaaaatattaccaccggggcacttaaaagaataaagggctgagtaaccaaacccgctttacccaaggccacgcttaccgagccattaactttggccatttacatgccttaata

SEQ ID NO: 94100 - DNA, 260 bp, Glycine max
  Clone ID: PAT_MRT3847_55985C.1
ctcgttattaaataaattcaaacacgtgcttcactgaagttaccaactattttattgacaaaagtattcagtgtagccgtgtaggaacaatatctaattaattggtgaataaagaaattcgaagagtggttaatgagtaatctctcatttagttagttggcagcagattgctaatttattaatattaaaatgatcatgaagatatatagttttgctagaattttttattttattttatcgatgtccttaaagttcctaaa

SEQ ID NO: 94101 - DNA, 301 bp, Glycine max
  unsure (1)..(301): unsure at all n locations
  Clone ID: PAT_MRT3847_55986C.1
gagagtacangtgaatggaatntgacaattagtagtgtatgatgtactattgcacaaaccataagagttgatagcacaatacactgtccaatgatcgatatgtacaagttgttggcttgacatgcattcatccaaccaactgtttttataatgtcngaaagcaagatgaaatcatactcttaacacacaaaataaagctccttcagtccgatcaactgttagaggctgattcatcttctttgccaggatgcactagataactgattgtccacactgctaaaatagttgcttctatgggagc

SEQ ID NO: 94102 - DNA, 187 bp, Glycine max
  Clone ID: PAT_MRT3847_55987C.1
gggagggtagaggcgtaaaccgggtctgcgagatctgggagacggaataaatgggcgttaaagaatgtggctcaccagctatttcaaatcccaatgcaaaacccttctcaacggttcagatttctcggcagcattagagtgactgtgtgtagtagtagtagtgtgacgagtgtcatgtctatctagg

SEQ ID NO: 94103 - DNA, 224 bp, Glycine max
  Clone ID: PAT_MRT3847_55988C.1
tttttttttttttaaacaaaatgagatgccttctgtcgtcgggtggcagccgcaccattctgttgtcttcttgcagcagcaccactctggggtcttgttgtagcagcacggacgcctggggggaccaccgaataattgaccggcgcctgcaggcggaccaccttttcttattatgaggagtattataacaggtcggaataatggtgataatagctgcctgcggg

SEQ ID NO: 94104 - DNA, 400 bp, Glycine max
  Clone ID: PAT_MRT3847_55989C.1
cgacaaccgattacattattaacgggataaatgtctaccttgcaaccaaacatacacaaaatgctatacttgtcaacagctgcactgtaccagaatgtctcataggataggcagcgcatctttgtctattgcggtcacatgtggatgcaatactgcgcctttacaaacgtgataactcaggaacttactctgatggatgacctgcgagatggacctttgacactaatgcttgtcccattggatatagattcagagctggtgatatactaatcttaaactatgactcatcatccgacaatgtgtgaagctgaggacacaaatggtatacaactgtttcaagacaccacacatcgctccagtgatcatgccagggaatgacctggtcaaactagtgagatgg

SEQ ID NO: 94105 - DNA, 509 bp, Glycine max
  Clone ID: PAT_MRT3847_5598C.1
ctaatatccgaaggcagaaagaggattgagctttgagccttggggaagaggcagcagagacaataatggcttctacttcttcttcttcttgttctcttgcttctcagtttctccctcctcctagaaagctttctgtaatcccttttcactcaacgaactgcacacatttgtcattcccggctgttgtgactccaagacaacaaccactgttgttgttttcttcaacctcaacttgtttggcggcggcggcggcgtcaaactcaaacaacatttggaattccaacaacaacaacaaaccagcttcgtcgaaagagaaggaagtggaagtggaagtggatgaggagctgccatggattcaggaaaaggctttggacctggtcgagttcacgggctccgttacccaagccattcccgggcccagagtgggtcccacctccttgccttggattctcgctattcctctcacatatgctggccttactttcgtcattgcctttgtcaaaaccatc

SEQ ID NO: 94106 - DNA, 490 bp, Glycine max
  Clone ID: PAT_MRT3847_55990C.1
gggggaaagaaccctttttccattaattgaatgggaagaggggggggttgggggtccacaggccttaaattcccccatatcagggcccctttataaaaaaaggaattccaaaaagggggcggaaagacccccccccaaaacaaattttccaggctttcccccaagggggccccccccaatcgggaagaagacgttcccaaaagcaaaaaaaaagcccggggtggggcccccattgaaatccgggggggaaaatggcccgagttaatggggggaccggttttaaccgttccaaatccgaccgggaaaaattgggggcccccatccgttttcctcccaaaaatttaaagccccttttgacctttttttaaaaggccttttaatttttcccccgggggacttggtcgctatggggctctccccaatttttaaccttggacggaatttacccccccgttgggggtggatttccaaaaaacccgatttgccaaaa

SEQ ID NO: 94107 - DNA, 266 bp, Glycine max
  Clone ID: PAT_MRT3847_55991C.1
attggggggtttttatttataagatatttctcctcttaatttccccccagagggggacaccaatgggtttcatctatttctttcagctcaatcacatagaagacttgcaatatatgcagtccaaacatggggcccctgtatgtcttgagaaaaaagaaggggcgccactggggggcaaaaggggaaggaaaaaaaaaatctcaatatcacaaggggggcccaacacggaaccattcacaggggttatcccccggaaaaaaacaaaa

SEQ ID NO: 94108 - DNA, 559 bp, Glycine max
  Clone ID: PAT_MRT3847_55992C.1
gtcaccgccattgtgcctgtgtgtgtgtgtgtgcgtgtgctcagccacgggtctcgggttcgtagggccacttggtgttgtaggcgtgtgggaggtgtgttgcaaagtaacccgcacctggtgccggttcgtggtggtcgtcagactgttacgaagtaaggttggtctctgacagtagttaatcagcactaattggtaagcggctggtaacaacggccgctgctgcgcgtacgtggctggccggggctattgttggttattggggtgctgcttactgtagttaacggcaagcaccggtgaaggttgaatttaggtaacaccttttcgctgcgcgggggctgccaacgaaagccaagtaagctgtggccaaaaaggcgttaccagaagttaagcggtactaaggtaggggccacgataaaggtacagaaacggcctaggtaatggttacagcaaatgcagcgggtgcaccaggtgggccagcaataatgccaacatgccatggcataacaaggacgcaggggtggtgggcagaccgccgtagagctgtgcagtttggcac

SEQ ID NO: 94109 - DNA, 1355 bp, Glycine max
  Clone ID: PAT_MRT3847_55993C.1
cccacgcgggcgctgtgttattgggtggagtgtgagaatccaaatatctgtatctatctatctccctctgcaattatccattttctggggcgcattttagcaacaatggtgcacccaatagcagaggcaaacgaggaaagtccgttcgggaaactaacgccggaagagttctacgcgcatcactcagtgagtcacggttccgagttcgtgacgaaccctagaggtctcaagctcttcacacagtggtggaccccactccctccaaaaaccatcattggaaccctcgccgtcgtgcacggatacaccggcgagtccagctggctcctccagctcaccgccgtccacttcgccaaggccggtttcgccacctgcgccctcgaccaccagggccatggcttctccgacggcctcgtcgctcacatccccgacatcaaccccgtcgtcgacgactgcatcaccttcttcgagaatttccgttctcgcttcgatccctcgcttccttcgtttctctacgccgaatccctcggcggcgcaatcgcgcttttaatcactctccgccgccgcgaaatgctgtggagcggcgttattctcaacggcgccatgtgcgggatcagcgccaagttcaagccgccgtggccgctcgagcacttcctcttccgtcgtcgccgcggtcatcccgacgtggcgcgtggttcccacgcgcggctccatccccgaggtgtcgttcaaggttgagtggaagcggaggctggcgctggcgagcccgcggaggacggtggcgcgtccacgagccgccaccgcgcaggagctgcttcggatctgccgggagcttcaggggaggtacgaggaggtggaggtgccgctgctggtggcgcacggcggcgacgacgtggtgtgcgaccccgcgtgcgtggaggagttgcacgcacgcgccgcgagtaaggataagacgctgaagatatatcccgggatgtggcatcagatggttggggaacccgaagagaacgtggagctagtgtttggggacatgttggagtggcttcgtacacgcgctcaacgcgcccccgagcacggtgttgcttagggtcaactcttttactttatattataataataataataataataataatattataatagtgttggttgggccaggttggcttgtgctctgataagatattattgtttattcctataaattgttatgggttccattccacggttcataaaaaatagagtagtgatagtttcgttgttaattaattccaaactatttatgaattttaaagggtttttttataaaaataattgtataataaatgcagtgtatagatatataatacttattcaat

SEQ ID NO: 94110 - DNA, 247 bp, Glycine max
  Clone ID: PAT_MRT3847_55994C.1
ggctcgaggatgcatcatattgcattctctatattgagcacggtgaatatgattgaccactgggcatctatagttactgcatgctgcatcatattggggtgacggccgaaaactctgtgttaccaaaggcgccgctggcccgataatgatgaaatgcacgacctgcttcaggacatggtatcatacaatgagctgcgatagatcagccatagagcctcgggagcgcacgagattatggtcaccaaga

SEQ ID NO: 94111 - DNA, 631 bp, Glycine max
  Clone ID: PAT_MRT3847_55995C.1
ctggccatcagttcccatttttgtactaagaagcatttgttacatttatgtaaccaaaggaaaatcaaaagtacgcaggaggtgaagctcggtggcgaaatcaacatgcaacgcagtgaaagcatgcgactaaaggagaagaaggtgaaggatttgatggttgacaagaagaggctagtggaggtgccgtacatggcgtccctggcccacacaatgactacactggtggcgaacaaggttgtggcggtgccggtggctgcgggcccggggcaatggatcggagccggggagtccatgatcgttgagtctgataagcaaaccggaaccgtacggaagcactacatagggatggtgactatgcttgacattgtggtccacattgctggtgataaccacttgagtggtgacgatgatgatatcaccaaagaccttgatcaaaggatgtctggccctgtctcctccatcattggccactcctttgaaggccttagcttgtggactctcaatcctaataccagcctatatatatatagtgaagtgtcttttatattacttttcattgagagaatcaaacatgggaaatttattggtatgtgtgaaaataccagggattctttacatgacacaaata

SEQ ID NO: 94112 - DNA, 275 bp, Glycine max
  Clone ID: PAT_MRT3847_55996C.1
acctgttacaggtagcgatgagacactgccatctcagtggacggcgggtataatgcgggacactaagtggtgagccacgcgtatttttctccctgatttcaaggaccaaggcagtaatgcgggtaatcctctccgaccacccacatagaacggaaccatacccgtcctaggaggtgagtagcttttacacggggcgaatgagactaccatcgttaataaacccctggcgcgtcagcaaaaggctgggagtatctatttgagccatctgtgggacc

SEQ ID NO: 94113 - DNA, 520 bp, Glycine max
  unsure (1)..(520): unsure at all n locations
  Clone ID: PAT_MRT3847_55997C.1
cacgtcttgcagtttcaaaagagttgtggatgagcttgagcatctgggtgcaattgattctcttatcactctctttacagaagttagatctgaggagcttcaagagaagacaatttggatgatagaaaagatattgagagtagacaatgtcagcgatcggtatgcactcaatcattctcttgtgcgagctttggttgaatcctttaagcatgggaataccaacacaaggaaacatgctcaagatgctttaaccctcctaaagcagttatcaggagttagtggaaagacatcaagtcaaactcgagctagaagatagcaaaaagttgttcaaatattgtataatcaaacaacaatctttccctattgtttgtatagaagtcagaaagagttaaagggcaagattaattgtacacatcaaccatgtaatgtcattattgtaaacattcattttggaagagttgccgtagggcggaagcattttaacaaattaannnnnnnnnnnnnnnnnnnnnnnnnnnnn

SEQ ID NO: 94114 - DNA, 769 bp, Glycine max
  Clone ID: PAT_MRT3847_55998C.1
cggctcgagtatgtggatggcattaaggagttttctgtaccaaatgatggtggctgccaggaccaaatgctatttaagttcagatcttctggtctatccaggagacaaaaaactcaatttggttatgatagtgatattggtcaagatggatcgagagtgagaactcaagcacaaggacctcaacaaagagcaaaaggagacctgagaaaagatcaagaaggagatcatcctccatggaaaaccttggccttatggatattggatacatgatatattatcacaagcctgccaaaagtcccttaactcataagcatagtagcagaaagcaccataagccttcactagaaggaatttccccattcaagttaccggccagaagaaactgatgctacatggtttctcaaaaaaaggaaaatgttttaccagtcatgtcacagccaagatggcacaaggagaaaacttttcaactttaaaatgagtggctgcagcttggaccaaccttgctatttttgcctacatgatgatgaagactatttggaacctcaatcaatgaagcaaaagaaaggggatcagagccacacatgctcaacaagaacttctgcctgatgaatgttgccactgccaactcttttgtgataatgagttgaaccaaggaattgaatttggttaccatccctcggagaccaaataggaggagttatagtggtgcagctgagtatcatgtattcaactaccaggattgccaagctggtaatggaaacaatgaaac

SEQ ID NO: 94115 - DNA, 148 bp, Glycine max
  Clone ID: PAT_MRT3847_55999C.1
gtctagatcgcgagcggcgccctttttctgttctctaaacacaatgcttcaatggtacttaaaaagcaatccgacaacaagaatcaccagtgaagtcattgtttcattttggacacttgaactttaaataaacttgtaagaaatggaa

SEQ ID NO: 94116 - DNA, 484 bp, Glycine max
  Clone ID: PAT_MRT3847_5599C.1
cagaaaatatgcttcgtttttggataagaccactaactgaaaagactttttaccaaggttgcttaaagtaacgtctgagcccttgcaacttacatagctaaacgcacgccagtccaagatccctaatgaactgccgttgaatcaccgtactgtttaactttttttttttctactccacgacactactatgtctataatgtaagggtaactccttcaagtcatgtattaccgttaaggccagcaaaagaaaagccaaaaagtatgcaccgtcgttttttttttctccccaaatatttacaagctacaggaacatgctctgacgaaaggggaaaggaagagcgaacccgaaacaaaagaagacaagagaaagacgtccggcgaaaaaatagtgaaaaagaaaataagggaaaaagtccaaaaaagaataattactggtaacaggaagggctccaaagataaccggtgtatttagtgcttcatattt

SEQ ID NO: 94117 - DNA, 1063 bp, Glycine max
  Clone ID: PAT_MRT3847_559C.1
ctttttccctttttttccccagggggccaattacccccccttaaagggacaaaaaattggggttcaggggcccccttttttttttttttttggggtttttttttttttttttttttttttttttttttttttttttttttttttttttttttttttttttttttttttttttttcggtaaaaatcgtagacagttttcattaagtttatgaaaaaaggaaacagaattcacatagtaccaatttacatataaaccttccacaacagagattcgtgtaacaacttaatcgcaggaacacatctagctcgataactcagcaaaatggaagaaggaagagaagtgcattggtaatggaaaaaaaaaatatatgaactatccaaaacacttctacaagtactaatgaactcactaatcttccatcgaatgattgcactgatgacaatcaggaacctgaacttgtgcctaaacaaagggaaaagaaaaaggtgtttggcttccttttcctataaaaaataatcaacccacgagcttcttttgtattgttttgtttgtctttttcttatttaaattagccaatatgatcatgctgctgaagctgatggtgtagaattacggttccccacaccttgacgtccaccaccacgcccacctccattttgatttggccgttgagaactcctaggttgccctgagaattctccttggtttctgaattcatttctgctataaccacgtccactgccaaatttcccacgcgctctgaaactgtcgcttcggaaaccacctcttcctgagtacctccctctcccactaccgctgactcgtgtagtagttctcttttcctcaacaacagcttgtcgctcaccaacagtgataggtgaagcctgaagtgcactgtgcatggaactcaattcttcaaattcaacaaagccaaaacagaatccgctctttctccttataacttcgagaccctcaccaacagtaagaccgaatttcttaaagactttttgcagtgaacccaatgctgcaataaaaggcaagttccgactgtatatggaggtgc

SEQ ID NO: 94118 - DNA, 342 bp, Glycine max
  Clone ID: PAT_MRT3847_55C.1
gctaaattctgcaagactgctgtgggggaagaagctagatgagcaagctacattggcaccaagctcgtgatctacatagcagcatgctaatggggctaccattgattgacatcactagggacaccaacgtgcactttccgacagacgctctactacttaagccatccattatcctaacatgtgcgacctaatacatagacattacctcgaacaagggttgaacaatccacaatagaaagtgcttgaagtgatactcctgatccgaatgctagacctacgggaggtaacatagacctcactggaaagagggcaaacggagcgtatctcacgggagaccttggg

SEQ ID NO: 94119 - DNA, 278 bp, Glycine max
  unsure (1)..(278): unsure at all n locations
  Clone ID: PAT_MRT3847_56000C.1
cagngagagatatggcagattacgacgagagatacgaagggaacggagaagaagaggaacttccacaattctcttcntcatccccatnccncancctgnttcntctcctcacnccaacnacgacgatctcancgattccaaatntcaccatgggtcctcgcgattatgacagagactcttccagaagcagagataagnaacgggagaaagggagagacagggaaaaaaaaagagagaanggaagggacagggaagggatagaagtaggatagggattc

SEQ ID NO: 94120 - DNA, 158 bp, Glycine max
  Clone ID: PAT_MRT3847_56001C.1
gttttaaaaaagagaaaaccagtaatcttgaaatttcaaccgatgtcaaactgaacaaatggatgataccttaactgtttaaaactatatgcacaatcaatgatagaaatggcttaaacaataacccatttttttttttttgggggggtagaaaatgg

SEQ ID NO: 94121 - DNA, 235 bp, Glycine max
  Clone ID: PAT_MRT3847_56002C.1
acaatttcaatctcttattcaccaattaccattatctactcctcatataaacattcatatcaatccttttttaaatcccacatctacaactcctcaatcatcattgataacaatactctttttgtatcaaagtaccaataattttacttttaaaatgttcccaataacaatctttaagcaactactttataatatacttcaactacaaaaaccttctttcatacaatcttctaac

SEQ ID NO: 94122 - DNA, 226 bp, Glycine max
  unsure (1)..(226): unsure at all n locations
  Clone ID: PAT_MRT3847_56003C.1
ctcagcctccttngaagaagcnnacaacaagcgaacaggttaacttgagaaaagcgaccccacaccgcccggcanngaangncccaaggacgagaaacccccccgccgcaaaaananagacaaacccaagacgcgcggcgncaccaagcnccccaaggagagnaaacccgcggcgcgccagaaggccccaaacacagcgaggaccaccacgaagaaaagggacaag

SEQ ID NO: 94123 - DNA, 516 bp, Glycine max
  Clone ID: PAT_MRT3847_56004C.1
ggaaaagttttaacagcgcccatccggcctagtgcgatctcaaattccgcgcttggatgagcccaatgatgtttcaaaataataataatattcatccaaagtgttcagtatggagttcctgctactcgtttgacagcgtccctctgcagcgtgtccttgcgtcggactttctccattacggggatcccaatttctcccaattatcagctggaggcgccctgtctcgccctgtctatgctgtcctaccaatcattcggtcactctgcgctgcactcaaatcgggtctgcgaggcgctgtgatgggtcatctgagtctctagaggcagctactcgcatagactacgccggcgcttgccctgcatgtcgtcccatctgactgatcgtataaggagcacggagtactccgcatctcctcccgtactttgagtgctcttgccttttgaaccgatccatggacaaacaggataacgaccgctgttcatgcgtgggtccgagccggcccgtcctgtcttcgag

SEQ ID NO: 94124 - DNA, 2177 bp, Glycine max
  Clone ID: PAT_MRT3847_56005C.1
ccacgcgtccgcggacgcgtggggtgacgcacatcacagcagcagcggcaccccgtaccgtagactttgaatatggaaaatctttgccacttcggcaactaacacaaaaagtctgcatttttatctttattttcttcctcgcagactgagggagacataacaacaacaatcttccatcctttttacccttcatggaatcgcgtccataacgccacctatttcatttccgtttcccttcttttcattgactttttttttcctctctttcgcgcaattttgatcgatgggtctcgtgtcgaatctgcgaggctcgagaacggaagctgcgccacaactagaagcattacccgtttctggcggtttccggagtcgctccgaagaggaaatggaccaatctaatgcaagctggtcgtcgccctacgtcgtcgttgcggagagtcgcgtttctcggaaggctcgacatggccaagaacgccgagatggttgacaccctcgctgtcttcttctaccgccctcgcgcagtggttgaaggcgacgatttggggctgggtaaattaggttggtggcgggttcggtgtttggaaatctatttcgtatcgatgtgattgagtggttggagagggaggatgcagtgacttattcaagggactttgccgaagaacctgtttttgtttctggagctctgattgaatggaagtcatgctcagtgggatgtaaatttgggtttagtggggataagaaacctgatgctgcatttgggttacctcaaccaggtgaaacagctagcgttctgcgatcgatggaatcagcacaatactatgctgagaacaatcttgccatggcaagacggaggggatatgacattgtaatgacaaccagtctatcatctgatgttcctgttggatatttttcatgggctgagtatgacatcatggcaccaatgaagccaaaaactgaagctgctcttgcagctgcattcatttccaattgtggtgctcgaaatttccggttgcaagctcttgaagcccttgaaaaatcaaacatcaagattgactcttatggtggttgtcataggaaccgtgatggaagagtggataaagtggaagccttgaagcactacaaatttagcttagcatttgaaaattctaatgaggaagattatgtaactgaaaaattcttccaatcccttgttgctggaactatccctgtggttgttggtgctccaaatattcaggattttgctccttctcctggttcaattttacatattaaagagatagaggatgttgagtctgttgcgaagtccatgagatacctagcagaaaatcctgaagcatataatcaatctttgaggtggaagtatgagggcccatctgattccttcaaggcccttgtggatatggcagctgtacattcttcctgccgcctttgcattcacttggccacagtgagtagagagaaggaagaaaatagtccaggcttcaacaaacgcccttgcaagtgcactagagggccaaaaactgtgtatcatatttatgtgagagaaaggggaaggtttgagatggaatccatttacttgaggtctagcaatttaactctagaggccttgaagtctgctgttgtttcaaagttcacatccctgaatcatgtacctatatggaagacagaaagacctgaaattcttagagggggcaatgatttaaaactctacaaaatatacccagttgggttgacacaaagacaagctctttataccttcagcttcaaaggggatgcagatttcaggagtcacttggaaagccatccttgtgcaaagtttgaagtcatttttgtgtagcatgtgctagtggcctctctgctctacatgaatagcttcttcacttaactgagcggtagagttttagggatgagtatggcaatgaaactggcatggctttatttatgcatagcttcttgaccaactcattgatgatttatattcaaaagataatcttacttttgaactcttttgtgtacaagaggtgaggttccatatttaatgcttagttttagttatagagtttctatctgatcatctagaaaagccacatgatgatggacaattggtcagcatgccagttcttgtatactgtgggtgaaaaactaaaatttaaatggaagcagcagatgtttcactc

SEQ ID NO: 94125 - DNA, 106 bp, Glycine max
  Clone ID: PAT_MRT3847_56006C.1
atccaattttacttacgctttcattctacgtcatatctgttctatagtgggacctatattcaggtgactggccgtcaatttacaacgtcttgactggtaaaacctt

SEQ ID NO: 94126 - DNA, 911 bp, Glycine max
  Clone ID: PAT_MRT3847_56007C.1
gaattcgacctcggtacccggggatcctctagagtcgacctgcaggacacatcatatgtgctagagagggacttgggacatgtaaaaatggaaacacatattgtttaacactgagtttgaactctatatgaaagcggctacatcatagatacaggctgaccattgccaaagttgagacactacctacatttatagtgagcagacacggagttcgctatcctggctagtgtcagcacacgtgaggtccgatatgggaatttctttatgactgaattactttacaagacaatgccatgggaggtatcttctggagaggaatcctcccatctaattgtgtcttggggaattgtcttcctccaaagcacaatgatgaaaggcatgatagaaggtggggcaagacaaggattgaaggagagttttagccagttctcggaccaacttgcacggaattttaaggtgctagataaggcagatttaccagacaaggaacatttgttggcaactttgcaaacagaagaccagtggtgttgtccgaaatacgcttacatgcttggaatttagtgggcttgaattgccagatagttttggagagctcattacaagtggaattttattcatccagttgcagcgtgtttataatatggtgtctcactttgtgcaagctagatttcaaatgggaactgaccatggcctcaaagctcatggcgatggatgggttcttactgtggctttaattgagggggttgacctagcctccttggagtcagagggattgtcagatccctatgtagttttcacttgtaatggacaaacaaggtcaagctctgtgaagcttcaaacttctgatcctcaatggaatgagatattagagtttgatgctatggaagaaccaccatcagttctacatgtgg

SEQ ID NO: 94127 - DNA, 318 bp, Glycine max
  Clone ID: PAT_MRT3847_56008C.1
cggacgcgtgggtctttttttttgaaaatgtgaaggctttgcgggggatgccttccatcgtgcagggaaatgctgttcgggcggatgctgtcctggctccatcgctctttcgttccacaggcgtccgggaggcggtacccacctgcgggaaacgtctaaacggtggccggggcagtcaagtggagtggcgtacgcagaggcaaaccaatggatgccccgctccactgcatactgagggcaaaggttgtaggggacaagtcggggtgccactgtccctgtagttgcaggctgtttggggggtttgggggactatatctc

SEQ ID NO: 94128 - DNA, 427 bp, Glycine max
  unsure (1)..(427): unsure at all n locations
  Clone ID: PAT_MRT3847_56009C.1
aacgcagattgtctctgctaaaaaccctaccgggtgaattagaggaataaaaaaaaacttagattcatcccctgtttcgaagaaagggtttttttttttttctagggacccagttttcgtttcagtgccgcacaattgagtttctgttggcttttctaaatgcacgagttcgatttgatttcgccctgctcctgctacttcgtttttcgttgctgttcaaacactcactgatagaaaagttcgagaattggtttggtgagttggaagtgggattggcattgctgaagtgcaattttattgaaatgagggacgttttgatgagagggcaatgaaaggggcgtgagagcttanaaataataagatgagtggtgggtcattgggtattcgttctgggagttatggtctttggagaacagcagctgcagct

SEQ ID NO: 94129 - DNA, 448 bp, Glycine max
  Clone ID: PAT_MRT3847_5600C.1
ttctttcatattccatgaatccggaaccactgacatgtttgccttaaacgacaacattggccggtgccgatgttatgcaacctcacctatgcaatacatggaatcggaacggactgtgatggttccaccggagatgatgcgccatgggcggtgatacccaacattgtggaccggccaccatacacgtgagtgatgaatgagatgaggaagaattatacgaattaaggggacaagctttattccaagaggggtatcttgactctcaaatacctaattgagcaactgattgtgagagactgaatcaacatggtgatgaatttgcatatcacgttctacaacgagctgctcgtggatgctgaacaacaccctgtgctgctcacagaggcgttgtttaatgccaaggacacatgtgcgtaaaagacttatggcatgtttgagaccttcaaca

SEQ ID NO: 94130 - DNA, 232 bp, Glycine max
  Clone ID: PAT_MRT3847_56010C.1
atggtatgctcggtaagaaaagatgacgaatcatggcaatttcgaggtcttagtttttacttaacgttgaatttcgtatgatgttatttttcgtttcatctggatatgcaattattccttgataaggctgagtatgatagctatgtaaatttttaatgcaacgtatgacttttgtcaagtaattaagtcataacagcatgaccttgaattttcatatgattttgtcttaaaa

SEQ ID NO: 94131 - DNA, 347 bp, Glycine max
  Clone ID: PAT_MRT3847_56011C.1
caacaaaaggttagggcaataaatttcatggcctacaaaatattttttccagttgtggcaaaaaataactttcttgggaagcccaaatataagttccaggggtttgctccacaccaaaatgttgttttagccttcttccttaaaaatcagaccttaaagaacctcctcaaatgtagcaaaccccctagcttgtaaatttccacgaatgattttgacatcaatcatgcaatgcccccagtttttaatcgtttttaaacaaatgatactttttgttataaagcttcacctaagttcccccattttcaggcaaaaaaacagggtcccctttttttacagccacaggaatt

SEQ ID NO: 94132 - DNA, 300 bp, Glycine max
  Clone ID: PAT_MRT3847_56012C.1
ttttggcgtggaaatcgcatgggaccttgtcgactatggtgccaaaacttccatactcgctaggagcccggttcattttctatcaagggagatggtgagtttgggggttgtttcttgaggaaatattagtcggtgagcaccgtggactagctgatggagatgcttaggacaatgataaacggggatgtgaccaaatatggggttgcaaggcccaaagagggtcccttttatatgaaggaaaaggatggaaagaacccagttattgaccgtggaacctatgaaaaaataaagtcttgagaa

SEQ ID NO: 94133 - DNA, 735 bp, Glycine max
  unsure (1)..(735): unsure at all n locations
  Clone ID: PAT_MRT3847_56013C.1
ccagcgtccgatggatcctctccttgttcgctgcgattggaaccctaattccaccttcaccctcacttccggcgctgtcagtggaggcagattcggagcaatattcaggtcttgcgcttccaccaccgtcacgcgcaggtaccagagctttggcgattgataaaccttggatcgagtgtgagccacgtagggtgcgtctgagatccacgcttccgggaacgcgtcgtcggattgcgtcccgatccacacggaaagctgaatgtcaccggagactctcccgggattctgatcggcggttcctccttcgaggcggtaccattgcggcgccaaaggactgtccggaggatctctcaccggaacgtcggagaggtcgaagcaaacgccaccgaggaaattctctgtcggggaatcccaaaccgaaatctccagtgtggcgctgtttgcatcgttcgtgttgttgtaactcagcgcgaatgtctggttccattccggcgaatcggggggctcgctgggcctgtaacttgcgggattggatctcctggattggctcgacatcctaaccctcacgattgggccttcactgggaggagcgagcccacgggccttccagattntcacaaacaggtactgcatcggctccaccagatcgaagggatgaactcgctcagactcattaccagntntctttccaaaaatatctttaggcaagtaatcaccgttcggncgcttcaaaat

SEQ ID NO: 94134 - DNA, 410 bp, Glycine max
  Clone ID: PAT_MRT3847_56014C.1
tcactgtatgacgtcctccttctttgggggggggggggggggggggggggggggggggggggggggggggggggggggggtgggggggggggggggggcggggggggggcggggggaatctttccatgaatagaatttacccccaaaaaaacagtggcgtgttttacccccctcccgaaagggtgtttgttataaaattttcccggcgggaaatatttgcccctttggggggaaacccacccaagttttaaaatgtttttgtataccccccgggggggaaagataaagttaaaaactcccaaaaaaaagggccctttttccaaatttggaaacttcacgggagagcctcccccgcttaaatccccagaagtttactccccccaaaattgtaaaggggaggcccccccccc

SEQ ID NO: 94135 - DNA, 807 bp, Glycine max
  Clone ID: PAT_MRT3847_56015C.1
gaaatcaaaataaacacataaaaatatgatccaatcatatctaaaccgaaccacgtttgtgaacccagctcatccaacctcttaacaaattcgcatggtttcgtacccacacaactgaactcacacaaacttctccaccacaccgacaacctcgccggaaaattcctcgccgtttccggttaccggcgatggcctcggcgacgtcgtttttgggcctcggtcttcgcccctccgtcccaatttgcgccaacagaaacaacggcattcgattctctcagtttcaagtctcctttggctttcgtgagaactccacttccctcaagactttgaattcaacaccgttgaagaaaagagaagctttctcaaatgggtcttcgagaacgcgaagaaacccgttgttctctgttcgctgcacagtttcatcaagtggaaaggtaaacttgtacattcataataacattccttgttataaacaaccttttttacttgtttttagaatttaagattagtgttgtattagtaaggcaatcagggacggaactactatatatttcaaaataagaatactcgtgttacttttcagttcacttcaactactctactttatattaactaagggataaatattattttggttgaaagtgttcgtttttactctctaacaaaatatgagaatatgtcgggtgtgttacctgtcaataacaaccaacaaaggaagcacggacaccgacgacatggacacagacacttacggctaatatctaaagtataggacacagagacaccacatacacacaaatagagcgc

SEQ ID NO: 94136 - DNA, 405 bp, Glycine max
  Clone ID: PAT_MRT3847_56016C.1
aacgactaaaacattaatacgtttaatcttatgtgtctggttaaacatacaggtggctgattaaacatcacaaaatctacctcactgtcatacgcagtattagtcaaagcatcagtacacatattgacgtcctggtatatatgaacaacacgagtcccttcgaaatccgccatcaactttctaatggttgttatcagtcttctgccattagaacttccaacattcctccctttgatgctcataacagcagcctgggaatcaatctgcagctccactttaggaaatcccttaagcttagctaactgcaatccttccaaaacacccacagctcatcttaaaacgcttcaataacttcaacttcttgaactttatatttgccttttggacgaccagaacgtttaacat

SEQ ID NO: 94137 - DNA, 260 bp, Glycine max
  unsure (1)..(260): unsure at all n locations
  Clone ID: PAT_MRT3847_56017C.1
ctttggnggatctccaatacttgtcgctcctttctaaggtttgcaccgagttggagtcccacaccggcaccgcngagnaaggtcntcgccgaattcatcaccgatttggcagctcatcgganaacttcaggaattaaaggccaagctcaacgacaacggtgccgacatgcngattaccttgtccgaantctcttcacnattattcgttcgttcttttccccaaccctacaagntncaacntcaaacatgggccaattgtc

SEQ ID NO: 94138 - DNA, 182 bp, Glycine max
  Clone ID: PAT_MRT3847_56018C.1
gcataaactactacgaggagactactccatacgaatccaaagctgacagagagtgagagagagagaggagccacacacgcaaaggaaacggacatagcaagaagatgacaaaagacgtctgcgccacctcttaatatgtatagcaaatttccgaaacactaaagaaacataaaagtaaaaag

SEQ ID NO: 94139 - DNA, 424 bp, Glycine max
  Clone ID: PAT_MRT3847_56019C.1
agaaaaagactgatcaactttctatttttcttgcaatgatactagtgtgttctaaagatcagcttggtatatatcatgaatccattttcttttagttcaagcttttggaacaattagtaatgtgacatgatatactttattctcttttcatttttaattcaagtagatgttaatccctttgtaataaataaataattattatgtctttctgtgtttgttattttatgctattcttgttcttttatacattcgggaccagggattggttaggttccttggcttgacttgcattgccaactggtaatgcaagtggcaatatctccaccagatctacaggcatctgaactttattcagaagcagaaaattacacatcacaaagtttctaatttatcatcattctcgagtcaatattttaatttggtt

SEQ ID NO: 94140 - DNA, 541 bp, Glycine max
  Clone ID: PAT_MRT3847_5601C.1
cgacctccacctttggatggacaataatacctcgacaactgctttgctcacaccggcaaggttgtggcagccactgctattgcgagataaacaagctggatatactgagggatatggtattcatcggagctctattcacgtatcgacgattgaaatagtgttgctgaactataatggcacgatgatgcccaatactgatcatgaatttctgctgaattgggccacattcaccgcatagaaaatgagatcttgctacggtacttcagatctctctatatttgtggaggacttgcacattgatgtgactgatgatatgctgttacatactattgctgggcgatatacatatattatagctatcaaagctgatatagactctaataacgaccgctcaaaaagctatggtgttattaaggttgatgatgaatatgttatacccagggcgaagactgacatgaatgtagtatattgctctatgaggtccatacaattatgtgcttgaactcgcaacaaaatttatggctaccgaccacaatattct

SEQ ID NO: 94141 - DNA, 318 bp, Glycine max
  Clone ID: PAT_MRT3847_56020C.1
gatacattgttcatgaacggacttatatactctataagaagtctttcaacgagcaggtcatacaaatgaggattataaacacacaagtagtgctcttgacacatgactcagaaaactcagctctgaagctgccattgaataaccaattaaaccaccacttaacgttgaacacacccacctcttaattgatggaaaaatcattcatgctactactggcaaaactataccaacgttgtaccccattacacgataagtgatttctcatgctgcttaaggtgaccattaatatgtcgatcgatcaatatcatcttctcgcaa

SEQ ID NO: 94142 - DNA, 288 bp, Glycine max
  Clone ID: PAT_MRT3847_56021C.1
cacccttcaatcatcaaaatcttatttattacatgatggaacagagtatatactttagtttagaggccgaagaaaacatgttaatcagaaattttaaatagctctgctgccatggcaagaggccaacaaaaagttgaaaagaaaaaggaaaaaaaaaaatcaggctccatacttgggagctttccaaagcttaaaggctatctcatgcaagaacctatctgctggtattgtaagatttccaccatgctccataaaatcttcaaaagaaaatctttttgcattatcctt

SEQ ID NO: 94143 - DNA, 293 bp, Glycine max
  Clone ID: PAT_MRT3847_56022C.1
tcgcacacgcgtgcaatgtacgagatacattatcaccagctacccgctatcacagcatcggagggggcttctacagacaagcctacttgtaaaccttaatacataacatcttcaactccatctcctgcttattttaattacattaaatatgatgttatgctaagggttatatagttttcagcatcactggtagctgctggcaaaatcataaatgctaataaaacagacattattcacattctaaacgctgttccatgggcaaacaacgacatatactcaccaccctttgttta

SEQ ID NO: 94144 - DNA, 449 bp, Glycine max
  Clone ID: PAT_MRT3847_56023C.1
ggggatgtggtaaaaacaccaaagtttcgaaaatctcaaactatcaatcttggtcgaagagatttagttaagaaggttagtgctaatactccaacgtctgaacagctagcatccttgaatctgaaggaagggaggaacacaataaccttcagtttccctacggttaaggggaagcagcaggttgatgctcacatgtatttgtggaaatggaacactcgtatagtgatatcagatgtagatgggacaattacaaggtcagatgttctaggtcaattcatgcctttagtaggaatcgattggtcacagacaggagttgctcatttattctcagatatcaagggaaatggctaccagctactttttctcagtgctcgtgcaatatctcaggcctatcataccagacaatttctatgcaaccttaagcaggatgggaaacttttaccagatgg

SEQ ID NO: 94145 - DNA, 1022 bp, Glycine max
  Clone ID: PAT_MRT3847_56024C.1
cttttgtctgtatggtacaaggtatcatacctgaaaagaaaaagtcaatgaaaagggggcgtgttcattcggtcttcaaagctaaggaatataatgctaccatagagttctattgggccccatttctagtggagtccaacactgacattcgtatcataggagacccaaagaagagaataataaaagtggatcaaatcacggagcgtgccaaaaactggaccggagtggatatactagttttcaacacctatgtatggtggatgagtggtcttagattaaaagcactatggggttcatttgccaatggagaagaagggtttgaagaattggatacaccagttgcttacaaactaggtttgaggacgtgggccaattgggttgactcaactattgatccaaacaaaacccgggtcttcttcacaaccatgtcccctgcacacacaaagagcgcagactggggccacaaggatggtatcaaatgtttcaatgagacaaggcctgtaaagaagaagaatcactggggaagtggctctaacaaggacatgatgagtgtggtggctaaagtggtgaagagaatgaaagttcctgtgaatgtcatcaacataacgcaaatctcagagtacaggattgatgctcattcctcagtttacactgaaactgggggcaaaattttgagtgaggaggaaagggctaacccactaaatgcagattgcatacattggtgtttgcctggagttccagatacttggaatcaaatatttttggcaatgttgtaacaaggacctgtgcttttgttttttaagggacatgaagatgtcaattatgtaaaatcatgtgtccaccacatttagcatttatatcatcttttggttcattttcatgacataaagatgtcacccttgtaaagccatgtgtcctaattcatcctttgctagtaattttgtaatttatatatacatggatcacaaatgcctgtgcgtgtggtagttcaatgaagcccacaaacaaatttgattgatttc

SEQ ID NO: 94146 - DNA, 368 bp, Glycine max
  Clone ID: PAT_MRT3847_56025C.1
aggcaaggggggaatttgggttaagatccaaccaatgttgtttcaactaattttccggaaatcaaaagaaaaaaccccccaaaaatggcccctcaggggtcaactttttaaggaatacttctttcccgggaagggtttgaattttggctttttttccttttgggatttcttttgacggggggttttttgggaaaccttaggggttgtttgaatggcaaatgtagttgcatttgacccaaacacaagctttcctgaatgtttaccagacacgggttttggtgacttaaaatcagaacccttggtttttttggaaggttggctttgtttcaactttggggggggtggttgttcaactggtggggctgggg

SEQ ID NO: 94147 - DNA, 922 bp, Glycine max
  unsure (1)..(922): unsure at all n locations
  Clone ID: PAT_MRT3847_56026C.1
ggngncaaaagacaatggagctttgttccttctatccacaaatgataaaaccatcatattttggaagggtcaagaaaagaaggacaagaaagtctcatacattgaatgttgatcctaaattaatggtaaatcggctctattgcttgtacaagtaattctcgtagctatacatcatattcttgcaaatgtactatcttacagatggaccatataattatttaaacaacgatttctcatttccaccaggcggtgtaccttcactaacattaccattggtagtaaccagccatgagaccagtttgatggctcgatgccgcagagtatatgcccatgctcatgattatcatattaattctatttcaaataacagcgatggcgaaactttcatatcagctgatgatttacgaataaatctttggaacctggaaattagcaatcaaagttttaatattgttgatgtaaagcctgcaaatcatgaaggtctgactccaatgtcagcatcagcagaattacaccctacacattgtaatatcatggcattgagtagactgcttggtcatgataagcatcatagcgtgcacgttgctgacaatgaagggaatctagaaggactaatccccctaagagatatcatatcaaggctagtacatgaaccccgtggctattttggcgatttctttgatggggttctcccgatgcctccaaacagcagggtttgacatgcatccaggaagaataacttttattccatcagtaacaaattgatgtgtgtttttcataagagctgacaaaaaaatcttagggcctttgtaacaagcacttagtactttgcaaattactagctctcgtattaatgtaggtgaaactgtgaaatgtgaaattttgtgtaaatttttacataataatcgggagttttggttgc

SEQ ID NO: 94148 - DNA, 401 bp, Glycine max
  unsure (1)..(401): unsure at all n locations
  Clone ID: PAT_MRT3847_56027C.1
tntggttttttttttttttttttttttttgggagcaagggcaggagatttattaacgccttgttgataactcacccctacgacgtaggagtgacttaagggactggagccaaaaacctaaagttgccttttcaaacctagcttaagcttcttttctaatagcgcattttaacgtaccttctttcattttgattggggcaaactcttccttaattgttgaaagaggtgaacgcactattcaatgattctcctgggattaaaaatgttaaacgatctagtttcacctgtagggtcaatcatgggaaccgtcctttggactgcaacgattgctacaagttttggtgcctggctccagagactgtatctgatagtggacctgaattaaagcccaatcggaggggg

SEQ ID NO: 94149 - DNA, 356 bp, Glycine max
  Clone ID: PAT_MRT3847_56028C.1
tctgcgagaagacgacagaagggaactattgtaggtaagtatagagaaagcaagataagtcagatgatgagaaggaccctggtgtcttttgcgaagaatcccgaaaagggcaatgtagcgagaatatatatgctagagcctgaaatatgacctttgtaattagaagcagacaataagatagagacatatatacatactaaaaaggatatctctcctttgttctctatttctaacgccaaagaaaaattaaaatcagaatgttacataattgtgatacagagaataagattttgagttacagatgttacatataatgcatttgatgagttggaaaggagtaaaaaatgtaagtatag

SEQ ID NO: 94150 - DNA, 324 bp, Glycine max
  unsure (1)..(324): unsure at all n locations
  Clone ID: PAT_MRT3847_56029C.1
ggccgccaccctttttcaagttctctttcnctgcaccaagctctatcttttcaaaaaaaaatacttccctatatatctaaacaaaaactcccagcacgttactttgtaacttgcatatccaatggagtacctttaccacttaacatctcgctgttagggaaccctctcaaagtggaaaagagaggtgttaagttgaagctaaaatgagaccggcccgaagaaaccctcaatgatcagggtgtgtcctatccgactacgccaacctaaccctgaccctgcaaaaggggatcatcttaaaagtcaaaggatggaatatgctcaaac

SEQ ID NO: 94151 - DNA, 170 bp, Glycine max
  Clone ID: PAT_MRT3847_5602C.1
acttattaaattcactacttattcattcaatttattttggccaaataggaatgatcgagattcgtacacagagcatttaaccacctacaaacataatgtattcacagagtaacaatgcattccattacttttactaaccccactatatctatcgtttagtgatttttttt

SEQ ID NO: 94152 - DNA, 851 bp, Glycine max
  Clone ID: PAT_MRT3847_56030C.1
aaattttatttgtggcaatcctgatcaaatgcggggcaagaatggtaatctacattcacagccattaagatcaaactcttttcctttgcaacctccttttataccaaataattcattttctccaaatccccaaacttttgcaacttcagtagtgccacctagaactggtggacccagcttctctgcagcaccactacttaatgtaccaaatattagcaatcggaaaatttctggatatcctagtaatgctcatgatccacgccctgttaaacaatggaatggagacttgaaacaaagttctaacaataatgctccaagtcctgtaaagtcaattggcgaacaaactggacatatggtacagaacacacaacaattgtataatggccatccacatggtccagaataccaacctacatcattgacaactatgggtaataataaccttcctggcaatggtatatggggatctccaggatgccctaaaccttctgaatatgtccaaggtcttataggggttgttttacttgccttgaacacattaaaaattgaaaaaattatgccaactgaggcaaatataacagattgcattcgatgtggagatcccaagcaccgcaacacagacgtcaagaaggctctggagaatgctattgagcagcagatggtggtgaagcagaatgtaggtgctttgcagttgtttattggtaagaatgataaggtttgggaagtgtgtaagccctgtaagtgggtatcctaagaagcactcaaaagagacatgggatgaaataaaaaaattcctatcaactccttctgggagattagtcataatgggtactcagtgcaagtatgaaaca

SEQ ID NO: 94153 - DNA, 414 bp, Glycine max
  Clone ID: PAT_MRT3847_56031C.1
aacaaaacatgcttattgacgacctttattattgtcaacccagacacactaaacaagacttttttaaatacactttgcccgatgccctacaaatgaattttgtggcgaggacaaataaaaaaactgtatttagccactttttgcaggatcactatagactatgcaccatacaacaaaacctttacaaaaagtatccgaccctcaaaacaagtaacccgtgaagattttaagaaacctacctgcacataaagtgcattccttcactcagcatagcgatgatgcatagcacgctcaatataaacggtaactcaccctaatcctggaacaaatttatgaagcatgctaacccaacaaatccaaaaggggaggatgcataaccagcgactttggatgagaggaaccagaggttgaagc

SEQ ID NO: 94154 - DNA, 251 bp, Glycine max
  Clone ID: PAT_MRT3847_56032C.1
aggaaatcctataagaagagaagtggaagagggagaaggagggaaggtgatatgaagggcgatgtagaggagcagagatatggagaagagactcagagataaattctgcaatggaagagtggtctatgctggatatagtcaaacctgaaggatatcataagattgcacacatcaccacaaaggctttcctaactctatgtgacttggctctacaagttattgacaagataggccagccatggctgatttga

SEQ ID NO: 94155 - DNA, 2953 bp, Glycine max
  Clone ID: PAT_MRT3847_56033C.1
ccttaactatccaactcaccttatatctcctcaaaaatagcggagttatcagccatataaatttttagtacattcataacataacattcataataaaaattgagttttggggctataagaaataagccagcatagaaacacaatcaaacacaacctaaaagtacaattatgacagtattttcttacataaccagaataagtaaaaggtcagtcgtaatttattactcagatagcatggcctcttctcattaggatggcgagcaaggcgagaaagggtgctattcatagaaggtaacaaacatagctggggatgtagtcaactgttgcagcagcatatgactaacttacatttttcatggttcaaccctgaattgttcaacctcaactttgagagacttgaggtatttaacagcttcatttaaaacagcaacagaatccatttgattacctccatcaggcacaatctttctcaacatcctcaccatcctctttatctcctggtgcttcccttcattgtggcagtaacccccagccccagaagacttctgtacagaagatgatgatgatgacctcttcttcagccatataaatttatagtacattcataaaataacacgcataataaaaattgagttttggggctaaaagaaataagccagcatagaaccacaatcaaacacaacctaaaaagtacaattatgacaatattttcttacataacctgaataagtaaaatgtcaatcatagtttattactcaggtagcatggcctcttctcataaaagttataactaggatggtgagcgaggcgagaaagggtgctattcatagaagctaacaaacaaagttggggaaatagtcaactgttgcagcagcatatgaccaacttacatttttcatggttcaaccccgaattgttcaacctcaactttgagagacttgaggtattttacagcttcatctaaaacagcaacagaatccatttgattacctccacctggcacaatctttctcaacatcctcaccatcctcttcatctcccagtgcttcccttcattgtggcagaaacccccggccccagacgacttctgtacagaagatgacgatgacctcttccttgattttgagcaataactggagcaagtatcggataaactttcataattttcttgagtccttgctgtgctgacttcttcctcgtcaaagtcatctagttcatccactcctatgctcaacaatgcgtcaatgtcattaggatcttcttcaaaaggagatgacacttctctttccatttgattggctttatttttctcaaaatcttgagaaccagtagcatgaacatttaagccaggactgttaaatttgtaggtcatggcaggatggaacatgataatgctgcatcaatctgttgtatccaataactccaacactcattttaatttgtccaacttccttcacagcttggtatctctttattgttaccgcaaagtacatggaggtaaatatgcatcaaaggcagaagcaagtggagcacgcatatgaggatcaatggcctcatctgccaaaggaagtaccatcttatccgggagaaaatattcctgagtctgcattatattatctgttgaatctgactgacgttcgagcaagcaatgctgatttagcctatgcaactggcaattattctgtactaaagctggaaggaagttcctcaaaggaatgttaaaactaaacagcatgtgctaaggtgaatccaatttacatctaagaagtagtggcaacttttccaaattaaaacttctatctgcagctttataatgaagcgcaatataaggcgatcccccccacccccctaaaccggtgtccgtagatgctagactacgtaacaggtttaagcaactgacgaaaatattcggcctggcaaacaagcatcaattggttaactccaacactcatcttaatttgtccaacttccttcacagctcggtatctctttattgttattgcaaagtacatcctcaatccccctaacagctttggaaatgaaaaggagaacagctaatgaaaagagttgctttgcaacctaatgggactacacctgagcaattaaattacagaatcacacgaaaaaacaccaccaagcgaacacaatttcttttgtgatccacaaacaaggaaacccacggcatcttgacttagctccactccagattatcagaaaagacaaacccagaaatctgacctaaggttttgtaagaagagaaacaaaaattgaagacgaatcagagaagggttgttgtgacgaagaaaacgcagagaattttagccagaatgtgcggacgcgtggcctgaaaaagtgtcaaagtaaggcttcagctgaaaatcaaaaagcaactgttcataatagagacacgagaggagcaaagaataactcactccaatctagctctaaaatactaaaataaaaataagttctttttttccttaaaaaaaggaaagttaattatcacaattcagattatcctcacaaaaatcctaaatctaatcttaggcacagaatccatcactcaagtttcataccattaacttaaatgagcttttgcagctaatagtaaagttccaaactttgcatcaaaacttaaccccccaccaaaccagcaaatcaattccaaaaagaaaaccctagctaccagtaaagcaaaactcagcatatgtatatatattcttaattttttttaaaaaagaaacatactttaagatatagatcttaaaactagaacctcatcagcacaaaaaacaacctgattttgcaaattgacaacaacgctaaatggaacaaattggggaaaaagatcacagtgagcgacagagcaagacctaaggttttggaaacaaaaattgaagacgaatcagagaagggttgttgtgacgaagaaaatgcagagaattttagccag

SEQ ID NO: 94156 - DNA, 652 bp, Glycine max
  Clone ID: PAT_MRT3847_56034C.1
ggctaaaattctctgcattttcttcgtcacaacaacccttctctgattcgtcttcaatttttgtttccaaaaccttaggtcttgctctgtcgctcactgtgatctttttccccaatttgttccatttagcgttgttgtcaatttgcaaaatcaggtcagatttctgtgtttgtcgtttctgataatctggagtggagctaggtcaagatgccgtgggtttccttgtttgtggatcacaaaagaaattgtgttcgcttggtggtgttttttcgtgtgattctgtaatttaattagctcaggtgtagtcccattaggttgcgaagcaactcttttcattaggttgttctccttttcatttccaaagctgttggggggactgaggatgtactttgcggtaacaataaagagataccaagctgtgaaggaagttggacaaattaaaatgagtgttggagttattggatacaaccaattgatgcttgtttgccaggccgagtattttcgtcagttgcttaaacctgttacgtagtctagcattgagggacaccggtttaggggggggattgccttatattgtacttcatcattataaagttgcagagagatgaagtttaatttggaaagttgctatactttttacatggaattgaat

SEQ ID NO: 94157 - DNA, 565 bp, Glycine max
  Clone ID: PAT_MRT3847_56035C.1
ctccagccggaaaaatctaccaatctcaaacagtagcaaaaacactgacgaattattttcacccgcaaaataaataacattataattcccaaaattgccataatcaaccatatctgaacaaaaaaagtcagtcaccatcgtcgagagcgaatatccataataatacagtcacaaattgcaataacacactcattggggttataaaaatttgatcgcagcgtagaaaaaaatgagaagtttgagagcgattctgaaacatccatatgactttcaccctctgctgaatctgaaaatggcggagaagaacgccgaaaaacatatcccgccagacccgcactgggcgttctgctacacaatgctacacaaggtttctagaagtttccccctcgttattcaacatctcggtatagatcttcacaacgccgtgtgcatattttatttggttctgagatctctagacaccggtgaggatgattctagcataaacacagatgtcagggcgccaatactgatagcctttcaccgttatatttatagatcgagattggctctttttgtgtggcac

SEQ ID NO: 94158 - DNA, 562 bp, Glycine max
  Clone ID: PAT_MRT3847_56036C.1
aaagcacggaatggggctcgagggacactcgaatggtaggcaccaacagcgacgatgaagttattcaagtttccttctaatttaacgaacccaccattcgagtttccttccaatttcattttctattcccactcatcgtcgctgacgctgacatagatgatgaagttattcaagttaaacttacacacttcacattcacatggtctttctctgcaatgccaatgccaatgccatctccctcattccaacccctcaaatccccccacaacctctgcatcgtcaagtccctcctctccaacccttccctctccgacgccgtttcctctctcgacctcttgcgcctcaagggcattcgcttaccctctcacgttctcgccaccctcttgcgccactgctccaaaaccaggtcttaccgagagggcaaattcattcacctccacttgaagctcactggtttcaagcgcccccccacgcttctgggcaaccacttgatctcaatgtatttcagctgcggcgatttcgctcaggcacgcaaggggttcgacaaaatggacgacagaaa

SEQ ID NO: 94159 - DNA, 287 bp, Glycine max
  Clone ID: PAT_MRT3847_56037C.1
atatgtacagtttactaggcgtccaacattatttacccaccaaatgttatggtagcttctatatgtgcatccaaaaatttactcagatttcaaatgctctcctctggatgatatcagaatgttttgcgagaacattactttctaaagattcgaccatgtcttaagcccattcttcacactcaagtcagtatcacagaacgttgtcaagtatttttcatgaacgatgcctctttgaagcgccccaaattcttatcatctttacaacagatgttaccactatgcgacaa

SEQ ID NO: 94160 - DNA, 436 bp, Glycine max
  unsure (1)..(436): unsure at all n locations
  Clone ID: PAT_MRT3847_56038C.1
aaagaaaatctgttgcctatggggcgcgacttgggcacattgcctttgactacgaaaaactttccaagtttttctgtttaatgacacaggccccccatttttcggagcttaggggagtttacgntgaacaacaccagaaaatttttggcttaaaagggtataaaaaaaacactggatgtttcacttcgtgggacatttggaacaaagaaaaagggtttggtatccgggaccaaaaaattgctcagggatctgggcccttgttcgacgcacaacccccaatgtgtccttggacacccgaaaattaaaaaaaattgccccagaatgtgtcttcttggctggaaaatggtgatccagacccccttgtgaggaaaaggtacgccccacttgttgctggagccgaacttatggtttaacaacgggtccatgggaacttttg

SEQ ID NO: 94161 - DNA, 383 bp, Glycine max
  Clone ID: PAT_MRT3847_56039C.1
cccgtaaccatgtctcaggtgcaattttgctttttatttttctcttgtttttccctcggtttctgattcggtgttctggacttcatagctagcaatttctgaattgttatatctgcaattatttattggaatcatttgtttgacttttcaaaaaattaggaattcctgtgtttggttgggaacccttaaaactagagcaaggattataacacgattgggcgaaaattaaatgcatttgattttcattaaccatcggtttctctgtcaactattgcagaatttcttacttgttcagctaccattgttttttttttttttttttttttgtataacgcgcatgctagatctctgttttcaacactttattcctgattatatgctct

SEQ ID NO: 94162 - DNA, 879 bp, Glycine max
  Clone ID: PAT_MRT3847_5603C.1
cctcgcgtccggtagtggggttcgtaaacgcaggggaatcgagtgcgtgagggtttgcagtgtgcagtgtgcagtgtgcagtgcacttggatgcatcaataacccccgattcaatttgggaccaagatcctggttcgcgatgaagaggtcatttccatgggaaaatcaaattgatgtctcttcttcttcttctccaaactcccttcgtcctaaccccctaactatccctaactcccccatagataccaagtcccaagatgcactcatcaggcgggcagaaatgtatcaggattacatgaagcagatcccaatcccaaatcatcgaggcactatgatcccatttacctcatggatgggattaggcagatccatgaagcagatatacggacagcctctgcattacctcaccaatattctcctcaagcaatgggatcagttgagaattggcagtgaggatgaatacaagcccttggacaacatagttcatccacacaaagctgaggccaccatctggctcattgaagaaatccatcggcaaacatcatcgcattttcatcttgctagtctgtggaaggtggacccaatgtacaatggttttgttgattccattttcccaacattagagcacacatcatgaaaatgaagccatttagttttgaggctttgtgctgtatcctgcaaatagtttcggttatgttgtccttttcgtaaagcaaaaatggaacgacttccttgatacttccattaaagagaccgacagagtcttactcgcctcgcaaatattctccgcggccgcgggggtcggtcgacaaggggcagtgccgggcttctcgcatcggtcatgttggggtagcgctctctgctgcctgctttctttta

SEQ ID NO: 94163 - DNA, 1593 bp, Glycine max
  Clone ID: PAT_MRT3847_56040C.1
ctagtactcgtgaattaacaagcctagctagctacgtacagttttaatattcctgaaaaatggatggtaaggttggagaaggagaattcattgtgagtgtgaccaaggaggagatagtggtaccagagcttccaatgaaagagcaatggctgccactatcaaaccttgatctactcattcccccagtggacgtgagtgtattcttctgctacaaaaaacctttgcctgaaaaatattattgctttggaaccatggtggggtcactgaaaaatgcactggctcaggctctggtatactattacccttttgctggtgaaatggtggccaacaccatgggtgagcctgagctgttttgcagtaaccgtggggtagattttgttgaagctgtacgctgatgttgaactacagtgcctcaacttgtacaaccctgatgacactgttgaagggaagcttgtaccaaggaagaagcatggcgtgcttgctgttcaggcaactgggcttaagtgtgggggtttagtagttgcatgtactttcgaccatcgcatagctgatgcctactctgcgaacatgttcctcgtatcatgggccgaagcagcccggcccaacaagcccataatctcagcccagccatgtttccgacgctcccttctcaccccacgtcgcccaccttccatccaccctttactccaccacatgtacgttcccgtctcggcgctacctccaccgtcagatcctaataagaaactcgtgttcgaatctgagccactcatcagccgcatatactacgtcacaagcgaatccctgaaccgcatgcaagcactagctagctcaaacggtaccgtgaagcgcacaaagctcgagtctttctctgcattcttgtggaagatggttgctgaagctactgctagtgttgatggtaagaaaaacgttgctgcgaagatgggtgttgtggttgatggaaggaagatgttatgcaacgatgaaaagaacatgggttcgtattttggcaatgttctttcgattccctatggtgggaatgcggttgatgagcttgtggaaaagccattgagttgggtggcggagaaagttcatgagtttttgaagatgggtgtgacagaagaccattttttagggcttgttgattgggttgaagaacatcgacctgtgcctggtttgtcaaggatttattgtgggcatggaaaagaaaaaggacctagttttgtggtttcttcagggcaaaggtttccggagtcaaaggttgactttgggtgggggaagcccgtgtttgcatcgtaccattttccttggggtggagattctggctatgtcatgccaatgccttgtgctaatgggaatggtgattggttggtttacatgcaccttctcaaggctcatttgaatttcatggaagttagggctcctcaaattcttaggcctttctcttgggattacctcctcaattaatcttcattgactttgcttgttcttcatcaatcacgcaacttgttgatttgcaacaagggaaaataatttctagtgtgaattttatccatacaaatagtatcaagtggtgtgacgcaagtatttattttt

SEQ ID NO: 94164 - DNA, 285 bp, Glycine max
  Clone ID: PAT_MRT3847_56041C.1
ccccccaaagctaattttttttttttggaaccaaaaaaagggattcgtttcaatggccccagggggaaaaaaaaggtttttagacccaaaccaaccaaaaagggttggccccacccctttttgaaaaaaacttttcccaaaccccttttcttagtgttccccctaaaataagcccctccacaacgccggggcccggggggtttactacaaataaccttttggggaaatggcccaaaacaaacccttttgggggttttttaggggatggggggggaccttttaaaa

SEQ ID NO: 94165 - DNA, 220 bp, Glycine max
  Clone ID: PAT_MRT3847_56042C.1
cggtcgcgttggcgaattctgttctacgaaatctcgcaatcttcgccgttggaatcggtggtttagtcgcaatcttgcaatcctatttcattcgaagactctctactttttgcctatgttgatagtaagattgtatttcatttaaagaggctaggcaagaaggatcccaccactgatgtagtggtggatggctgtaagtaaacgagtaaacaaagcaaag

SEQ ID NO: 94166 - DNA, 101 bp, Glycine max
  Clone ID: PAT_MRT3847_56043C.1
attaataaacatgattatcagtataagaaattatgattcacttccgcggggtatagccctccctatgcttgacagttaatgctcaccagactccagcttgg

SEQ ID NO: 94167 - DNA, 476 bp, Glycine max
  Clone ID: PAT_MRT3847_56044C.1
ttcgacgcgctcactcgtcagctggcgaccttgatcgtgaaattattttttttcttacattaaaatatggtttgtagaggtggtgaaaaaagaataggatcttaacctgatagtcactaacacgagccatgttcaatcagaggagaatattggaagataaagagcaccaattggacactaaagattttccctactcggcctttcactacaaccagaagctcttgtgggacaagggtgaagattacgagggcatggtccaaaaacttaaagttggactagtagtggtgctgtgggagttccaccaccttgctgtgaaattagggtaagaacactagggggcgcccatgagtggaatctgatcatgacatgcttggcgtggaagctgttggaactgccgcctctaatgaggagaacggtgtgggtgattcttaccagggttgaaatctggaaccctaatttgaatgacctgatgcctc

SEQ ID NO: 94168 - DNA, 259 bp, Glycine max
  unsure (1)..(259): unsure at all n locations
  Clone ID: PAT_MRT3847_56045C.1
ttctcgagccgattcttctcgagcggctcgagctgaagaagaaggcctccagacagtgaagctactttctaacaaggagcacagcggatttagcaatgtcaacgattttctcccaagtgatgcggcaaatcgtctgaagtaaaccatattgggaaaccggtacttttttagnattncaaatttcaaaatttttgctagcttacaatttttattgaggacaatcagtcaggttcagagatcacaaaagttcagaagatcg

SEQ ID NO: 94169 - DNA, 426 bp, Glycine max
  Clone ID: PAT_MRT3847_56046C.1
tcggcggccgtccttttttttctttttttttttttttcttttgatttttattcatggatgcctttaacttggccagaggccctgttcattgaatcagtgaaaaccgggaaaaactcgttaaaaaaaagagagacaaagaagatctacactgcaacctttacgtcgcacggtgcaccaaacatgaaaaggggctctgccaaaatcaagaacaacccacgaaaaacatacgcttaatccaccccctcaattgtgggaccaaccccacattacaatggccgctgcaggaccctcctaaatcaagggtccacccagtataacaaccaacaccgcggcgcaccatttggtttgaagggatctccaatgctgtccaaatccttcatcttattccaaaaagctggaccctcaaaaagcgaggttccactttgc

SEQ ID NO: 94170 - DNA, 2271 bp, Glycine max
  Clone ID: PAT_MRT3847_56047C.1
aattcggctcgagctcgagccgaatcggctcgagcggctcgaggaaagcattatcacaaattgttcgattcattcatcttctcttctctttttcccccataaagattattccatcgcatggtaggttcctgcaactacgtacatgcaaatggaaaacatagtgtgtgtagcacagcgcattaatatggggacaagaatcacttttcagttggaagaaaggtataatttacagcacggaatgtctggggcgggtggagctatacgtgtggagagagcaaggaagcaaagagccaccacccatggcttcaaattggaccgtggcctcgtcaagaaacaacgacgtgttggagtgccgttcaaagcagctgcaactgctgaatctgaggcacaagttcgtacaatttccaaagatccaataatgcttgcaaattatgtaccagtatatgtgatgctcccgttgggagttgttacaaatgataatgtcttgcaagatagagtgggactagagaaccaactcaaagagctacaagcagcaggtgttgatgggttatggttgatgtttggtggggtatagtagaatccaaagggcctcaacaatatgattggtccgcttataggaccttgtttcaaatggatcaggactgcaaattgaaattacaagctataatgtcattccacaaatgtggggggaatgtgggagattccgttttgattcctctccctaaatgggtacttgaaattggagaatcggaccctgatatcttttacaccaaccgcaaaggtattaggaacaaggaatgtttatccctcggcgtggacaaccaacctttgtttcatggacgaactgccattgagttgtacaccgactacatgcaaagcttcagagataatatggaagattttcttgaatccgagctcatgatagacattgaagtaggacttggtccagcaggagaacttagatatccctcttatacaaaaaatctagggtgggaatttcctggtattggagaatttcagtgctacgacaaatatcttaaagctgatttcaaaggagctgcattaagggcagaccatcctgaatgggagctacctgataatgctggggaatcaaatgatgtacctgaatctacagaatttttcaaatcaggaggaacttatcaaacagagaaagggaaattttttctaacctggtattccaacaagttgctgacccatggtgatgaaatcctagatgaagccaacaatgtattcctaggttgcaaagtgaagttagcagctaaagttgctggaatccactggtggtataaagcagaaagccatgctgctgagcttacttctggctattacaacttacatcatagagatggatacagacctgtagcaaggatgctctcccggcacaatgctattttaaattttacatgtcttgagatgagaaatcatgagcaaccagctaaagcccaaagtggagcgcaagaacttgttcaacaagtgcttagttgtggttggatggagaaccttgaagttgcaggggaaaatgcacttgcaagatatgaccgtgaagcttataatcaaatccttttaaatgctagaccaaatggtgttaaccaatttggtcctccaacactaaaaatgtatggtgtcacataccttcgtttgtcagataagttaatgcagcaaacaaactttaatatattcaaagcctttgtgagaaagatgcatgctaatctggaatattgtccagacccagagaagtactatcatttcacagtacctatggagcggtcgaagcccaagattccactagaagttcttcttgaagcaaccaaaccagtggagccttatccatggtataaggaaacagacatgagccttgatgttactggttttcttgattatatagttgctattattgtacgtatattcaagctaaaattaaactaaaaacgacaatgaaaaagaaggaaggaattaaggaacaatagaaaagtaaaggatatatatatgaaaggagaagcaaaatgtgaaaaagggagttacaattggttctgctccaagcctgctacactgccatgccaatcacaaagtggagatgagaaaatagcttaaaatagtttgcttccttgcagcacccacattttctccttatatagaaactctttatatcactacacgattaattttacatgttctttattatctacaagcttttcaaagtgtaccaaatatcagtgaaaaactaataataattattttttattacaaaaa

SEQ ID NO: 94171 - DNA, 508 bp, Glycine max
  Clone ID: PAT_MRT3847_56048C.1
cacacagaaaacaaggaaagcaatgcctgggatcgcggcatagccggacaaaaacccctccttatacgtccccatgctcttcctcctctgcaccctcttctccattctctccctcgccctcttcctcttcctcatcttccccaccgccacaacaacaaccaccctccacccttctctctctccattctcctcttccacaatcaacgtctacgtcgccgacctccctcgatccctcaactacgccctcctccacacctactggtcctctttctccgattcccgtctccccaccgatgccgatcacaccactcccccttcctccctccatcagacggctaagattcccccttaccccgagaacccactcatcaaacagtacagcgccgagtactggatcacgggcgacctcatgacccctccccaacaccgagccacctgcttcgcgaagcgcgtcctcgacccgcttctcgccgacgtcgtattcgtactcttcttcgccacgctcagc

SEQ ID NO: 94172 - DNA, 257 bp, Glycine max
  Clone ID: PAT_MRT3847_56049C.1
ggaagttgtttgtgacttacaatctcgttgccttcgaaaaaaaaatggaaccgtcttatacctttggcctttaggcccatgatcttgctcctggaccctaagtccaaaggggcgctaatcaacccctagtaggggggggcaaaagaaaaataacaaacctatttatcataaagggctgggggtggggaaccatcctatgaaattttaaccccaacacctacgttgcaaaacaatttttttttcccacaccctcctac

SEQ ID NO: 94173 - DNA, 592 bp, Glycine max
  Clone ID: PAT_MRT3847_5604C.1
cccacgcgtccgcccacgcgtccgtacggctgcgagaagacgacagaagggggaagacaagaaatgaaggagatcaatgaccctgcagcaccatcgcctcctagagaagccattctaatggatcagatgaaaacttttttgctatatatagcaaaaattaaagaggaactggagagtgaccctcaattatattggcattcaatttatcgtatagaaaaaatggacgttagcggcgacgactctgtggaaaagctcacaagcaaaattttgcaatgcatagaaaaaatggacacagggcttcgttgggagagcgttcttttactgagactcgagaaaactataaaggaactgtatccagaactctgggttgtaaatgtgtgtggcttggggattgtgattgctgattcagttttggaatccaagtttgcgcctcacgccgtggatttgtctttgccggagcttgaaagtagaaacataataaaaggttacattggctcaagatatcgtcgtccgtattatccaatggtgggaaaccataagcggctgcaagtatatactgacattcacgtagaacgttgtttagcgaagtggc

SEQ ID NO: 94174 - DNA, 270 bp, Glycine max
  Clone ID: PAT_MRT3847_56050C.1
gtttttgcctaatgtgattgttttttgaccaaacatatgggcaacgaagttacttctattaacctttaatggggaaagccaatgacaaggttaccatagggggaccaaggtttaagacaaggtcatatttggtaaaaacgtttttttgggccatataactactatgcctttggaatttttgccccgagggaaaaaatcgaatttttcactcgagagtaacaagggtcggtccaaagttagatgatccaattaatcttgggggggaaattt

SEQ ID NO: 94175 - DNA, 706 bp, Glycine max
  unsure (1)..(706): unsure at all n locations
  Clone ID: PAT_MRT3847_56051C.1
ctctcggctcgaggtaccgtacccgtgagccatgcaccgacagttggattacatctcttagttttgtccgtggaaggagctttttccggtaaatatttctaaaaacatgatttaatgcattacttaccgggaccagctttttcctgccagatctagccaaatgcattttcctgtaaaaagatcacaaatatgacaatgttgcattcaattttccctaaacaatataaaaaggtcagagtgggactcgctaagttagtagttcgacaatggcggaggtagggtttcaggaacgaagctcgtggagagtggggctgagagcgcgctatagcagccccgactctgtggttttcactctcgaatcgaacttgagcctcttctcctatgcgtccgcgagcgttgatcgatgctccttttcatctgattcacacgaccacgactctttcgtctccgaaatctcactggatagtactctactctctaccgtataggcatactcttcttttacaaacactgaatgattagtggaaattattgagtttttttttttttttgtgtgtgtgtaatgcggnggtggtggcataataataataataatggtgagagaattgagtaagagtacatgttgttggtgtactgtttaggaataatgaggtaggtttttgagtgtaatgatgggagactgaaagggcgattctaagggtaaaaa

SEQ ID NO: 94176 - DNA, 329 bp, Glycine max
  Clone ID: PAT_MRT3847_56052C.1
ctagaacacacaatatccttcgttactgatgcatgaactcgaagcttcactgtggcgaatgaggcggctctgttagacacatggacacgtccattagggatgaggcaccagattgcactcgctgaatagggtatcaaatatgagggcaactaatacgacttgctgaacatgaaccgttcgcttctcatactgaacccggggcatatgaaaattcaggacctcatgagatctggcaaaccgatttggcaatctaatggtgctggatagaacactgacgaggtctgtaacgacacacatactttgtcgtcttctgaccttatccagatagc

SEQ ID NO: 94177 - DNA, 477 bp, Glycine max
  Clone ID: PAT_MRT3847_56053C.1
gttttataatgcaagagacgcaaataattgtcggaggggcctctctgtgctccattttggccatcctcgccaccgttgttgtggtgccatcgctgtactcggagatcaatgagatcgccaccaaagtgcacgacggtgttcaggctttccgcgtggacactgactcggcctggaccgacctgatggacttacaaatcacagtcacgccgccgtccaagccgcgtcagaacccgttcagctccatcttccgccagaagcgtcagttgcccggccactgccaatgcgcgggtgtgcaacagccgaactgcccgcccggcccaccgggaccggacgggtcgtcgggacagcctggccagcctggacagtccggaggacctggacagcccggagtaccaggacaacaaggtccgccttgccctgtctatacgcacccgtgccaacactgtcccgcgggaccccccggacagtccagaagcc

SEQ ID NO: 94178 - DNA, 297 bp, Glycine max
  Clone ID: PAT_MRT3847_56054C.1
ataaaatgaacggaactctgcgattggggtattttattggttccaaaagttttttcccactatccttttaacgatggggtgagacttatttgctttcacacgtagagtgtttggattgaattttatctcaacaaaatgttttttttatacacatggctggcactcggttttttaaaccattttttaaaaaaaaaaaaaaactaacaatcttcacactgggctggggtaggatgcaaaagccttgaagccccctttaaagcactgcggggagcctccgttgtttattattaccctttt

SEQ ID NO: 94179 - DNA, 385 bp, Glycine max
  Clone ID: PAT_MRT3847_56055C.1
taccgtccgaattccggtcgaccccgcgtccgaatttaaaaaaaaaaaaaaaaaaaaaaaaaaagaaaaaaaaaaaaaaaaaaaaaaaaaaaaaaaaaagagaaagtactaagcatcagcgaagccacctgtctaacggttccctgttgtttttcggtgcgcggctgtcactgcgggctgggaaccctgggggggggggggcctccttttttttcttgccctttgggcgcgggccctttttgtcggggcggaccggtccccctcccgacgggggcgcaccctcttggttctgaacccgacctggatggctcttgagctaggcgggtgaggtggttcgctgggggcccgctcggtcccctccccctgcgcttgcctgcgccgggcc

SEQ ID NO: 94180 - DNA, 350 bp, Glycine max
  unsure (1)..(350): unsure at all n locations
  Clone ID: PAT_MRT3847_56056C.1
acttactatatcccccttacgtgtctgctcatatcttattttatttcccgaccaaaaatcctatgggggctctttctccctctctactctttctattctatccccccggtctgcccccttggcccccaaagccccacnaaccgcncacgaccccccgnntgatttgnnnnnnccctcctctttgcnngtcctctcttgtttttcttttncgttnttctttcttgtgtcccccttggggctgcgcccccccctttctctcaagcctcnccccacccggggtcttgtaacttccccctcccttcttctctcttatttgctttgtttctctacctccccccccngcctttccc

SEQ ID NO: 94181 - DNA, 280 bp, Glycine max
  Clone ID: PAT_MRT3847_56057C.1
ctcataacacatagcacaaagcaaagctcatccttgagttaaaaaatggcagcagcttcggccatggctctctcatcccaatccttgcctgccaaggccttgaacctggcccattaagcccaaaaattggaaaggtgagcctgaagaaagaccgtcaccaaccaggtttcttaaggagcccaatggtacggcccagaccgagtcaagtacttggcccaattctttgccaggccccgttctaactaaccgcggagttcccaggcgactacggctgggacac

SEQ ID NO: 94182 - DNA, 873 bp, Glycine max
  Clone ID: PAT_MRT3847_56058C.1
gagtaccaatttgcgccccttctctctttttttctctttctctctttgtgtcgcctggtcttggcatctccgcagcaccacccaccctggaccaggtcttcaacagagagaaagagaaggaagaacacacacacacacacacacacgttaaactaacattttttattagtaagaagacatggctcaacccagttccaacggggatctgaataataaccagcagggtcaggttcagcaacagcagcagcagtgggcggcggcgcagccgcatcagtatcagcagcaatggatggccatgcagtacccggccacagccatggccatgatgcagcagcagatgatgatgtacccgcagcattacatgccctacgctcacccccattatccgccgccgccgccgccgccgcctcctcagtcgtctcaccatcaccaccacaaacaggccgcagccgcggcggcggctgcggcctcctccgacgagatcaggaccgtctggctcggcgacctccaccattggatggacgagaactacctccacaactgctttgctcacaccggcgaggttgtgtcggccaaggtcattcgaaataagcaaactggtcagtctgagggatatggattcgtggagttctattcacgagcgacggctgagaaagtcttgcagaactataatggcacgatgatgcccaatacagatcaggcattccgtctgaattgggccacattcagtgcgggggaaaggcgttcttccgatgctacttctgatctctctatatttgtgggggacttggccattgatgttactgatgctatgctgcaagagacttttgctggccgatattcatctattaagggagcaaaagttgtcattga

SEQ ID NO: 94183 - DNA, 316 bp, Glycine max
  Clone ID: PAT_MRT3847_56059C.1
ggcataggcagggatagatagagacaagcttgaagcatgtcagacgaagatcatcacttcgattctcacgcggatgcgggagcgtccaacacgtatccgcagcaggctggtaccattcgcaataatggctacatcttcatcacatccaggccttgcactgttgtataggtctctacgttaaacacaggcaaccatggacatgcaaagtgtcacttcgttgcaattgacattttcaatgggaaaagtcttcatgatatttttccatcatctcacagctgtgatgttccacatgtgactcgcactgactatcatctta

SEQ ID NO: 94184 - DNA, 829 bp, Glycine max
  unsure (1)..(829): unsure at all n locations
  Clone ID: PAT_MRT3847_5605C.1
actctatctgcttcaacgttaccactactgtaaacgaaaaaagaaagaaaaaaaacacttctttctctgtcttactgttcactctgctgtgtaccaaaaccaaaaccactcacaaggtgccactaatctgtcaggttatttcaagataccattttttctggtgtttggttcccgagaaactgtttagaatatagaatcaaggaacagtagaaggccaccaaatcatttcaatttttttcttcaatctgtgtcagcacccttgttttgcattcttcttctagcggctgcttcattatttcacacatctgtgacttcaattgggattgtactaatggaatcttggagttatgtccccgaagagaaaggctatttgttttctgatgaaatggatttttcacttgatgctttcatgagaagtagaaaagcattggttgaatgggacaacaaatccaactttgttgagaaagatggatttaattcacacagagaggtagttagaagcatggaatttgtggatttgggattccctgacttgttgcaaaagtcttttcatggaagccagcctctagagacatctagctatgaactagatagtaataattctagtaaaagagggaattcctccccacatgtcattgccttggattcttctatgggggaagaggaatncgattcaaagcatttgagttctctaggtgaatccaagactcatgattgttcactgattgatctcgagctagggagatttagcacactgtaaaggtgcatgttgcgataaagccccaaaagaagggttcactttaacatccatccttccgaccccactttg

SEQ ID NO: 94185 - DNA, 364 bp, Glycine max
  unsure (1)..(364): unsure at all n locations
  Clone ID: PAT_MRT3847_56060C.1
aggaaaaccttccatagatagcctcccataaaaatgaagagtactacctctttggctctctttctacgttgtgcccgaatttcatcatatcagccttcagccgtcgctgatattgtactcgataccgagtgcaatccgattcgaaacagcggcacatactatgtgttgccagttatgagaagaaagggcggctgaatacagtttgcgaaaaccgaaacagacacatgccctctcactgttgtgcaatctccctttgaggtctcaaanggtctaccactgatgatttcatccccagttaagatccttgacatcaccgatggacttattttgagcctcagtttcacttatgtactcacctgtgcct

SEQ ID NO: 94186 - DNA, 645 bp, Glycine max
  Clone ID: PAT_MRT3847_56061C.1
tttttaatttattttatcatggttttcttcttattcatggaagtatagttattgtgtcatgattattgattaacctcaattactcaaatacaagggagtgcaaatctctttgcatgataccaattttccaaaagattccaccaatatttaacttcccacgcgtccgctccctctaagaatgatgttaaagatagcattgattttaaatttaaagggttcactgggatgtgaagattttaaacctcagttctgctaggtttcccactcaaatgatgactgtgacagttaatttgaatttcagggactggtaaatataattatggagaattatggcttgaacccttttggactccatgctgtgagcaagatctgtatttcttgatagttgtacacacactgactcatacatgcacgaataatacttgttttgctggggggtggttagtcttttttgatgtctagaacattggtgggggaacagatgtatgttggggtatcatggctctgttccaaattttttcctcatgtaatttgaacctgtcttgggttactggaccatttgtctttcgggttctctaacttgaggtatgtacattgagggtatcacttatacccttagaaatacaatattttcactttgctgat

SEQ ID NO: 94187 - DNA, 1484 bp, Glycine max
  Clone ID: PAT_MRT3847_56062C.1
aattcggctcgagcacacctgccgccagtcacatcatccggatacgaaaggcgaccggtggcatcctcctcactgccagccacaaccctggtggccccgatgaggactttggcatgaagtacaacctcgccaacggtgccccggctcccgagagcgtcaccaacaagatctacgaaacctccaagaccctctcgtcgtacaagatcgccgatatccccgacatcgacttgagcacaattggcacacaaaagtatggcagcctcgaggttgagatcgtccactcaacagaggactacctgaagatgctcaaggacatcttcgactttgacctcatcaagtcgttcctcaagcagcattcggacttcaaggtcctcttcgacggcctgagcggtgtcaccggctcatacggtgtggacatcttcgagaaggagctcggcatccccaacagcacacaaaactgcgtccccaagccagactttggcggccaccacccagaccccaaccttgtctacgccaagtcgctggtcgacgctgttgacaagaacggcgtccactttggtgctgccagcgacggtgatggtgaccgaaacatgatctacggcgcaaactcgttcgtctcacctggtgacagcttagccatcatcgcacaccacgccgagcttatcccgtacttcaagaagcagggcatctatggtctcgcccgcagcatgccgacctctggcgcgattgacctggtcgcaaagaagaagggcgtcgagtgctacgaggtgcctacaggctggaaattcttctgcggtctcttcgactctaacaagatgaacatctgcggtgaggagagtttcggcacaggcagcaaccacatccgtgagaaggacggtctgtgggctgtcgttgcctggttgaacatcctggccggtgtcggacagcagacgggtaccacacccagcattgcctcgatccaaaaggacttttggaagacatatggccgcacattcttcactcgttacgattatgagggctgcgagactgagggcgcaaacaaggtcaccagtcacatgaaggaactcatcaccaccaagaaggacgagttcatcggctccaccgtcgctggccgcaaggttgtcgaggcagacgacttctcctacaccgacctggacggtagcgtcagcaagaaccagggtatctttgtcaagtttgacgatggtagccgcatcgttgtccgtctgtctggcacaggtagcagcggcgccaccattcgtctttacattgagaagcacactagcgacgagtcgacatacgacatggacgctcaggattacctcaaggacaacgtcaagcttgcgactgacctcctgaagctccaagagtacgttggccgcaccgagcccgatgtcaagacgtaagcgcgtttgttggagtggagaacacggagatgtaattagcatgattagacgacttgtacacgagaataccagtaaaaacag

SEQ ID NO: 94188 - DNA, 393 bp, Glycine max
  Clone ID: PAT_MRT3847_56063C.1
tccacgcgtccgcccacgcgtccggaaatgtttataactttgtatgcaacttgtgagttgtgacaggttaaaaaatgaataagaaaatgtatttttaatgtgggtatttggtgattaggcttttggttaattcaataaccaaatttactatgatagtatggttccctttgcatgagtggatttgagtgtttttcagtggcaccgatgagttagaggtctttatgctgtttgtttttgtttacaataatatatgataatgtgccactgatgtgatgtctttagggtctttatgtttcccttagcaaatagcttgtgaaagatttaatttcatacagtctatagagtttttatactgtcatcaattaaaaatcacctaaattatgacttttatgt

SEQ ID NO: 94189 - DNA, 177 bp, Glycine max
  Clone ID: PAT_MRT3847_56064C.1
tttttaggtggcttcaagatatttgcaatagagcaggtcgatgttgctataatggaagtaggattaggtggaatataccatgcatcaaatgtgggtcaaacacctattgtgtggggaacaacttctcttgggtatgaccacatggaaattcttgggaatactttgggggagattgct

SEQ ID NO: 94190 - DNA, 1324 bp, Glycine max
  Clone ID: PAT_MRT3847_56065C.1
ccacgcgtccggaaattaccccgcaccaaaaaaaaaaggaaaaagaaaacaaaaccatgcaatacacgaaaccagcgtttcgaaacgcggctttctactgccagggtttctctcgctccttaaccttaaaccctaaccctctgctcctcgtttccccgtttcggaaacccgaaacgtttcgcctcgcttcacccgtttcgtgcttatcctcctcctcaatggcggtgcctccgtcttcgctggagaagcaattcgatgactttagggttcagctggaagaatctggaaccttgcgcgaacgaattcgaagcgtcgtttcggagattgagtcctccactaggctcatctatgccacacttcttctcgttcaccagtctcgtcccactcccgagcttttagagaaggccaagtctcatgttaatgtgttaaagaagcagtataagcaacttgctgaagttgttggaggatgccctgggcaatactataggtaccatggtgattggaagagtgagacacagtctgtagtttcaatgcttacatttatgcactggcttgaaacaggaagccttctcgagcacaaagaggctgaggaaaaacttgggttgaatagttcagaatttggcctagacgttgaagattacttaataggtgtctgttttatgtctaatgaattgccaaggtatgtggtgaatcaagtgacagctggggactatgattgtccaaggaaggtcttaaagttcttaacagatctccatgctgcattccgcatgcttaatctacgaaatgattttttgcgaaagaagtttgatggcatgaagtatgacttaagaaaagtcgaagaagtttactatgatgttaagattcggggtttgacaccgaatggtgagccagttggagacttggagatcaaggaatcgcaggacaatcttaatcttaagttgtgatacctgtagacccaaagtacatggagctttactagcttcttaacaaactatggaccttaaaaattgataggcttagctttttgttagctgtaacgggagttctatttctaatggttgatgaaagcaagattcatgagtaaggaaatacaattgccagtatgtgctgctgactttcaaccatcgtgagaactaagaaccctgtactcaatgcttgtgggttgaacggggattttcaattcaatccacagcggacaatttgaagtttttctttaaaacctttcaccccatcggctaaatgaagttgtaattccctattgcaaaataaaaaagttcatgagatgaaagaaatagagaataaagaaggtaattcattgattttt

SEQ ID NO: 94191 - DNA, 318 bp, Glycine max
  Clone ID: PAT_MRT3847_56066C.1
ggctcgaggtgaaacttagacctcattaattttacatcaggacccagcataagtgcgagaacatttatttttacacctaacgtcctatctgctacttttgcgccaactggagctaccaccgggcagaatagcctggacaacctactggccagagacacaggtaatgcaagcccactggtaaatacaaaaggagctgagacaatagaggatgaccccgccccactgatatccaactaagagccagggctaacctgttgggcaggaccaagacttctacatgtcggaggacacctctaaatggccgaatcactgacccca

SEQ ID NO: 94192 - DNA, 531 bp, Glycine max
  Clone ID: PAT_MRT3847_56067C.1
gtctctctctgacaatttccgagtccttctatattccaatggcttctacaaaggtcaacaatcgaggttcgcctggatcaaaaaggtttcgaaacgacgcttcgcctaaagatggagattggacctgccctaattgtgggaacttaaacttttcttttagaactggttgcaaccagggacgctgtggtgccccaagaccacccctaactccacctgccccaattataagcccgtatagaaacagtcatcccttctactatggtggtgtcggcattcctcctccatcatatggaatgccaagtcagtttggatccccaatacctcatcctggcatacagtatgattatggtttgtatgctagggctcgtgctccttacagtccattgcccatgttcccacctgcaagctttggaggtattaattatggtccaaggcctagaattgatggctatggctatggctatggttttcaaagtcctcctcctccatgggttgaaggattaatagctgataattttgcatctcgaaaac

SEQ ID NO: 94193 - DNA, 113 bp, Glycine max
  unsure (1)..(113): unsure at all n locations
  Clone ID: PAT_MRT3847_56068C.1
ctctctgcgttcggcancngcgaaacgntgcttcgttatctntngctcgactccncggcgtagatccgaggagttcgggnaaccctaactcatctttccntnnnaanaagact

SEQ ID NO: 94194 - DNA, 478 bp, Glycine max
  Clone ID: PAT_MRT3847_56069C.1
accactaaaccctcgcaaagccctaaaactgagtttctcatctctcagattagattccgatagacacagaaatggcttttcgttcaggttctctgtctcgctccttaatgtctacagctagggcatcactccgaccggcggcgccgtcgtcaacccttccccgcctccgtccgccaccactcgccgcccctcgcgtccagtcccgccgcttttccatgcctgcttccaggaatttggggcaattagggtgcacacactcgcttttacctctgggcataacctgcatgacgtcacacattgctgtcagtgcgcgtgcttgctgcgagctgtcccatggtgatcctgattcctgaggtacgtgaggaagctgttggatttgcatagtgttgcctttgatggtactggtgaccaataatttattaatagtggtatctgcgaagtaacggttgtaggattcttgaatggaatggaaaagatg

SEQ ID NO: 94195 - DNA, 171 bp, Glycine max
  Clone ID: PAT_MRT3847_5606C.1
ttgtcaatattccctcaacttctgtttcacctacgacgctctcagtttgttcaggtctttaacaccagtcagatgcgactgcttatctcgaatgctactacaccgcgaaaatgctgcgaattctgttctgatggttcagcatccgttcatttctcattccctccatgctcg

SEQ ID NO: 94196 - DNA, 286 bp, Glycine max
  Clone ID: PAT_MRT3847_56070C.1
gaaaataatttttttaaaacacggaagaaaacaattcatacactggcgctagctttgtaagcaccgataaaacaactcttgaatcaacaagggccaacgggaattccttcatcggaaaaaaagatccttggtaagtgcaacaaatactaagacctggtttaccttctcaagctcatctaaaaagtcaaattctttgttttttgataacaaacaaatttcttgactgatccaaacaaaaatgggctcttctcctttaaatcaaaatccatcacgggggggggggggg

SEQ ID NO: 94197 - DNA, 735 bp, Glycine max
  Clone ID: PAT_MRT3847_56071C.1
cacactttattttccctttttatgttcacactcacacacactggttctggtttctgattcccctcgtataaaaacgcaacctttttttctccccctttctattctctctgctctctccgtgcgtgtcttttatcttgaacaaaaaaatcacctttcccttattagggttttgaaatgtggagggagaatggaaggctctgaatccgattctgtgtcactttccatttccaatggcgaagagccccaattggggcgaccttcttcccccgccgctcctcctgagccgtcagatctcaatcatgcggcggaggaagagacactctccggggagcttcagagcaagttggatttgaaggatgtggatgaaagtgaggagaaagtttcggactttaacgatggtggaggagtttgtgatgaagaaactggtaagggtgatggagatagtaagggttgggagaccaatagttggaatgaggaagtgggtgttgatgttgatgttgatggtgatggtgatggtgatggtgatgatgatgattttggtgctcaatcccctttatagatggctgtgtttgggtcagttactcaagagttaagtgatgagcaaaaaagcagtcatagttttcttgcccaatatatatatatatatatatattaaaaagataaaacacaaaattccatacactaaatttcggaaatgcgcgaacccggggcgaatggcatcttttgccatccctt

SEQ ID NO: 94198 - DNA, 326 bp, Glycine max
  Clone ID: PAT_MRT3847_56072C.1
taggcattcggctccatcataaataaggctcctactcttttcctatattaactaaaaccttaccttatatcgtgagggcatgattttttatttgccctacacatattaaagcataacacacggatcaaaacatacatacaaaggtacaaatccacataaggttcctattacttattcaagggatagaccttcattactcaatcccaatgcactgatcccatatacaatagcgttcatataccatgctcttaaccccaccaaaaccattaaatactgaataaaccttacattgcattctacacaagctatattgcaaacaaactaaa

SEQ ID NO: 94199 - DNA, 434 bp, Glycine max
  Clone ID: PAT_MRT3847_56073C.1
agcaactactacggtactgctgcttatacttctacccccattcttttcttctttttcttcttttcaatctctttcgtcggcatgatactctgcatgtgcggggtccgcacctgaaccacgcttctgactgcaatggctcgtgcccgtttccctttttcaatccatacactattgctcttatataagtattgatggaaatactgaaaatggtaacaacctgttctactactttcttagttcaaaaagaaatccaaaaaatgaccccattttgctattgctgaatggtggaccttggtgctccaacttttatggctttgtttatgagcatggaccattcaactttgaagcttgaaattccaaagggaatctacccactttgcatttcaatccttacagctggtctaaggttttcagcgttttatatttggattccc

SEQ ID NO: 94200 - DNA, 944 bp, Glycine max
  Clone ID: PAT_MRT3847_56074C.1
gagctatgacgtcgcatgcgctagctcggaattcggctcgagcaaattgcggtgatgttagtccaaatgtacttggagctttttgtatagacactgaactaccttgtgacttcaatcatagtacatgtggaggaaagaatgaattatgctatggccgaggacctggttattcagatgaatttgaaagcacacgtattataggggagagacaatttaaaaaagcagtggagctattcaacggagcatctgaacagattaaagggaaggttgattttcgacatgctttcatagatttctcccagcttgaggtaaatccttctaaagtaggagcttctgaggttgtaaagacatgccctgctgcaatgggatttgcatttgctgctggaacaacagatggacctggagcttttgactttaagcaaggtgatgatcaggtaaccactgattagaccttatgctcggacgtgtgggcggacgcgtgggtagaaaagcagtggatcttttcaatgctgcagatgaagagattgaaggggatgttgattttcgacatgcatatatagatttttcccaacttgaggtaactatttctgatcaaggatattcagaggttgtaaagacatgcgctgctgcaatggggtttgcatttgcagctggaacaacagatggaccaggagcttttgattttcagcaaggggatgataagggcaatcctttctggaagctggtccgtgacatgcttaagactccaagcagggaacaaatagattgtcagcacccaaagcccattttgctagatactggtgaaatgaagaaaccatatgattgggctccttcaatacttccaattcagatcctccgaattgggcagcttatcattcttagtgtaccaggagaattcacaacaatggcttggaggcgtcttcgtgatgcagtgaagatggtgc

SEQ ID NO: 94201 - DNA, 412 bp, Glycine max
  Clone ID: PAT_MRT3847_56075C.1
cagagagataatgtatgctctgatgaagctgtcacaataacaggtcgcgggccgcaacaagatatggggggcgggcttggtcctctatcaacccatctatcatgtgcaccttctacagaatgaagtggatatattatccaagaatcttgcacgatctaaccaatggattgattcaaacctcgacagcttactggctaccgtaggagcgactcctaaggactgtcacttccctgctacacgtgcacctgttatgtggccagaacttccacagtacggaaactgacaacaatatcagcaaccgatacagcttgatgcattacaccaacctctttgggggacggaaaaagacaacactaacatgactgcaaaaaacttaatctgcagttatgactcatcggcaaattgagtatct

SEQ ID NO: 94202 - DNA, 797 bp, Glycine max
  unsure (1)..(797): unsure at all n locations
  Clone ID: PAT_MRT3847_56076C.1
ctctggaacagaatatgtcacagcatcaaaggaagataagggccacgaagaagatacataattggttctgattgtagtaaacctggaatagatttcagaagctctaacataattgacaagagaggttctgacaatgaacttgactgtgccattgtggatgctttggaatttgctcgacaagttgctcaggaagttaatagatatttcagtagttcttcagaaaaaatctcagaagacagaatcaggcaaccgggcagtccaaattctgtaagaaaagaggaccagctcactcctgtccctcccaaggaggtttcctcccgacaaagccatgctactgaggcatattcaatggagaggcatgcaagtattttagacaacaatgaggctgagccaaaatgcagacctgatatggtgtccttagaggtgactgaaacagctcaagattcagcaggtaattcagagaaacgactctgcggctttgatctcaacgaagttggtgctgatgatatggatgtttctgtaaatgctacgtctaccccaataccagttgtctctgcttcaaggcctgtgccaactcctgggttgcctgtggcccctttgcagtttgagggaacacttggatggaaagggtcagctgccaccagtgcctttcgacctgcatcgcctcgtaaaattgtgataatgacaggaatctttctgttgatatgaactttgatgcttccaagcagaggcaggattggcttgattntgatctaaatgtgacccgaggtgaagaggcaatgtaaacctactgctga

SEQ ID NO: 94203 - DNA, 128 bp, Glycine max
  Clone ID: PAT_MRT3847_56077C.1
actcatacaataccacaagacgatacaacgactcatcaattcaaaatatagggtgcattataaacattggttcgcggaacacaaccaatacactatcttgtcgctttcacaagtttgctcattaccaa

SEQ ID NO: 94204 - DNA, 532 bp, Glycine max
  Clone ID: PAT_MRT3847_56078C.1
gagccagcgaaaaaaaaggggaaaattaagggaaaaagttatagccttccgggcatgacatgaaaagacaatatagcatataaacgaagggaaaaagccggggggaaagaagaaagagttgcccacaaatcaaaggggggcttgccagggaacttgaccccaaaaggactaacatttttaccaaaaaacctgaagttctgaccaaccccttgggggccgggggtgaccttttaaggggacacaccatccttggggggcaaaaactgaacccccccatgggggaaaaccctggaaaacggggacttgatcttggactttgacccgagcctaatcccaaaaaccaagccctggtcctttctcgccaacttgaaaagggggggaccccccctcaagaaggcaccccccccagggggcatttaaaaaatctgtttttttgggggggcccatgggaagacaaaaaactcctccacttgggccttgcgcaagagcccgccggggctgcctccaaaaatcggggaaggggggtttgggc

SEQ ID NO: 94205 - DNA, 337 bp, Glycine max
  Clone ID: PAT_MRT3847_56079C.1
cccacgcgtccgtacaggtgcgagaggacctctgatgggggggtgctggtggtgcacaatgggccattttctgaatgcgctctatctatctattgcgatctggctactaaccctaacccgcttggaaccgtggcttccatcggccttgcaggacctttctcgaagaaaatactcttcttagtctttgattactcaacaaacttgcgggtagacccgtatcgtttaccgtgaacctatgatacaataggtatcacaattttccgttctggccgcataactgctgcatcgcatggctcttgctcatggctctgggattcttaaggctggctctatcgct

SEQ ID NO: 94206 - DNA, 131 bp, Glycine max
  Clone ID: PAT_MRT3847_5607C.1
cgaccaattcttgtactatataccattcttaaaataattcattctttccagtcaaggcaatatatacatacaattgcctactaaggttctttaaattaacatttgaggaagttatatttatggtaagagtg

SEQ ID NO: 94207 - DNA, 423 bp, Glycine max
  unsure (1)..(423): unsure at all n locations
  Clone ID: PAT_MRT3847_56080C.1
cggnaattcccggngtcgacccacgccgtccggtgcaaaacacaaccttagatctactaatatctgagccttagcaatntcgctgtgttcccacaacattcaccaggcctgaggatgtgcaacataatccagcaaagacctacattataggaaccatcggttccctacgccaaagaggatactagctctctcaattaatgtcttctgccctgaaattcaactgccaaaatcattggaagagcttgagcggcctcattgccacgtcatccaagacatgtgagcacgactcgtcattattggttaaaaaaactccggctgctctatcagcatctttagaatacaaggctagaaaaggaaaacgagcaacaccttaactacacgtcgcaatcttatgctataacaaagtcacatttcgaggagctg

SEQ ID NO: 94208 - DNA, 269 bp, Glycine max
  Clone ID: PAT_MRT3847_56081C.1
tacggctgcgagaagaccacagaagggatcctcatgataaaagaagtatttattgtaagaagagtgaaattatacggtgggcgagcacacattattttgtttccgcccgggatataaaaagggagcggtgaagataaatgcccccctctcctccccataaaaaatgtattttttgccacagaaacggaatgataaggatggtgcttcacacgcccgtacggtcaagcacacaccggcataaaatcctatgttcaggaagagtagttttt

SEQ ID NO: 94209 - DNA, 401 bp, Glycine max
  Clone ID: PAT_MRT3847_56082C.1
ttggggtctagaaaatatgttaaatagactacgatatccttttgacggtctgaggtaaatatgagttgtttgtttgaggaagtgaatctgtcccattttcttggattaccttttagaatactcccaaagcttcatttgcctagaaaggctttgtagactggttatatgacggctcacagcacaggatatattgcccataggagaccgacatggattcggtgactgcactggaaaaccaccactacatattctaagccccgaataaaacaagtgacgaaacttgccaggaatcaccctaagcccttcttgatatgcaaggggggccctgcagcctgggcactacatatagactccatggttcccatgggctacaaaacatagtgagcccggagtctacatgg

SEQ ID NO: 94210 - DNA, 173 bp, Glycine max
  Clone ID: PAT_MRT3847_56083C.1
taccgctcccataagacgacagatgggggcatccagtttatccacgaactcactgtgacagccacttgtgccaaacctcaagtccctcacactcggctgctctacaggctccacgcctacatcagcgtgcatgcaacttcatatctcttctatgttgccacctaaattcaatt

SEQ ID NO: 94211 - DNA, 389 bp, Glycine max
  Clone ID: PAT_MRT3847_56084C.1
gtataatacatcaacttcataggccgcagatgtaatatatactttatcgagacaagaccaaactttgctgcttgcacatattatggggaatccagaaaaggcgaccttgtcgtagaacacaaacgtggaggatgctcaattaaacacattaactaagtccttggatgcaatgcccaaagatcttccagacccagaaaacctgtggcctattatgaagcaatcctcgctgcaccaaagaacggaactcactgactgcataactgagatcactttcctgaaagcgcatattgcaggggctcacttgggaaataacatggctatcagtgatgttaatactgtcaaacctgaatctcttgaagaatataatgtagatatgcataaatcgcaga

SEQ ID NO: 94212 - DNA, 781 bp, Glycine max
  Clone ID: PAT_MRT3847_56085C.1
tggggttatttatatttcacctcaggatggagccgactttgatataggagattttgttatgcatgatagtgctatttcaagttatggagaaggtcctatgattcctgatataattgagagcactgttggcttattgtctgctgttgatgtcaccctccattcggccttggttgttgacccgtgtgaagatgtaatggtggacaatgtcttgatacatgaggtagctgaaacagatgagcacacctttaaaagtgcaagtcagtatcccatggagaggcttcaggacgtggagaaagacgaaggggaagaagaaagtccgaatcctgttcctatccccttgtcagatattaatacagcaacaacaaaccctgcagtgtctcaagagcaatcaactatcaagtcctgcatgtatagagatgggaacattcccaagaacaaaagaaaacgcggggagcgcaaagcgtgttcaggcggttggagcaagaaatgctcgggggattctgagaacccgtgagcaagtcttctcaatcagaagtgactacataatttatagcttgttttttctccctcaacttgacagatgttgttaatactttaaaggttatagtgaataactattatagtcatttcggatgaggaactggtttcattctgattttcggattctatacttcacacccatcaatttgggtttggatgtgagaacactctttttcaatttgatctatatatgaaaagaaaaaaaaaaaaaaaaaagggcggccgctcagaggatcaagct

SEQ ID NO: 94213 - DNA, 420 bp, Glycine max
  Clone ID: PAT_MRT3847_56086C.1
ccaacgcgtccgggttcttttgggggctttttgattcaatcctaggggacttgtttgttgaaggggacacagggtagaaactaaaaatggggaaggggaatgaagaaccaaaaccattaaaggatttgggtttatccgagtaatgggtggaggctggcgaaaaattggttgggaaaatttcattaaggttccagccggaggcaattccttttgtttggtagggaaaggatgtgttagtgtttgccaaaactggttccggtaggattgtagttatggtttttccattaatgcatgcttatttggaagctctattctcaaatttttttttttgtttgttttgtggtttttctaattgtggaatattgtttatttaatatttttcgttaatatatatttaaactattttgggttccttttata

SEQ ID NO: 94214 - DNA, 295 bp, Glycine max
  Clone ID: PAT_MRT3847_56087C.1
tgaatttactgttatgtcaacaagaggacacggtatagttatgagcgtctatgctacggtggcatgtgtagaggaccaaagagcaaaggatatgccttatattgatagcatggatatgtatgttggtggcataaatgttatgtttcaattggtccgtaacaaatttgctggtcctattgactttgagagcgagaatgtgactgaagccactcatattgtattgatagtgcactctaactagcatgaaaggcactggcaagaccttatttcaatggatgctttctgtcatgcaaat

SEQ ID NO: 94215 - DNA, 273 bp, Glycine max
  unsure (1)..(273): unsure at all n locations
  Clone ID: PAT_MRT3847_56088C.1
attcgaaggtcactttaaaaataggaactaacttgaaaccttgcctcctctctgcttggacatcaaaaaccatgtaattggtttcactaattttaagattggattttcacttttccttttactatttcagtgaatataggcttacccaatctatatagtcacagagatttttatnaccgagtggangtnctaatctgttnctggntgggggggnntgtnaatntanatattcttcccattagntatgacagtggggtctatgaaaggtcncgg

SEQ ID NO: 94216 - DNA, 359 bp, Glycine max
  Clone ID: PAT_MRT3847_56089C.1
gggggacccgggggttaaaccgggaattcggaaccggaaccggaaggggttccaatttttctaatagggagtaaatttaaagctgggcaaaaaaaaggtctttcctggttcctggggaaaatggtttacccttccaaattccaaaaaaaatacaagccggaaaaataaagggggaggcggggggggcctaaaggggggccaaactcccgttaatgggggggggcccactgccccttttcaaaaccggaaaccgggggggcaaaaatgaataaagaaccgcccaacgcggggggggaggcggtttgcggtttgggccccattttttttttttttttaacagggaaacggggaaaagtttt

SEQ ID NO: 94217 - DNA, 109 bp, Glycine max
  unsure (1)..(109): unsure at all n locations
  Clone ID: PAT_MRT3847_5608C.1
ggagatagaccccagangtggtttctgcagctccaattccaatcttctcacagcaagcgtaagtncctcccactgccctgcccaacaangccttngangtcaccancnt

SEQ ID NO: 94218 - DNA, 698 bp, Glycine max
  Clone ID: PAT_MRT3847_56090C.1
caaagttttaacatgaaaggcaataatacacttttgttgcatttattctacactacacacaaccctcaacttgtagtgtcaagttcatcttcaacagggaatgaatgtaatctatgacactaacagtaaagaagtttatatcgtgtacatgggatgctgcagattcaacaaaagcttctctttaaaatgagcacgctcagattctgaattcagtgttaagacggaatgagaatgccctagtacggaactacaagcatggtttctcaggattcgcagctcgtctatcaaaggaggaggcagcctcaattgctcacaaacctggtgtggtgtctgttttccctgaccccattctgaatctccacacaacacgttcctgggaattccttaaataccaaacccacgtcaaaatcgacaccaaaccaaatgctgtctccaattcttcttcctcgtcagacatcattcttggcgtcttagacacaggttatcaataataaaataagaatgatatttacgtaatatgtacacgttattcattatggatatcacaaataacgaagtaccgctaccatatatattctcatgacgtactaaatatatgcatgtttcatcattttatataaaaatggaaaatttcaggtatatggccagaggcggcgagttttagcgacgagggtatgggtcctgttccatctcgttgg

SEQ ID NO: 94219 - DNA, 909 bp, Glycine max
  Clone ID: PAT_MRT3847_56091C.1
taatcctcctgtgatacatagagatctcaagtgtgacaacatctttgtcaatggccatcaggggagggtcaagattggtgacttaggcctggcagctatacttaaaagctcccaacatgcacacagtgtcatcggcacaccagaattcatggcaccagaactgtatgaagagaaatacaacgagctgatagatatatactccttcggtatgtgcatgatagagatgcttacttttgagttcccatatagtgagtgcgccaacccagctcaaatatacaagaaagtcacttcggggaagctacctgaagctttttacagaatcgaaaatttggaagcccaggagtttgtgggaaaatgtttggcaaatgtctcagagagaccatcagcgaaggagctcttgttggacccttttttagccatggaacaacttgaaattccattgccaccaagcataccagcattatttacaaataagtctttcaagcttaattgccctgcaccagttcccagtgaccatcgcgatcaaacaaagagcgcggatatgacaatcaccgggtcaataaacgaagaggacaacactgttttccttaaagtccggatatctgacataacggggcacacaagacatgtgttcttcccattcgacacattaaaggacacggctattcaggtggcaatggagatggtgcaagaacttgagattacccacttggagccattggagattgctgcaaggatagatcatgaggtatcagctctagttccaacttggagggacagggtgaagtgtcaccaccaacgacagtacagctttaactacgaagaagatgaagatgtcaataaccatcaccctttcttcttatcatcttctccatcatcccctcgcggttctggccacatgtctgcttc

SEQ ID NO: 94220 - DNA, 940 bp, Glycine max
  Clone ID: PAT_MRT3847_56092C.1
gcaggtaccgtttccgggttccacggtcgacccacgcgtccgctgcgagaagacgacagaagggatatatctggctcaatcctgtagcttcctccttgagaaggaaggttggattcatgctacttttttatgaaacccaaccctaaacaacttggtctcaaacaagttgattttgattaagtgaattggttctgaacatctaaatttgttttaaactttttaaaactgaggttttaaataaacacaaaatacaaattatgaaaaatcaccttgaagctagtcacttagctggcgtatcatgaaagtgttatggtgatattgcttaacaattaagtacttaatctcaataagtcaacaatgacattcgaagaaattgaaatacgttatggaggggatgtcctatagtcaatgtgtggagggcaatagaaagaattggaaaccttaatctgatgctaagtgtagagagtgagagagagaatgggaacttagtatctcatgaaagactttgaagtctgaacaagttagtgaatgtgttatcactaatattggaacttttaaatataaaaaatatgtaagcatataaacaacaatagtaattttaaagacatgtcacatcaatgagtctatgggtttggttcatgggtttaaagtttaacacccatgacccaacccatacttgaatgagtttgaacaagttggagttgacctctaggcaagtgtacgtatacaaataattaaaaatgtatgtagagtatcgttaccacaacaacttgtctcaatgcctagaactttccatttatccactatttaaatgaacaaaatttcatttaattgatttgaaattaaaacttgattttttatcgactagaataaataatctccaaaaaaaaaaaaaaaaaaaaaaaaaaaaagcggccgctctagaggatcctagctaacg

SEQ ID NO: 94221 - DNA, 260 bp, Glycine max
  Clone ID: PAT_MRT3847_56093C.1
ctcatctcacacagcacatgagcgaagcctcatcctagagttaagaaatcgcagcagcttcttccatgggtctctcaatccccatccttggctggcaatgccgtgaagctgggctcatcagccccagaagtccgaacggtgagcatgcggatgaccgtcaccgagcaggactcctcacgtaccccatggtacggcccacaccgagtcaagtacttgggctcattctctggcgagaccccgtcctacctgaacggtgagtt

SEQ ID NO: 94222 - DNA, 968 bp, Glycine max
  Clone ID: PAT_MRT3847_56094C.1
gaaacgacattggtggatacacacttgcttacaatttggagacagcaatttctggatgcactgaggttgttgagaccagaatcaaaaaaaataaaaaatgcatgtctccgcttagcttgtattttctggcaattgctgattttaccttggaggtttctgtttgcatttgttcctccatgccaaattgctcatggatggatctccttcatttgctctctgcttttcatctctgggatagcttacgttgtgactaagatcacagatgttataagttgtgtcacagggataaatgcttacgtgatagcatttacagccctagccagtggaacctcatggcctgatctagtggcaagcaaaattgctgcagaacgtcaaaaaactgctgattctgcaattgcaaacatcacttgcagcaattcagtgaatatatatgttggtattggtgttccatggcttattgatactttgtacaacttcatagcatatagagaacctctccgaatccaaaatgcagggggactaagcttttcgttgattgttttcttctccacttctgtcgggtgtatctcagttttggttttaaggcgtataatttttggcgcagagctaggagggcctaggctctgggcatggattacctgtgcgttcttcatgttgttgtggattatttttgttgtactatcgtcactcaaggtttctggattcatttagaattgtatatagcaaatttattgtatagatccttggcaatatccttaggtgcattatgtttttccggtgccctctccagtcatcatgggctcatggctgttcgtcacgctgacggactagttgggttttttcttctatttttctttcttttcatgtactgtattaaataaatactgatatttttgtaacaaaaaaatactcaatttttgttggaatttttctttttctttatatatccacttaaacgatgttgtgtt

SEQ ID NO: 94223 - DNA, 238 bp, Glycine max
  Clone ID: PAT_MRT3847_56095C.1
tgaaccaacacccttttacttgatattattattgtaacgctactttaattaggaaaatgccggatgttcaagcccttgttaatgattttgtgaatctgcttaagaaacgaattgaagggtctcaagccacagcaaagcagacagcagtgttgctacgctcggtgatttcacagcagcgggtgccacacacaaaccaggccacagttctgattaatgcagtaagggcggtgggggagca

SEQ ID NO: 94224 - DNA, 424 bp, Glycine max
  Clone ID: PAT_MRT3847_56096C.1
ggctcgaggggagttgaaggatatccctcttattattctatcgatcattcatagcatactgtgagaggggtgcgataccctaagatgaagaagactaacactaagaagatgccgaagaagatgggggtgaacactaaggcggacgcggcgagggctttttagagcgctgcggatactgagcggaaggagaaggagagtccatagaatgaggaccagtactggcgagaggcggaaggttcaaagtcacgcgcctcgaagaatatggaggaagaggccgaaaagagggcggaggcatccgtgcggaaagcgtaggcgcgaccgttggctgagcacgacgataaggagctggagaagtcgatgaagaatgtggacaagaatgcgacacgggtgtcgatcccagtgcctaacgtgacagaagtggatc

SEQ ID NO: 94225 - DNA, 420 bp, Glycine max
  Clone ID: PAT_MRT3847_56097C.1
atattacgtaaacggcgcgcgaggttttttttggagattataagatgccagggagcctgtgcataaaatgtctataataattttacccatagcctgggcgattattttttcttagatctctagccgtacaatgtgtagactattcttccttgtgtatgcggagcttagtgaaaaaggtggcacccagattgaaagcctattttctttctacgtgccaatgactttttttggtgatgaatgatttttccatccctcggaaggagcactctatgtggcatgagatatgcttcttcaaaaggtgcacctagctgtgacagagattgtgagctaaaacaattctgatgagatctgctgggcttgaggcctcggaaaacgatttgatagctgttgtgatataggccaccgtagagcttcgttttg

SEQ ID NO: 94226 - DNA, 276 bp, Glycine max
  Clone ID: PAT_MRT3847_56098C.1
gggttcttttttttttttttttttttgcgcagaaaacaagaaagatgctatattggatacccgggaacacaaaccaaaataatgcttcccgcatgtgacttggtcggagttacctgaaaaaacatgttattcaattatccacctttttgttgacgggaggggcaaaccaagaccgaagtgtttccggcaatataccacgggggtaagtggtgggggaatcagtgaatgtactcaagcccttatttgtgtgcaactgttttctgatcccgtgaacct

SEQ ID NO: 94227 - DNA, 655 bp, Glycine max
  unsure (1)..(655): unsure at all n locations
  Clone ID: PAT_MRT3847_56099C.1
gaatncngcacgaggtcaacgctgttgaggaggagtagattttgcagcttaaggtctgaatagagatttgggcagttggatttctggtgcggtgagtatttggtcgaggttggggtggcggcgtggtggtcatgcatcgttgcagcttgaggtttgaagagagagagagagagaggaggaagaagcatagagaagaacagaaggtggaagatgaaaagaaaataacttagttgttaatacttttattttattaaccacatcaattttagatagacaagaattattttaaatcaattttaaaaaataaaatattaaaatgaatttttaaaaagataaaagattaacataaatcaaaaaataagataaataactaattagattatttggccaaaaataaatgtaacacatgtttaaatattcagccgacattttctaccctatgcaacaagttaacagttcattgaaagaaatttaaagcattcaagactctgtaattaatgttctttatgctttaaagaaaattcattccaccatttcaactttgcgttcaagtgttaactatttttctatgtatttggttttgatgttctagttttctcagtcaattgagtcctatatgctctgatcaaatgggccannaaannacaatacagat

SEQ ID NO: 94228 - DNA, 449 bp, Glycine max
  Clone ID: PAT_MRT3847_5609C.1
attatggtttattaatgccactagtgactgtgcattagtgcttcttgttgttgaaacagctttgtctttcgaggtcatacttattacttgggggagttaatggcgtagcattgaggtaatttccttcgtccattttatgtgtagttacaattataaatgtgtctgtttccgcgtgtttaatagatatctagagtttttttcgtaaaaaacaaaattttcgtgcataaatatgtattttgacatttttgaaactaaattttaaattttaatcttttagtaacatttatcacgaaattaattgtcaacataagcatgctgaatagattggaaaaaaatgttaataagatctcattattgaactaaaatgtctctaattttttgttggacgaaaatgtcaataattttgtttggacaaaaatatcagtcatttttaatttggatcaaaatgt

SEQ ID NO: 94229 - DNA, 382 bp, Glycine max
  Clone ID: PAT_MRT3847_560C.1
ccaacacttactctttatcattgctatacctcatcaagcctgttttgaatataccgggagtgttgctcaaaagtgttggacaaccacatctctccaccttaaaaaaaatggcgcccgttctaaagattccatctttacatactcttgcattactacaatattaactgctacaatcacgataccttaattcaaaccactacccgaagctttacaacgattatactggtaataccctgctgtttcacaatttaatcgcccatcagctcatatgctctttcacacaatggcgtactatgcattaggcccgcaccgatcctccttctctacaattgctcactctatttgcttaatgggaccctccctataccggttcatcaatctc

SEQ ID NO: 94230 - DNA, 494 bp, Glycine max
  unsure (1)..(494): unsure at all n locations
  Clone ID: PAT_MRT3847_56100C.1
agcncggaattcggctcgagggcggtcgcggaacaccatcgctttccatggcaaaggcggaaaccaccaccctaagacacgacatcccatcatcgcaatagggtatcaggtatatgtgagaaggatgacaataagactatggcaatagatgaattacaactgccagagaagaatctcaaaacttggatatatgatattcattcaatgaagatgaacactatgttacaagaaattactgctttgaacgataaggaggcaccacttaacgcggcaaataaatatctacatgacaacgatcgtggagaatactgcaacttctaactttgctgactttgctactgatacttcttacccactaattgtacaagatgggggttatcaactctattaaatgacttgattctacaatggaaagtctacatgctttaataaaggatatactggcgactgcgctgtgttccataacattaaatactgaactatgatgcatgaac

SEQ ID NO: 94231 - DNA, 464 bp, Glycine max
  Clone ID: PAT_MRT3847_56101C.1
tttttttttttttccttaaatgtttcttgaattcatgactgaatataagtgttatcggtttattagtttttttaggaaagttgattagatatttactttggtttactttaaaaaatttgaagaaaagtaatttttaaaatagtcaatgaattcactgtatttgatttggtaggtttgcatagtgaatgccaatccggatgctgctcaatagtcaatgtgagggttgccccacaagtaaagcgtagccacgtcttagttgtttcgtgcaggagttttatttatttttaattaattgagctaaatccttttaaatttatctttctagttgtatatgataaattttttacctaaatatatttttattagtgtaatttaattttttattttatctttattttagccttcgaaaaatatgtttattttattttttattttaaagtattttgtaaaatgtctttgtcatg

SEQ ID NO: 94232 - DNA, 200 bp, Glycine max
  Clone ID: PAT_MRT3847_56102C.1
ataaaaccagcttttattgcagtggaatagtgcacacggcagtgcaaacatggtccatcaggagttgtaaaataattggttcatcgccacaaggacttgaagtggggatttcaaaacgggcaggctttttttaaactgccaaaggtagcttataggaacgcataggaaccccacctcaaatcacatatgggggaaaagca

SEQ ID NO: 94233 - DNA, 309 bp, Glycine max
  Clone ID: PAT_MRT3847_56103C.1
ctgaataaatataattccaattataggggccaatttatactttatacacacaagccacccattcccatgttaaattgttacacaagcatacaacaatgtcatgatttcctaagtccacaaaatgaaagtttaaagccaattaccttcaatatgcaatttagaattttagcccaaaactttaacttaattattggctttaccataacttcttggaaaaaggataacgtccctaacatttccaaggcccattgcaaaaagaccatcattgcaaaccttataatgaacccaaagttcttcactgttcctttt

SEQ ID NO: 94234 - DNA, 377 bp, Glycine max
  Clone ID: PAT_MRT3847_56104C.1
aacggggcaaacatgaggtttttttgaaaagcatatttccatgggaaaaccctccaattttatggggttacaaaaaaaatctctttcaaaaggaaaggaaacatttgaaaaaaaggcccccctcaaattgctaagggttcaatttttacaacttaaaaaaccaggtctttttttttagtgggggaaactaagctgggtttttaaaaaaaaagtattgaacacgtccccacacagccaaaatacggttttcataccctttccaaaaaaaatttccatatggccttggggggaaaaaatttccatactaggcatcaacttaaatttaacccgggggcatcctttgaaggctttggattaggacccgaataaggggcctt

SEQ ID NO: 94235 - DNA, 402 bp, Glycine max
  Clone ID: PAT_MRT3847_56105C.1
gtcttccatttgtgtgtcatacacttgttgcgaagcctgttcagctgtcatataacaagtctttaatcctgatcataccatgtcatacccacaatgtacgaaacaagggctcactgtttaacacattatctgctattacagcgatctcagtttgaccttggattgcccttcttccactatgagcttgttgcttcgcaatgctaagcccctatttgactgtatatgagactcaatcgactactctttcaattactaccattcattccattactatcattgtacttaaatgactccaacaccaagtacagttttcacgacagcactggtcaaacatggatactatatgctacctacgctcatgaaggacgcaccagcactcttgctaagatagcttctaatgca

SEQ ID NO: 94236 - DNA, 149 bp, Glycine max
  unsure (1)..(149): unsure at all n locations
  Clone ID: PAT_MRT3847_56106C.1
tgcacttgaattcttcggggcattttttatgtggncacgccatgatgatccccataccnatttattagggaatgtgaattaaaattataagagagaaaatggtgcttatgtctaagattacttgataaagctgtgtggtagagtaaaga

SEQ ID NO: 94237 - DNA, 390 bp, Glycine max
  Clone ID: PAT_MRT3847_56107C.1
aattcggctcgagcatgctgacacatactctatagctgatgaatgtgctagggcttatagactacactcactcttgcgggggaacctggaaccgtgagtacatatctgttaccccaggacctaacagatcttcaccattaatcacttataccaccattagaagtcacagtggagggcatggggaagaagcattggcaacacaagaagttgaaaggcgcatttgagaagatgcgacgtaaagcttaggaagaccctaggagctctagagactattcattgttgcgaagaaatgtttgcccatatggcaccctttgaagaatctgcgttaattgtggttctcgttgaccctgtgaggggagcagcaataaagctatgatgtgtgggtgatga

SEQ ID NO: 94238 - DNA, 354 bp, Glycine max
  Clone ID: PAT_MRT3847_56108C.1
cccacgcgtccgtccacgcgtccgcattgaatgggaggttgaaggaagaaaaagtgatagcaacaatgctaacgtacgtgagttacagaatttgcataatttgacaactttggagatatcattcaaagatacttcggttttgccaatggacttccagttccctgcaaatctcaaaagatacgacatattgattgggagttggcagttattttatttatggtatgttggaggtctcgaaagaacactcaagctcacaggcaattggtggacgagcagatcgttgttcaacacagtcgaggagttgagctttgctgaattaaagggtgttaaggatttgtatgatttggatgtgga

SEQ ID NO: 94239 - DNA, 382 bp, Glycine max
  Clone ID: PAT_MRT3847_56109C.1
cgcactaactatgctttttttttctttaacaccaccatttattgctgcaagaagcggtcgatttagaactatcaccaactgccattctgaactgcgaaatgattgccagctatcgtattaaggaacgaacaatctaactggtttgaaccgtgtggagactagatgtaccaactcttgctgcacgatgatattgtaagataagcttgcctttattcatatgctacttcttcaataacgtgatatccatgccatgatcgctcgcgctaacggtacatttgtggtatcacatgacatcgtctcaccttgacatagtgcaagatttgccttagagcccctgtagatcagacacctgtaaattgttcgattcttaacttgtatttat

SEQ ID NO: 94240 - DNA, 426 bp, Glycine max
  Clone ID: PAT_MRT3847_5610C.1
tatattgaggtactatcatagcatatagttttgtgctttatatatgtttttttattttcttcattgggtgtctggtctatacaagcaacaaattggatacgtgggctcatgttctgtatgcatgcaaatatgaacaggtgctttggtattgaaatcttgaaggttgtcacagatttgtctttttgtttcttttgcatggtatttggaaaatttaagttgttgaaatagggcttttgtcttgattggttactttctttttgcttctctaaatgggtctcacatgttcaattgactcaactactcatgagatagagatacaaactttgcttgtataagtggcttccctcgaaaatttaggttaaaatttgtgtattatatgtttggatagaataaaaaagtgtgtttataatgtggaagagggttatg

SEQ ID NO: 94241 - DNA, 332 bp, Glycine max
  Clone ID: PAT_MRT3847_56110C.1
tttcttttgcgagaagacgacagaagggggcgggggggcatgtcacatttcctaggggaatcccacaagactaaggggcccttgtttcttgacaaaattctgggaatctagtccaagtcgaataacatcccaggttttatcaagggatcaccaacacttttcacattgccttccccacaatacttaaaatttggtctcaagtaccgggtgtgtacaaatctagttgtctggcttttaggacgttggtgccaccactgaaccctgaacctgctattggctcacggaccaaggaatcttgggcaataatctaaacattctctaccaatacgact

SEQ ID NO: 94242 - DNA, 258 bp, Glycine max
  Clone ID: PAT_MRT3847_56111C.1
cttaccttataactttgttgggcctgcgttcttcacatagcgaagcacacatggcttcattctatgaagagctaatcaatcgagcgcgggcagcaataactaaattacttctcactttcttcttaatcgattgtcatatgacgcaatcagttcgttctctcgaacatatatccgtatgggcacggacaaccctataaaatgtgagcttctctgctaagaggagagccacgcttcacgacgatcttcgcagctttgaaa

SEQ ID NO: 94243 - DNA, 271 bp, Glycine max
  Clone ID: PAT_MRT3847_56112C.1
cttcctttctctgctctttgtcttctctgacacatttggggcctcgttgagtgtgtgtttgcaagagggtatggcgacggacgttgcggctgctgagcgtggctccttctctgggaaggactaccaggtccctccaccagcagtactcattgatgctgaggagctcacaaagtggtcctttcacagggctcttattgctgactgcattgccactttgcgcttcctctacattactgtgctcacagtggatagggtacccgctccagacgga

SEQ ID NO: 94244 - DNA, 686 bp, Glycine max
  Clone ID: PAT_MRT3847_56113C.1
cccacgcgtaccctccaacacatgtatcattcgaattcttaccgtcattgccatctgcatacctcgtgccaaatccttccacttggattttccagcagtttttaactttggtgattcaaattctgatactggtgctcttattgccgctgcttttgagagcctttacccaccaaatggacaaacttacttccaaaaaccatcagggagatactctgatggccgtctcaccatcgatttccttatggatgctatggacttgccattcctaaatgcctatcttgattcgttaggtttgccaaattttaggaagggatgcaactttgccgcagcagctgcaactatacttccagccactgcatcatccctctgccccttctcctttggggttcaggtgtctcagttcctccgattcaaagctcgggcccttgaattgatcgctaaaggcaggaaatttgataagtacgtccctgatgaaaatgtttttgagaagggattgtacatgtttgatattggccagaatgatcttgctggagcattttatgaattaacattagacgacatacgccactctgatcccacaattccattggagcttgaaacaggaattaagagtctctatgaccagggggctagatatttctggatacacaatacaggtcctcttcgatgcttgcctcagaatattg

SEQ ID NO: 94245 - DNA, 583 bp, Glycine max
  Clone ID: PAT_MRT3847_56114C.1
ggctcgaggaagtacgtttaccgacataaggaaactctctctctttttcgccagttttggactttgatccccgcacaatattgtgtaatcagactagtcactaatctctttgggtgacaataatagtcaaaataccagtgattgttgcacagaaaatttgcccatgtatttatacctcagcccaccatgaaattaggtaacaaactgtgcattttatggtacctgcaattggttgttttactatttccagctgacttttgtatttgttctttgctttgaaatgggttggactagtatatatttgtttggccatctggggtaacaagattgtgacacctgaaatggggatcatcgtatacatatattataaaattttttaggccgtggttgtcagttctagttgagggtcgattgtttcttgacccaattgttcagtgtgggttaaggatatgttctttctagttctttagaagccataataatataactatgctaatcagtggctcttcctatgattcacttagtgttaaatgggttgtgttttatgatccatctccttagttttagattctaacctaactaa

SEQ ID NO: 94246 - DNA, 944 bp, Glycine max
  Clone ID: PAT_MRT3847_56115C.1
tcgctgccgcgtcgtagctcggactcggctcgaggtgccttctcgcacggaattctgcgttttcttttccaccacaaacgcgttttacaatcaagagaatttcgcacatcgtaacaacccaattcatttaaggtaggtatgcgcctctgtcatttaacatttcttagacttagactcaataattgaacatcacttggcttggcagattcaccaataccatttatgtgttctgtgggttgctcacacatacaattgtagttcagtccaattcttcaccatcaaattatgttgtcacctgaaccctgtgatccgaactttctgctgtgtctacccgatgatgtgtttggcatggtgtcacggttcctcttgcccagagatgtttgcaatctcagcctctgctgcaagagtctctatgctctttcatcctctgaaaaagtgtggttccctcagtgttacatggtgggagtggtgccccaaaaagaccttgttgagtggagagagggtgtctcatcttaccaggcactttgccgtttccttttgagtgttaaaccattgcttgggatatgggttcatcagaaccctgagcttggtaaccttgtctatgtcatgcctggttttgtttcggttgtcggctgccggataattcctcaggagcttggtccattagggattcaagatggtcctatccaatggtcatctgtgtttgaggttattggtgattttgatggttcagctaccttttttctccatggaagggaagaggggatggactatgtttatcgtggctcggtcaagtatatagatgaatcttgcaatgtgctgttgcttgaggttgaacctagggaacaaaaatatggtattaatttgttgcatggtaggagcttggatgactcgggtggggacggtttcaggagaggtttgtgggtcaaacagggagctttcta

SEQ ID NO: 94247 - DNA, 507 bp, Glycine max
  Clone ID: PAT_MRT3847_56116C.1
tccgggatgaaagcctctccttcaaccctctaactcagagccatccatgatccttctactttccttcagcacaaaagcctgcagagagaggagagaagggttacacacacttatatatatctatgtgaaacaccaaagaattaagaaggtgaagtttggttattatattcctcctttggtggcttctactgtatacaatggttaattttggtggactgcctctaattactgcatcagaaaccatcagatgcttaatacccagttcatggcctagaaactgcattctgcatatgaaagagagtggtatgattcatgtaagtccatattatatattgaccttggtattgctctcttggtcttacaaaaccaatttatttaatctttcctttcttctttttatttatttattttatttttatttttaactgtgctagatgggattgtggtgtgattcatgtaatcaattcaatttcagtagtcagtggaataagacttttgttgttgttg

SEQ ID NO: 94248 - DNA, 321 bp, Glycine max
  Clone ID: PAT_MRT3847_56117C.1
gaaaaagggcggaaaaatatttactataacaatcaaaaacaagtcctttagcaagttttcaagccaagcacatcaacgagtttaaaaaaatccaaaaactcgacccccctccccaaaaaaaaaccttaaaagtccaaaaaaaaactaatgctcctccaaaaaataacacccctggtttcaaaaaccgatttattcaaacctctttttttttgctcgaccaaaacactaaattgcagttaaacataaacatacggaaaaaatgggaagacaagcttctttgaagaaaccccttaaaaaaacttcttggccacaaatacaaaa

SEQ ID NO: 94249 - DNA, 298 bp, Glycine max
  unsure (1)..(298): unsure at all n locations
  Clone ID: PAT_MRT3847_56118C.1
ctgctccaagttattgatattgttattttttacatttatatttgataatagaaaattcaaatattaatgggatggattagtggttggtgttgtggttcatttatatttggcaggtaatatcatcctaaaaacagaaccgcatttcacgacaaaggcaggtaatcaantgttttttattttttntaagcaattgtatcttacccgtggtaaaatgaaaaaggtaatcaatcttnttttgtccaaataggacttgtgtatttgttgttgaaaactggccaaaattttcaaattgtgtatt

SEQ ID NO: 94250 - DNA, 780 bp, Glycine max
  unsure (1)..(780): unsure at all n locations
  Clone ID: PAT_MRT3847_56119C.1
ctactaagctggattttagagcggccgctagggttttaaagtttttttttttttttttggcaacaacaaaagtcttattccactgactactgaaattgaattgattacatgaatcacaccacaatcccatctagcacagttaaaaataaaaataaaataaataaataaaaagaagaaaggaaagattaaataaattggttttgtaagaccaagagagcaataccaaggtcaatatataatatggacttacatgaatcataccactctctttcatatgcagaatgcagtttctaggccatgaactgggtattaaacatctgatggtttctgatgcagtaattagaggcagtccaccaaaattaaccattgtatacagtagaagccaccaaaggaggaatccaaagggatagcatgatcccaaatattgagaagggaagagaaatgatcccaaatattgacaagggaagagaaagacaaatttataaatctgaaatttgggatcaatgcgatccctttggatgcctcctccagttgcagtggaatataataaccaaacttcaccttcttaattctttggtgtttcacatagatatatataagtgtgtgtaacccttctctcctctctctgcaggcttttgtgctgaaggaaagtagaaggatcatggatggctctgagtttgagggttgaaggagaggctttcataccaaaagagagctattgctagtgcttatattaacaacccccnaccaacccccggggccgcgccctcgagggggtac

SEQ ID NO: 94251 - DNA, 397 bp, Glycine max
  Clone ID: PAT_MRT3847_5611C.1
tcggcccgcccaacaaaccagtcattaacgcttgcggcgtcatacctctccttgcgcacatccttagagatggcagccatcgagctaaagctacagcggcctggctctctctaatttatgaacacacactaacagcctcaccatcatttttgagacaaacccaagccctgacatcgaggaccctctgatgacctggaaaaaaaccttgaaacctgctgactagtgccgtgctatgctagaatccttgtgggtttctgacgagggcagaactgccttgacatatgaggagggcggtgctcttgccttaggggaagcactcggaagcggcacactccaaagtagggagcatgctgttggatcactgatgacgctgtgctctagagaccgacgtaaatgc

SEQ ID NO: 94252 - DNA, 200 bp, Glycine max
  Clone ID: PAT_MRT3847_56120C.1
ggcaaccacagagacatttatgggtgtccgatttcaattgctgcaatgctttgacaagctacttgaacccccattataaaactatacccgtgtatttaaaatataaatgtggaccacacaatgattttcgaatttaacataacccgaccaacacagatttgatggcaccatcctaataatatgccaagctgcagaaaggg

SEQ ID NO: 94253 - DNA, 427 bp, Glycine max
  Clone ID: PAT_MRT3847_56121C.1
ggaatacgggggggacgcacgcgtactcccactcgttcttcttccatcatccatcttggctcactcaaacacctgtacctgggcaagaatcatctcaggggcgggagtccctaagacttttttaatctgggcatgcttagcctcatgttgcttatccttaaccatctaaccggtataataccactttctgtctccaagatttaccggctttctgacttagacttatcctcaaaccggttattctgttcttttcctttttaactctgtacaattccggttctatccacacttaatttggatagaaactctttatagggcttaatttcttctagtttgttgatttatgggtgtattttcattttgaaccttattccaaactgttttgaaggctccataccctatttgttcatttcacacttgtatttca

SEQ ID NO: 94254 - DNA, 214 bp, Glycine max
  unsure (1)..(214): unsure at all n locations
  Clone ID: PAT_MRT3847_56122C.1
gttttaaatataaaaatcattagcatttaatttgttaattccggtgaagctnctccgggaggctttttttcacatntttactgtcccacctcaacaactgaaaactctacaaaagaatcattatctaatgccatgacaactctaactgtcaactctaaagcatcacctacacttccaaggattgcaaaacatctcaactttatcatttttttat

SEQ ID NO: 94255 - DNA, 417 bp, Glycine max
  Clone ID: PAT_MRT3847_56123C.1
acctcgcgtccgtccacacgtgcgggcacgcgtacggccacgctttcggcgacgcgttcgaatagaaggctatggggatcggaaggtctattgatggttatgcttatagggctgggtgtgaatatatggatgatgttgcgacaggagtgctggatacggactgcagatgtgggtctgagaggagtgcgaggttgtgcgcaaaagggatgagttgcagagacgttggctactggaatacaaagattgatggataggcacaaaccgacgaatgtgaggaagacggggcgacgacatggaagatgctggatgagggagcgggacccacgaatgttagtatgatgggggctggacatgctagtgccaatttatgtgatctctgacgagggagatatgttcatagatcgttggatgagaaga

SEQ ID NO: 94256 - DNA, 175 bp, Glycine max
  Clone ID: PAT_MRT3847_56124C.1
ggacaccaaacccaccgagatcagatgcggcaaaatgttcggaggtgacaacaaaagattgaagcattgcagccttaccctgggatgctgcatgaacttccacatgtactttccttcatctaatgctgtctcttacaaattcccactgctgtactttgtctctggcctcacttgc

SEQ ID NO: 94257 - DNA, 777 bp, Glycine max
  Clone ID: PAT_MRT3847_56125C.1
cccagcgcaggtgactggcgctgtgggtccctggcatgggctgctcccaatgccggctgctgcaactcttgcattgcaacatatcagccctgagcgcccggaagcggctgttcgattcctaaacaagcggcttcaaattcctgttcaagtcgatccagtagtggcacaaataatacgtgattgctggcaaacggagccacacttgcggccatcattctcacaactgatgtctcgtctttaccgacttcaacatttgattgtcccaaaaacaagctcaacacattaaacgaagttgtctataacatagctattgtaataatacttaaagctgttccttggttcaaagaaccagaacagctaaagtttttcttttcttttctttttttcgtccatcttgacatatcaagatattgctgaactggtaagtgtcaggtacattcaaagttgggactggacacaacccattcagaaaagagcagggtccctccccaatatctgcataagtgcagtggaggtttagttggagtaggtacaaatgaagaatccccagagggaagaaaggcaagaaacataaaggaaaaaaaaaaagtacaaaattattctttgtctgtagaggtcttatttggaattgtaacatgcgatctctcaggttctcatgcaaatgtaaaaaagaaaaagaacaaaaaaaaaacagaaaaaaagaacattatgtatttcccgttactcagcttgagtttttcttgagcaagtgtacttcctagttgttatgatcaaaaa

SEQ ID NO: 94258 - DNA, 164 bp, Glycine max
  Clone ID: PAT_MRT3847_56126C.1
gcatttcaacaattcttccataaaaaatatatagaatttcttttgcttaccctcttctcctaacacctaaaagatccctacttttcctatacaactacaattctttcactctttcacaccaaaatcttttcttattactgaaaacagtgcaattttgagtcttt

SEQ ID NO: 94259 - DNA, 502 bp, Glycine max
  Clone ID: PAT_MRT3847_56127C.1
gcacgagctcccaggtggcaaaaaggagctcagacgagtcaggttcaggtatgcttgctacaaattttgtgtctttagaccaacacaggttataaataaggttttaaagatctatgactagttggtaattgacataaagctttatgaccaaatgctcccccatttttcatgatgaaagtaaagttgaattacaagttatatagtgagcatggttcatgattcatgcttcatcagcttaagttttttaatttttgaaatgatggcctttgacaatgattgttcatagtagtttatggatcatgcataaagtctaggttatctagcttgattgtttgaccaggtaaaaaaagaaaagtaaatcaccgttttttcctttgacaactgtacgattaattttctcaccatcctacaaaatttggtcaatcctcctacaacattgaactgattgtgtcacaagggccagacaactatctgtatcttcaaatgggttgaaatgcaatct

SEQ ID NO: 94260 - DNA, 566 bp, Glycine max
  Clone ID: PAT_MRT3847_56128C.1
aaagaaaatctcaaactaatcgtcaattggttctattgattggcaaccttctcatatttcttacagatagtaaaatttaaattgtaatcttacatggatgaatgccaaagaatatatagtgatatttaaaaacaatctcataaataatatttgaatgagggattcaaaatttaataggccagtactatacaatgctggatatatgcctcctttatttgttttggtccttactgcagtccatgttttccatgcgctctctcttgagagcagtgaacttggcagctatgtcatcatagtctggcaacttaggatgaacatgactaggatgtggagaaggacaaaaatatgtccttaacatcttatctttgttgtttctgtgcctctcttggggcatggtcatggcccttgaataggtagcttctgtttctattattggtgaggaaccaccagtccttggattggaaactttgggagaagcagagatttcttcttttgtttcattgtttccattaccagcttggcaatctgtgtagttgaatacatgatactcagctgaagcctggtgc

SEQ ID NO: 94261 - DNA, 297 bp, Glycine max
  Clone ID: PAT_MRT3847_56129C.1
cccacacttccacacgagagaaggagtctataattctaagggagaccccagaagctgatgagacctagggcttgaacattggacacaggcagtaccttctgtaagatggactaaggctggacatgcatcataactaaaactgaggggtctgatactgtcatagcactcacaaatgctgtgaatagtgcacctcgaccatggagggcgaaccatggaaccaagaattgactttgtcacctgatgctccgagcaacagaggcagtggaccactctgctagagcgatgaatggtagagct

SEQ ID NO: 94262 - DNA, 452 bp, Glycine max
  Clone ID: PAT_MRT3847_5612C.1
gagagagagagagagagagagagagagagagagagagagagagagagagagagagagagagagagagagagagcctcatgccgaattcggcacgaggcttccccgcatgcttcttctttgaaatttgagaggttttgtattatttagggtggaatgagtactatcatagttaaggtatcgttcagtagagtattttttaatgaaattgaattaaagcaggtcgtaaaagcgtgggatttataccaaattttaaaactttcctcttatttctttgctactttttacacaagagaacactaccttagggggcaccataaacttggggctagagatatatataggatatgatatatgacagtgatgtgtattggcttccattattgttgttgttgttcagtgtctctggaatcttgaaggttttccagcaaggacggtgctgatgctctctctca

SEQ ID NO: 94263 - DNA, 299 bp, Glycine max
  Clone ID: PAT_MRT3847_56130C.1
aatgccgcattacactctatctcataatgcacgccttgcattcctatttattcaacatctcactcatattcagccaccatattgaccacatgatcactatatcattctcttactcactgcactcaaacattccggtcctctactcgttatcatgtcaatcacagacttaattacggacctgtacctacacacgtaccaactctccatataacatgtcatcttacagcttggcgtagtcctggacctagctaaatgccgtgttaaattcgtatccccatacaattccacacaacatacaa

SEQ ID NO: 94264 - DNA, 356 bp, Glycine max
  Clone ID: PAT_MRT3847_56131C.1
atgttgtgtggtattgttagctttttttatttttttacaaaaagcccctaagaatattttatcaccattcacttaaacgaacgattgatagtgaacatgctttcttttttgggcaaatacccaagacaatctgaattgaaagacagcttaaggattataaatagcaaaagctttcagtctttatttacagtatatagaaggttactgctttcattttaggtggaagagtctgatcagtaggaacaccccagaggaaggacatctttagcgatagaatttacataccgttagctcacagtaattgattagtagcagggctctgtagtacagagctagctgggcatgttatttgggat

SEQ ID NO: 94265 - DNA, 329 bp, Glycine max
  Clone ID: PAT_MRT3847_56132C.1
ctgcgatacgaccacagaatggatatttattaaaatagctctaaagatgggggcttaatatcaattacatctgtaaaaggcatccccaatggttaggagaaaaaaatgcttataaactaccattaatatcaattactacgcactaatggcttaaagagtttgagctcttgatttacaaatattgtgatctcaagtccttcaagtccgctgcattgttagatttacttcatctgaatgtattattcgatttaataaagaatctttatcatttatctatggcgtccattactaactaatatgagactttttagtgcaactggacatctttg

SEQ ID NO: 94266 - DNA, 147 bp, Glycine max
  Clone ID: PAT_MRT3847_56133C.1
cccacgcgtgcgtacaggtgagagaggacgacagaatggggtgactgtggactgagaaaaactacgacaaattgcgattttttgccgaggaccgtaacaacccaaaaagaaagagttgcatgcactgctcgtaaagataatgaatag

SEQ ID NO: 94267 - DNA, 712 bp, Glycine max
  unsure (1)..(712): unsure at all n locations
  Clone ID: PAT_MRT3847_56134C.1
atatcataaaattttatttatcattaaattctgtaaaacatatgaactagatcttcacaaataagagacaaagtctgttctaagagtccagactctttaattacacaatagaggcaggaaagtattctttaaggccattattctcaaaataaatggaatcacaaattacaagggtagctgcacaaactctgttttatgtttacttccatgaaaccaatgtaagtcattcttcctaagacatttattatttatttttacgttttgattgttttttgtttcttgatttttattttattttttaaatattacattgtctttggttgaggactgttgtggagggtgaggggcaactaggtgttgttctgctactgtgtaggtgataggcatcaaactctagctcctaggtttgacactagacatctttatctgttgagacatcttgcccactcttattactttagttcatttttacttactaatttattatttgtacttactttccttttttgagatagggctttactatgaagtcctacttggcctgtacattgcattgatggactgcttctngttcgggagcattgggatcaccaatgtgaaccaccatgtctagtttctaatttatcaaaggaaaatcagaaccagatgacatcactttttgcaagatgtaattggcataatatagatatttcctgaatttccaacgaaagcc

SEQ ID NO: 94268 - DNA, 241 bp, Glycine max
  Clone ID: PAT_MRT3847_56135C.1
aagccaaacttattaaaaacttaaatttgaaaaattaacctacctggacccaaaattaaaaaaaaaattttttacttaaccttacacatttttaaggcatttggaattgacccgggaacctcaaactttggaagcctccttttattttggggtaacccaaccttggaatggattcaccaatttaattaattttatttggatcaaggtcactttctaaattttaaacttcatattctaggtt

SEQ ID NO: 94269 - DNA, 230 bp, Glycine max
  Clone ID: PAT_MRT3847_56136C.1
gtttggaaatttttcctttggaaaaataacacacccttcacaccatattagcgacctttacaagaggtcagctaatttccaaataagcctatcatactcaactaaaggggactgcctaatattctttatcgaatctaacaaacaaccgagcctaagaacacccctattccatatcatgcagaagattccgaaatttcaaaacatccggcagttgcctgtggccccaaaag

SEQ ID NO: 94270 - DNA, 1232 bp, Glycine max
  Clone ID: PAT_MRT3847_56137C.1
acgactcggcccaaggtcaaactctcggactcaaacacacagcacgacgaaacctagcagcctcacgccctcatcgcagcagggacctagccgtcgccggagacgcactgagtctgagagcagcggtgactaaatcaggtttgtcaaagaggaaaaggagagttacgattcaggtttgaagcactaaatcaatcaaaattgtagcaatgggtgagagcaagaaacgaaagagacacagaaacaaacgtggtggtaaggaggagcaaccggttcttccttctccttgtgctaagcgcacaaagctgaaggaaccctcttcctttcttcaaaagatgcgagcaaggttgtctggtgggcatttcaggatgattaatgaaaagctctacacttgcactggggaggaggcgctagattatttcaaggaagaaccttcgctatttgatgtgtatcatacaggatacaaaacacaaatgtcaaattggcctgaacagccagttaatgtaattattaagtggctgaaaaaacagagcccttcttttgttgttgctgattttggttgtggggaagcactcattgctaaaagtgtgaagaatgaagtcttctctctagatcttgtctccaatgatccgaatgtaattgcttgcaacatggcaaatactccccttgactcctcatccgttgacgtcgccgtcttctgtctttcgttgatgggaaccaactaccaaagttacctcaaagaatcgtacagactgctcaagccaggtggctggcttttgatagcagaagtaaagagcaggtttgatccaaatactggaggagcagaccctaaaaagttctcaaatgctatttccgagctaggtttcagctctgtaaaacaggacttctcaaataaaatgtttattttgtttttcttcacaaaaaaggaaaatcaaatttctaagcggaaggaaattgaatggccaatgcttaaaccttgtttgtacaagcgtagatgagattataataattttttccttttttggtgtattcaatgtcatctggatgagagttaaacatttttcttttttttttttcttttagatcagcatggttagtaaatcatcaaagttattgtagtaattggtttctcggcctcattattattctttgattttaagtgcgtatggggagtttgcttggtttacaaatttgctacgaccgtttattgaatatcagatagggtgccttccctt

SEQ ID NO: 94271 - DNA, 188 bp, Glycine max
  unsure (1)..(188): unsure at all n locations
  Clone ID: PAT_MRT3847_56138C.1
cgccgtttccattttctcttctcccttctcccacgccgcccaccgccagtaaagagtgagttttccatttctnngccctccgatgtgcatggcgcgctcanntccatggatcgangtcggtctggccnnntgaatctggaagaaatctgannaatgggaaccatnntcctnntcgtcagaagaaattg

SEQ ID NO: 94272 - DNA, 768 bp, Glycine max
  unsure (1)..(768): unsure at all n locations
  Clone ID: PAT_MRT3847_56139C.1
atgnnnngcaagtctctgtacatgcaaaaatgcaatcccgacgggaacacattacaaaattgcccaggtgagggctcgagaaataaaatgaacttacaattgttaattcgtaaatgtaactcttacccttttttgtatgggtaaataacttcatacatttacttcttgtatatcagactccaaggttgatgggtgtaattatccagtagcaatatctgctaaaagcatcttcaacgtctcataagtcataaaacaaatacctacacctggcaccaccttgtaatattcaggcaaaattcctctgtaaagaccacgaaagccttctgtccggattatgtgcctaaacacaccatagaggcctgttgtatacacacgagctcgcccaccagccccctcaagttgcttcctccgccttacaagatccaacggaaatgttgctggtctctggttctatgggtcagtctggttagatacttggtgcagttcctgcaccaaactctctttctctgcatcaaaagcatagtaaaccacagttgatgatgcaatgcctgaaagactgccgcaagccagactaatcacgacaggtgaatcatcggatctatttgactnnnaataagatctcaaggtttcatacacagagaagctgatagctatacttggccctacagtcaagagtgtagttccaagtcccttgtaannnnaaatattccctcttcctttgctannnnnnnnnaagcatgnnnnnnacctctgtagtagnnnaaatnt

SEQ ID NO: 94273 - DNA, 550 bp, Glycine max
  Clone ID: PAT_MRT3847_5613C.1
gacgacagaagggggaacatgaatatctactcttttctgtttctcttattcttccgaaaatgcttctttttctttgcgggtattaaagaagcacgtttgtcaacttctttcaccaataaattaagcacgggaagttgtgtgcgtagactatagagatcacgccgatggaagatgaagtgatgagtgaagtggctgctccacctcgtcgtgttcttcttgtatcggctggtgccagccacagtgtggcacttctgagtggaaatgttgtttgttcgtggggacgaggagaggatggacagttaggccatggtgacactgatgatcgactatttcctacaaaactgagtgcattggatggccaagacataatatgtgttacttgtggagctgatcatactatggcacgttctgagtctggcagggatgtatatagttggggatggggtgactttggaaggttgggtcatggtgatcatagtgacttgctcattcctcatcccataaaagcattacagggtctaatgatacaacaaattgcctgtggggacag

SEQ ID NO: 94274 - DNA, 812 bp, Glycine max
  Clone ID: PAT_MRT3847_56140C.1
cccacgcgtccgctagcatcgccgcttgttccttttcaagggttttgtgttctcctttgcgccgcatttgtcggtctcccgctcgatgtttttgtctctgtcttcaccaaaatttctatctttattcacattcggcaattgggttcgcttccaatttttatttcgccttcgaccaccttcggaacctttcttcccttccttcttctgcaaattagggttttatttccaattgggtaatttttaatttgggaatctcgtttattcaatttggatcaagaaatccgcgacaatgcctccgagaatagtgaagagaggtgctgcggcaaagagggcatcgaggggatcctcaaaggctgcacctgagaaccagcctgagcctgaaactacggaagtggttgtgaaaaataatcaagaaaatccggttgttgatgctgtggtggaagagaagctcgttgatgtggagcaagaacacgaggaagtaccaaatgagtcggctaaggtggaaaacactgaagaggaggttaaggagtctatagatgaatatgaaaaagatgaacacttagattttgaggataattaccctgagtacgaagcagaggaatatggtggtgttgactatgacgagaaggaaattgaacaagaagaaggtcaggaggagggagatgaagtagaggaagatcctgaagagattgtaggtgaagaagagggtgatacaggtgatgaaagagttgaatatgtttatgaaagagttgaggatgatgatgatgatgatgatgagcatgcctgtgaagagtttgagcatgatgagcatg

SEQ ID NO: 94275 - DNA, 2378 bp, Glycine max
  Clone ID: PAT_MRT3847_56141C.1
attctgaacttaatttgcagacaacgcatattccccataaaagcaactcatattcgcaaatgggaccatatcccctatacccgcttccatcgtaaaccctcctttcaacgcaaaactaccctgcaacccactgcagcgaataaaacccacgctgctttaacttttccggtgaaccgccccaacaatatacgtcaccgttttgctcgagccgggtcgcaaaaacgacgtcgccgacctcctcgtttgaaactgcgcagagcgaaaagtaacaaagtgaagaaaatgctcgatgcatagttgcgaatccttgttcttctgatagtgaaggtagcttgaggtttattttaatttaatttaattcggttagagaaaagtgcggagagataaaagaaaatagaaaaggtgaaaaattgaagctcggagatgcaaatggaagctagggttggtgtggcggtggatggtggtggtgtacggaagttggtgcagccgccgccgccgaaacatattgggactgtttctcagcttcttgccggaggagtcgccggcgcgttcagcaaatcctgtacggcgccgcttgcgagactcaccatcctctttcagattcaaggaatgcattccaatgttgcaactttgagaaaagccagtatatggaatgaggcttcacggattatccatgaagaggggtttggagctttctggaaagggaatctggtcaccattgctcaccggttaccttattcttcggttaacttttattcgtacgagcactacaagaagttgctaaagatggttccgggacttcaaagtcatagggataatgttagtgcagacctttgcgtacattttgttggtggtggcctggcaggagtcactgctgccacaactacttatccattggatcttgtaagaacacggctggctgcacagacaaattttacctactacagaggtatctggcatgctttacacacaattagcaaggaagagggaatatttggcctttataagggacttggaactacactcttgactgtagggccaagtatagctatcagcttctctgtgtatgaaaccttgagatcttattggcagtcaaatagatcggatgattcacctgctgtcgttagtctggcttgcggcagtctttcaggcattgcatcatcaacagagaaagagagtttggtgcaggaactgcaccaagtatctaaccagactgacccatagaaccagagaccaggttggagttgttattgtatctgtggcatatgacaatttagtaaggaaaatgacaaaaaacatttttctcgtctttctgtaactttattttttatctaaagatcttgctcaagtaatcatcttcccaagttttgttctatgacatgtctccccaagctatgcaggggattccatcatgtggtggcattacttggatgaaactatatgattccctcagttaccaaatgtgagaggtgtcctctttgagctatgcttctcacttaggctaccttcacctgatgtttggatgggtaccagaatccttttcagccctaagtgtttctgaagaatctgttcttgttgctttaatagtattgctttcagcataatctaaattatggaaattatggcaaaaaattacaatataaaagaaaaatttataaatgaaattgtcaacaaggaacgactgttctttacatgggaaaaacactaaatcttacttattggggtatggatattttgtgtcaaactgtatattatacagagatactaaccacatgcatccaaaatattcacgcataaaaaactttagtagtgcccttttatcaattgtgttaataaaggttctctgccccttcgctacaacaaatgtatgttcaggtaaggatgtgttttacttcaacccttgcctcttcttgccaattttacagcaacgtttccgttggatcttgtgaggcggaggaagcaacttgagggggctggtgggcgagcccgtgtgtatacaacaggcctctatggtgtgtttaggcacataattcagacagaaggggttcgtggtctctacagaggaattctgcccgaatattacaaggtggtgcccggtgtaggtatttgttttatgacttatgagacgttgaagatgcttttagcagatattggtactgcataactacacccatcaaccttggagtctgatatacaagaagtaaatgtatgaggttatttacccatacaaaaaatgttaagttacatttacgatttaacaattgtaagttcaatttatttctcgagcctcacctgggcaattttttaatgttcccgtggggattgcatttttgcatgtacagagacttgcataacatttaatattaagctgttatcgc

SEQ ID NO: 94276 - DNA, 2948 bp, Glycine max
  unsure (1)..(2948): unsure at all n locations
  Clone ID: PAT_MRT3847_56142C.1
ttgttcgcgtggggtcgcgtcgcaaaaacgacgtcgccgacgcccttgtttgaaattgtgcagagcgaaaagtaacaaagtgaagaaaagagcagatagaagaaaaagctcggtgcatagttccgaatccttgttcttctgatagtgaaggtagcttgaggtttatttaatttaattcggttcgagaaaagtgctgagagagagaaaatagaaaaggtgaaaaatcgaaggtcggagatgcaaatggaagctagggttggtatggcggtggatggtggtggtgtacggaagttggtgcagccgccgccgaagcagattggaactgtttctcagcttctcgccggaggagtcgccggcgcgttcagcaaaacctgtacggcgcctcttgcgagacttaccatcctctttcagtggaaatgttttcagattcagggaatgcattccaatgttgcagctttgagaaaagtcagtatatggaatgaggcttcacgaattatccatgaagaggggtttagggctttctggaaagggaatctggttaccattgctcaccgcttaccttattcgtcagttaacttttattcgtacgagcactacaagaagttgctaaagatggttccacgacttcaaagccatagggataatgttagtgcagatctttgcgtacattttgttggtggtggcatggcaggaatcactgctgctacatctacttatccattggatcttgtaagaacacggctggctgcacagacaaattttacctactacagaggtatctggcatgctttacacacaattagcaaggaagagggaatatttggcctttacaagggacttggaactacactcttgactgtagggccaagtatagctatcagcttctctgtgtatgaaaccttgagatcttattggcagtcaaatagatccgatgattcacctgtcgtgattagtctggcttgcggcagtctttcaggcattgcatcatcaactgagaaagagagtttggtgcaggaactgcaccaagtatctaaccagactgacccatagaaccagagaccaggtgggagttgttattgtatctgtggcatatgacaatttagtaaggaaaatgacaaaataacatttttcttgcctttctgtaactntatttcttatctaaagatcttgctcaagtaatcatcttcccaagttttgttctatggcatgtctccccaagctatgcaggggattccatcatggggtggcattacttggatgaacctatatgattccctcagttaccaaatgtgagaggtgtcctctttgaggtatgcttctcacttaggctaccttcacctgatgtttggacgggtaccagaatccttttcagccctaagtgtttctgaagaatctgttcttattgctttcagcatactctaaatgatgaaaattatggcaaaaaattacaatatagttgtttatgatataagaaaatttataaatgaaattgtcaacaaagaacgactgttctttacatgggaaaaacactaaatcatactgattggggaatggatattttgtgtcaaaaccgtattatacagatagatactaaccacatgtatccaaaatattcacgcataaaaaactttagtatgccctttttatcaattgtgttaataaaggttctctgcccctttgctacaataaatgtatgttcaggtaaggatgtgttttacttcaactcttacctcttgatgccaattttacaggtaatgtttttacatgtttggatttgttaaatgctgcgtctaccatgttaagataggcttgtgcatccataaatttcttgctgtcaattgatcacaaattcagtagagccacatggtatcaataatatgtttgccacagttattctttagaatagccactgatgttgaggtgcaggtttgcaactttctcagagacacaattagaaactcctattttgtctacaatttataggttattgatttcaaacatcgttgattttgatggccaaaatatcgattagaagatttagcttgtataaattgatattcatttcatttattgttttggaattggtttgcaattcaatcgattaatcatcttaccacctttgatgatgcactgtaatgtcacagactactggtctgatgtaaaaattgaatttctgttgagtagaatgggtgtagttcaattcaattcatctgttatactatatgcagcaacatttccgttggatcttgtaaggcggaggaagcaacttgagggggctggtgggcgagctcgtgtgtatacaacaggcctctatggtgtgtttaggcacataatccggacagaaggctttcgtggtctttacagaggaattttgcctgaatattacaaggtggtgccaggtgtaggtatttgttttatgacttatgagacgttgaagatgcttttagcagatattgctactggataattacacccatcaaccttggagtctgatatacaagaagtaaatgtatgaagttatttacccatacaaaaaagggtaagagttacatttacgaattaacaattgtaagttcattttatttctcgagccctcacctgggcaattttgtaatgtgttcccgtggggattgcatttttgcatgtacagagacttgcataacatttaatattaagctgttatcgtcatgtattctcatttggtctgcttatctttgcactaaagaaaaaggggaagtgcagtgagaaatatctattgatctgcaagactgcaactggtttccgatggcccgacttattcttgtcttaagagttgctaaaaataatactttcagaacttgggagaactatgctacaaaatctagtcagttgtagttggagaggccatgcccttgtaaatctcacatttgaattgcatacttctaatatgggactgaaatcctatgtgc

SEQ ID NO: 94277 - DNA, 1272 bp, Glycine max
  Clone ID: PAT_MRT3847_56143C.1
agagaaaccaaaaatctcaacaaagcagtttctaagatccgatccattcagaccattccacattttggggaagaaagaaagaaactctcttacaccctagggtttctctcgcgaaatgtgcccgatcgagacctaaggcttgttaggtgtcccaatttccgtgctgcattagtcccaagcgtgagggcgagccctggtgcagcggtaaagttgtgccttggtgacttgttggtcatgggttcgaatccggaaacagcctctttgcatatgcaagggtaaggctgcgtaccacatccctcccccataccttcgcatagcgaagagcctttgggcaatggggtacgaagtttttttttaattgatcacaaattcagtagagccacatggcatcaataatatgtttcccacagttattctttagaatagcctatgatgtttaggtgcaggtttgcaactttctcagacacgatcactacaataagaaactcctattttgtctacaattcataggttattgatttcaaatatagttgattttgatttcatttcttgttttggaattggtttgcacttcagtcgattaatcatcttaccacctttgatgatgcactgtcatctcacagattaacggtctgatctaaaattgaatttctgttgagtagaatgggtatagttgaattcaattcatctgttatactattttcagcaacgtttccgttggatcttgtgaggcggaggaagcaacttgagggggctggtgggcgagcccgtgtgtatacaacaggcctctatggtgtgtttaggcacataattcagacagaaggggttcgtggtctctacagaggaattctgcccgaatattacaaggtggtgcccggtgtaggtatttgttttatgacttatgagacgttgaagatgcttttagcagatattggtactgcataactacacccatcaaccttggagtctgatatacaagaagtaaatgtatgaggttatttacccatacaaaaaatgttaagttacatttacgatttaacaattgtaagttcaatttatttctcgagcctcacctgggcaattttttaatgttcccgtggggattgcatttttgcatgtacagagacttgcataacatttaatattaagctgttatcgcatgtattctcatttggtctttgcttatctttgccctcgaagaaaaaaaaggaagtgaagtgagcaatatctattaatctgcaagactgcaactggtttttgatggccggactt

SEQ ID NO: 94278 - DNA, 512 bp, Glycine max
  Clone ID: PAT_MRT3847_56144C.1
aaaacaaaagagggggccaaaatttctttaccaaactttcatgaatcatgactgcataaaaacaaaaaaaaattttaccgaatatcccatgttaaaaaaaattttttgcccctcataacaaactaaaaaaaaaaaaaacccaggttgttttgttacaaaaaaactgaccctttttttacttttaaaaaaaacaactaatttgaaggacggggcaaaatcttagcttaaaaaacccctttttttttcccacccagttggttggacagagtcatttccaaagggagaaacagggattttttgggggggggaaaaaatttccccccaatttttttttgaaaaaaaaaaaggtgtttttggagggcccccccagttaacaccaggggctgttgaaataggttggggaaccgcatcaccccatgaaggaacaattggaccaggcccctggccataaaaaaaaaaaacacccggcttgaaatctgggggggaaaatccccggccggagcttccccccc

SEQ ID NO: 94279 - DNA, 481 bp, Glycine max
  Clone ID: PAT_MRT3847_56145C.1
cccacgcgttcgcccacgcgtccggtgctgggtacgcgatgcgaggcggaaccacaaactcaccacacaaatgcggcaacagaaaaacatgcacaactcaatgctgcactcaatcgcgtgggcgcattcgagcgtgcaccgctttacacccgcatcattcctcacgagtccgagccggaaatgtgtcgtgtggcagaaagcactgcgcacagtgtcgtgctgaactccgcataccgaagggaggaagtgatcgaaagcagcgaacatatcatctggcaaccgcactttggtggacagtttgtgcacgcatcaaggcgtgcgggcgacgtgtctgccctgctacaacttcagctagcagagacgagcgcacggtcattgcaagcgcagcacatcatttgggtagacaatcgaccggttggcgcgccgcctcattaccgtgcgggtgctgcacgcgaggagtatgcactccttgaagacaact

SEQ ID NO: 94280 - DNA, 848 bp, Glycine max
  Clone ID: PAT_MRT3847_56146C.1
tcgacccacgcgtccgtggccgcgcgaagacgacggaaggggatgagaaggaaataaagattaggattaggtgttgcgcagtcgcaggcatggccatggctttggtgagcctcaacaccattcatacatcgccttcttctttttcgttttcatctcccaaaccttattcttcctccaactatgcaccacctctcaccctccttccacgatttcggaggcacctcgttcgtatggctcccgacgaggagaagatgactcgccgttcccctctcgatttccccatcgagtgggaaaggcctaagcctggacgaagaccggatatattccctcaatttagtccaatgaagacacctttgccgcctccgttgcctgcagatcctccagaagaggatgaagaggaggaagaaaagaaagaggaagagcaagaacctgataaggaggagccagataagccagacaagccagaaaagcaatagtgtgtagtaaatgactagtcttgatttctccagttatccttgatatgtcaagccagactgctgattgattaagtgaatgtaagggtatcacatgaatacctatagcgtcagaaattttagctttcaagtttttctagcaccatgtggccttatatgagttagctcatgcaagaaggaaaaaaaaaacaattttgtgctacggacatatttgtaggcagtaattttttctatactttatcgattagtttgctcctgtaccatcattttgatggaccatgatttattgtttaagatgcaatttcgatttttattggattattcatcgtgaattgacaggaaaatgaagcttcttctttaaaaaaaaaaacgaag

SEQ ID NO: 94281 - DNA, 358 bp, Glycine max
  Clone ID: PAT_MRT3847_56147C.1
acttggctttcgggtcggtgtccttgaggttttcgccgtcgtagacgcgcattttcgagtagatgttcgagttttccggctccttgaggcgcgagagcacggtgaactgggcgagcatcttcagggtgtcgggtgcgcagtgggccttggccagggagctgttgaacagaagtttgtcgtagatcttcacttcgtcgctgacccgtaggcaagtccggacctttaccatgttaatcccggtcggtgaacgcgttgacttgtttttgtgttaacgggaggggtgcccttccgattcgttgggttgggccaagcagatcccgggtaaacggatggcccccagtcctttggggcgtgtgta

SEQ ID NO: 94282 - DNA, 2198 bp, Glycine max
  Clone ID: PAT_MRT3847_56148C.1
tcgaccacgcgttcgccaatagaagcaacagacagaagggaattaaacatacgattaggtgtcgcgcactctgaggcatggccatggggttggtgagcctcaacaccattcatacatcgccttcttctttctcgtttatcatctcccaaaccttattcttcctccaactatgcaccacctctcaccctccttccacgatttcggaggcacctcgtacgtatggctccctacaaggagaagatgactcgccgttcccctctcgatttccccatcgagtgggcgttgtttggatcttcatacgccagatctgaaaaaaataggctggatctgctaaaatacgcttgatacatatgggattcctcgagcacttgtggaacgacagcgtcatcctgccgaaggccgccaaacgttctcaccaagctccggcaaccaccacaccttcactttccgaactagctctggtcatcgcttgggatctccatacgccggatctgctaaaatacgcttgatccatatgggcctcctcgaccacttgtgggacgacaccgtcgccggcccaaggccggaaaacggtctcggcaagctccgaaaacaccacaccttcactttccgacctagctccggcaaggaaacggagggcgggagcgtgagatcgtacggagacgaatcgtcggaggaagcgacgagagtgacgcgtagtatcatgatcgtgaaaccgcccgggtaccagagtggatcgcctccggtttctcccgccggttctactactccgatttctccgttttccggaggaaaagattcgtttcggtttcgaagaaggtcggcatcagatgcgtacgagaagagagggcagaacagatcaggcccttcttctcctttcgatgtgtgagaaatgagagtcgcattttctcgtacccgaaagctgaggatgtagtcttttggcctatgctgtattcatttttgtttagatctccgtttgcatgtatgaatgtatgtaaggaatgagttgaggttaaggttgtgccacagttctgccagttcacgcgaggtagctttttggtttagcttctttaagtctttacttaggtgagctgcgtagtggctggcaaattgtaagtaagaaagtgtaagggtagagtagcggtgtatcttattattatgtaatgtatatttataattaataagccattatgcttgtcatggttttgttgatagctctccccattgctttgaaaacaatttcattagaacctttctcctgaagcaagctcatggcgtaagtaatgtagttgcgcatccttccctgactagtaatccggatctcgttttcatcgattggagtttcagctcttggcttctccaccttctggtaccgatccatcgcgatagctaaggatagagtttctttccttcgcgaacaaacacacgaaagagcgagccctcttctacggcttggtattttctctcgtacccgaaagctgaggatgtagtcttttggcctatgctgtattcatttttgtttagatctccgtttgcatgtatgaatgtatgtaaggaatgagttgaggttaaggttgtgccacagttctgccagttcacgcgaggtagctttttggtttagcttctttaagtctttacttaggtgagctgcgtagtggctggcaaattgtaagtaagaaagtgtaagggtagagtagcggtgtatcttattattatgtaatgtatatttataattaataagccattctgcgtttgttggtaaaaaaaaaaaaaaaaaaaaaaaagaaaaaagaaaaaaaaaaaaaagaaagaggaagaacctgaaaaggaggagccagataagccagacaagccagaaaagcaatagtgtgtagtaaatgactggtcttgattccctccagttatccttgatatgccgagccagactgctgattgctataggtattcatgtgatacccttacattcactttagcaatcctcgagccgaattgtgcaagtgaatgtaagggtatcccatggatacctaaagcatagaattgtttagctttgttcaaggtttttcaagccgctaatgtgcccttatatgagttagctcacgcaagaaggcaacaaaaagaaaagccattttgtgctccggacatatttgtaggcagtaatttttccctacttcctcgctccatttgcgccttctttaacc

SEQ ID NO: 94283 - DNA, 260 bp, Glycine max
  Clone ID: PAT_MRT3847_56149C.1
ccgccaatcgcaaggaggatcggctcagcgctcagacgcgaaggagtgatcacaaagtcacagctacccacagtgatctcggctatcgtgctcgagatagcatgaagcgcgcatgccggtgggggtctacacgagatctcgtcagcactgaccgtcttgcgcgtgagtattggtgtacagaacgggtcacgggagatgcactctgaccggggagccctctctgaatgctatcgccaccgggtatggcgtagtcgtctcgt

SEQ ID NO: 94284 - DNA, 261 bp, Glycine max
  Clone ID: PAT_MRT3847_5614C.1
caacaatggtgaaatcgagttccaccaagtcaaagacaacagaggacgttgacctcctcaaagacgtcgcctccttcgcttccgagctcggcttgtccacttcgcaaccccactcaggtttcaacgatgttgatttccgcaaaaccaagccaaacaagctcccgaagaagcaacaaacgcctgaaaaagtcacgccccaaaattcccataatccaaagaacaaaacttttggcaaaaacaacggaccccacgagaagcgca

SEQ ID NO: 94285 - DNA, 748 bp, Glycine max
  Clone ID: PAT_MRT3847_56150C.1
cggccgctcgaggcggctggcgggatttgggatctcctacgccggatctgctaaaatacgcttgatccatatgggcctcctcgaccacttgtgggacgacaccgtcgccggcccaaggccggaaaacggtctcggcaagctccggaaacaccacaccttcactttccgacctagctccggcaaggaagcggagggcgggagcgtgagatcgtacggtgacgaatcgtcggaggaagcgactagagtgacgcgtagtatcatgatcgtgaaaccgccagggtaccagagtggatcgcctccggtttctcctgccggttctactcctccgatttctccgttttccggaggaaaagattcgcttcggtttcgaagaaggtcgggatctgatgcgtacgagaagagagggcagaacagatcaggcccttcttctcctttcgatgtgtgacgcattttctcgtacctgaaagctgaggatgtagcagcttttttggcctttgctgtattcatttttgtttagtctttgtgtgcatgtataatgtctgaatgtctgtaaggaagttctgccaagttcatgcaaggtagcttttggtttagcttctttaagtctttacttaagtaagctgcgtagtggttgccaaatcgtaagtagaaagtgtaagggtagagtagcggtgtatctttactccttatcatgtaatgtatatttataattaataagccattctgcgtttgtttttggtattgttcc

SEQ ID NO: 94286 - DNA, 440 bp, Glycine max
  Clone ID: PAT_MRT3847_56151C.1
atttgtataattacgatgttatatactttgatagtttaattgaaaaatgaaaccaggagaggtttattcgctggcgtacaatgccatccaatgattgggatggcgattcattcttgtgaagactgtccttggcttggccagcgcacactccttctccgaactgtaccaaaacgtggagatggaattgaaaatcttacaaacggctgccattttggaaatcgatcacagtgtcagaggtttggtgcgtttgtcgatggtcaccacaattgatcagggtttatcccgtgtcactggagtctggctgattctgcacaaagttgcctctgcccgtgtcagtttgtgtgcgccaatgcttatggtcgcctggtccatcactgaagttggccgctattcgatctatgcgctcaatttgctgaacgccgtgctctacgcattgacgt

SEQ ID NO: 94287 - DNA, 388 bp, Glycine max
  Clone ID: PAT_MRT3847_56152C.1
gataacttcaaattattgaaatacgatcaaacaaaccagtgttagttaatccacatgttcaataataatatacacatctttccaaaattatgtaatgaatcaattaaaataaatttctttacaaagttaagattcttattagaaaatattacgcacatttttcatgaatggggatgtttctacaagaatggagtgaaatcatgataaaaaaaaagtgttttttctaaacattaaaacttgaacttaaaacttatggaattgaaataattttaagtcaattgatccatgtgtgacgtgtttgtaaatgattttgggatgatgatgttattaatttgaagatgatatttttttgttgcctataaacatgcatatgcatgaaaaagaaaaa

SEQ ID NO: 94288 - DNA, 552 bp, Glycine max
  Clone ID: PAT_MRT3847_56153C.1
agaagaagcaccaccacgagtatagagtaaaaacacaagcagcaaccattaatcatttcagctgcaatgcaacccaagaaagaaatgcataacaccaatattccaaatcccatgaaattgtagatgaaccatggagcgggtaggttgatggaattgagtttgagatagaaatggaaggcgggaggaagaggaggatcaggagggacactatggtcccattcgttgaacatccatagggaatagagcagaatggaaaggccaacgaagcattgaaggaaattcaggaatttcagaacgaaaccaagcgaaacgtggcacaaattcagccgcatcttcttattctcaatactaatattttagggtttcttcttcctttgccttgcctgagttgatttccaatgagtgtgtgagtgagtttggctttgattattaggatttccaattatcactctttgcttcccttccttccgcaatttgtattttatcccattgtttggtttatccgtcaggtactctcactctgcatccattaaaataaaacttactcgagcc

SEQ ID NO: 94289 - DNA, 526 bp, Glycine max
  Clone ID: PAT_MRT3847_56154C.1
gtatttgttgtcttttgttttatatttgcatttgcattgttaagtatgctcttgcttgaattccactgttttatagatgcagccatcctttcattaaggatgcaacaaaatggatgaagttaagactacacatgttcaatgaaagttttaaacatttataaacattctgcagtaattttttaatgtttgaactgcagctattcgaggagtaaaacagaagatcaattatatttatttatttatatttttgttaacaaaagttagtttattagttttgttagaaatgtcaggagattcgaactatgacctctgccccctcccttcttcctttcctcttttccaattactgggtcaaccttatatcccctagaagatcaattatatgcattggtttcaacaccaagaagaccaaaagagaaaaataggagtaatctattaattatgtaaaaattgaaaagaataaattgtgttttttccattgtacatcttctagtgaagcatacacaacaaaaaaatataaacctta

SEQ ID NO: 94290 - DNA, 226 bp, Glycine max
  unsure (1)..(226): unsure at all n locations
  Clone ID: PAT_MRT3847_56155C.1
aatacacttgtacctctagcaagttcataacctctccacaacactgaaccactatctacccaatttacaataatgcataatttgccctttgaccctcacagctaagaattcttaccccacaattttaattacttaccgcggggggaccaaccagtttcacnnnnnaccaagaacaagaaatttctgttaaaggatatntaaataccccnnctanaataatatatgt

SEQ ID NO: 94291 - DNA, 229 bp, Glycine max
  Clone ID: PAT_MRT3847_56156C.1
gtggggtgttcatatttttttttgtttttttttttttttgggaaaaaaggaaaaacaaaacacacatcctgttataaattacaaagtttggttggggtaaacaccaccgcgagtttcgcaaacagattttccccccctcatatttcattttgagggacaacccccccccccgggggtgggagaaccctttagttgaaaagcccttttccccggcccggtcccattgtta

SEQ ID NO: 94292 - DNA, 139 bp, Glycine max
  unsure (1)..(139): unsure at all n locations
  Clone ID: PAT_MRT3847_56157C.1
gataaacaaaatcttttcaacaaggtagagagccatcnacatagtacagtgggcgccgcaaataaaccaccctatctccataataactatactttactaatgttcccatttataaacttaacctaattataataataat

SEQ ID NO: 94293 - DNA, 230 bp, Glycine max
  Clone ID: PAT_MRT3847_56158C.1
cttctttagttgttgtgagtgtttcatttgctgaaactgaacaacacatcacaaggccatcgatcatgagcatgctgcttgccccgaatgggcatagccaactgcaagtacgcaccttcactagagactcttgtatgctcccaaggcgcctctactgcctgcttcaccacttcacctgcgtgcgcttctagataggcaatttcagcttgcactgtataaggccatgccaa

SEQ ID NO: 94294 - DNA, 242 bp, Glycine max
  Clone ID: PAT_MRT3847_56159C.1
ggaaggaaggaccataaattccttggtgttcatggctcaaacaaaacttaatggtttttatttaagtctatttagcggggttttaaaccgcttttacattttacaaagattgttaaagagcgtcccccgttttttaatacggtccacacatttacccaacaagttttgtgggccgccaaattataaataaaccttcaattttggccccccgggggggggttaaagaaatatttttcaaaacc

SEQ ID NO: 94295 - DNA, 343 bp, Glycine max
  Clone ID: PAT_MRT3847_5615C.1
gaacaggagcccttcctacttcaacttgtgaacgatgcaaactctctatacagaccaatatgtgcacgatcgcgtgctccagagggtcaacaaaagctactatcagctcctgcatgtgacggactaccggatgtggaaggtgaactacaaacccaacaccctccttctgcgagacaatgctgtacgtgatcatctgcaggctgtccttaacgaaactgccattgttacctctgtgatcagcaacgctcgagactcttacaaccttgactctgtcgatggactaagagtcggtgcagcgaccacatactatgtagttgaccatgacggcgacgacagtcgcaga

SEQ ID NO: 94296 - DNA, 264 bp, Glycine max
  Clone ID: PAT_MRT3847_56160C.1
ctcacgcgtacgcgtactcgtgggcagactagacatacactacctagctcgctctggagattggcacatacacgacgattactattatcatcatctactttctagcttatcgttcaagagttgtgatcaagaatgtgtacaacaagccgcgcttgtacttggacacgtgcggctgatgtcggagcggtgaatgccttgaatgaccaaggcatatgtctgtgagtacagcacgaagagatcagcacaacttcatgctggacataa

SEQ ID NO: 94297 - DNA, 483 bp, Glycine max
  Clone ID: PAT_MRT3847_56161C.1
gatgattgggtatcattgatggcgaagtacccaagattatatcatatttctcaacagcaacacaaatacattcagcaaatggggccgatatcagacggagggtgggagtggcagttccagtggaggaggtttttttggaaggtgaaatacacatggctgcaaaatttttggaggatatagagggtctggtagtacgattgcagctacaagacacctggagttgggagggagagtcaagcgggagatatacagtgtggaatgcctataggttgcttgataggggatcaccaaatgagaatcaagatggagtgtttaatataatatggaagcttagaatccctagtaaagcctcaatctttgcttggagattaatccgggacaaactaccaacaaagagtaatttgagaaggagaaatgtggaaatcaatgacgtcagttgtccattttgcaggcatcatggcgaggatgcatctcacctttttt

SEQ ID NO: 94298 - DNA, 229 bp, Glycine max
  Clone ID: PAT_MRT3847_56162C.1
gccgaagcgggaagactcgggcgagtcggtcgacgaccaggaccgcgtggtgcaccagcaggagctcgagggcgccctgcgcgagatggcgctgtgccggcgttgtgtaaccaggcgacgctgtccagccgagcgaggacaacacgcagtgggaggccaacggcgaccccaccgagattgccctgcaggttgctgcgcacaagctgggccgcggcaagccgttccacac

SEQ ID NO: 94299 - DNA, 215 bp, Glycine max
  unsure (1)..(215): unsure at all n locations
  Clone ID: PAT_MRT3847_56163C.1
ctgagtggcgatccaccttcgagggcngtaagtgaaaagggcgctctgtaccgccatataggaaggagcaatttataatgaacgaaaagctgtgccttgcggactaccttgacctcgagcactcttgccaaacgctttacctcaccataaatcaactgaatctggtcatacctatagacggtgtaaagaaaatgcacgtacgctattaagaacgt

SEQ ID NO: 94300 - DNA, 496 bp, Glycine max
  Clone ID: PAT_MRT3847_56164C.1
gcgatcgtgcgcccacgcgtccgcccacgcgtgcgacgactgcgagaagacgacagaaggggtagaccttaccagaacaattgtaccacaaattagaggcttgccttgaggtgaggcactagcttgcactacgttgggcaaacgtgcctattcatgtcatgccccaaggtcaagtttttgaaattggtgactagcaattgaaaggcttcagagccattttttttcattactgtaattccacatttctacctctctcttgcttgccttattttctttgacgctacaatgctagcttatatatatgtctagtaccttttttctacctttgtccatgtaactaaaagtacagagcttgcaatcatacaatggaacacattataaagaacatgaaccaatcttgagaatcactattttagagtatgcaactatttaaaagcttaaaaatgacaaagtttgcacatcagaagtaacattatcaggaggacaaattaccaga

SEQ ID NO: 94301 - DNA, 516 bp, Glycine max
  Clone ID: PAT_MRT3847_56165C.1
cggtcgcgtgggtttgagaatgctgtaacggtcttctattttatggtctacaaattccttttatattattaatcaatcaacatgattgtgttttatggtatttcatcatcaaatgtttttggtagagtttcctactatgtaaggagggattcaaattcatgagaacaatgcactccatgtgatcttaatttttactgtgttctctttacaggcatgtcatctggaaaaagttcagtgacaagtttccagggatcacctgtacctgcaggactaatggagggtggtctgattgatgttcaacaccaactcaatccatcttcaagtgacccaaatgcacctagtttagagcctcacaaaattgtacagcaggtcactggtttagatttgcctgcaaaactgagaagaggtgcaggttaattaatgcaaatatagtgacaccagcaatgtcattgtcatatggtattgtgtaccccatgtgcttctcatcaaagatttttttttttcttggcttttcaa

SEQ ID NO: 94302 - DNA, 239 bp, Glycine max
  Clone ID: PAT_MRT3847_56166C.1
gaccgacggaagtcgttaggacaaacgaagaagtatcactcatatgctgctctctatcattccattgcgataatcatccatagctacttactaaaatggctaccatccatgctgctatcacaaccacatcgatctatcgcgcaactcttgttcatacacaagccttatctaccgttcttgctttgccagcaatcggtaaggtaggaagagtgagttgctccatggatgaagcaccttac

SEQ ID NO: 94303 - DNA, 743 bp, Glycine max
  Clone ID: PAT_MRT3847_56167C.1
ataaaaaaaattaacattctaataattaatatctgtgaataaaaaatgtttattacacttaatgtgtgaatgggaacagaaagagaagcaaaaagaaagaatctagaataagatggaagggaaggaaggagtatatataagatgaaaaaaaaaaaaaccttctatagaggaattagagtgtatgcatgtacgtgtttagagaaattctctccttacggcgtatgcatactgagagcgccgtatattctgcttccgcttcttgtacaccatccctgccaacacgatcacgctcgccgccacgattactccgatcgctaaccctgccttcttgctcccgctcaatcctcctctcgatgatgaattctctgctctgtcatcctcgtacacgtcgatgtggttgccgtccgccggagaaggcgccggagaggatcccggtgaatgcgccggagaggcgacgggactccgaaaaggcggtgatgaacctagaggtaagctggcgggggaagcattcggagcatggacggaatatgacggagacggtgacggagatggtgcggagagagcgaggtgcagtgaaagagagaggaagagaagagaaagaaggaataatcttgcacttgacatatgttagttatttctaagaaaaagaagagataatgtggatctgaattctgaagagaatgagaaaagtgtttgaaaagttgagatatatggaatccgtatattcccgcccgccgctcgag

SEQ ID NO: 94304 - DNA, 129 bp, Glycine max
  Clone ID: PAT_MRT3847_56168C.1
aaaatttcacaagataatcagcaaataaaatttgtaatggattttgagtaattcttaggtgggaaaaaagtgaaggacacttgaatctagaattacttatattaatttgattctgtcgagaaactttga

SEQ ID NO: 94305 - DNA, 401 bp, Glycine max
  Clone ID: PAT_MRT3847_56169C.1
ctgatgcatgaaactgcaatttaaaatcccatattcatcgaaattaattctggggatgttagaaatgaaggtggagagtttgcatcaaaccaaggagaatgtagcattgttgttctctccatataagcaccacttatgaggaaagagtcaagaactgtccactccttattcttgcactgctaacaagctcaaatccggcgctgttacaatagattctgatcttggacgtaatgagaaaaatgggttgtagaagaaactctgtatacacgacaggattgatttcggccggatgtttcacggtgctaggagttcccatgactggcaacttgctgaaaatttgatttttggtgctgatccgcacacactcaatgaagccttgtgtatcacactgcattccatct

SEQ ID NO: 94306 - DNA, 299 bp, Glycine max
  Clone ID: PAT_MRT3847_5616C.1
cgggtatagtgtcagagcattattagcatgaggatcacactcattgactcacttgcgcccaagactagtaacattcatcatttgagaccatcgttttgggtacagctgaccctaacgttccatatgaacaagtacttatggggtgcagtgagcactatccaaaggggatgtgtttagaagaatgactttggcttaattatgttggatcctcgagactgttattcatttgatggtgcctatgcctatgcatcaccgtcatttggtcggtgcaagtattcagttgcaaaaaagcaatgaaa

SEQ ID NO: 94307 - DNA, 2602 bp, Glycine max
  unsure (1)..(2602): unsure at all n locations
  Clone ID: PAT_MRT3847_56170C.1
gcattaggggggccaacctcgtcaggttcgacgcttccgagatcgcataggacaagcgcggttggatcttcgatccggtagcacccattattggtggatgcaattggaatacggcgtcgtttttggtttggaagtgtttaccgcgtgttcgtttgtgaattattttcccttcagtggcatttctcactggtagtgatcttgttcctgggcctgctgctggagtgtttccttcaaggggtggtcatggcattggtggaagcatgcttgtagggcctaatgacccccgttggtttggtggtattggtggagatcctgcttttcctggaggattgccgagagccagaaagaaacgaggttagcgagacaacctcggcgtagttgtggccttacctcaacccccctccccaaaaactattctttcaaaacgactacggtgttagcttcagattcctttaaatagggttgcactctaactcacacagcccatagcaagagatcgcaaaggacaagcgcggttggatcttcgatcccatagcacccattattgttggatgcaattggaatacggcgtcgtttttggtttggaagtgtttaccgcgtgttcgtttgtgaaacaattctctgaactactgattaaggcagctagtgattatggtgctttgacagcatcagtggcaaatttttagtggagaggaatgaaagaggatagggtcatgctgcattttgatttttgacaggtgtaggctaggggaggcaataaatctgtgcagagatccatcattaatattggacagatggttcttcttcatggattgacactgttcacagtaaaccatgcatgacatgcaattgctatacttattagctttaatggaaccatcagttgcctatatgtcatgatgtctttatgatcattctttttaattttccctgcatataagttctactttcttttgtactaattgatttttaatattttgttttgcttttgtacagaggaggcagagggggtacatccacgaccgagaatccaaaatagggcctagtggacccgacgatggcgagtgaaaagttggtgctggcagtgatcagggccgcgaggccaaccttccgaaaccaaaacgacaaaatcgcctttgccgttcactcctccttcctcacctccggctatgtccttacagctacaggttccccaggccctctccgaacaatgcgttttctgacccatccaatgacgaggtatccgttgatcattggaacgagctgaacgatgagtacgcgttcgtttacgcgaatccagaaaagggttcggagaaagtgcttgtcaagtgcctcgtgatgaacgacaaattgctcgttcatgctttgactcaagggtcttcggagcctttgagccttgagattgatgttggggattatgctgaagaggatggagtcagcaattattctcagcagttcgagaatttggataagcttgtgaagagaatagatggggatattttgtctaaattagatggttctgctagagccagctcatcaagtagaagctcggagacaagtgacagaactagacaaagagatacctgatcctgttgctaggttttggtgaacctggtggtcctccaactcaatttattttcccttcagttgccattggttctggtagtgatcttgttcctgggcctgctgctggagtgtttccttcaaggggtggtcatggcattggtggaagcatgcttgtagggcctaatgacccccgttggtttggtggtgttggtggtattggtggagatcctgcttttcctggaggattgccgggtgttcctcccggtgcgcgatttgatccataatggacctcccaggtgttcctggttttgaacccaacagattttgcaaggaatcctaggaggccaggatatgacactcatccagattggcaacattttcggagagatgctgattcagactacatatagtcgtaatacggacaagttgtcttaagtcaatttaccaaaaacaacttgagcaaatactagttatatggacaaattgttctccatgcgtattttctttcagggctattattagttttattggaggacagggaaatatgttgataggatgatttgaaatttgtaaatagttaaggatttaattacaaatttgtagtttgaataagatcttcgtccttatactttattcataagattttgacatagggtttgatccctagcaaggtgtgatatatacttaagaataaattttgattccaaataaacatagatgaagcggcaacagattttaaatatttttatatatatattcaagacaataaatatatccatcgcaactgatcaatgttgtacgattaattttgttattttgggttggcatttaattcacagtaaggtcataattgcactctcttagtggacaaagaagttaattttttgacgcaaatataattttccaactatgggatgctcccttgagttatatcttgtgacttgatgatcattagacattttttaaagagtaattactacaacgcaaaataatcatctcatgcgggggcgttaacagaatcagganngaatgcaag

SEQ ID NO: 94308 - DNA, 1198 bp, Glycine max
  Clone ID: PAT_MRT3847_56171C.1
gagatcgcaaaggacaagcgcggttggatcttcgatcccatagcacccattattgttggatgcaattggaatacggcgtcgtttttggtttggaagtgtttaccgcgtgttcgtttgtgaaacaattctctgaactactgattaaggcagctagtgattatggtgctttgacagcatcagtggcaaatttttagtggagaggaatgaaagaggatagggtcatgctgcattttgatttttgacaggtgtaggctaggggaggcaataaatctgtgcagagatccatcattaatattggacagatggttcttcttcatggattgacactgttcacagtaaaccatgcatgacatgcaattgctatacttattagctttaatggaaccatcagttgcctatatgtcatgatgtctttatgatcattctttttaattttccctgcatataagttctactttcttttgtactaattgatttttaatattttgttttgcttttgtacagaattattttcccttcagtggcatttctcactggtagtgatcttgttcctgggcctgctgctggagtgtttccttcaaggggtggtcatggcattggtggaagcatgctcgtagggcctaatgacccccgttggtttggtggtattggtggagatcctgcttttcctggaggattgccgggtgttcctcccggtgcacgatttgatccctatggacctcctggtgttcctggttttgaacccaacaaatttgcaaggaatcctaggaggccaggatacgacgctcatccagatttgcaacatttccgaagagatgctgattcagactacatataggatctgtttggatacaagcactttgagagctttcttactgaaaatatagttttttcccgtaacttaatagcttgtatccaaacaacctcatagtatagttgtcgtaatatgtggacaagttgtgtcaagtcaatttactaaaaacaacttgagcaaatactagttctatggacaagttctgcatgcgtattttctttcagggctattagttttatgcgaggacagggaaatatgtcaaaatttaattacatatttatagtttaaataagatctaagtccttatagtatatattcataagattttgacataggggttgatccctatcacgaagtgtttggtatcaatattttttcatattt

SEQ ID NO: 94309 - DNA, 337 bp, Glycine max
  Clone ID: PAT_MRT3847_56172C.1
cccacgcgtgcgtccacgcgtacgcccactcgtacggtttgatagctgctaattaacacccattaattcttgttgctcaatactaaacagtgctaaacatgggtgtgtgctttactccgctcgctggccaccaaacaccctttaaatccattccctacgcagcaggttcagggcgtgagtccttgtggagcatggatgcgaatatggagattactgatcgcactccccgagtgaaaggaggaagctgtattactcatagcaccaagaacattatgactgctatcgtgaaagagcagaacctgcctgaggctacttgtgtgaatgtggaagctatacc

SEQ ID NO: 94310 - DNA, 515 bp, Glycine max
  unsure (1)..(515): unsure at all n locations
  Clone ID: PAT_MRT3847_56173C.1
aaaaaatttaaaaaataaaataaaaaaaaaaaaaaaaaaaaaaaaaagnttttttaaaaaaaaaaaaaaaaaaaaaaaaaaaaaaaaaaaaaaaaaaaaaaaaaaaaaaaaaaaaaaaaaaaaaaaaaaaaagggggggctttttaaaagaacaaaaatttagaaccggggcattgcaaagttaaatgttattaaaagggcaaattaaatcaattgaaatgcccgtctataaaaaactcctaaatggaaaaaacaatgttttatataaattaaacccattaaaacaaaacctttttttaacatgttgagtaaaaagaaaaaagaccgcaagtaatggcattactaaaaaagggaccaaaactaaaaggcaaaaggcacccccttaaaaatgctaaataaaacctggtaatttgaaagtttcaactcaggataaaccgttattttgcaaggccctaaacccccttttttttggtttttttcctttattttttggcaactatccccgattttccccg

SEQ ID NO: 94311 - DNA, 1284 bp, Glycine max
  Clone ID: PAT_MRT3847_56174C.1
ccacgcgtccgcggacgcgtgggcggacgcgtgggggttgacattcgctccaacaacaggagtggtgatgcaattttgatccacaaaaaaggaaaagttgttggtatccattgcaatccaattcaaccagacatctttctgacttgtggaaatgatcattttgctcgtatttgggacctgcgtcaaatagaagctggatcatccctttatgatctgaagcatatgcgtgttgttaactctgcatatttctctccaatatctggaaccaaaattctcactacatcacaggacaaccgtcttcgtgtatgggattctatctttggtaatatggactctcccagccgagaaattgtacatagtcatgatttcaatcggcatttgacaccctttaaagctgaatgggatccaaaggatccatcagagtcccttgctgttgttggtcgttatataagtgaaaattataatggagctgccctccatcccattgattttatagatacaagtacagggcaattggtagctgaagtgatggacccaaacatcacaaccatcagtcctgtgaataagctgcatccccgagatgatatcctggcaactgggagttctagatctctgttcatttggaagcccaaggagaagtcagagcttgttgaggagaaggatgaacagaaaattgtggtttgtggaaaagctgagaagaaacgtggaaagaaaaatggcaatattagcgatgaatctgatgatgaaggattcatgtccaagtccaagaagtctaagtctaaaaagacagagtggaaattgtctcgctgcactactaaggataatcgctgaataatgaagtcagagtgcattgaggattttcctacagttttttttgtaaggttttccaatccaactgctaaccctgtatggtggccaaactcctcccctccttgttttgttttttaggaaatgggatggatgctgttatcacattcttggcttgttcccctggttgtaagatttgatgtttttcttgaagtagtgattttgtatcagatacaagccttatgccaccattttggcttttgtattttgtagtgctagcgtatcatatttaggacataatgcaccatagcattttaggatatagtaatagtgttttgttggattgtacctttttgttgatgtttgtaaatggtatagtctcttcaagcttaagattggcatattatcttcatgcttttgtctttctatgaatctgtctttcaatgaatgctttagtgaaaaggtgcagtttatttc

SEQ ID NO: 94312 - DNA, 283 bp, Glycine max
  Clone ID: PAT_MRT3847_56175C.1
ggcacacaacatttttagtgaaactgaaatggggacggagatcgtgaaatgggggagctttacgcgttggacttctatggaatcatatttgatatctgcattgaaagctttctttttgctatgaaggcttccaaagtgtgatggcctgatttgtttgatgtggtggatgtaacctcagaaaattgggttattgaccatatgcacactttgcgaccagttttggatacttggtatggacactgtttacttgttagactggtgcttgaaagcatagcaccaacca

SEQ ID NO: 94313 - DNA, 230 bp, Glycine max
  unsure (1)..(230): unsure at all n locations
  Clone ID: PAT_MRT3847_56176C.1
gcagctctggaaggagttgttgacnatgggttgttcttgaacatggcgagttcagtgatcattgctggaacggacggtgtcagtgtcaaaacgaatatgtnttngagttgctttgttgtttgtgttgagttttacaatttaatgtacaagctattggtgtanaagcagctgataagatgcttcaataaaggtgttcccccaatgtggggattgactatcacttattgtgg

SEQ ID NO: 94314 - DNA, 451 bp, Glycine max
  Clone ID: PAT_MRT3847_56177C.1
gggacggcttaatctcctacttgggtggacactcgctgtaagactgtggcgtaattatctacacccaacctgtggccatctcataccagaccactatgctaacatatgcgccgccgtagaaaacagcggtagacgggcctgtactaatgagtggcaacagacctttatcaccgtcccatccaccctctacctatactatcacaattgctttatccacaattatcatgcttccattttcattacatccacgagggaataacaaatcatataatacatcaccacagacaacctggctgtggctgataataaattcggcacactcatcagagcggatactgcgcgtcatacgcaggcctcactgcacacgcaaggtggcagatacaaatgtggtgacctacgacacctgtagtgtttgtcactgtctgttacaccttcttacaccattgatcta

SEQ ID NO: 94315 - DNA, 488 bp, Glycine max
  Clone ID: PAT_MRT3847_56178C.1
caacgttaggtaagaattcggttcgagatgaggtataggaaagcaaatatcactttttttctataaaaattaaagagaattaagatataaattattgaaactaaaaattctacttgtaaactatagggactaaaaaatataaatcatgaaactatagaaaacaaatgagtaattcaacctttatttaattaatatttatctttttattatgaaattctcttttacgcacaaacacacacatataatttagttacacactctaactgtctccatatgctagttttcatcatgtgatcatgattattagaggttctacaattttaattaacttaattaatttcaggtggtccaaaattgcaaagcatcttccaggaagaactgacaatgagattaagaacttctggagaactaggatccagaagcacattaagcaagctgagacttcacaacaacatggtaaattcatcagagaatagtaataatgatca

SEQ ID NO: 94316 - DNA, 252 bp, Glycine max
  Clone ID: PAT_MRT3847_56179C.1
cacacgcgtgagcacacgcgtccggaagacttcagaaagacgttgataaactaagcatggggggctactatggagtgaactagtagtatcagtgattacataagtgcgggtgtaatacatagtaggataagtatcaaagttatggatactatagactatagttaatgaagcttctatgatattaattgggcctatgataacttattaaccattatagactctgaatgataagcatcatcacctgtaaattat

SEQ ID NO: 94317 - DNA, 101 bp, Glycine max
  Clone ID: PAT_MRT3847_5617C.1
gttgtacaccttattttattcaacttcagaattatcacaaactcgtacgctggaaacgggtggtgtcacctactacgaggccctcacagttagcccaagct

SEQ ID NO: 94318 - DNA, 378 bp, Glycine max
  Clone ID: PAT_MRT3847_56180C.1
gcaaatcgcagcaatcaacctcagtcttcacagccacggtcaccttcgcaacaactgcctcacaggggaagcgctagcaaagtacaatattctgctgctcgacgtcactctggcctcatcgacctacaacgatatgacccccggtacccaggacttctcctgcaaccagactctcgccctatatcacaagaacagttagcgtctgaagtgaaatctatctacgctggcttgactatggtagagacgaaatgtatccacgtagatcgagcccaggccgccgctgcacaagatccctctgaccctaaccacaaacttacttctgagcattggcaggcgcttatagccctccaccgaactctgctacatgaacaccatgac

SEQ ID NO: 94319 - DNA, 457 bp, Glycine max
  Clone ID: PAT_MRT3847_56181C.1
acatttttgtcctcttatcccttagatgaatgaggaggggaaggtgggattaaagggacctttgccggcaatttcgaaggccaaaaagagaaccaaaaaacccaaaaaggccgcaggaacaaccggccccgaacgaggaacgaaaacgggctacaaaacaaagaccagaagagcaacaatgagggaaccaacagaccaccccctgagccccggactctgcccacaaaaaaaaaaaaccaatcaaggcaaaaaaccacccacctctccgagggggggcccccgccacaaggggcaaaagcccagggaccaaaaaccaaaccccgacccccaaggggccacccgaacccacacagcccccaaaccaggaatggccgccccaaggggacccccgggcccaccccgagattaaccccggggaacccggccgccacccgacgggggcccaacaaaacccaaa

SEQ ID NO: 94320 - DNA, 260 bp, Glycine max
  Clone ID: PAT_MRT3847_56182C.1
gcagctttgatcaataggtgggttggtatggaaaagaagatcatgaatagcagcatagcgaaaaaatggcgacaactcagtgggcaagatcatgggaagggtctgatagaccctctggacattgatcttcgccgctacatcattcactacggcgaaatggctcaagcggcatacgatgctttcaacacggagacagcattaaagtacgctggaagcagcagatacgccaaaaagagtttcttctccaaaggtggtttggt

SEQ ID NO: 94321 - DNA, 631 bp, Glycine max
  unsure (1)..(631): unsure at all n locations
  Clone ID: PAT_MRT3847_56183C.1
atnctctctatttttgttcttctgtttaaaggatgaatatcaataacattattttctggctttggcttctactcccatacttgatgttagcttcttcttcctctttctgcaaccaccatgacacctctgccttactacttttcaaaaactcatttactctcaacacttcgcttcattatgattatttttggctctcttattcttcaaagacagagtcatggaaaaacggaacagattgttgtgagtgggatggggtcacgtgcgacaccatctcaggccacgtgattggtcttgaccttagctgcagttatcttcaaggtcaactccatcccaacagcaccatcttcagcctaagacaccttcaacaactcgacctatcctataatgatttttcaggctcttcattatattctgcaattggtgatctcgtcaatctcatgaatcttaatttgtcatactctcaaatcagtggtgacatttcctccacaatctctcacttgtccaaattaccgtcacttgatctcggtgaccaccagagcatgatgagagttgatccatatacatggaacaaactcattctaaacgcaactaatttaaaagagctttgtttagatggcgtggacatgtcttc

SEQ ID NO: 94322 - DNA, 264 bp, Glycine max
  Clone ID: PAT_MRT3847_56184C.1
cgcgcagaagcgtgatgacgaagggaacgtcatcgtctggcaaacgtcgcaatatgacgcacacgttgtgccgccgctgtggctctaaggcctagcaccttcagaagtcgacctgtggcacatgtggctaccctgccaagtgcaagagacagtataactggagtggcaaggctaatagacgacataccaccggaactggtcgaatgaggcacctacaaattgtataccgccgattcaggcatggattccgtgtaggatcaacac

SEQ ID NO: 94323 - DNA, 110 bp, Glycine max
  Clone ID: PAT_MRT3847_56185C.1
ctcgagtcgctcgagccgctcgcgggtggacaacgacatttctcagccaaagaacaaggatccgaatcgactaatcaagttgaggcagatgagcactatgtctaccggag

SEQ ID NO: 94324 - DNA, 399 bp, Glycine max
  Clone ID: PAT_MRT3847_56186C.1
ggcggcaccgttgcccttaacgccccttccagctgcacattgcactcctccacgcgtgcttttaagcgaaatcgctcgaaccgctatccagggaccttgggccgcttcgtcaatcgtaatcgacgtcttaaacggcaacactgcccacgagtcgcaagccctcttcccaggtcgatgttctcccacgagaaacggtcagagtccacttgatccctacagaccacgcagcagccatgtcatacaaacgccaccacgcagacgtgtctactggtggtgcaggcactcaaatgcagtcagctcggcggccatcgactcaagcaacaattttcaaacaggagacctttgacggcgtctcgccggaggagatcaaaccgcagcgtactccgtcggacggagctg

SEQ ID NO: 94325 - DNA, 151 bp, Glycine max
  unsure (1)..(151): unsure at all n locations
  Clone ID: PAT_MRT3847_56187C.1
gtttcacctttccacacatcatacgactttacccacttgccttgcagatctttttccagggaaaagtttgcatttctntgtcatctagagttagatgtctgagtgatcagacggaacatgttgaggtgangagctgcgagttatataggat

SEQ ID NO: 94326 - DNA, 142 bp, Glycine max
  unsure (1)..(142): unsure at all n locations
  Clone ID: PAT_MRT3847_56188C.1
aaagtgactgcaacccgcaaataatacacacgaaaccctttttttttgtatcgccgagagaaccaagaataacggggacatcatctcagctccgcccgaaaaagaagccntcttcactgaaaatacatcgtaaaagaatgtt

SEQ ID NO: 94327 - DNA, 225 bp, Glycine max
  Clone ID: PAT_MRT3847_56189C.1
aaactgagcaacatttattctacggaaaatcatcaaaaataccaacaaattataatttttgacaggctgatgcctcaagaaaactggcacttctactgatgtatccgagacttaaaaggggaatctggttctggtgggccactaacttgcataaactgccacatacaggccataggaatcaatggaaccaaacctttccatgaaaggatttgttaatcctgctat

SEQ ID NO: 94328 - DNA, 118 bp, Glycine max
  Clone ID: PAT_MRT3847_5618C.1
cgccattcaactgagaaaatcaaagccaagtaccccgactacgaggtcacctgggctaacgacggctactgagcactcccagcccggggcctgctgcctccagcagccattcagagcc

SEQ ID NO: 94329 - DNA, 410 bp, Glycine max
  unsure (1)..(410): unsure at all n locations
  Clone ID: PAT_MRT3847_56190C.1
ccaacaaacgagaacaagcttccttttaatagacgaagcggattttaaaacatcaccaaaacaatatcttaagtacactgcttcttgaattctaatgatatctatctgaaagcttctttagagctacacaaaatagctaccagtcttaggcagtaagggtaacaatgatacactatcttgggtggtcacataaccatactccttgggcttgcacaagacgaactgcaggcttattagataggattggcattcacagactccttcagcctctgagctcttttgcacttttctttttgctaacggcccctctcttaaaatagagtctttgttttttatacttgacctggattggacatgcaatatcctgacnctattcatataacaaccattgagcatacatggtatcagag

SEQ ID NO: 94330 - DNA, 431 bp, Glycine max
  Clone ID: PAT_MRT3847_56191C.1
aaaagaaagaaaaatcacctttgctttacttcttgatcagatgggtacttgaaaaccgatccaaaaaggggtttttcttcccagatgggggtcagcaaaaaaaaagaaaaagaaggcaaaggccctttttctttttcggggattggagttacttgaaaaactgattaaactaataaatgggcttttacccaacccaagaagagggcccctttcattttcaccacccttggatttttcataaattaaacccccccattttcctttgggggcatttttttgggatgatgacaaattaggatccggttttgtcctttccaacactgatttccagaaaaaggggtcccttccaagcagcctaattcccttggttttctcttaaattttccatctttggattcttttaatttaaacacaaaacttttcactggggg

SEQ ID NO: 94331 - DNA, 289 bp, Glycine max
  Clone ID: PAT_MRT3847_56192C.1
ggctgtcgccctttcgtccttttttttttttttttttaggggccctaattcggtattaagatttatacttgtgcacactgagaggtaatctgattacatgtccataagctaccgtcgcatttgagaccccttctatgtctggcacttactcatacatacggacgcaaattgccagtggcacggataaaagtaaaatggtgcaataactgcgactgagtcagcggcaagaatttgcctatctgaggttggaaaaactccaggactacaattcgctatgagaggtgcttat

SEQ ID NO: 94332 - DNA, 453 bp, Glycine max
  Clone ID: PAT_MRT3847_56193C.1
gaaaaacccttttgttcaaccaataattttgggggccccattgtaaaccaagggaaaatttttgaaaaggggcaatttgggaaaaaaaccacaggggtttttaaaaaaaagaaattttcgaaaaaaaaaaaaaaccttaaaatattttacatccccaactggggaaaaactttggcgggttgggcctttttggaggttttcccaaaaaagaaaattttttgtaaaatttatggggaaaaatttttttgggggccaacatggatttatttcaaaaagatttttttttaaggaggttttttgcaaaattaaaaaattgggccattaaaaaaaggggttttttttctaaaaaccctttttttttaaaaggccatctttttgggtaaaccctttcggggattaaaaaattccgaaaaaaacttttttggattcttgagtttttggaatttcaaactt

SEQ ID NO: 94333 - DNA, 470 bp, Glycine max
  Clone ID: PAT_MRT3847_56194C.1
attccaccattaaagaaaactgattaccacatgtaccctgtacaggaccactaacacttcatattcatgccatcccagggatggctcatgaccgtctaatgattacatgactacaatatcctacccctaaacggtcattagcctagatatattattttcccctaggacgctgtatgatcagttcccacgcgttgaagggtcaatttcttcttactatatcggatcaaatgtactaggtttctgcgctgttttgaccaagggctccatccctactttatattgtccaaagcttctacccttactccaccacttgggaaagagggcttctatatatgcctcgttaccatcacctgtcatccaaaaagaaaaaagtctttacggggtcttcgtttgccagaaattgctttgataacctcctgtgcaaggattttgcctataatctcacaaacatggggaaactctgctgcctt

SEQ ID NO: 94334 - DNA, 460 bp, Glycine max
  Clone ID: PAT_MRT3847_56195C.1
ccccgggcaagtttaatttttttatggggccttaaaaaatcccttctcaaaatccatccccaaaaaaaaaaagggttttttttaaccgcaaaaaaaaaaacaatttccacaaaatgggttttacagttaacttttcccccttaaattccccccattaccaaaaaaaacaacttgtttttttatttgccaatttactagggttgccaaaaaaaaaaaagggggctggttttatttttttacaagggtccatcccgccggctgacttaaataggtagagcttatccttaaatttttttattaaaaggcctttttttccaaaattctttcccgccaattttttaacaaaagtgccctttgtttttaaaaaacccaaataaacttttttttttcctttgccccactttgaaaggaaaaacacccccataattataagtcaactcccttattggggggatttttt

SEQ ID NO: 94335 - DNA, 192 bp, Glycine max
  Clone ID: PAT_MRT3847_56196C.1
attcggctcgagacatgggggaccttcaaaggcgtgacctgtttttgggtctattaatcgaggtggcaaaggagagagccctaccagttgaaccagaggaaggtggttggggaatgtcatatgatcttctgtatggacgagctggattcttatggggtgcattggtcgcgaacaagcacctaggagacgatg

SEQ ID NO: 94336 - DNA, 825 bp, Glycine max
  Clone ID: PAT_MRT3847_56197C.1
acggctgcgagaagacgacagaaggggagttacatcctatgttagtgttactcttccgtcaaacaccacataatcctttcctgcatttcacggtttttcttcaacactctcagtctcgttttcttcatctttttcttctttgttccactggaaaaagaagtaccttacttgtgaagtgggatttagagcttaatctgaagttgggttttgcttcccttgtccaaattccatggctttaatcttctttacttgttttcccttactcgatttcacatggcatttcaaccccgctctggagctgatagtgaagttgcaggaagctctatacaaaattcagagcattggtcagaggcttatacataccaccaaataattgaagaatgccggttatgaagcgatatgtgctgagattgttcatatcattaaagtacattactgcaaacgttgtagatagaaacaatggtcgctttgttgtatcatcatccactgcagaacaaaccattaaagagtcacttgagtgtaacagatcctgcaatgcaaaagcagcagctgttgttggagaggtattggccaggcggctgaaagttgaggggcttaatgaaggagaaggaagagggattcatgcaaacataactaaagaagttgggaagaaaggatttaagaaccaaaccaaggtttgggctgttgtgaatgctcttaagaataatggagttaaactcattcttgatgatgatgatgatgacaaaaattgtttgcctaattcataagacaagaatggagtgagtgttatgctaataacatctatggaataaaaaaatccctccc

SEQ ID NO: 94337 - DNA, 750 bp, Glycine max
  Clone ID: PAT_MRT3847_56198C.1
tgtgggtgaacgtcttaccctcacagtcacaggtacagaataagcgctaaccgatttccgatatattctcatccggctcgaggtcacactgcaatcccttcttcctcagtacctcttcttcttctcctccttcaatcataacattatataaaatatatggtacactgattacatttataattattatcgtcgtcattattatatatttgttaatttggattcaggaatgtactgcataaaattctgattcaataatctttccctctttgtgttgaattcctatctgaaggattgatttggggattggacatcatggatcgcctaaaatcttctccgcagctcatgattgtttcggatcttgatcacacaatggttgatcatcatgattctgagaattggtccctttttaggttcaatgccctttgggaagcccattatcgccaagattctctgctggtgttctcaactggaaggtcacctacactctacaaacaactgaggaaggaaaagcctctgataactcctgatatagccattatgtctgtggggactgagattacttatgggaaatcaatggtgcctgatgatggatgggttcggtgtttgaaccagaaatgggataaggacatagtcatcgaggaaacaagcaagtttcccgaacttaagcgtcaggctgaaacagaacaacggccgcacaaggttagcttttatgttgagaaagacaaggctaagcatgttacggagactctg

SEQ ID NO: 94338 - DNA, 252 bp, Glycine max
  unsure (1)..(252): unsure at all n locations
  Clone ID: PAT_MRT3847_56199C.1
agcacngaacgtcgatttagtttagccgaattggttttcaaaccccttttgtggggaaaaatggggaaaaatggttaggtttgctcttttagcgaaatttggtattaggcatcctactttaaccttaaacaattgggtccctaaacttcaaaaaaaaaaaaaaaatgattttcgcccctcatcacatgggtttccctatgaaaaggggtggaaaatattgttttgagtaaaagcccaaaacccaattttttt

SEQ ID NO: 94339 - DNA, 523 bp, Glycine max
  unsure (1)..(523): unsure at all n locations
  Clone ID: PAT_MRT3847_5619C.1
aaatcactaaaccacattcgtgtcatccataaaacacattagacaatccactgaaacattgtaaatcccaagcgcaacgcgcacttgaaatcataaaattcattaatacaataatcccactatggcaagccacattggatccatattatcggtaatacatatccaatcaactaccacatcgcaactgccatcgcctattcgcctggttgttgcttagatgtttccttgatctcatctccagcatcgtcctgaatattaaaggcaattcgagtaaaaaaattaataactaattattctcaaatcaatgtgcagctgagacagaaaagaatggaaaacattccactccaaaatactccatgtctaaaagctgtcaacagcaacataaagcatatgcagggtaatgcattagaaacagcttcagtaagtatgaggataaaactaaattagcanatgaagaaaagctcataagcctaactcctacactactacagcgcaccaacacaaacaagagagatgttaatta

SEQ ID NO: 94340 - DNA, 1170 bp, Glycine max
  Clone ID: PAT_MRT3847_561C.1
agggaaacacaaggttgaaaatgagctgcctgaaaagattgagagactaataagatgtgaggcttcatcatatcaaaaacttttgatgaagagggtggaagaaaatcttggcgctattggcaattcaaaggctcgatcagtgcacaactctgtcatggagcttcgtaatatatgcaatcatccatatctcattcagtttcatgcaaaggaggtggataacttcatacctaaacattatctgccaccaattattagactttgtgggaagcttgagatgtaggaccgtttattaccaaaactgaaggcgacagatcatcgggttcttttcttttcgacaatgactaggcttttggatgttatggaggaatacttaacttcaaaacagtatcgctatctccggttggatgggcatacatcaggaggtgatcgtggtgctctgattgaactatttaaccaacccggttccccatattttattttcttgctcagcattcgagctggtggcgttggagtgaatcttcaagctgctgacacggtgatcttatttgacactgactggaacccacaggtggatctgcaagctcaagcaagggctcatagaattggtcaaaagagggatgttcttgttcttcggtttgaaacggttcaaaccgttgaagaacaagtcagggcttcagctgagcacaaacttggcgttgctaatcagagcattactgctggttttttcgacaataatacaagtgctgaagatcgaagagaatacttggaatcactcctgcgtgagtgtaagaaagaagaggttgcacctgttttggatgatgatgctctaaatgatctcttagcccgaagtgaaacagagttggatatatttgaggctgttgacaaagaaaggaaggaagatgagctggctacatggaagaaattagtgcttggacaggccgctgatggctctgactctgatattcctccacttcctgctcgtctggtcactgatgaagacctgaaacagttctatgaagcaatgaagatatccgatgtgcctaaggctgaggtagaatctagtggagtaaagagaaagggtggatatattgggggccttgatactcaacattacggcaggggaaaacgtgcaagagaggtacgttcctatgaagagcaatggacagagga

SEQ ID NO: 94341 - DNA, 403 bp, Glycine max
  Clone ID: PAT_MRT3847_56200C.1
ctgcgaggtggagcgtgaattgctgagcccggactggtctgtgggtgagcgtattctcactaagagttcgaaatgaacctctgctccttcatgagacgactatatacgacgagtctgagctctctgatagtccacagtcatgagcgacaaggtcaccatagagagggtcaaggacgagctgtacagccacagatgctacactatggtgaagataactctctgcggattccctgaaattcgagacctagctgtctacgagaagaataacatgatgaccatagcggtgggatgctgtaaccctgagcagctaagagaccttacttactgtaaaggttgtgggacgatctatgacaatgcacttgttgagccttccaagccgtacccacgactaaaccttaaaagg

SEQ ID NO: 94342 - DNA, 1062 bp, Glycine max
  Clone ID: PAT_MRT3847_56201C.1
cccctcgaggccagtgaagcatctcctcgcctctcctcctccaggatggccatcgacagcgtttatacttcgtctccaccgtttcagagcggaccatccggccactcgcgccatttctaccttgcagtcgacaggctccacttcaaaatgcaaacggtgattgaactcgtggatctggtggctcgacgtccatgcttgcccatcgtggtctgctgcagcacgcgcgacgacctcgactctctctgctcctctctctccactctccccttcctttcctcttctgctctgtacagtgaccttggcgaagatgaacgctcttttattttagagaaattccgacaggtgacggcacggtggaaccagacgaatcacggtggagcaccgaatgaggatgagattgggaaagatgagagatctcacatgatcattgtaacagacgcttgtcttcctctccttgcttctggagaatttcctttgaacgctcatcttctcattaactatgagttaccagcaaagaaggagacatatggaaggcgtttggcaacttgtttaacagctgatggaattgttattaatatggttgttggtggggaagtcgtaactctaaaaagtatagaagaaagcagcaatattgtcatgcaagaaatgcctatgcaaattcttgacattttatgaagacaatatcactgcttgcatttgtgaatggctgaacacttgaagctctctcattcctttgaatattctgtgagtagccactgctacaaagaaaataaactgctaagctttttatttctattttggacgtatagatttttttgctggattacatcttttattggttgtttcaaactagaatacagaaatttgctagaaatgacaaacttattggtcttctctttcttttgaaatgtgagtcatatattgttcaacgttgagacaggcttctccgtcttctctttgtttggaaatgtaagagtcatatattgttcaacattgtaaaaggatatttgagagtaggaaaatcgagggtaatttaaaaaaaaaaaaaaaaaaaaaaaaaaa

SEQ ID NO: 94343 - DNA, 804 bp, Glycine max
  unsure (1)..(804): unsure at all n locations
  Clone ID: PAT_MRT3847_56202C.1
cttgaggccagtgaagcatctcctcgcctctcctcctccaggatggccatcgacagcgtttatacgtcgtctccaccgtttcagagcggaccctccgatgccactcgcgccatttctaccttgcagtcgacaggctccacttcaaaatgcaaacggtgattgaactcgtggatctggtggctcgacgtccatgcttgcccatcgtggtctgctgcagcacgcgcgacgacctcgactctctctgctcctctctctccactctccccttcctttcctcttctgctctggtctctctcaactcattttcttcctcctaattccacgcgctacactatttccctaattcgttcttgttttcctcgtgtcagtacagtgaccttggcgaagatgaacgctcttttattttagagaaattccgacaggtgacggcacggtggaaccagacgaatcacggtggagcaccgaatgaggatgagattgggaaagatgagagatctcacatgatcattgtaacagacgcttgtcttcctctccttgcttctggagaatttcctttgaacgctcatcttctcattaactatgagttaccagcaaagaaggagacatatggaaggcgtttggcaacttgtttaacagctgatggaattgttattaatatggttgttggtggggaaagtcgtaactttaaaagtatagaagaaagcagcaatattgtcatgcaagaaatgcctatgcannatcttgacattttatgaagaccatatcactgcttgcatttgtgaatggctgaacacttgaagctct

SEQ ID NO: 94344 - DNA, 837 bp, Glycine max
  Clone ID: PAT_MRT3847_56203C.1
gctcagggtagcaacgatgaggaaaaagtcctcgcttgtttgcagcgagcgaacccgaaattggttgcctttattcatttgattgaagatgaaaaaaccagttttgagagtgtcaaggaagagttcaagggtatcatgagcaatgcagctgttgaagtgagaagacccttctgtaactgtttgattgacatatgtagaaacaaagatcttcgagagagagcccatgagctactctacttgggaaccttatatggattatacccaggtttacacaacaaaactgacaatgaatggtgtttagacgttcggtcattatcggttggtgcagctctaactgcgctggaagagtggatgtggacactcaccaaaatcgttaagcgggaggagacactgcctgagctattcctagcccaaactggtactggtgctcataaatttgcccaaggactcaacatttcttttgcctctcatttgaggaaactagctgctccatttaagcagagtgaggaaaaaattggctgttttattgcaagtagagaggatttagtctcttgggtgcaatcaaagtctactgcagctgctactgctacatagatgatggtagaaaaggcttaagtggcattcaccttgtacgttatggctaatgatacttgcaagtctatttatcacttgaaatgtcaagatgtgagagtgttgaagccacatatgggatgtataatcctccctcggtgtaagcacgtcctgaaatttactattttttttctgtctcttcattttgtatcccatcttcaagtttggggaaaaggctggtcaatcattatgcaaattgtttgagtc

SEQ ID NO: 94345 - DNA, 258 bp, Glycine max
  Clone ID: PAT_MRT3847_56204C.1
tctgacttttgttccgaatttatatctactgagaaaggaataccacgatcagtaccttgtatcaatgttcgcggtactttctgccttaactatcggttccacaactgcttctacttcttcgccatatagttctgcttctaaggtccattctttccactcttcttcacgcttacagctccacttcaactagctcaaacaaaccaataatctctttgtgatagatttctcttcttcttatttcatcccttgcaaattcat

SEQ ID NO: 94346 - DNA, 722 bp, Glycine max
  unsure (1)..(722): unsure at all n locations
  Clone ID: PAT_MRT3847_56205C.1
ccacgcgtccgggaattaatcatcttctctctctagggtcattatcaacatggccccttaagtggacattaccacttgcacatcaatcactatcaatccaaataaaagttgtcaagggttggaaacccctagacccaatcccaaagtgcaaaaattcaagatcaatattataataatccatatcatgcaacatgccatgccaagtggttacactcacttggtcttacaacatttaatcataacaattaaaatcatgcaacatgccttgccaaatggtcatagtcacttggtcttacacatttaatcatagaaattccacataataattctaaatcaaagaaagtaattaaatatgtaagttataccataatttccatacaattttacatatatagacactttctcatttgaaattgagcctaatcacccacttttaaaaacatcattcccattgatgtataaaatccaattgatatatgtttctcaaggcttttgaatgtaaggaattcaactttgtattcaaaatcctccaattccactcccatggggtcagatttcaaaaatgccctgaactttgcctctaaatttcacaaacttgtttcttaaattccaagagttgtagaaatctattccatgcaatttttttaacaaaccctgtgattntaaatatgaggaactctatttcatggtcaaaatctacagaaaacaaacccatatgcaca

SEQ ID NO: 94347 - DNA, 727 bp, Glycine max
  Clone ID: PAT_MRT3847_56206C.1
ccacgcgttcgtccacgctttcgttttctctttcggaactcttgtcattgccggcgacaaaactttcaattttttgggtatgaaaacgtgtcaggttattccattaccattataatgttgcctactgggacatgaactattgttaaagtctctggcctactgccccggtttttttaggccgtgttatttaatcttgggaaaagggccagaggatgtaatatattactttttgggattgacaacctcttttgcttccctgaaaaaactttgtaattgttcctggcattgccaaaaattccggacccatgggcggacaccatgggcggacccttggggcggcccttttatatgatcacacgtttccttacgggggcccacaatttcatatatttagtataatgacacctaggttcaattcagtgcccggctgtttcctgggggaaacttggaaaaccttgaattacccaactatatcactggaagaaaaacccgtttcgcctgggggggtaatagagagaaggccctcacctttattgctttccaataattgcccacttttaatggggaaaggcacgccccctgaccggattaattaaaccccccacaccgcggggataaaccccccatggtgacctggtccccttgggggggtttttttttttccccccttcttttacggtgtaactccctttatttttcttttaccacgttttggccccttttttac

SEQ ID NO: 94348 - DNA, 277 bp, Glycine max
  unsure (1)..(277): unsure at all n locations
  Clone ID: PAT_MRT3847_56207C.1
aacatttaaaaagatcctagccccccccnttttctttatttaatttctctttttataatcaaatccatttaatttttcatcctcttactaacccatctttaaatccacatcatcaaaaataacaatattgcccatcaaactctnatctctctccctctcttacacccgattttttttaccacaattttttttttctccttatcatccatttttaccattgaaccttaanncatgaacaaacaccgacccaaacctcccataaacctcccttatcctc

SEQ ID NO: 94349 - DNA, 776 bp, Glycine max
  Clone ID: PAT_MRT3847_56208C.1
ttgttatggtgtaggacacataatatgaattgctttatgtagcataggatagaatgagagagagagctttggaatctagtgtaattaagtgtgaatgtcctcctccaatgttattacagggtatctatttatagtgttgttgttgtggcattactagccacgtgtcttattataggtatttgcatttgggggtccgttctaagggttgtcgtagacaaattatagattggttattattgaggcatctttgatttatgttgcccttgaacttgtcttggagttgtcaagctctaattacagttctctgttagttctacggagtgcctgtcacctccagcaagggcatcatgccccctactaatcgggctttcatcaagaagtactgcgtccccaggcaggcgcagggcgaaacaccacagcagcctggggatgaccggcagcgggcaacagacgcaccgccatcacctctagagcccctcagctcatctacaaaggctggagcattgcctatgacccgtggccaactagcaagcgaccaagtccaaagccaaaggtaagcaaaagtactaagcccatgaccgataagtcatcatgtgtttggctcaagacgttaaagaagcgctactaggaggcaacatagaattggctacgaagaagctccctatgaagtggtccaggaagggtgatgcaatcctccctaggaagggaccaatcactagaaccatgagcaagaggctccaagaagattgggctagagctgctgaagaaggcctcgt

SEQ ID NO: 94350 - DNA, 317 bp, Glycine max
  unsure (1)..(317): unsure at all n locations
  Clone ID: PAT_MRT3847_56209C.1
ttgatttttgancacaccacacccnncnncgcagcgccaccagggngangcgccccagaaacggccaccggagcngcngngccaacnacgnnnncnacccncaagacangggaanccagnnnggggnnngcaaaaaacanagannncgngagacgcnccgacacgaagagcaagaaancccccgcgaggaaaagggcgacaacaancaggaacgcaaancccggccaagacacagcggaacaacaacccgcacccccaggaagcccaccccagggacccaggcaaaaggaaggagaaccaacgcacaaacccaccag

SEQ ID NO: 94351 - DNA, 477 bp, Glycine max
  unsure (1)..(477): unsure at all n locations
  Clone ID: PAT_MRT3847_5620C.1
acggctgcgagaagacgacagaaggggctccttccatttcattgcctttaataatcattaactagtgcatgttcccgtgcgggacaaattatgtgtgagaagtacaacttttttatttattttaaaaaagtaaatttaaaacttaggggtctaagtggataagtcatttgtaatttcgaattgacttaaatcaattcaaatagttttaatattgaatttgtcaattggttgagccattaatttaaatattactgattattgattacatagactcatcgatttaaattgagtaagcatcaatatgcattcttaatcttcggcatcaaagtgataaaagctttattgattagtagacctcagtaatgttccattggttttagtaaaaaaanaatggtttgaaacatatcatgagaattcttattgaagctcattatctcgaatatggatgtttaatttttcatccttatagttagatag

SEQ ID NO: 94352 - DNA, 369 bp, Glycine max
  unsure (1)..(369): unsure at all n locations
  Clone ID: PAT_MRT3847_56210C.1
ccagtgatgattagaatatgatgatccttcgctaccttcgattgacatttgacagtacttggctagttgttagtggcatttactcattttcttatctatcatccatgtacaaaaccataggctgacaatttgagtaagaaaccaaatatagttcaaaactaacttcatactaaatttatttgcctaattgaaaaagacagtttttgttatttattacaatcatggcaaaatttaaaccttggaagattatataactanctttagttaatcattacctttttcttccctcaatttcttaaagcttacagaagttttctctaagaataaaatgtctttttcaattacttatcaaaatcttatccctcaacc

SEQ ID NO: 94353 - DNA, 315 bp, Glycine max
  Clone ID: PAT_MRT3847_56211C.1
ctttgttttttttttttttttttttttttttttttttttttttgggacaatatcccatctagtaaatttattaaacaaaatttgcgggagcaattagtctaagactcttggaacctaatggtttttttcatccccctctaaaaacaaacaatagtacgggctgagcattataatttaagccccaccagagccctactttttgccgaacacaagaacctgggacttgtgataaccagcgagcgcaccagggccggggacggggcgggggatgtcgggagcggggcccttgaacaaggacttaggggccctcattct

SEQ ID NO: 94354 - DNA, 209 bp, Glycine max
  Clone ID: PAT_MRT3847_56212C.1
caagcatcatcttggggcaggagcaggattccttcggtgggaactttgaaggaagccagtccctggtgggagacattggaaatgtgaacatgtgggactttgtgctgtcaccagatgagattaacaccatctatcttggcgggcccttcagtccgaatgtcctgaactggcgggcactgaagtatgaagtgcaaggcgaagggttcacc

SEQ ID NO: 94355 - DNA, 1718 bp, Glycine max
  Clone ID: PAT_MRT3847_56213C.1
ggctcgagcctatgatcaccaatccgtccctcccaattacgcccctcccaacaccaattccactccctcagtatacaactctgctccctacagctacactggagtctcctccgttcctccgattccgacgtacgaacctgcatacgacgctccggtgaggcccgatcatggtggaggctattttgacgacagatactgctctggatttactcggagccattccgatttgggatcggatttttacgggaagagcgttggtggtgcttcgagatatgacggtgtcgctgatgatggatacggagatggggtgtatgcttatgaagggggcaaggtggaaccctatggggcgcgtggcacggcgccaaaatcgtcgacttgggcggcgtttgatgattacgggaggtccatcagtttcccctcgcagaaggaatcttctgtggggggtaagattgtgaaagcggtgcccaaggctgatacacaagaagacgtcaaaggtggtggcgtgcaaaagtttcgtgtcaagctgttggcagaaagtgggggtcagagcaccatggatgttctctgtcagattggtttggatggaattcgcatgctggatccaaataccagccggacattgagaatttatcctcttgagaacataacaagatgtgataaatcggctcgatctacctttgcattttggtcaaagagccctgttgacattgagccaagacggatcagattgcaatctaatagttacactactaacacacttttggatatagtgactgctgcaaccatacagttcaaggaaatgggtggaagcaggtggcctgctgaagcagtgaaaccaaatgaacagcctacagaaagaaagaaaggttttggtgattggatgaatcttattaaacctgccaatgaagagaaggatcattgggtaccagatgaagccgtctcaaaatgtacagcatgtggtactgattttggggcttttgttcgcaggcatcactgtaggaactgtggtgatattttctgtgacaaatgtacatatggtagaattgctctgactgctgatgagaatgctcagcctgtacgagtttgtgaccggtgcatggcggaagtgtctcagcggctgactagtgcaaaagagtcatcaagtaaacctgcattgcagagtcatgaggatcttgcaaggaaacttcaggaggagctggagagaaatcgaaagacatcaggttccaagtctgatggatctgcaagacggatgaaggaagttgcatgtcccatttgcactgtccatctgcaggttcaggtgcctagctcgggttcagagacaattgagtgtggagtttgccagcacccatttcttgtgagcgctcattgagttcagataaacatgaatacggaagcggtgtctacgtgtttcataagtttaaaatgcatttgttttactgatctatctcttgcgcattcattatcaatgattgggatttgccttccttttaccattatctttgggcttgtttcatgtcctagttttaccttgcatgcgtctttttattattttcttctttttctgattaaagcttggtgtgctttgttagttgttcacgtttcacttaaattcgtttgtccgcttgtataaaatagacgctgaacacacatatatatacatgtatagctatggtgaattcgttctggtataagacgattcgatagttcagctttaaaaa

SEQ ID NO: 94356 - DNA, 202 bp, Glycine max
  unsure (1)..(202): unsure at all n locations
  Clone ID: PAT_MRT3847_56214C.1
cgcgtgcgtgcggaagaccacataagggatatcgaacgaattaattgacttttctttttgaaagtttcnttaccttggaggcgctatatttctggtaatttcttaaatatgcttactatagctacataccaagactatgcatgtctgtntggtgctactgttacttaaactttttaagcgtgcttttttttttttctaatct

SEQ ID NO: 94357 - DNA, 339 bp, Glycine max
  Clone ID: PAT_MRT3847_56215C.1
aacccggaaaaaagggaccgggtcaggttttttttcattttaccttcagttcacaaaaaatcaattggataccaaaaaatatttatgcatgggggggaaacaaaagggtggaatttcatgttaaaatatatattaggaccccaggggttttaaggggtctaacccccccagggagcatccccgggtctgaaatcgggttcaacccaaggaacaaacccgaccttcccattatttatataaaaaggggctaaggccaaaaacaagggagcaggtcccctaacaacttttccttgggcattggccggaaacccagggcaagggcaaatgaacttgttcccc

SEQ ID NO: 94358 - DNA, 122 bp, Glycine max
  unsure (1)..(122): unsure at all n locations
  Clone ID: PAT_MRT3847_56216C.1
tttnnnnnaaactaaacaaaccaaattgcgtttaaagtcaaaaccacgtattttttttagtaaccaaagaatgggatcaaccaggatgaataagatcattatttacctgaaacaaacattac

SEQ ID NO: 94359 - DNA, 196 bp, Glycine max
  Clone ID: PAT_MRT3847_56217C.1
ataaagggattttttttcggtgttaacacatagatctgacggggggggagatatcaaacctgctaaccctttcatctctcgaggacctaaaactgcctcccgcgatagctcactgactaagcatactgaagaacacacgctccaccaaatcacaaggcctaatgcaagcctacgcaaccatcgagcacgagatcgc

SEQ ID NO: 94360 - DNA, 1087 bp, Glycine max
  Clone ID: PAT_MRT3847_56218C.1
atataaaaaattcataaaacttttgtaacttttataataactggtttacataattcatagcccctttcttggaaaaacaagcaatgtattattgacatccctttctccatatccctagccccttccataataataataataaataaacaacgaagctagagtttgagacacaaatacacacatatatacagacagagagagacatacatacacacatagttattaaggggagtaattctactgagaatgactcttcatccccaccctatgtgtgtaaaaaaaatgaatttgaatttgcaaagttgttttgtattattgtatgtattagaatattcttccttgtgaacactccatggccctgcctcagcaaaaaaatccctcgaatacaaatatacatgttattacaattggaatgtctgaaaaatggaaatgatagaacaagaccttgagcccaagagatgaatagaaactccaaaaaccgttggtactaaattcatatagtacaaaattcatctggttcccagctcaacaaagaatcaagtttcatctcaagatcctacagggcattaatgacttactttatattctgagattgctcatcatcaaaagccaaattaaagatctgcatgtagtcatcaacaaaatgaacatcaagaccttctttcacattaggtgctagctcatcaaaatctctcctgttagctgaagggaatataatagtcttaacttcgctccttcttgcggctatggttttctctttaacgccgccaatgggaagaatcttccccgtaagtgtcacttccccagtcattgctagatccttcttcacaggtttcttcatggcaagggacaacaatgaagtggtcatcgtggaaccagcacttggtccatcctttggtgtagcccctgcagggacatggaggtgtagttttgaatttgcaaagaaaggattttctggttctctttccagtagtattcttcgggcaaccgtgtgagctatctgagcactttctttcatcacatctcctaattgaccagtgaggtgcagtgttccttttccctccccttcttcaacacggacgcgtgg

SEQ ID NO: 94361 - DNA, 510 bp, Glycine max
  unsure (1)..(510): unsure at all n locations
  Clone ID: PAT_MRT3847_56219C.1
tnnnntggaacttgaaaagttgttttgtattattgtatgtattagaatattcttccttgtgaacaacaacactccatggccctgcctcggcaaaaaatgtaattttttttaaaaaaaatccctcaaatataaatatacatggtattacaattggaatgtctgaaaaatggaaataatagaacaagaccttgagcccaagcgatgaatagaaactccaaaaaccattggtactaaattaatatagtaccaaatttagctggttcccagctcaacaaagaatcaagtttcatctcaagatcctacagaacattaatgactctctctatattctgagattgatcatcacccaaagccaaattaaatatctgcatgtagtcatcaacaaaatgaacatcaagaccttctttcacattaggtgctagctcatcaaaatctctcctgttagctgaagggaatataatagtcttaacttcactcgttcttgcagctatggtttttctctttaacccc

SEQ ID NO: 94362 - DNA, 145 bp, Glycine max
  Clone ID: PAT_MRT3847_5621C.1
ccacatcacttccaaatacttgaccctattaaggcgcctagcactatgacacacttaatgattggctggcagaggcaaaaccctactatccaacgccgctaagaacgccatctgaacgtgcatctaagactggctccattttccc

SEQ ID NO: 94363 - DNA, 438 bp, Glycine max
  Clone ID: PAT_MRT3847_56220C.1
acaaaaacaagggccccataaaacattaaattaatagaggagcaaaaattattagcgatttagcatgaaataaaatttgtgttctgggctagaatccatccacaatagcttgaagcattactaatccccatttaaggggggaattttaatgggcactttggatgcattagaagggaaaacaggacctgccttgagggaattttttactgactccaatgctcgggaagtttgaaaagccattttaacatggggctgtttacatgtcatagccatcggatagcattctttatgtggggcccaatcgggtacataaagggcccatgggcgaatccattcaagggcacttgaaattttaacatttcctttgagaaagggagatgaaatgtccattggattaagggcaaccaatacacattcaacttgaaaaaggacgggttt

SEQ ID NO: 94364 - DNA, 225 bp, Glycine max
  Clone ID: PAT_MRT3847_56221C.1
ggttctaacaagaaaatttcttataattattttttttttttttttttaaaacagtagaaggggccttacttaaataccgcagtaaaaaaaggtaatacaaaagtttgccaactataaaaaccagttaagggagattgtcccacactggaactttcgcgttataactcttccaaagacaaaccttttacaggaatagcgtcgggtccccctgttacaattttgact

SEQ ID NO: 94365 - DNA, 492 bp, Glycine max
  Clone ID: PAT_MRT3847_56222C.1
actccactgcctaccgttgtggatgtgtatttcacagacaccaaaagaactagattcagcatcaccacgccttgtaggcaaaaaaccaatagaaaattcttcatacactgcgctacttcaaattccactccagaagctcctccaacactaacttcagacaacaacaacaacaacaagaaaaacacttccttatccgaccaactcgcaccccttgccaacaaaaccctatcttccgccacaagagaccaatcctatgcgttatctaagccaaaatccacatgggtcaaccccaccaaagcaaaacgctctgtgttatcctctgagagacaaaaacgtgctacttactcatacagtccacaattaagagatttgaaacgttttgctcagaaactgaacgagtctggttcctctgaagacgagttcttggcttgtttggaggagattccacgcccaatttcaagagaaaacgccttgttgatactcaacacgttg

SEQ ID NO: 94366 - DNA, 298 bp, Glycine max
  Clone ID: PAT_MRT3847_56223C.1
tggagaatttgggttccaaccacttggaattgcataggatcccgcaagcttaaggaggtatatgcacgcacagctggctcattgtcgctttgccatgcttgaggtcttcggaattctaatgacagatctacttctcgtacaaggattcagtaacataccggtttggcttgaaactggtgcgactcaatacgacttcgccaatacagagacactcttccttgatcaactattcctgatggggttagcggagactaaacggtctgtggatcatgttaaccctggatctgctgcctacgac

SEQ ID NO: 94367 - DNA, 472 bp, Glycine max
  Clone ID: PAT_MRT3847_56224C.1
cggttgtgggttttcttatttttttttttttcttttttttttttttttttttttgggggttttttttttttttcagcgaaagggttattaaaaaattctttttttcgttttttccccgggccatcgaaaaacgtatttcttccaataccgggtttttaaacagaaggggttttgcccctaaaaaccaaaagacttaaaaaacggaatttccggggattgaaagaaagaagggaagggcacccaaaaaaccaaaaaagccgggttaaaaacttgtaaattttggggggggaaacgggatcaaaccccaccctttttgtaacgggcgaaaaaggtttttgtttgggcctttttgaaggcccttcaacctcttacctaaacccatatggggacccccccctccccaaagagaaaagaatttgctttccccccttcttttcttggggtacccaaaaaaccagccttgcccccctta

SEQ ID NO: 94368 - DNA, 299 bp, Glycine max
  Clone ID: PAT_MRT3847_56225C.1
aggtcgaggtgacagataagaaagactagcttttctacagccatgaatgcctttgagctaatttccatgtccaaaggactgaacctttatatcttgtttgactcacatcagggatttctatggcacaccagattcacctcactatcctctgcgtatgagatactcaacaggagtgttgaatctgcaagaccttttggctttgatgtgcacatcaaaaattacaaccataatcttgcgtatgtgaaacctgcaccgaagggataccttaatgttgccacaaagatattccaagcggcacc

SEQ ID NO: 94369 - DNA, 319 bp, Glycine max
  Clone ID: PAT_MRT3847_56226C.1
aatattcaaaaacttgatcccctctccacaagagaaaacacccgggggcaagaaagagctaatgcggctccaacggggaggggcaggggttttagaagccgaataattcagacctctcattctttgctcgagcaggacactaaaccgcagcggggcgggacatacggtcctaatgtgaagacatgctacttggaagggacaccttgtagagaccccttggccccgttacaagaagatcgggggcgcgtgcgctggatgcccactcgctgcccgcccggggggccggcgtcgcgggggggttgttccgggcggccccagg

SEQ ID NO: 94370 - DNA, 253 bp, Glycine max
  Clone ID: PAT_MRT3847_56227C.1
cttataaatgttcaactatcaaaccaataagcagttttaaaaaaacaacttttatttacaaatggatatggtagtgatttaaatcttaacaatttaccttaaagccacttaaaatttttaaaaataatgaggaaatgttttgtaaatgctttgaccaagtccagcaccacatacacgttacaatattagtggcgcttagttattataaaagttatttgtaaataattttagattttaattcaaagacaacaaa

SEQ ID NO: 94371 - DNA, 238 bp, Glycine max
  Clone ID: PAT_MRT3847_56228C.1
caattattctctaaaacaaaacacaaaccaatctgagggggagaaaaaatacaaagcggagagcattatgtcatggatcattcacaaaaattgctagacccttcatgtcatatggcacacaaaggacgaatagcataacggttagcaccatgcttgagaatacaaatgggagctccattgtgaacacaattatttatgcaaaggatatcatcatggctaacacaaagcttgagaatac

SEQ ID NO: 94372 - DNA, 1790 bp, Glycine max
  Clone ID: PAT_MRT3847_56229C.1
aacccatcttcgaatcaaattctaggaaagtaccaacgcgtcgctccttttggctttcagaaacaaaaagcttttgcgttcgatttgtttcttcctaaagactaatattctcattctccccaaaacctctgctagtttttggttttgcttcaacaccctcgtcctccttcttcttcacactcccccagaaatcccaattttgcccctaccctcttccccaatttacctacgatgtacagcaacatgctggtcaactgctccaactgccgcacccctctgcagctgccacctggcgcgggatccatccgctgcgccctctgccgcgctgtcactctcatcggcgatccacgcgccctcccttcgcagccaccggcctccacccacgcgcctcctcctccgtcctctccctacagccacgcgccgcccccgcccaacccccacggccgcaagaaggccgtcatcgtcggcatctcctaccgcttctcgcgacacgagctcaagggatgcatcaacgacgccaagtgcatgaagtacctcctcatcaacaagttcagctttccagaatcttccatcatcatgctcaccgaagaagaagatccccatggccccaaatttccaacgaagcacaacatcaggatggcaatgtattggcttgcacaaggatgtcaacctggagactccctggtttttcattattctggtcatggatcacagcaaaggaactatagtggtgatgaagctgatggatatgatgaaactctatgtccccttgattttgaaacacagggtatgattgtagatgatgagatcaatgccgcacttgttagacctattcctcatggagctaagctacatgcactaattgatgcctgccatagtggcactgttctagatttgccatttctttgcagaatgaacaggagtgggcaatatgtatgggaggaccatcgccctagatccggtgtatggaagggatctagtggtggagaagttatctgcttcagtggatgcgacgatcatcaaacttcagctgatacatctgctctatcaaaaattacatcgactggggcaatgacattttgcttcatccaagccatagagcgtggccatggggctacctatggcagcattcttactgcaatgcgcacttccatcagaaatgttggcggcggcggcggcggtaccgggggtggtgatgtggtaacatcccttctctccatgcttttgactggagggagtctcagcggtgtcggtggactgggacaggaaccacagttaacagcttgcgaagcatttgatgtgcatagaaaacctttttcattatgatactcaatattctttattctgcaatttgttttcctaggctctgcccctgtatacgactacattgattacaatgattaatatattataaagtagagaggattcttttttcgtaaatcactgaggatgtgtttggatgaatttatgtctgcccttgagaatgtgacatgctcttgtaataatgactttggttgctgctgcaatccttggatgaaaatgctgattcgactcagatttgaattccacataagaggtgagcatcttaaccctggataaattaggaggtgtgcgtgtgaccccaattttacttcgtgaaaagtgtcaataatgacttgaaagtgatggtctcgtactgatcatacatcatgtgcataaatttgatgtaattacttgtatagtatgtttttggaacaacaaatcttgggacttgatttgataaaaggtataaaatagaataatttgatttt

SEQ ID NO: 94373 - DNA, 236 bp, Glycine max
  Clone ID: PAT_MRT3847_5622C.1
ctcgcactgctagaagaacaaatttcatgcctattgttccaaatagtgatgaagcttcagctttggatactgcatctgatgtggctggtaatgatcttgggttaggatttgccagacgcttggctggcagttctcctcagcaaattaaacaaaaaggtgatccttcatcttcagctgccttgtctgaaagtgaagagtcaggggtagctgatgttaaaccaaaagaagagggtagg

SEQ ID NO: 94374 - DNA, 1178 bp, Glycine max
  Clone ID: PAT_MRT3847_56230C.1
attcctcatggagctaagctacatgcactaattgatgcctgccatagtggcactgttctagatttgccatttctttgcagaatgaacaggagtgggcaatatgtatgggaggaccatcgccctagatctggtgtatggaagggatctagtggtggagacattatctgcttcagtggatgcgatgatcatcaaacttcagctgatacatctgctctatcgaagattacatcgactggggcaatgacattttgcttcatccaagccatagagggtggtcatggggctacctatggcagcattcttactgcaatgcgtactgccatcagaaatgttggcagtggtggtggcggcagcgctattgggggtggtgatgtcgtaacatcccttctctccatgcttttgaccggaggtagtctcagcggcgtcggtggactgagacaggtaatatagttagatttgacactcatattacaaaagttttgactgttttatttatatcagttgctcgatgatccgaactcattagttcttgtataccaactataacagtgccttctctgtttgtgtccactttgttttcctactgttaaactgacttctgctattgtttttcctacctatttccttttgtttcaacaggaaccacagttaacagcttgcgaagcatttgatgtgcatagaaaacctttttcattatgatattactattactcaatattctttattctacaatttgttttcctcggctctgcccctgtacacgactaaattgattaattaatgtattataaagtagagagtatccttttttttctgaaatcactgaggatgtgtttggatgaatttatgtctacccttgagattgtgacatgctcttataataatgactttggttgctgctgcaatcgttggattaaatgctgattcgactcagatttgaattccacataagaggtgagcatcttacccctggataaattaggtgtgcttgtgacctcaaatttactacgtgaaaagtgtcaataatggcttgaaattgatggtctcgtattgatgatacattatgtgcataagtttgatgtaattacttgtatagtatttttttggaacaacaaatcttgggacttgatttgataaaaggtataaaatagaaactaatttgattttgattttttatt

SEQ ID NO: 94375 - DNA, 636 bp, Glycine max
  Clone ID: PAT_MRT3847_56231C.1
attaaatgtagattttttagcccattgcatggctagatagggttaaatagtcattgtatatggataaatctggttaaattagctttactgtttagtgtttatctataaaatgtgaacaaactagttcattatttttcagctattaactttctgttgaagtaattttacataacttaatatgcttgatataagtaaatggaaatcatgagaccataaatgtggaaggggatttcaaaatcagccaagaagcagggcatggaagttcattctctgtgaatgaatcataaacttgtagctaataaaattttttggttgctcatcacaactcacaaagtctgaataggctatccaaaggagtaatgctactgccattgttgttaccaatgtgtctgatattaaacactagtacaatagatttgattttatagattagacaagagtatgccagaaagcttgaagaagtgatattctctttcccttctacacttgtagataaagtatggttatcttttctttgtttgttgatgctcatctcatagttgagcttgcggatttgtattattgttgcctagaacatattttgtttctaaagtccttttatgcttttatatgccacctagcccatatcttccccct

SEQ ID NO: 94376 - DNA, 463 bp, Glycine max
  unsure (1)..(463): unsure at all n locations
  Clone ID: PAT_MRT3847_56232C.1
attcaccctttcgtaaactcnaaatgggctcgtattcaataattcttcaatcatatttgaaccctttcataacctaaaacccctttttaaattagagggtgtccggctatctgaaccagccttccagctacagctactgtgcgccgacggctgctcaaccctacggtgcccatccgtcattgcaatcatacggggctcctccgtcatcgcaatcatacggggctcctacgacaccgcaaccctacggtgcgccgtcgtccgctcagccctacttcgtctacccctacgcccaaccgtacggtccctacgccgtcccctacaacaaaaccttgaagaacgagtcccactcccacggcggcggaagcagaggcggttacccggctcctggtgacgcgagacccgttgcgtcgatggtgccatttgcgtatccttcagggacagacccttaaaggggggcgtgctt

SEQ ID NO: 94377 - DNA, 416 bp, Glycine max
  Clone ID: PAT_MRT3847_56233C.1
acgaggtttcgcatcacccacagccctacaggagactccttgacacgactatctgcaacaccccacctccaccaccaagaagcaaccccgacttccaaccaactcaatctcgtcttgcctatccacaccagccgccggactacttgaccctgacgcccatcatgccttcgcgattccaccagcttatcgctcgcgaccacgaggctcaactcagccaaaccatcgtcaaccttctcatcgcactcctggttctgcttgtcatctcgatatgcatgtgcggtgcactgcttttcttccgccaccgtcgtcgctcccaaaaatctctccacggtctcccgctttataacgacaagcgcagctctggctcatcgattgcttcttctatccgccgtcctttcagcaagaccaccgaatca

SEQ ID NO: 94378 - DNA, 281 bp, Glycine max
  Clone ID: PAT_MRT3847_56234C.1
ccgaatgagattatcaaacacatcatctgtcgattgtgaatgcgaaggattgcgttgtcttccttcctcttctcattcgcttcattcttcgatcttcgtccggggactgctcagaatagcatcaccatcactcgcagatggatacgatcggatgcttacactactctggatgctctcagcatagtgtcggagctgaaggacttgcacgattagccatcaacttcttgaagagcatggagaattcgctgtcggattttgcaatggtagttaaggcatagggg

SEQ ID NO: 94379 - DNA, 419 bp, Glycine max
  unsure (1)..(419): unsure at all n locations
  Clone ID: PAT_MRT3847_56235C.1
acgaggtttgatccacttcttcgactttgcttcatctccttctctgggttttttaaatatttttcttttatgtgccttttttgtttgaattttcaagctggtttttttctacacctgctggaaattctgaatggttttttgcttttaaaaaatattaaaatttgtggtccaaatttttaggttgagggatcagggagagataaataataataataataatataaaaaaaaacaagagtggtgaattcctgtcatgtttttctatangtcttgttttgctggatgttgatgatatccgggtttgtctctatttaaatttcattaagatattttggctgttatttttaatgttccaacttgtaatgtgttctaatttcaatggaatttctacactctattttctttccccaaaaatgtata

SEQ ID NO: 94380 - DNA, 1047 bp, Glycine max
  Clone ID: PAT_MRT3847_56236C.1
gctgtattgtaatccaaaatgtggtgaaaattattccttgtggtttaccggtctacgtgtctgcttcttgacgtatgaagccgacggaagggagggccactcacattttctggttcatatgtatctggaagcacatgcaagtttgttttatgaacagtaatagctgctctgctaaatgatgaacgccgcaacagcagctaacagcagtgtttactcacagacacagtgcagaccactttcctcggatgttcgaggttcgattccttacttgaatgaacggaagtctcggttggtggtgagggctggtggcggtggtcgtcctcccaaggaggatggtgaaaagcaacagcaacaacaacaacaacctgtgtctcttaggcttgacgacgtgaaccctgtgggactgggtcgaaggtcgcggcagttatttgatgaggtttggagaaagttctcgggattgggtcagatttctggcactatccggtcggatgatcaggaggctttggatgcccttctggtccgcgaaggtccgatgtgcgagttcgcaatccctggcgctcagaacactactgtactcgttgttggtgccaccagccgcatcggtcgcatcgtcgtgagaaagctcatgctcaggggctacgctgtcaaggctttggtgaggagggcagatctgaaaggtttaagagctgcttatcaaggtcagttgagatagtcattggggatcaagctgagaaattgactgacgcaatcaaagccaattgtagcagagaattgcagttttataggcgttgagacgtgattacaagagatgtgacttttggatttagtttatatttttcttatatatggtagatgcttcttcatctgaagattggatgaattagacatctccaggatttttttactaatttgcagatatgagattaacttgtttacagaattgttttgaaaactaaaatgtatttgtttgtaatttactaatgatgttacataatttgtaaattcagtagaaattataacagattatgaatttaatttgatagtgca

SEQ ID NO: 94381 - DNA, 471 bp, Glycine max
  Clone ID: PAT_MRT3847_56237C.1
aattcggcaccagccggctgccccattaactatggacttgcttgctgttctttccaccactctttctggggggtctgcccctgatgccagtgcgtcgccctctcaaaaccacagctgcaacagtgatggtggcagtgctgaccagacgagacaacagcaattcttttcggttggtggggaaagaagcagtagcagttcccggtctccggttgaagattcagactgtcaggaggatgttcgtgttaatttaccactgcaactctttagctcctcaccggaagatgacagcctgcctaaactagcatcttctagaaagtatttctcgtctgacagtagtaaccctgctgaagagaggtccccatcgtcttctcctgttgtggagatgctgtttgatttgcagggtggggcctaaggtctcaagccagagagcatatccttctggaagagaagttattgctaataaggaagcta

SEQ ID NO: 94382 - DNA, 433 bp, Glycine max
  Clone ID: PAT_MRT3847_56238C.1
gtgactacgtgaggacattcatctatctctgacagatcttcttagaggtaagagatgctctacccatgatgactattgtgacggatcagggtactgcagttgtcaccagtgtgcccaatgatgctcttcgacactacatgggattgcatgatctgcacgccactgccgagctcagagagacgtaccgtggtaaggatgagtgtgcgcatgctagcgagagtgtacctattattgaggtaccgcagattaggaatacttatacccagacagtgtcgcttgcagatgataatcgattgcctaaatgataaagaaaaagttgtagacaccaaaaagctaacgtacttgaacggactgactgaacgcactatgactgtatgatgaattagctcggagacgagttaaagaagctaagcacttcattacgatcacgctt

SEQ ID NO: 94383 - DNA, 466 bp, Glycine max
  Clone ID: PAT_MRT3847_56239C.1
taaatttctagcaaataggtggacgaattctaagagcgtcatggattcacagagtgagacccaacaacttgcggtgccaaaaatggaagatttttacttcggtgatcaccagcaagatctgaaggcgatgattgttcctgggttcaaagcgttgtctgggaccaactcggggtccgaggtggatgactcgacctccaacaagacggtgactcgggttgcacccgctgcgttgggcggtgctcactctggcgaatctaattgtaaaggatcagctttgactttatgcgatgttgctgcgaatggttctgatgatagtaataataaggccgttgttgccgtggggtttgatactcggaagaaggttgctcatacgtttggccagcgaacttcaatttacagaggggtcacaaggcaccgatggacgggaagatatgaagcgcatctatgggataacagctgtaggcga

SEQ ID NO: 94384 - DNA, 235 bp, Glycine max
  Clone ID: PAT_MRT3847_5623C.1
tgccatagagttgagtgtgccacatcctctgggatatcaatctggtgcttatagtcaagtgtttctgcctgcagaagaaggtgtataaagttatataaggctgctatcaaatgcttatgttgatgtgattgattcgtgctatcatcgacttgtcagatattggttaaacactcatgcatttgttgaaccattcatcatatctacaaactggcatcttgttgttgattcaccctat

SEQ ID NO: 94385 - DNA, 505 bp, Glycine max
  Clone ID: PAT_MRT3847_56240C.1
aaaaaaaaaaggcccaaatttttatttctctgaaacaacgcccaaaaaagttgtttacctgggccccaaacccggaatattaccgggccccccccttaaaggggggggaaaaaagcttcacaaacccaaggaccccagggacaaaatggggggcagcaaataaaaaaaagggatcggccccattggacccgggggaccccccaacggccaaaggggaaaaagccctaaaaacaaggaggggccccctttgggggggggaaaaaaaaacccccggggccctttccatggccacggggcccacccggacccggggggccccccggaaattccggaccgggccctgggggggaaccaattttccctaaagggaggcgaaaaaaagctgggggaaaaaaggggaaaaaggggtcccgggggaaaaatgttatcccctcaaaattccacaaaaaaaaaaagccggaaaaaaaaaggggaaagccgggggggccaaagggggggcccaccc

SEQ ID NO: 94386 - DNA, 494 bp, Glycine max
  Clone ID: PAT_MRT3847_56241C.1
tttgggggtttgagccatatactggggaactgctatgatagcatactttttgctgtgggtacttagttagacgcgtttatgggaagggcactatggctgcacaaacattgatagttggacccatagacgtgcttatatctttcgggcaaacgatcatgggtgcggagctggtaacatctgttgggctatcccacatgtggctaagtgatgcatcgaaagagctcgttgagtggcagccaaatggacgcacgcctttttgttctttgcgaatgatgaaatttccttcttgggtatcatgggaagcggttcatatggactggatgccatgcattactgtgtgctaacctcattgataggtctgacattatatatgaagctcctatgaagtctctgtaatatctttgtttgatactccgtctagaaggatccaacatggtgtggttgctgtaagactaggtgatgaggggcatcaggaccctgtgtatcaagctttt

SEQ ID NO: 94387 - DNA, 540 bp, Glycine max
  Clone ID: PAT_MRT3847_56242C.1
ttttatcaaaaagcaacttcatactagaccaaattaatgatactatacaagacaaattatgaaaatcttaactagtaaaacaatccactcactcaaaactagtcattttacattggaccaattatagaatggtgctccgttagggttttcctctgactgtcatcgtctgtccttgcatcccctattggacatgcctcctccgatttgcccatggccatttctcgacccttcggttaaggataccaataaaaagaagtctcatcatttgctcaaatcgtgaacacctcgtgcgacatccctctcagccttctccctaaaccttgcaaaatgggggatacgatctccatcaagagtacgaaagcataatatcaacttcgcctctagaactgcaaagataaaccttcatggaagaattattctaccaaaaggtgcagccccaatcaaaacttcagaacttcgagagtggttgttgaagctttggcaccccgtgtgtcaatggaaggtgacaagcataattagtgatgaccatcgaaaggagga

SEQ ID NO: 94388 - DNA, 585 bp, Glycine max
  Clone ID: PAT_MRT3847_56243C.1
ggctcgagctcgagccgattcggctcgaggagggatctgagaccagatttgatcaggatccattacttggtgaaaattcaaaatgctgttcttgttgtaatgaacaattggttttaaaaggctatgatcaaaggttggtaattacgaagtcaattgggtctggcagtgctgattttgatggatcgaatgctgttggaaacaaatttcacaagaaaagaagagttaaaccatttgtatcatccagagctgcacaccttagaaataaacatgaagatcctttgtctcatgttggttacaccgagctaaagattacttctgatactgagtctgaaccggatgtttccttatctgatgatgatggtacaagcataccagttcagggtacagatgacaccaaggaagatatagaggtttcatgtgaacatatggagcctcacatccacgattcaaatgagaatttggcttttgagaagctagggacttcagcttctggacttcaaccatcattatcagagtcaggaatgcgattagaaaatatagatgttcatggcactaaatctacagcgacaacagaaagtagagatg

SEQ ID NO: 94389 - DNA, 151 bp, Glycine max
  Clone ID: PAT_MRT3847_56244C.1
tgggtcgagcgatagagccactctcacacaactgctgtccccataatgacggcgctactaccaatggtggacgcgttccacggtccaagactcctgtgtcgacgttgcctgacctttgaccagttattgcgcctctgctgcgtacggagga

SEQ ID NO: 94390 - DNA, 362 bp, Glycine max
  Clone ID: PAT_MRT3847_56245C.1
tttatttttccggttaatgatcatgtatcatgagctgctgttgccttgacaaaaagctacacttcatctacatagagggtatctggttggcaaaaagacagtgggttaacggtggaatatggtggagggatgtcttatgtggctaagaaagatactcagccccaagagaaagatttgacggagggaaattttgcctcacacattaaattttgctctacaacggaaaaagttacctctactaaagctcatttagttagagtaataaccttcaaatatgatataattggtgcaggttcacattcttaagacgatatctctgaaaaggaatatcaataaaaaccctagaatgattgatgccagat

SEQ ID NO: 94391 - DNA, 254 bp, Glycine max
  Clone ID: PAT_MRT3847_56246C.1
attctcctctgtcggtcacacacagcgatagattgataatagagaagagaagcattcataagcgccaattgtgagtgagagagaagtttctgtgttttctacttttccatttttgtgggagacttagagagagagagatctgattcttcaccataagtgttcttgctttgcatctgtcactcagcactagttgacaagcatggcattgccatttcagtcccatccagaaagcacactcaccagttcaccaccat

SEQ ID NO: 94392 - DNA, 520 bp, Glycine max
  unsure (1)..(520): unsure at all n locations
  Clone ID: PAT_MRT3847_56247C.1
gcttctcaattttttgcaacacgaaccgaccgccaatnggcttgattattttttggagcggaaaaagctttcagagctgctcagacgaaacccaattgaccgaattgcagcgatttcgttttgtgaccaattcgttgaacaggctttggtcggtgaaagagatttggcgacgatggagagaaacaatgcaattgagaaagatgatttcatgagcacacattacaaaatcgaagacctttggctgtgtgctctcagctgttttgcagcgtgtgattgggacttgtcgttgctgatcaaaaattcgaatgccatccgagtgggcgctttgttaagccgtctcatccgatgggcttttgaatccgatttgagttcacagagcagaactctctttgcggaagagcctttcaaatttctgaattctttcgaccgagttggcgcctcgagacttttctccggatggctttacgctcgttgggttctcaaaactgatttggatggccgattccctgttcctcccgca

SEQ ID NO: 94393 - DNA, 494 bp, Glycine max
  Clone ID: PAT_MRT3847_56248C.1
gaaatacaccgttgagggtgctgtcagccactcatgcgtgttaaatatgtcaatcgatctcagggacacaactgtgcctagcgggaaccctgaaaaatggcactcacctgatggctatggatacacaatccacccactttgttattcatgaaacagaaaaagaaagttctgcgtgatcacgcaaattggcaaatcaggaattgatgaagaaaaagagaagccttaaggttgggagggaagttttacctggaaaagaggtgaagaacatgacagagatgaagaggagaagaggaaccctgcaattgggaatggacatggggagaactggaatgcaagaaaatggtggttgttcgaggaagaaaggttttgagtgtgggagactgaccggctcgcgctgtgattcgttgacatcccgtctggtgtacgcaaagtgcgcattacgcacctgctaacgcagatcgaagaaaataggggcaatggctgtcggtgacttc

SEQ ID NO: 94394 - DNA, 440 bp, Glycine max
  Clone ID: PAT_MRT3847_56249C.1
tcacacttatacaggtgtggtttatttagtaactagcggggagttgctgcttggaagaaaggctgtttaatggataagatttgtgatgtctgggaatgcatcagtcaaaaggagtgattgggccttattggtacaagtgtttttaacaaacagcaacagtacagagcattttgatgcatgtaagtggacaaaatcttgaaccacattcctgggaattgatcttcccaatagaggtatgtggtcctaattttggatattaaatgttgagtttttggtgggcaaattaaactttatggcatttgagtttccttatttgacataccaaacagtctacagtttttgataatttccttgggaatttctcaagaattcgtaattggatggtagtactcttatgccatttttttctgtctcacaagttacttgtcagattcttctgt

SEQ ID NO: 94395 - DNA, 373 bp, Glycine max
  Clone ID: PAT_MRT3847_5624C.1
ggcgggcctctcgcggctggacacctccgtcatctttgaagccttggccacaggctgcaccagcaccacggcctacatgagcatccacaacatgtgtgtctggattatcgaccgcttcgggagcgaggagcagcggcaccggctgtgcccgcccctctgcaccatggagaagttcgcctcctactgcctcacagagccagggagtgggagcgacgctgcctccctcatgacctctgccgtgcgacaacacgatcattacatcctcaatggctccaaggccttcatcagtggtggcggcgaagctgacatctatgtagtcatgtgccgcacaggagggccaggccccagaggcatctcctgcgtagtggtggag

SEQ ID NO: 94396 - DNA, 254 bp, Glycine max
  Clone ID: PAT_MRT3847_56250C.1
gagatgacttggtgagtgctgtactatttattttgggttttggcttcaatttggactgcatgaaatggattcttctatgcctcctgttgctttggaaactgaagacagcataagcagttactccattcctgaaatccctgcgttcaaacatgaccaaaatcaagatgcaacccatgtcactcactctctctagtagtgaactctgacccagtcattctaaccactagcaaaagccaacataaaagaaagcagaa

SEQ ID NO: 94397 - DNA, 263 bp, Glycine max
  Clone ID: PAT_MRT3847_56251C.1
attggcaggccaatttctcaactcgcacctgttcagcctattcacatatcttctctggacctgtcaatggggacttttggcaagccaagggttcggtggcccttcacttgatcttgatcttctccctgggagttcttcatcacccatgctgaatgtgcctcctttccaaccagcatgtctctcggacatggataagtccctcatgtcagacattgcctcaaatgccatggaggaaatgatcaggctattgcaaacgaatgagc

SEQ ID NO: 94398 - DNA, 358 bp, Glycine max
  Clone ID: PAT_MRT3847_56252C.1
gtatattacaaggctctactctactgcttcaccttctgctctagagaatctactggcgatacatggcttccgctactgtctctgcagccaaacgagccattcatgctaatgggaaaggcttctctgaattctatggcattcgcagatcatcaggctacacttgccgtatgtagaaaatcttcagaggatttgcattctggcattgccttccagacctatgcagttacaagcagtacacgatacatgaaggctgtgacagaagcaaaactgaatgctgctcataaaccgatatgcaaagattggaacgaactacttgacgcgctgtcacagtccgatagacttccgtcttgacgtcatt

SEQ ID NO: 94399 - DNA, 1121 bp, Glycine max
  Clone ID: PAT_MRT3847_56253C.1
tgcatgcctgcagaatattctttctatttctatttatcctatctcaccatatcaagtcgttcattccctccggacaccgcgaaaacgaaaacgaaaacgacgacaagtcgttcattccctgcgaaaacccttgagaaaaccgaaaccctaatcacgactccgagaaccctaaattcgcccaatccaaagtcccaaacctctaaaatcaaaccatgaaaagcgtagaggtggcgaagacggtgctcgaggtcgccgacgtggcttggaccgccgttgaacacacccaccatctccgccaccgcagtcatcccgtccccgctgcccccgcagccgatgtctgcccatccgaccaagatttggagtctctgcgatccgaaaatcgacgtctcaggaacttactcgaccagaatctgaaattgctgcaaaacctctctgaggcgacttgcttcgataattgccctcccgatttgagtgaccggttagacgctgccaaggttcctgcaacaggaaactgctagtggaggaaatcaattccctttcaaggaggccactgagcttgatcaccgatcagctgacattttggtcaacatcgactctcaagaacccagttggtgggtttgggttacagatgagtggatcctattaatgttgaggaattgagtggaattgatgatgagagttacgtatattccttttatcagataatgtatttttctttttaaaaaaaaattgggcatttcaatttcatcatagaaagcttttataacgttttaaattttaaatttgggtactaattattcattcctgaataattgaaaaaaaaaaaaacttaaaattcatggaacttcacctaaacatcctaagttaccactttgggtgcactttacctaaacatcaacccataaattcgtgggattagtgtatactcatgggaatcttggtaaataaagaaaaaaaaactttttttttttgacaaaaaggttattttctgaattgggtggtattagtttgttagtaattgggtacaagtgaagctacattggatattgttcaatcatcttgtgtgatattgtttcacctgcatttattccagggttattagtttggcttcattatgttta

SEQ ID NO: 94400 - DNA, 1230 bp, Glycine max
  Clone ID: PAT_MRT3847_56254C.1
ccgcgacgaagctcgaattcctcgagcgaaaacgaaaacgaaaacgacgacaagtcgttcattccctgccccgttccttgagaaaaccgaaaccctaatcacgactccgagaaccctaaattcgcccaatccaaagtcccaaacctctaaaatcaaaccatgaaaagcgtagaggtggcgaagacggtgctcgaggtcgccgacgtggcttggaccgccgttgaacacacccaccatctccgccaccgcagtcatcccgtccccgctgcccccgcagccgatgtctgcccatccgaccaagatttggagtctctgcgatccgaaaatcgacgtctcaggaacttactcgaccagaatctgaaattgctgcaaaacctctctgaggcgacttgcttcgataattgccctcccgatttgaatgaccggttagttgctaccatgaggtctgatgagtacttgactcggctcaagtaccttcaacaagaaactgctagtggaggaaatcaatttcctttcaaggaggccactgagcttgattaccgatcagctgacattttggtcaacatcaactctcaggaacccagttggtgggtttgggttacggatgagaaggaacctattaatgttgaggaattgagtggaattgatgatgagaattacttggtcatcagtgaggaacatgtggttgatggtgttgccaactttatggccagatgcattttgtcaaacccgaaagctctgaaattttctccagaggaactgcagaaagcgctatcaaaagcattgcgtggtacaagcaaactggaaaagattatggatatttgggaagctggaaagttgttttattgtctgtctacctggggacttgctttggcagggctttaccaaagtcgtgcaattttaagagttgctgcaaagggtgttcattcaggaagtaaacttgctctcaaggctctctaaagattgctgttccatgaacatggcaaagtgcaaatgtatgatgaatgctagtgcaaggagtttacagttccttgtctgactgtaaacctatttgttaattgcttcctacaagatctagctgatgtaaataatttgtcaataaaattattcgttgtcttacctagctgtgtggcctacagtgtaaattgtactgatgatgcagctacagtgtaaattgtactgaatatttcattgttgaatgatacaatgcttgtgtttttcttaaaagaa

SEQ ID NO: 94401 - DNA, 205 bp, Glycine max
  Clone ID: PAT_MRT3847_56255C.1
ctttaggtgtgaaattccacgtgccaaaagaagttttgaagacaaaccaacgatctcaatcaagggcctgatatattgttggcagtctagcggtcagatgaaattctaccagtggagcaccagaggggttaaggttcatgttcagggaaattcttcacggaagcttaatgtcgtcatgaggaagcggatcatagtactgatgtat

SEQ ID NO: 94402 - DNA, 230 bp, Glycine max
  unsure (1)..(230): unsure at all n locations
  Clone ID: PAT_MRT3847_56256C.1
agagggagagagaaaaaacgcagaagcacggacaggcaacaaagcgaaacgnagngccggaacatccgttgatgcgggggagcaccacccacgggggaagaagccgagacagagcccccccgggggggggggcggagcacccacaaagatacagggaagcccgacgcgagcaaagagagcccgaagaggaggcagcgatgccaggaggagcaccaagacgcgaggaggga

SEQ ID NO: 94403 - DNA, 123 bp, Glycine max
  Clone ID: PAT_MRT3847_56257C.1
atcacttcgctctccatctctccggatcccactttgcgaacacaattcttcgattcattcagatcataatttcggtcgctaagcaaatgatcccatatcgataacccgatttcaatctcaatc

SEQ ID NO: 94404 - DNA, 377 bp, Glycine max
  Clone ID: PAT_MRT3847_56258C.1
tttcgtccggtttttttcttctcttgtttagctacccttttctttgggtcctggattcaccataacgggtcctgatttgagtggcttcagatacccttttccctgaattgaagtaaaacccatccattcagctcaaaaatgcatattcggttaagaaaggaagatccttgagattccaagtgggaattggggaaaggcgggatatggcagaggacaccgcataactcctatggaacatgacaagaaccgttgcttactattggcaggtgttgaacatgctccttaagcgcatcaatgtcatgatcaccatgcaaagtggtgtctacagtgtgtagttactacttgccacacctataggtcttcctgaagatcgaact

SEQ ID NO: 94405 - DNA, 510 bp, Glycine max
  Clone ID: PAT_MRT3847_56259C.1
gagttcataaactaaaaagagcataggtttttgaagttagtttatgatagcttgaaactgttatgaaaattctaaaaactcaagagatttaattaaaaaaatatatgatcaaggattttatttatttttattttatttcacatatttgaaaattttcgaatagttcaagcattaatcgagtaatttaacttataaaatattctaaaatatttattacaaattttatgtataacaatttataattcgatgataacatccaaaatttgtatgagtacattatagttaaattctatttttatgactttttttatttgttcatcacatgcttttttttcttgttttgaatttattttttctaatcatgatattaatacaaaataatctccaataaaaataatgattaatgtttgtcgaagaatataaatgctgacaacataaatattttttctttatcttttcatcacattcttctctttttttcttctgttatttctctttattgaaaacaaa

SEQ ID NO: 94406 - DNA, 1041 bp, Glycine max
  Clone ID: PAT_MRT3847_5625C.1
ttaccgcgtcgaccacgcgtccgattcttttgaactgcgtgccctctgcgcgtccaacagtaccgccgctacacgcccgcacctgtttcctgctccgacacttgggcgattgtgatcaccgccggcaaacaccgcggtctcactcccaacactggttcttttcttaggcgctaaggactaaaaaacaaaaaaatccagcagaatcaaccttttcttttcgttgcctctgttccaaagtatagagaaagcttcgaaacaagcacactctccaggtagggttactcagcgcagagcaatctcctccgctgtcaacatgctccacaacaagtccttcgtcaagaaaaccaaaggtggcaaagtcataaagcaagtgcgggagcactacctgcgcgatgatatatactgcggcgcaccgttttgcacagtttgcgattcttccagtgctcgcctcagtgcttcgccttccaccattctcgtcgtcgacaccaatgtcgttctcaaccagattgatttgctggagaatccggcgattgacgatgttgtggtgttgtccattgtgttggaagaggttaagaacaagaacatgtctgtttacaaccgtataagagctatctgtagcaattccatgaggaagttctttgttttttccaatgaataccacagggatacatatattaaggaaatgagtggggaaactaaaaatgataggaatgatagagctattcgagtggctactcagtggtatcagaatcatcttggtggtgcagtaaaggtgttgcttttaactaatgacaaagagaacaaaaggaaggctagtgaagagggtattttggccgaaacagttgagtcatatgtgaagtctttggaccaacctgatttacttgatctgcttgtgcggcctgcatctgaagatgtggacatggaagaggttgaagatcttagaccatgcaagaggaaagtcatctactgcgagcataagccggtgtcagaaattacttgtggggttgcgtggggggatatgtgatgggggggaactggggg

SEQ ID NO: 94407 - DNA, 723 bp, Glycine max
  Clone ID: PAT_MRT3847_56260C.1
gtcaccaactcaccaaaaggctcatgaatggggaggcactaagggtgacaattgttacaaagaaacagatcaaattacagaagaagggtattgggggaatggttcaattccaagtatgatgcgagttgtggaaaatgtgattgaaaatttgaatggaagaggtttgaatgttcaattgcttaacatcacacagctctcagagtataggaaagaagggcacccatcaatctatagaaagcaatgggaccctctaactgaagaacaattatcaaatccaaaaacttatgctgattgcatacattggtgcctccctggtgtgcctgatgcgtggaatgagctactctatgcctatatttttcatcgatgactaacatttgactagaaaaattaagtttggaatgtagtattttgcatgccaagttgttcattttgtttatcctgtgtttttttcttttttcttttgctttgagcgttgttatcttatttttcacttaattggtgtgtgaggggagttaaagtgtaaaaaaagttgcctctcatatatgctagtatattttcttaatgtctattttgtcatttgtaatcaatgtagtcaattttatttagtgaaataaaattttgttgttgttagtttggtcatgtattagttttttttcatgggaatgacttgatctctcctttgtcatacaaagttaaaaacaatccgagtttcagactttgatg

SEQ ID NO: 94408 - DNA, 169 bp, Glycine max
  Clone ID: PAT_MRT3847_56261C.1
cgggctgcagcagttgggaggaggcactgtggcacaagtcttaggagtgtaaatcagagacgcaaaatgaggaggagtcgatcgtccgagaccatgaatattcccgacggtgtgagcatcaaggttcatgccaatgttatcgaggttgagggccctcgtggaaaatcca

SEQ ID NO: 94409 - DNA, 202 bp, Glycine max
  Clone ID: PAT_MRT3847_56262C.1
ttcataatgggtaggttcacatttggaggatgataccaggtcccctgttgctcctgctaccctttacaaagctctagttatcagatgccgacaacgtcatcccaaaggctttctaagccttcaggagtgttgaaaacctttaggggaacggtggccctggaaccatcaagaagatcactttcgttgaggatggagaaagcaa

SEQ ID NO: 94410 - DNA, 271 bp, Glycine max
  Clone ID: PAT_MRT3847_56263C.1
aaaaagcaaactcccgtcttgataaatgcgtgagaaaggattttttttttccctacaatatacttaaggaaaaagtccaaacaaagcaaaaatagcgggaagttaaacacactctagttgaccggattgatcaccgaaacttcactaggattccaaaatacaacccaaacatgttttaacaacttattaaacacaattaaattgcttggcgatgtggaggacccttaatattcaagactggattaaattaatatatctcttctacaaattt

SEQ ID NO: 94411 - DNA, 1155 bp, Glycine max
  Clone ID: PAT_MRT3847_56264C.1
ttgtgttcttttttttttttttttttttcagggacatcaaacaaagtgactaaccgctccaattatatttttacagtaacttcagccataaagggaaatgggtttctgaatatttgttatgtaaccgttcaatggcttttaaacagaattttgaacttcaaaacttttatcctagaagtgaactacccaagctgagaaacaacatgatgcaccattcaactaataccgccaaatacaggagcagcaaaaaagaaggaaatttacaagtctcaagcatttaaaaaggaaacatggaatgataaattttcagaaattgaaaaaaaaaaataggcccctgaaaattagagtttgatagatttaaaattttaccctgcctgtacaaatctgaccattagtagatcctcaacagaaattgccctcagcctcggtgattgtttgggagaagaaacttgccttgtggtacactggcgatcttcacttgcttccctttccgtaagctccaaaccatttttagtttctgaatttttatgctcatcatctgataccattgcttcttggttcacacagttttctaaattttcttcagaatggtcatctgaatctaggggctccttgggagctgatagagaacgttctctgctagcagtagcattactggaaatagaactagaactagtaggtgtcagccacatgaactttagattgtggtcattccagcatttgccattaataaatgccctctcagctgcccaacgagtggtgaaagttatatgagcctcttgttggctactatcattgacttgcacgtcttctagctctacggcagaaagttcaccgtatggtgagaagtgctccttcaaaacagcaacatttgctagaccagatggcaaaggtggaatgatacaaaatgcagcaggacgattgtccaatttgtatctatttacaggcattagtggttgaattggatgctttcaagcctgtagattcttgcagtcttgttgctgtacttgctttaggacttcgggatacaggattgaccagctgtttattcttatcagctgctgcctctgtgtgtggagatgccatgccaacatcagcatccgatgattgaggggaagccagtttggcaacatcagatggcacacacattttgag

SEQ ID NO: 94412 - DNA, 650 bp, Glycine max
  Clone ID: PAT_MRT3847_56265C.1
ctctctctttctccgattcattgccgctccaccagcaatggccacgcacgtgagtcacgtgatagtagcggcagcatttcttctacttcttctccctttctctttctccttctccatctcccattctcaccgatccgctgcaatcaacctcttcgctgccactcccacaagcttagaagacgcgtacgaggcgcttagagtttttcagattctcggaatcgaagagaagaatactcctgtgaacgaggacacgtgtcagaaagtagttgaaagtctagcctcgtcttctcctctcaaggatttgttctatgccttgaaagttaacgccattttaaaatgcaatgtcaatgggaacgtttttaaggatattgcttcaagacttaaagccactgttcatgatgcgagtgctttgcttgacatctactattcaattggaggtttggttgttataaaggatcaggattctaatgttgatgtgcttcttgctgatgttgatggggttttccatcaatcaaggttctcagtcaagtgacggaagatggcgctatagttctgataatccagagtctagtacctatgctggctggattaagctcttgaatcccttgctggaattgatctcactagcttcttctgaatttgatcaatct

SEQ ID NO: 94413 - DNA, 686 bp, Glycine max
  Clone ID: PAT_MRT3847_56266C.1
gttaaaattttatagaaactgaaatgggataaaaaaaaaataaaaattggagggaccaattctagatttcatatattttagagagaccaaaaacatactttatcctaagtaatttatatagctcgaactaaattactatttttgttcataagttgtgtaaactgggaaaagttttcagcaagagtaagtgcataggacagaggatagtaccatccaaggagtttgattaaatttgagtaacctttgtgttttgcttaggttatttgactatattcaaggtaagaataactacaagcagaagattgagatgacagcacctgtgatcagtgaagtattacccagtgatggacccttctgtgagtcctcatttgttgtgagcttctatgtgccaaaagagaaccaagcaaacccgcctcctgcgaagggccttcaagttcaaagatggaagaccgtgtttgtggcagttagacagttcggtggatttgtcaaagattctagtgttggggaggaagctgctgccttgaaggctagcattgctggaaccaagtgggctgatgcagttgagaaaagccagaagagagctggccatgcttctgtttacacggttgcgcagtacaatgccccttttgaatatgacaatatgggtcaatgagatatgggtacttgtttgatattgaaaatgaact

SEQ ID NO: 94414 - DNA, 1127 bp, Glycine max
  Clone ID: PAT_MRT3847_56267C.1
cggctgcgagaagacaacagaagggtacggctgcgagaagacgacagaaggggaaaggagaaaacaaaaaaagaaaaaattgacttgtgtagcttctaatgtgtggacattaaactcactttctctgtagccatagaaattcacattttatcttttgcattgtgcaacttcctcgcgccatggctgctaccatcatcacatgcaagctctcactgcttttaagccttctctcagtttcactattgctgggtgtgagttcatcagatacccttcagaatgtaggggcaattcccccaacatgcaagcgcatagagtgtcccagctatgatgtcattcactttggcaacggctacgaaatccgtcgctataattcacccgtttggatttcgaacagccccattctagacatttctctggttgaagccacaagaaccggcttcaggaggctatttgattatattcaaggtaagaataactacaagcagaaaattgagatgacagcgcctgtgatcagtgaagtattacccagtgatggacccttctgtgagtcctcatttgttgtgagcttctatgtgccaaaagagaaccaagcaaacccgcctcctgcgaagggccttcatgttcaaagatggaagactgtattcgcagcagttagacagtttggtggatttgtcaaagattctagtgttggggaggaagctgcagccttgaaggctagtattgctggaaccaagtgggctgatgcagttgagaaaagccagaagagagctggccatgcttctgtttacaccgttgcacagtacaatgccccttttgaatatgacaatagggtcaatgagatatggttcttgtttgatattgaaaatgaaccacaaaccgtgtgacaaagtaagctttcaacatgaaagcaatatgcagagtgctgcagcactgaggtgttaggacaaggacatcatgaatggatgaataaagtgttttgcatttagctaaaacactgttttctgtttgacttgctttttggttcattgtagctatatagttcagaggtaattttactcttgaaaacttttcattatgaattgatatggttgttgaaatgagcatgtggtacatatatacttttttcc

SEQ ID NO: 94415 - DNA, 1472 bp, Glycine max
  Clone ID: PAT_MRT3847_56268C.1
attcgagctcgagggttaaaattttagagaaactgaaatgggataaaaaaaaaataaaaatgggagggaccaattctagatttcatatattttagagagaccaaaaacatactttatcctaagtaatttatatagctcgaactaaattactatttttgttcataagttgtgtaaactgggaaaagttttcagcaagagtaagtgcataggacagaggatagacaccatccaaggagtttgattaaatttgagtaaccttggcgtttggctttacggctgcgagaagacgacagaagggggtagccatagaatttcacattttatcttttgcattgagcaactaactcactcgcgccatggctgctaccatcatcaccacatgcaagctctcactgcttttgagtcttctctcagtttcacttttgctgggtgtgaggtctgatacccttcagaatgtaggcgcaattccccccacatgcaagcgcatagagtgtcccagctatgatgtcattcacgtaggcaacggctacgaaatccgtcgctataattcacccgtttggatttcaaacagccccattcaggacatttctctcgttgaagccacaagaaccggcttcaggaggttatttgactatattcaaggtaagaataactacaagcagaagattgagatgacagcacctgtgatcagtgaagtattacccagtgatggacccttctgtgagtcctcatttgttgtgagcttctatgtgccaaaagagaaccaagcaaacccgcctcctgcgaagggccttcaagttcaaagatggaagaccgtgtttgtggcagttagacagttcggtggatttgtcaaagattctagtgttggggaggaagctgctgccttgaaggctagcattgctggaaccaagtgggctgatgcagttgagaaaagccagaagagagctggccatgcttctgtttacacggttgcgcagtacaatgccccttttgaatatgacaatagggtcaatgagatatggttcttgtttgatattgaaaatgaactgcaaaccgtgtgacaaaataagctttcaacatgaatgcaatatgcatagtgcagactgaggtgtaaggacatcttgaatggatgaataaagtgttttgcttttagctaaaacactgctttctgattgacttgcttttagattcatcatagctatatagttcagaggcaattttactcttgaaaacttttcattatgaattgatatgggttttgaagagttagtctaaaacatatctatatgtttttcttgctttttggttcattgtagctatatagttcagaggtaattttactcttgaaaacttttcattatgaattgatatggttgttgaaatgagcatgtggtacatatatagctacaataaaaaaaaaagcaagtcaaacagaaaacagtgttttagctaaatgcaaacggacgcgtggg

SEQ ID NO: 94416 - DNA, 243 bp, Glycine max
  unsure (1)..(243): unsure at all n locations
  Clone ID: PAT_MRT3847_56269C.1
cctttatagcggtcgtctttttttttttttttttaaattttttttggtggggnnntttgccccttttccaagcgccgccaaacaagaaccaaaggatgccccccccggataaaaaagaaagaacagcgcctcctacaattgcgcccacccgaccaaaagcttaaccacaaacaacaataggacccggcatgggccaagcccccaagcgcgacccgcccccaaagaaaaaaaaaaaggcggggc

SEQ ID NO: 94417 - DNA, 424 bp, Glycine max
  Clone ID: PAT_MRT3847_5626C.1
ccaaatgacgggtcatgcaccctactatacggtgggcgtcctgctcgaggcctctttaatctaaagaaccctcacgcgctagctatatctttactgtagatacagggtacgatacctgatttaacattctgctaacaaaattatctaggatgaaccttgaccctccacgaagcctcagaggtgcccaccaagatagcaacacaccgctgaacaaggctgccttatatgcgcctgatgatactctatgggacggaggcacctcatgcttgtctgttccatgtactgcagactatccaattctaccaccaactgtgcgagaccggccgcgcatgagggatgctgatctctatgctgacggaaggagacgatggcttatactacaacaaaacaggagttctatctgtgatgtagctgctatactgac

SEQ ID NO: 94418 - DNA, 880 bp, Glycine max
  Clone ID: PAT_MRT3847_56270C.1
aactcatcatcaagggcttcttctgatcacatcaataataataagtcgacgaagcacaatgaaatggttcaacaccacaacatcaacatgggattcatgggacaatcaaagccgccaacaactgaacacatagttgacaaaattaatgaatcggaagcaagcagtgatgtcaacacaactcttggactttctaaatacaatgcttaccgtgctgccaccatggcgcttccagttgttccaatggatgaggaagccttgatgatgatgcagcagcatctaagcaagctgcgcctgctgcagcacatgttccaacaatcttctctgctgggccttccagttccaacaacagtggagtggtgaatatggatgatctgaataggctaatgagttatcaacagcagtactacaatgttcaaagccaaagccatcccaatcagttctccactttgctgatgcaaccttcagcggtagtgtctctcagctcgctaccaaatccacttccacccaccttctctgaccgactctgggactggaatccaatccctgagccaccaaatcaagagtacagcaacatgtccttcaagtaatgactcgtcaattatatctagctatctgtgaactgcacatacatatatatatagatagatagagacaattatctgtgctaatttccgctatcaactttatctaggttgtacgttttcgttactctctaattaatctcgtatcttattttagatttcaataagataattgtatgacttattttgatcaatgatcaatatgtattactcttagggtttgagttttaaaccttttctttttttttattattatcagtaaaaattgattttgaagttacccacttaaaaaaaaaaaa

SEQ ID NO: 94419 - DNA, 393 bp, Glycine max
  Clone ID: PAT_MRT3847_56271C.1
ttcttaggacagagacagactaccaaggttttcattgtgcagtgcaaggctaaaatcatcatgcatttccatggacttgcattatggtatcctcactttgtgactcgtgagatcattccaaaagtgatgaagtgtattcgttgacatgctgtgatctcttcatattcacacgctcagtgcctcctcaatgcagctgtgaagatattacgctgaattcatgccactcagattgtaagagctgtatgtgcacacgctcacagtcaggacagtgtcgttgtcttgacaccaacgacttctgctacaaaccttgcaagtccagagatgactagataaactaatagctctctcaaatggacgaaacccctttaggctttggttgttatgttaggggag

SEQ ID NO: 94420 - DNA, 370 bp, Glycine max
  unsure (1)..(370): unsure at all n locations
  Clone ID: PAT_MRT3847_56272C.1
gcgagaagacgacagaagggggggagagtgagaattaaaaagaaagaaaaaaagaggcctttgataaagcaatttttattattgaaacataaattctggactttctttgcattaggcagccccacacagtggccaaaacttttaagccacaaccagagaacacacgcaaagagaccccgggagagagaggcggaggaaccccccaagcaaggagancccgagagaccaggncgcaacccgccacggggagagaagccacaggaacgccaggngcggacaagaagcccaacggggcgacaccagccccaaaagggagggccaacgaaaaaggacggcccccccccaaaaaggaagcagccaaggggcaggc

SEQ ID NO: 94421 - DNA, 650 bp, Glycine max
  unsure (1)..(650): unsure at all n locations
  Clone ID: PAT_MRT3847_56273C.1
ttgacacagtagagactcattcatctgaattagttcttgtattttctataatttaggaaattgattatgttttccttggttttaagttaagttggttgtgtttttcaggtctatggtggagaggcaaggatttcaactttgagggaattatttcctctgatggaagacaagaagagccttgcttcatctgaagagcgttctcagataaagggaaaagcttctctattagctgcacttgactactatgttggcttgcatagtgacatcttcatctctgcttccccaggaaatatgcacaatgcattggtgagttgtgctatatgcatttttagatgtctctaattgaaggttaaattattaactaggtctgtactatttgggaattttcaaatagttctttatacttttatttttaattgagtccctaaactaaaaaggtattccctatagttttttggcagtttcaaatcgtcagaaaatgacaatttatggcgtctttaaaaaagactagtgactcaattaaaaaaattaccagatcaaggatctatttttaaaaaaannaaaaaagttagggacttgaaaatatgaactagttcaaggggtttactancttgaatcctaattanattagtctaacacttagacttatt

SEQ ID NO: 94422 - DNA, 341 bp, Glycine max
  Clone ID: PAT_MRT3847_56274C.1
cggacgctttttcttaatcagaagctgagattgagaggctactaggggggggagaagcaaaataagcaatgacagagccacccaaggcagaccgaggagacgatagtgatagtgtgaagctggcggagccgctgcatggtcgtgatgctaaagtagattttattggatcaaccctattcgcactacaacaggcaacaggcaaaagcgccaggcaatggcactctgaccctgtagaaagacgagcaggggtgccaacatacactgaataggagtgcacaggagatgccaatgcgtcaagatctaacgttttgatgggattgatggaggagcatggactgaag

SEQ ID NO: 94423 - DNA, 705 bp, Glycine max
  Clone ID: PAT_MRT3847_56275C.1
gatcatcaatactcaaagctttattcctcaaacggggacaagaaaataaaattaaagttatgaacaacaacaacaacaaaaaagttggaaaattttcactctaaacacaacctgatgaaacgttgaaaaggcctcataattacgatagccttttttgttaactaaactagctagaattgctatttgctaaacgctagaatccataatatatggaagagtgaaaactagaaagctaaacaaactacagatcatatatatatatatatatatatatgagtatcatacgaagttaaataattaaaccttttgattggtcgtcattatgatgaagagacaccaacaccaagaaaatcaatgaaaggaacttctttgggctcgacattggtctcatcttcatttgtttgttgttgttgatgatctttctccgtggaagccttcaacttgctgaatgtggatgatgagttattattattattatcacagaaactcatcaagtccctctttatgatccttccatcatgatgatcagaagaaccaaggaaagttctaaaaggacttgttggaacaactctcttgtagttgggaagagagaatgcgggatttggataaattctgtaaagaaacgatctatctgagcttctggaacactctgagagataaacactagaagaacgagaagtgttgaaatagtctctcgcgcctttt

SEQ ID NO: 94424 - DNA, 648 bp, Glycine max
  unsure (1)..(648): unsure at all n locations
  Clone ID: PAT_MRT3847_56276C.1
aaatccctgcgtgaagaagaaatcactgtgtgtgattcaattgcatcggtttcttcaattccagcaccggtgcgtgcatctgatttatataaccttgtttgttcactcttatttttatgttatggctatttcatatttgaggtcagcatcataagcagttgttgtttcggaaacacaagatgaattctggtgggtacgctgttgaggttacgggtctctcgccaaaagccacggacaaggatgttcgtgacttctttgctttctccggtgtcattgagaatgttgaaattatcaggtctggtgattatgcttgtaccgcttatgtgacattcaaagatgcatatgctcaagaaactgcatgcttgctcagtggagccactattttagatcaacgtgtatgcataacacgctggggacactatgaagatgaatttgatttttggaaccagccttcgtatagtcatgaggatgagactgcttcaactacaccacaaagcaatcaatttgtttcctctgctggagaagcagttaccatggctcaagaagttgttaggaccatgctgtcaaagggatatgttctcaagcaaggatgcactagctaaggctaaagactttgacgagtctcatcaaggtttccgncactgcaca

SEQ ID NO: 94425 - DNA, 372 bp, Glycine max
  Clone ID: PAT_MRT3847_56277C.1
gatggaacatgggcgcatgatccattaaagcccccaaagagaaagcaacctagtgaagcctcttacttgactggttgacacacaggtgaaacatcatatagcgaagctagggcccctatttgaacgcatcttattacatatagatggataggagcaagctaaatttgtcgaaaggtgagaggaactactgaatgtatgacaggggattacgaagcttaaagggcctggtttcgactttgaggccttctaggagaacgctccattggtcttcaatgatacccaacaatgctgaatacgtgacttaacagtttctttctcgatcatgcattgaatgaaactgaatttgcagtggaaggatcacgtggatccttg

SEQ ID NO: 94426 - DNA, 542 bp, Glycine max
  Clone ID: PAT_MRT3847_56278C.1
gagaaacttcctcgtcgcaaaatttttgacaaacctaagacgcgctgcttcactattcttcctatggagtttaatcttgtggtccgtcagaagtctttaaaaatttgtgagggccatttatgaagaaatgggacaagcttatgtgtgaagttggaatcaaccaatatctccatggaatggactggtttggccaaaaaattacctgagtaagggcaacgatatttctgtggtgcgattatgctagttttgatggtttgattacccagcaagttatgagcaagatggctgaaatgataaacagtttttgggggggtgatgaaaaattgatccgtgaaaggacaccacctgcttgaggcatgatgttcaaggatggcaattttgtaaaaaaaatgtttggaaagttgaaagtggaatcacttcttgtattccggtaatagttattgcaattgcatttctaatgaaatgctttataataaagttataaaaaattctggcccagttaaagctcaaaaattttttcaccatcctcaaaaatttgtttc

SEQ ID NO: 94427 - DNA, 401 bp, Glycine max
  Clone ID: PAT_MRT3847_56279C.1
aatatactcaattttaaattctttcaaatattctaataacaaattcaaacaagttaaaaaaaaaaaaagaaacaaaaatgcacaagaaatgtggatctaaagtaaacacaaaattgccattgacgagtcaccaccctccacagcggtggcaaccttaagcgcacactttgacgcttctcgaccaccctggcattttcatagtagatgaccttaactgcgagttgtgttacccatgttcataaataagagctagttctaggaccaagtcacattcttgtgcatagaagcaccacacttttcctcctcgcatttctcttccctgcaaaaccccagttcttctcctctactttaggacccttacgacacaccaacatggtttctacacaacatctttatgacct

SEQ ID NO: 94428 - DNA, 284 bp, Glycine max
  Clone ID: PAT_MRT3847_5627C.1
ggggaacaaaaaataaggttttctttcttaaaccaccattgtttttaaccggcggtaaaaaagaaccagggtgggggattaaacctttttacccttttttcttttgaaacctaaattcctggggggattttttggggccgggggcccaattttatccaaaagaaggtccgggttgggaaaacaaaaggcaaatttgttttgggcttaacaaaaatccgggttttttactttaggttaaaattccgggacaaagccgaggggaacattttgcaggggggtttttt

SEQ ID NO: 94429 - DNA, 414 bp, Glycine max
  Clone ID: PAT_MRT3847_56280C.1
attaatcttgctgatgtctgaggctagtatccacaggcctgagtgagctagtttggaatatattaaccacgcacagagcctgcatctctatgggcaatgtgagagttgttctgttaaagaacttgaaccatgatgaacattgagggagattctttctaaaggaaccaagctagcgaacgccagacatcagacagacagctgtatggaacacactgctaattatacttcttagaactgggcgtgacaagagtgctgcttgaaaaacgctgtcattgccgaccatagctccatagaactataatcgcctaggaactgttgggatagctcatataggacctggcaattcggaattatctgcagagggtcatcctgaatggataatggaagaccccctgcatcctgcaatcaagggca

SEQ ID NO: 94430 - DNA, 494 bp, Glycine max
  Clone ID: PAT_MRT3847_56281C.1
ggttgatgtcaatggaccatttacaactccagtgtaccagtttctgaaatcgagtgctggaggctttttgggtgatcttataaagtggaattttgagaaattcttggttgacaaaaatggtaaagttattgaaagatacccaccaacaacgtctccttttcaaattgaggtatgttaagcttcccccaatagtaaatccagtttttaattgttaccatgacagtgaaatattaactaatgaagtatgtcaatgtcttttctactcaagattgaagcctgaaggtgagtataatagagtatctgttaatattgagaaatttagcattgaaaattcagtttgaaacttttaatgctgacaacttagcactagaatttagtgtttgaaaacttgatattttaagtgcctgatgaaattagtttatgcttaatgtagtcagtaacctcttgcatgctgagccggttaagcagttttcacttatatttattgtaagtag

SEQ ID NO: 94431 - DNA, 2372 bp, Glycine max
  Clone ID: PAT_MRT3847_56282C.1
aacggctatcatgttcttgggtgattcctcctcttgatcttaaccatgaccaacccaaaactaggctatgccggaatctccgattccggcaaccacattccctcctccaagaaaaaccacaagaagctcctcctctccctcttggccaccctcctcgtggcggcttcggtggtggccattgttgtcggagtaaaaaataaaaactccgacaactctgccaccagcacctccctctccctctcccaccactcacacacgatcgtgaagagcgcctgcagctccacattctaccccgaactctgcttctccgccatcgcctctgagcccaacgtcactcacaaaatcaccaaccaccgcgacgtcatccagctctccctaagcatcaccttccgcgcggtggagcacaactacttcaccgtgaaaaaactctttaccaaacacgacgacctaaccaaacgagaaccgcgcgccccccaccctgaatttcaagacttatcttggcaggcctcggaaggagtactctaggaccgtgaccatgcaaagtagtataagtgatgtcattgacccaattgggtggcatgagtggagtgggaattttgcattgagccctttggtttatagggagtaccaaaacactgggcctggtgtgctgacaagcacgtgaggaaggcactggagaagggacaggtgcacgtggaacacatgtgcagcaacgcattggccatgacgaagaacatgaccgacagtgacatagctaactacgaatacaatatgtagagttgaaaataatggacaaaatggtaatagcaataggaagttgttggtggagaatgatgttgagtggccggagtggatttcggcggcggataggaggctacttcaggcgtcgacggtgaaggctgacgtgacggtggcggcggacgggagcggggacttcaagacggtgacggaggcggtggacgcggctccgttgaagagtagtaagaggtttgttataaggataaaggctggggtctatagagagaacgttgaggtgcctaagaagaagaacaatatcatgttcttgggtgatgggaggaccaacactatcatcactgctagcagaaatgttgttgatggtagcaccaccttccactctgccaccgtcgctgtggtgggttcaaatttcttggcccgggacttaacattccaaaacacagcgggcccatcaaagcaccaagctgtggccctaagggttggtggggacctctcagcattcttcaattgtgacatcctagcattccaagacaccctttatgtccacaacaatcgccaattctttgtgaagtgcctaattgctggcacagtggatttcatctttggcaactctgcagtggtgttccaagactgtgacatccacgccaggcttcctagctcgggccagaagaacatggtcacggcccaaggaagagttgaccctaaccaaaacactggcattgtgatccagaagtgtaggattggtgccactaatgacttggagtctgtgaagaagaatttcaagacatatctagggaggccttggaaggagtactctaggactgtgatcatgcaaagtagtataagtgatgtgattgacccaattgggtggcatgagtggagtgggaattttggattgagcactttggtttatagggagtatcagaacactgggcctggtgctggtacttctaatagggtcacttggaaagggtataaggtcatcactgatactgctgaggccagggaatatacccctggaagcttcattgggggctctagctggttgggctcaactgggtttcctttctctcttgggttgtaaattatgttcaacttttgagcattataattgttacctattattgttatgttttttattagcaaaagggctgaagcccaagctagaaccctctacagaaaggcactccctagagaaacaaagttgaccaaaaaatttaaaagaaaacaaaaaaggaaagagggagagagagattattgctggagaggagggggttttagtttgtctttggttgggttttagaacacaccgtgttcttctaccttaggctatttattctgattttgccactggctaaaataatcatgataataagtgtatcagtgtaagccaaagttttggctcgttcaaaaattggattttttcattttatggcttccgccggccccaccgctcccccccgggcttcgacggtcgccgcctccccgcctcgggcctgccgccgttgggtggccccgctgctccttgttaagtgttgaaggatctacaagaggctaagacgtgatacccctgcggctccatccgtatcatcgtattagacaatgctcgccaagtg

SEQ ID NO: 94432 - DNA, 883 bp, Glycine max
  Clone ID: PAT_MRT3847_56283C.1
attccgggtcgaccacgcgtccgcttcctcctcttgatcttaaccatgaccaacccaaaactaggctatgccggaatctccgattccggcaaccacattccctcctccaagaaaaaccacaagaagctcctcctctccctcttggccaccctcctcgtggcggcttcgctggtggccattgttgtcggagtaaaaaataaaaactccgacaactctgccaccagcacccccctctccctctcccaccactcacacacgatcgtgaagagcgcgtgcagctccacattctaccccgaactctgctactccgccatcgcctctgagcccaatgtcactcacaaaatcaccaccaaccgcgacgtcatccagctctccttaaaaatcaccttccgcgcggtggagcaaaactacttcaccgtgaaaaaactctttaccgaacacgacgacctaacaaaacgcgaaaaaaccgctctccacgactgcctggaaaccatagacgaaaccctcgacgagctcagagaagcacaacacaacctcgagctttaccctaacaagaaaacgctctaccagcacgccgacgatctcaaaaccctcatcagcgccgccataacgaaccaggtcacgtgcctcgacggtttctctcacgatgatgctgacaagcacgtgaggaaggcactggagaagggacaggtgcacgtggaacacatgtgcagcaacgcattggccatgacgaagaacatgaccgacagtgacatagctaactacgaatacaatatgagagttgaaaataatggacaaaatggtaatagcaataggaagttgttggtggagaatgatgttgagtggcccgagtggatttcggcggcggataagaggctacttc

SEQ ID NO: 94433 - DNA, 316 bp, Glycine max
  Clone ID: PAT_MRT3847_56284C.1
cggtcgaccacgcgtccgcaacactctcaagcttcacactaccaaactttgctatttaaattcgcatgatctatacaaggtcatgtctcttactatcttcatcaactcagatagatatctaatgaataccctatactctcatatctctatgtatctgttttacattacttagcataccatcttccaacgtcagtgcttagctgaattaaacatatttctccatatcacattcctgtcttcatcctttttaatattcctgttctagttcactttcaatgtttcagcgttctttcttttcgacactcattgatcatat

SEQ ID NO: 94434 - DNA, 753 bp, Glycine max
  Clone ID: PAT_MRT3847_56285C.1
ttgcccctacccaaaaccactggcattgtgatccaaaagtgtaggattggtgccactaaggacttggagtctgtgaagaagaatttcaagacttatcttgggaggccttggaaggagtactctaggactgtgatcatgcaaagtagtataagtgatgtcattgacccaattgggtggcatgagtggagtgggaattttgcattgagtactttggtttatagggagtaccaaaacactgggcctggtgctggtacttctaatagggtcacttggaaagggtataaggtcatcactgatgctgccgaggccagggattatactcctggaagcttcattgggggctctagctggttgggctcaactgggtttcctttctctcttggtttgtaaattatgtgaaacttttgagtcttgtaattgttacctattgttattgttatgtggcagagagaaacaaattaagttggcccaaatgtttagaagaaaacaaaaaaaggaaagagggagagagagagagattattgctggagaggtgggtggggggttttagtttatctttcacttgtattggttgggttttggaacacaccatgttcttctaccttaggctatttattgtgatagtgccattggctaaaataatcatgataataagtgtatcaatgtaagccaaagttttggctcgttcaaaaattggattaaaataatcatgataataagtgtatcaatgtaagccaaagttttggctcgttc

SEQ ID NO: 94435 - DNA, 989 bp, Glycine max
  Clone ID: PAT_MRT3847_56286C.1
agagaatccaaaaccagactttattagattgaaaagcgtaactgtacattgatagaaacagcaaattctctatctaatgaacaaagttacacccctaatatttcccaattccagtgatcactccccatgccatttaattacattggccctcatggatgccttttacagtctcctccactaatcatcatatggcatctcaccagcagaaaggaaaatctattgtctggctacgacaactgctggcccttccaccttgaaagtcgctccccagatttcctcctcattagcaggaactgcagtaatcttatttttaggattctcatagcacatcaatcctccaacagctgtagagtagaaacatccttgagggaaagaagcaagtgacttgccacaagcacctttaagcaattctgcatcatcggcaaatgctacgtagccatcagcagtaattccccaatatagaggtaccttaccatattgatcagaggccacaaagagggtagaagtagatttgtcaaaaactatgaaagcaaagctcccactgagatggccaacaacgtgattagcagggtagggtgctctgtcacgcaatgctttgtaagcctcaatgaccaacaatacttcattggttgacttggccaatccatattgttgtctcaagttgcccaaattgtcaagggctccctcaaacaagcagaatacctcatccttcacagcaaaggatctgggctgaaacggcgactcgttctggtgggtataagcgagctggacatgctctccgacctccaccgacactgcggaggggttcttctcctcgaaccacttccgcagcgccgccgccgtcatcttcggcgacggtgtacggctgccggcggcaacgagctcctccggcggcgacactatggagctgctgaacacacccaacatttttcacgctaatttctttattttccttttctacgcattcaccagaatcttctcaaggaatc

SEQ ID NO: 94436 - DNA, 320 bp, Glycine max
  Clone ID: PAT_MRT3847_56287C.1
atcaattgccgacttgggagtcatcgaggttaggtcacacctactacccgtgtacgtgacccagacagccaaactaggggcaactcttgctccgacgataatggcagtcaatctgacatcggcggaaccgtctgcggccaccttaatgcatccaacgctcccaacgacgccgatgatcgtttcatcaggtatcgtggctacaacggactcttctctcataacgagctgacgcaagctgctattgtattgcgtgatcgggatgagctttacaagagtgatccaaagaacggaactatatgcacgacgaaaaaacgcaaaac

SEQ ID NO: 94437 - DNA, 284 bp, Glycine max
  Clone ID: PAT_MRT3847_56288C.1
gcacgaggttctggaaagtgcggtagctcctctagccgctgtcattgttccaaaaagaggtatctcgatttcggttttttttccataactaaatttagagtcgtaaaaatctaaatatcgaatttttaaagattacatgtaattaattttgattttgcttgtaacatgttctttttaaaaataaataaaggtgatttattttaaaaaaaaaaacaccaaaacaacaaaaagaaaacgcaaacaaaaaaaaaaaaaaaaaaaaaaaaaaaaaaaaaaaaaaaact

SEQ ID NO: 94438 - DNA, 428 bp, Glycine max
  Clone ID: PAT_MRT3847_56289C.1
agaattaaaaattctttccaaagcttggccctgcaaaggccaaaattaacaattgtttcatatgtacattgtgacaaatatgttcactacttatagactatgttttgttgggcccagagatccaacgctttctcctcaacatacagctttgatttggattttcttgggaccaattacatacttttcgacttgagaactactttaaacccctttccaacttttacacttgttgttcatttaataaggacagaagccgacttccgtatatctttgtgaagatacctctcaatatgtttatatatgagcaaaagaaagacctgtgtccatgtggcgactatacaaattgtaactaactggtaacaaccgtctatctgatgaaaatgggtcattttgagtcagagacatctatgcacaggaaacgacatttt

SEQ ID NO: 94439 - DNA, 188 bp, Glycine max
  unsure (1)..(188): unsure at all n locations
  Clone ID: PAT_MRT3847_5628C.1
cagcacgcgncgtanactcggaattcggctggagccaatacaataatcactaactgaatattcgatctttgatgtatttcgcctccgaagaagctaaggctcccggggataaaaatccgggagaggtggggatatctcccaacctcgtgaaggataagaaacctaagggtccgaaagagatgaagcca

SEQ ID NO: 94440 - DNA, 365 bp, Glycine max
  Clone ID: PAT_MRT3847_56290C.1
accataaatatgtgctttattcccttatgaaaaaaaaattacattgctaatctattaatatgaaccacgaaaatggtttgattaactactagggttacaactgttaatgccacaacttttttgctgctaacaccttataaaaggttgaaaaattgggtgaatttactatcaggatcttttaacattagcaggggcatataatggatgatgacagattgtaaaaaaaggcttcaattttggatcaagggctcctgccccacaaaatttcaagggaaagcggttgcgctttgttatttgttctactatacacagataaggcattgggtcagggtcattggaaaaactacttttcacctgttttgcta

SEQ ID NO: 94441 - DNA, 300 bp, Glycine max
  Clone ID: PAT_MRT3847_56291C.1
tgatacgcgtctaacggctaaaactagttatgtgttgaaatacattggattatggcaagagggcaaggcaagaagtcattgtgtctcatacgacagatggagccaggcctggacggagtagtactcaaacattgctcgaagtaagagcgaggaaatcttgagaaatggtactggagacagacacagagcaaggattcctggtcctggaaccgtacgtggctacatgctgaaaactaataggagaagccaccagcactgagctggacacccaacgttttcttatcgggagaggactcactc

SEQ ID NO: 94442 - DNA, 193 bp, Glycine max
  Clone ID: PAT_MRT3847_56292C.1
attaacttgggaagctacaacgggcctgttccaaagcgtggaagaaaaaactaagcttatgtgaaagacctcttatgctcgtggatggacttgtgactacactggcgaaccggggtctcgaccaaacacctcgactgtacgggctacacgctgactctgtagcttgggcctaagcggttctatttggtaccca

SEQ ID NO: 94443 - DNA, 140 bp, Glycine max
  Clone ID: PAT_MRT3847_56293C.1
tcactttgcatggattcgtatatctggtcaattccgtgtgcagaattgcaatctgacactagacttattgtcggcgatgttatagatattgtgaacttacacaacaccatatgcgatggagcttttgatgtataatcctc

SEQ ID NO: 94444 - DNA, 560 bp, Glycine max
  Clone ID: PAT_MRT3847_56294C.1
ggacgcatacaaagtggtctattaaataccattcgatgttcaaatggtattcctagaaacaataaatggtgcataacgccctaacaatgcactcacatttactggtataaccaccaagctaaaacaataacatgtctggaaaaccggtctttttttaaaaggggcttactagggacacttaacaaaactactgttattcatccttctattctcaaaactttagagttattctaggtgaaccactttaaacacattttggaaataattttggtcaacaagagaaccacccatttcaagcccttgagaaatcctgttttatcgatagtattccttaacatccagaaaactagtatgctcaaacaagttgcttgcaccattcacatgaactgccttattaaactcattctgcaaaaaacatgcccctccccttttaactattttcttgagcttcaacactttgtgatgatacccaaaagacctaaagcttgcattattgagaccatcttgtggagttacatgaatggtgctaacagcagcacctttaacagagctctttggat

SEQ ID NO: 94445 - DNA, 382 bp, Glycine max
  Clone ID: PAT_MRT3847_56295C.1
tattatgagaccgagggttacagccggtgtggagaactacttatgatggctgacctctctttatcacagaagaagctgttttgttttttggactagtctcacaaaggagacaaactcatgtcgatgcgactgtcatacgacttcgacaacaacgctcttatgcctagaaacgacagaccgtgttatactctactctagaggctgggaccgtcagtcagatcctcactcttggggctataacccttatggtttggcgaataaagagtgcttagccgaccagaaccctgttacgatgatcaaaatcttatgtctgttatcaggaaaccctgcaccactcgcctaggcgaaattctaatctttggtgaatacaaacgccgatccc

SEQ ID NO: 94446 - DNA, 1254 bp, Glycine max
  Clone ID: PAT_MRT3847_56296C.1
aaatatgcattcagtgtttgagaggttacatttatttctttatttatttttttattttttcttttttaagccacccaagaatatttagctaaattacttctagttttgtgtatgtttactggattttgtgtattgttttagcaaacagacatatcttaatgcttgtccatgtctggtaaaacagaattgcctgagtgatactcacatgtttataggaatacaaaaaatataaaattctggatatggtgaacaatcaaattatcaatggtatgaattgaggtggaaaatttggcaagctggattgtaggacatcttcgacgcagtttgctcaaacttcttgacggcagcttcattttcttctaagcttgtttcagtgaataattgttgccaccaagttgaactccgcattttagccgggcggccaaatttggataattgtgctattttagctctccgttgacctgggtagcctgcaaaaataataataccatcagcagatacccttgctagctcgggaagagatttgttcaaatattttggagacaggtaatccaaagcatctgacactataacatgagaaaaagactttgccctgtatggtaaagggaattttatatctgcaacacgtataatgcctttctgcactagagccttgcagttcctatcagcatcctctatgtcatatggctccacaccccatgcttcagtttccccttctcttaaaaatttggagaccaccgaacaactctcagggcctacgtgtaaaacatttttcatgctgccaccatatgcattcttcaaaacaggaattgcacttgaaacttcaaaagtgcatgaaaagtcaccttcaaccctgctaaccacatcctttcttcctcccaaaacacctgacccgctacaagcataaaggatgagaaggatggctccaaagaggacaagggatatggagagtagaggagaagatttggatttggaatgcaagattcttgaaagaccgccacgtctcgtggaacttgcttgtctccttgtcattgtgccttaattagatcgcattcataaatcataaccttaaccgcgttcagcaacgaagggagtttatagatctaaatctatctatgagaaagaaaagatatagcaatagcaagacattacattgcagcactaaacttaaacaacagatctcaccggcaaaccgcactaccctcattctgttctccccttctgtcgtcttctcgcagccgtacggacgcgtgg

SEQ ID NO: 94447 - DNA, 308 bp, Glycine max
  unsure (1)..(308): unsure at all n locations
  Clone ID: PAT_MRT3847_56297C.1
gacataggnggtgtgnggnnggattcggctcgngggnaagngntngtngannnagtnagntnnaagntncntgnnncntnnnnnnantgngnnagntantnctnatcnnatagacnatncnnngggaaaagtntnngttnnctngcagcctaggtcgagntgnaggannncnggntntggngaggagtannagggntgttgnaatgcnnnnactctngnnccnangnnggnngtggggtcnggtgggangtntnccataagggggagngcgtanggnggtgangtgagannggtgtngannnagaaac

SEQ ID NO: 94448 - DNA, 252 bp, Glycine max
  unsure (1)..(252): unsure at all n locations
  Clone ID: PAT_MRT3847_56298C.1
aagggatnnacnntttanactcctctnntcttcccggtggttgcatcgctggttgaatcttngatcagaaggttgnttcagagntnccccattcatnggaancactatcatnggggttaactngaaaggaggtgtcggtctcggagccgaatctncgaaanagcacgngagtgtatttgncaaccgagcattggncaaaatcatcagtcantggtaatgtatacgtgtgtcggcctggatngggngtgattt

SEQ ID NO: 94449 - DNA, 158 bp, Glycine max
  unsure (1)..(158): unsure at all n locations
  Clone ID: PAT_MRT3847_56299C.1
aggggaaaatacttgcatccacattttaatcctgaaaccatacgttcgcaaaggtagtcaatctatgtaggcatacaggctatttactactactaccttttgaaaagcattgctttgcacggatgccgganaaaatgtcttttctgagatatagtaac

SEQ ID NO: 94450 - DNA, 312 bp, Glycine max
  Clone ID: PAT_MRT3847_5629C.1
cagctttttagctagcaaatacattctgcacactctttacggtacgcgactatacctatatctggataaaatgtccatcaatcgtgctttcatcaagaaatgggtcccgaccgagacctggcctatctttggcatcgttggcatcgcctgcggcggtgcgggctactatctttggaagctagccatgggccctgaggttgtgtgggaccgaaagggtgactggaggccgtgggacaaggtcaagcacgaccagaacctcaaattcctctcatacaaccctgaattctgggcacaacgcaagaaggaggcgtt

SEQ ID NO: 94451 - DNA, 162 bp, Glycine max
  Clone ID: PAT_MRT3847_562C.1
ctcgaatgccaaaactagtttttatgtaggtggacttgtagtgtttgtaatccactgatagcaccttgtggccaggggcaaacaattccacagggggattattgtcttacaccatagggtttaggtttatccccaccccaaaatgttaccaatatgagcata

SEQ ID NO: 94452 - DNA, 408 bp, Glycine max
  Clone ID: PAT_MRT3847_56300C.1
cccacgcgtccgtagaactagaactagggtttcatctttgccatcagaaacaccaatgatttacgacgttaactctccccttttccgatccttcctcagccagaagggaggctcctccgataagaggaaaccggatgaacagaagccaaaagagcagaaacccaaagccagcgagaacaaacctataatgacagagtgccaacaaatttgctgcattcagttgtagaatgataataggtggtagatattgcatttggttctacaaaattaagatcattttggctgtgttctgaggtatatgtggtgttttagactttgttattgtaatggtttgattttggatatggttataatggactcaagttgaacttgatgcacacatgcaatgaagttactcgtttaaaagtt

SEQ ID NO: 94453 - DNA, 218 bp, Glycine max
  Clone ID: PAT_MRT3847_56301C.1
attaggtgtatttatacaaacaccatttctctagcagatgagaagaactattagcctcaattcactaaaataactgcaaaagaccctgagggtgaaccgataaagactactaacagagctatgatcaggaacacgccaaatagagtcacccaaaatgtttgctacgggaataatcgttaactggggaaaatagtccttctccgaaactggaatggtgt

SEQ ID NO: 94454 - DNA, 391 bp, Glycine max
  Clone ID: PAT_MRT3847_56302C.1
ttttttttaagcacaaagaaaaataaacacatcgtagtcatgcatagacaaagtcattaatatataattggcattagatattaatatatatagttgctgaaagggaaattaaagttattccagagaggcataaatagagcttttttttgtaagaactattgcaggcaaaggacaaattgtactttccatcttaaaccggtagcttctcatatgaagggtggttgaggcttatatattatgaaatggttgtggtggtattagtaagtgctcatatgtgggtaggtttatatgtgaatcattacggactgtggggtgctcttgatctcgtaatgaattcggtagtggattttgggggtgctttgaatgaagacatgaattcagtggttgattt

SEQ ID NO: 94455 - DNA, 200 bp, Glycine max
  Clone ID: PAT_MRT3847_56303C.1
gcgagagtgaagaaatggagccagacttggcattggatttggatcagcttcggcacgtccacagcatcgccaaaagacctcgaacactctctcttctctcctccgaaattcgtagactccaaaagttatcgtcagaggacgcttcttcgccgattccggcgccgatatcggcaggaactaaagtggggcctcacctgcga

SEQ ID NO: 94456 - DNA, 249 bp, Glycine max
  unsure (1)..(249): unsure at all n locations
  Clone ID: PAT_MRT3847_56304C.1
gcgtccgcccacgcgnccgcacatatacaaacaaggttcaagacaccaccgaccggagacattagaaacaccatcaggcagaccacggccaccacacagagcagacaacacgaacggaangcggccaaacctaatcaacccaaacagaacagacaacacaaaggcacctagcggacaagaagaaggagaaactcgataataacatcacagaaagaggatacgagccacacactaccactaataacagaa

SEQ ID NO: 94457 - DNA, 299 bp, Glycine max
  unsure (1)..(299): unsure at all n locations
  Clone ID: PAT_MRT3847_56305C.1
accaagaggatgctgatggctcacaggaagttcgatcacctcacgcacgggtcactgggatggcttcccaggaagcgtgctgctcgtcacaggggaaaagtgaaggcattgcccatggatgacccatgcaaggcacccaggctcactgcattcttgagttacaaggctgctatgactcacatagttcgagaggtcgataacccaggatcacagcttaacaagaaggaaacatgtcagcctgttccaattatagagacccgtacaatggctataggtgccgncgtggctcatgtgaaaac

SEQ ID NO: 94458 - DNA, 496 bp, Glycine max
  Clone ID: PAT_MRT3847_56306C.1
tcgtacggctgcgagaagacgacagaaggggaagacagattcatagatttataataacttatataacctaataaatccactaagttggatcccttttactcttaaaggattatcccacgtactttattaaatattttaatgtaacaaataatttcattgattcattctcatttagtagtaatatttttatacttttattttaataacgattattttaagatactcattattaaaattgatgcaaattgtagtaacggaaagaaatgaaaagagtcagttgagaatccaaattagttttctttctattgcggttacttttaccgttttcatttcaatgcaccaaattaatgtgagcaatttctgagacgctgggagacagtaccaccaacctatactgcataaaaagcaaagctgagaaagagagagagagagagagatacagaaacaaaacaacattgtccgcaaaagagagatctaagaacatggggtgactcag

SEQ ID NO: 94459 - DNA, 473 bp, Glycine max
  Clone ID: PAT_MRT3847_56307C.1
agacaatgcaaaagaagaacacttgataaaacatgtagcaagggaattgacataaatactcggatcaaaatatagccacctatactacgatcaaacccggagtacatgaacactatagcgccgatctaaaagcaattccaatccctaacttcttagccatggcctggggagggggggatttaacgctacaaggtaacattacgaagctcttgggctggactacgggctatacgggagtcttctaatgcaggcttaaggggcgaccttcttgggcgcggccttagcggacttggcctagggctgggtggcaggagatagggcctcgggagtggcaactgccttcttcttaggtgccgcagtcttgggcttggaagcgggcaaggcggtgggcttagccgaagcaatggtggggtacttgggagcagtatgcggctctgacaggagcggacttaggccgcgccagcttgaaagag

SEQ ID NO: 94460 - DNA, 467 bp, Glycine max
  Clone ID: PAT_MRT3847_56308C.1
acatctcttcacactttttacattacttttctctggatggcatgtcgcaatgttcatccaactcgaataaaccttcaaataaggggagttcagtgtgagggaatatgtgtcatgtgtgaggagaacttggaaaatgcatggcatgtccttatagactgcaactatgcaagacaatgttgagtggaagctggtctatggcatcttattgattcgattattgtaggtgtggagaatttgccagagctcatctttgagtttatggtttgctggttatggatttgcagctttgagggtgccaacatagttggaatgttccgagttgctttgcttcagctagcctcttttgccttcaaaaaaataaagttccttactgtgttggaagatcatagtagcatcatttgcgatggttctttggagtacatggaagggtaggaataggctaatatgggataaaacttcgtacccca

SEQ ID NO: 94461 - DNA, 445 bp, Glycine max
  unsure (1)..(445): unsure at all n locations
  Clone ID: PAT_MRT3847_56309C.1
ttgagttccattttccactgcacaaacaaagcacaacgcacaacgcacacacgcgccatagtcatggttctgccagagtcgctgttctttagcgctccgtcactgtcactatcactgtaactgacatataaaaagcacttttcctctcttctcaaatcttccatttcatggctattctacctcctgcttcttcacttccctcgtcttctgaggggatatgttgctctacttatggaataacaagcaattcaatcaaacttcctattgatggccgaaggtggcatgatcttgccagcacaaggtgcaaaagtccattttttggatcaccacacctcctttggctatccacagggcatgatctgtgcctttcanagggtaatgttggtgcagactattcagattctatacccgattcttcggatcaaatggatgaacaagggtatca

SEQ ID NO: 94462 - DNA, 447 bp, Glycine max
  Clone ID: PAT_MRT3847_5630C.1
tacggctgcgagaagacgacagaaggggggagaaacagggattattattattgtagagctgagaactgaggacaatgtctgctgaatcgccaagttctgctcgtaaagtggttgttcatctcagagccaccggcgatgctcctattctcaagcaatccaaattcaaggtatcccctttcgaccttcctctttaatgcccatcttttatttcttcaaatttctcatcaaaattgttaatttaacgatccccctttacttgcgttcctttttttaaaattcttctggtgtcagttatactttatttgttgctaatacaagtttgtgggtgagagagatggtgcttaaatctgaattgatgatggagatgttatttcccctggattatgtatggttttcaattatgtgggtattctaatttcataattggtgatattaaccctaattgat

SEQ ID NO: 94463 - DNA, 1328 bp, Glycine max
  Clone ID: PAT_MRT3847_56310C.1
tccttgaaagtctttgattttttttgaattccctcctcactcataaatgtatcaaacagcaccgaataaagaacatgaagtttacaatgtgtacgtttttttttgaaagggagaagaaaaaaggttcatgaatatgaccatgctaaataatcttatacaaataataaacacaacatttgaaaatcatatcttaacattgaatgataattttgagaggtttttgatcacagagaagctactagcttttctggcctaacttcttgactattgtggccatgtactttccttgatactcagcaagggccagttctgtttcactagcctgccttgatccatcgccagcaaaaactccagcaccatatggagatccacctctgaccgagtccatttcgaacattccagcaccgaaggtataaccaataggaacatagagcataccatggtgccctaactgggtgattgccgtccaagctgtgcatcattcgcccccaccctgagttccagtgctcacaaatgagcaagcacctcgccaatcgccctcctcggccctgccttgctgacagcccgagtcgaaaatccacttcatctgccccgccatgctgccatactgtgttggaaaaccaatcgcgcaagccatcagcctccaccaacctgtcttcagatatgagtggcactgtctcatccttctcaggtgccgtcctgcgcccctgcaactccttcaattgaatcaacccctttcttcaaggaccttgccaatgactccacattgccataagctgagtagtcaacaatgaaaactttcagctttttcactgctacgggtgctggtacaggcacctcatgtcttgtgttaccaggatcatttgttgggattagactttcaacactaattggatccttttacgctccagaaattggtgcctttgtcttgcttggaaagcaaccacctcctttccccattgaaattcaactttgtgaatatacggtcaaataatgaagtttcttccccattgaaattcaactatgggtgaatatactgtcaaataatgaagtttctaaaatatatacaaataaggttgttctagttttacttgcaaaacaagatacaaagatatttgaagaaggaaacagaaagaatggaatcaaatgttggttaactttgcattataggccaggcaaaattgcaataacagaactaaaagaaaggaagagaaaaaggaagaagagagatggaaaacgtgtaacgtgaacactcgagccggatttgactgcacttatgagctgctttaactaatgagataagatgaatatcgagccgaaatccgaat

SEQ ID NO: 94464 - DNA, 503 bp, Glycine max
  Clone ID: PAT_MRT3847_56311C.1
ggagggtgttgcgatgctttggttctacatttggggccaaaagaacccagattcagattgggagtcattttccacagctttgatgaaaagatccggagatcactatggtaacccacacaaaaaaagattaagtatcatgaagaaagaagaacaaattgagacggaaacccacatgaaaaaaagggagacttccacagagttcttgaaagaaaggaccaacatttcagagctgaaacacatgctgcgcaagatattgaatgaagaagttgattctcatgcctcttaacaagacaaaaatagcatggagggaagtgagtcagaatgcagtgaagcaaaggctagttcttggacaagaaaggtgaaactttccagctttaatagaagcatagaagggggaactaatttaaagggtaatagttctgagtgtgacagtgatccattacagttcttgaaatcagaaaacagaaataaataaggttccgtaatcaagaaccacacccttt

SEQ ID NO: 94465 - DNA, 539 bp, Glycine max
  Clone ID: PAT_MRT3847_56312C.1
ttgactttgcttctgtaatgtatgcatccagctcttcatatggctgcagctaatggacatattgatattgtggagtatttaatcagtagaggggtggtaagtagttttttttacctatattcttcatttgatcttggaactttatgatctgaataagtcattgtttttttttttatcagcaaaaataatattatatatattataataaaagcagtacaagtggtactagtatatatacaagtcagcccttctataatgcaggaatatggtttcataatacagactatacagcacgaattaaggaaccatataactgaccgtatagttaccatagattagcccatcagctaagacactagaccccccttcttacaaatccctccctaatgttacttgacctgtggtggaaaggcacttcaaatcctttttcgagattggttagccaagtccagcatactaatatggcatcctccatcagttagcgttgaagctgtctgatagcaaatcatttcattgaccattaccagctttttccttga

SEQ ID NO: 94466 - DNA, 264 bp, Glycine max
  Clone ID: PAT_MRT3847_56313C.1
aacactgagcatcgtctagctatctcgatcgaactgtccaaggtcctgtcacacaccataatgcctagataacgatggcaaacaccctggtgtgacctcgagctgaagctaaccaggttagtaatacacctaatgggtgagccgtaaagtactgtactaacgcaataggtttcgattgcacccgcgatgcagttaaagcttgtaaatggtcatttaatgttaccaacgcagcagccaattgctggagatatattcgcacaattg

SEQ ID NO: 94467 - DNA, 373 bp, Glycine max
  Clone ID: PAT_MRT3847_56314C.1
tgattaggagcttggcgctgaagcagtgtgcgccggagctagcttacagacccccgtcgaaccctactaaagttttgaagtggcaaaaacctgatgatccacacgagtccgggcattgatatttgggggcgcggtccttggtgggatatataagtctgatagttggcacattagtctggatgtgcatactaccttgccaactatacgagctctagactcacagagcttggacagttatgcacttaagactttgtatggagctgaatgatatttagatctaatacttgaagcctacttacagtttatttccatgccatacccttaagtggccggggggccgttctagaggctgcttgcattggtacgcttgcat

SEQ ID NO: 94468 - DNA, 528 bp, Glycine max
  Clone ID: PAT_MRT3847_56315C.1
cccacgcgtccgcccacgcgtccgaccattgaaggcatttcagtcaacagcgtgaattcagttcagagaagatacaggctataattgatgagacagttaatagtcgaaatcttgattattcacacttcatatcccttccattggccattcatcctgagttggttaataaactcatcagttttcagcattcaatattgggaattggttcttgcatggatgagaatacctatactgaatctgattccaatgaggatgagggtactactactgacaccaaagaagtggaccaactatccaaggaaaattccggtgttgcagttgagcttaaagctaatgacaacagtgaatcggttaaagttaatcttactaacataccccttgtcagttacgcacctaaagcatccaagtcttccgctccatctgacctgggtattgacaaatccatattcatcaagcctaaaacatttcaccttacagtactcatgcttaagttatggaacaacgagcgaattaagacagcctctgagg

SEQ ID NO: 94469 - DNA, 125 bp, Glycine max
  Clone ID: PAT_MRT3847_56316C.1
cttttatgatgattttgagaaccgggaaaccgcaaacaaatgaggtcacatctcgacgcgattgacccatcgaaagctgcatactaatatgagttcgagtttctacatccacgacataaactcat

SEQ ID NO: 94470 - DNA, 229 bp, Glycine max
  Clone ID: PAT_MRT3847_56317C.1
tcttaacacaaaggcccctcaaaccacgatcgtcacactcttttagtgggtcgtatctattcctgtctttctgcacaattacgtcgtggaccgaccctttagtgtaagtgcaatggccatgcctaaacttgtatgtgtactgcatctggcattccttggcatttggatgatcacaactcaagttatagtaacagattctgtctctcactcggatgcaaggagttatgga

SEQ ID NO: 94471 - DNA, 344 bp, Glycine max
  unsure (1)..(344): unsure at all n locations
  Clone ID: PAT_MRT3847_56318C.1
cggcattacccgggttcgaccccacgcgtcgcgatgggtagtttagggaaaaccaaccaagagttccagagtttttggtnttggggatagctagagtgatgcgcgtcacattttcataataataaaaaaatggccacggcggcggttgtagacggtgctactcccacctaggtttccgaccgccaccaacgttacccggtgctctgctttgccttttctgcgtggtgggggcgcaacgccataaccactttgttctgaccttccctaacaacttttcagtgggccgtaaattttgtgtggttggaaccagagcttgttgagtggaatcatcgtcagtagatgcc

SEQ ID NO: 94472 - DNA, 247 bp, Glycine max
  unsure (1)..(247): unsure at all n locations
  Clone ID: PAT_MRT3847_56319C.1
ggacantntgtgaaccagaatttttgtctttctctgtaattgtagaatttttattttcaaaaattttgtgtnattatctnttntngaagctcnttccgctctctgcaatggtngagattngagtnactgtgtcgcgtctttctcggagttcaaaattctggnnctgggnttncgncatttcngncaaaagtntcnatttttnangtttttncggtgcagtnacaacttttnctgtgctnaaacatca

SEQ ID NO: 94473 - DNA, 1085 bp, Glycine max
  Clone ID: PAT_MRT3847_5631C.1
agaatagctgcccgtgaaagacagcgaaaggaatataaaatgatcctcttgaaattattagaacaaagaaaagatgatgatatagactggatttgattcggcgcgtgtagggataatccaatataatctagagggtgcagagtagagtaaaaaaagataaagatgatcgatatgaaattgatgatgatgttgctgatgtggggctctgaatcccaaggccgattactgtctatcccaacaaaacctaacccagatgatgctcctgcctctgctcgttggctcgtctccctcaatttctggggagtcttgaatactatctcatctgatttgggtggagctccctttgggaatgtggtatcatatagtgatggactacctaacgaaagcactggaatcccatacttttacttgacaactctagacccgacagcaagaaatgcactgcaagatgataaagcttcattcacggtcagtgaataccctcttgggacctgtggcaggagagacccaatgaaccctacttgttccaaaatttctctaactggaaagctgaaattggttgatgaaaagtccaaggaagccgaatttgctcgaaatgccttgttttccaagcatccagagatgaaagactggcctgaggatcacaactttcaagtcttcaaattagaaattgaaaatatatttctaattaattggtttggtggtcccaaaccactcacagtggaacagtacttacatcccaaagtgaacaatgttggcctcattctctgaatgctctttgaattgctactccttttgtgggctgtaaatgtacacatagtgtgttcttggagaaattgtaaatagatgtataccgtgtttcaaattgtgtattccttccaagatacccttcgaccatggttatttattcccgtatatgtttgaaatctgtatgtttatgatatgtaactatacacactgatctcgggttcttgcccactgtgggtatatgtatgaaacgatagcaaccattaagtgaaataaaaggtaacagagagcattaattgattgcatgcagttgatatgcttaaaaaaaaaaaaaaaaa

SEQ ID NO: 94474 - DNA, 724 bp, Glycine max
  Clone ID: PAT_MRT3847_56320C.1
atggacgctgccattgccactgcacaaaaggcatcggcatctggccgaaattcagcaccgacattggactggatcccgatctggtcatggcttcatgtggtgatattagcactcatgaaacattggcagccatcgatctcctccttcagcacttcccagatctcaagattcgctacgtcaactgtgtcgacttgttcaaattgatccacccaagcgaacatccacatggcctcagcgaccaagaatgggttagcttgttcacagaagatacacctatcatcttcaacttccacagctatccttggatggtgcaccgcttgacatataagcgccctggaagccagaacatccacgtccgccgatataaagagaagggcaacatcgatacccccttgggactggcgattcgcaaccagaccgaatcggtttagcctggccattgatgccatcgaccgcatgccccagctgaataaccgaggcgcagctgctcggcaggctatgctgaatgcccagattgaagctcgaacggaggcgtttgagcggggtatggatccagagtacttgacgaagtggacgtggaagcgagatgggttgtggagcaaacatacataggaatgtactattaatggagtgctggagacgtaggagtggttagagtgacgagttcgcccagtacagaatgagaactgctctagacactctgcagtttatatatatagtaaag

SEQ ID NO: 94475 - DNA, 403 bp, Glycine max
  Clone ID: PAT_MRT3847_56321C.1
gcggttttcacaggcgttacaaaagcaaacgggactcgatttcaagaattactcaggttcgacctacttctttgtgaacgatttcttaaaggaaagaaaatcactctctgagggcgaaaccagatcttgggctatcatcatatttcccgctctaagttcatttgctgaacactcttctattcgtgacacgactccttgtcacatttaaacttgtgctggatctttactcagctctgtgtgcaatttcaaggtcaagctggtgaaactttggattagtgctgccactctactatctggtataggacttcgcgggtagactttactattggtatgccttttttcacatctcttcttttcacttgatccgcattgacgatgaaagcgcgttttatttgaaaaacac

SEQ ID NO: 94476 - DNA, 892 bp, Glycine max
  Clone ID: PAT_MRT3847_56322C.1
ggcgaagacgacagaagggggagtgatactgctttgcattgattagggtttaggaagcgtttctttgagtgaaacacgaaggaggaatggcgtctctgagaagtggagcttcttcgttgttgactcggctatccaaatcgcttcttcttcattccaaaaaccctaatcctcattctcagttattactcccttctctctcacggctccccggtgcgatttctccccaaaacgacgccgaattcccccacaaacaaggctttctctacccctgtggcctcccctctctccgcttcttcttacctcaaggggacgctccttcatcagatgatcctatgcttttattccccaaaagaacgtatcaaccaagcgttattcgacggaagaggaaccatggattttttgctcggaaagcaaccaagggtggcagaagagtaattgctcgaagattagccaagggtcggttcaggatcactgcttagtatcattgcattgacattggagttaaagattcaatctagaaagttagtgcacttcatggtaaggcccagtgatacaaggtttggttgggaggtggggttggagttttttctgagtacagtctgcaatgaacaattttttagacaactattgtgtatggatatgttttttttgagagcattgtctatggatatgttaacattctgtttattgactatttgaaattctcgtgagtagttgccataatttgtaactttaggtctagttttatgtcgagccctgctgaaattctcgtctgtagttccaataatttttaactctagtattagttttatgtcgagcacctcagaataatctagcttgctgggtgtaaattctttgtgcttgttatgagttctaacttttatgtcaattc

SEQ ID NO: 94477 - DNA, 734 bp, Glycine max
  Clone ID: PAT_MRT3847_56323C.1
attttcatttctcattttccctatacaacaacatcatcattatcttaaccatccagaaatataaaatttttttaaaaataaccattctatttttatttataacaaaaacatcattatttttattttttattttgtggatcgttggttgaactccgatgatagcatgtatcgacatggcattctcggcggacatgaccgcagctctgtcacctcgtaccagtgtttcttcaagccccctccctcattgggcctgggcctgggcctgggctttgagtttcggaggaagggaagaagactccgtagacacctcaacttggtcatcagcgctcaactttccaactctttttccttgagtttcggtctcgactctcagaacttgaattccttccagtccaatgatccatcacagttgtcttggatgggtccagttccaggcgatattgctgaagttgaggcattttgtaggatctttaggaattcagaaaggcttcattctgcattaatggatgcattatgtaacccattgactggtgaatgtagcgtctcatatgaggttccatcagatgagaaacctcaactagagggataaaatagtttctgtccttggatgtatgatatccccttgtgaacaaaggtagagaggatattctttctgggaagatcctcaattatgaattcctttcgtgctgcagaggttagcacaacagaggataagcctcccccgcttgcccttt

SEQ ID NO: 94478 - DNA, 711 bp, Glycine max
  unsure (1)..(711): unsure at all n locations
  Clone ID: PAT_MRT3847_56324C.1
tttttctctctttttcaactttcaattcaagcagctttggaaaaaccaaccagccaacgggttttttttttttcacctcctgaaatttgtgttggtttggtaatataggccttggagtgaaaattcaatattttgcatggaagccagagaaggtattagttctggggttacagtgataggggcagaagctccatcagcttaccatgtggctccgaggagtgaagctccaaaccaggttcatgtccctgatggtggtggtggtgctgctgctacagctgcacctgttggtgtctcacctgtgagtgtggggttggatggaacagttaagaagaaacggggtagaccgaggaaatatgggcctgatgggtctgtaactatggcattgtcgccaatgccaatctcgtcttctgctccgccttcgaatgacttttcatccgggaagcgggggaaaatgcgggggatggactataagccgtcgaaaaaagttggcttggattatctaggtgacttgaatgtatgctctgatggtacaaattttatgccacatatcatcactgtcaatgctggcgaggacatcacaatgaaggtgatatccttttctcaacaaggaccacgagctatatgtatcttatctgctaatggngtaatttcaaatgttacacttcgtcagcctgattcttctgggggtactttaacttatgagggccgttt

SEQ ID NO: 94479 - DNA, 473 bp, Glycine max
  Clone ID: PAT_MRT3847_56325C.1
tacggttgcgagaagacgacagaaggggggtactgacaatggaacaacaaaaggaaaccttccgggtcgggaaataaaaacccgaacttgaaaagaggcaaaactccgatccacgttgaggttggagcttggagtgagtcaaacacgaaggaagaagaatggcgtctctgaggagtggagcttcttcgttgttgaatcgcctttcgaaatcgcttcttcttcattccaacaaaaaccctaatcctcaatctcagttattactcccttctctctctagactccccggtgcgatttctccccaaaacgacgccgaattcccccacacacaaggctttctctacccctgtggcctcccctctctccgcttcttcttacctcatggggaagctccttcgtcagatgatcctatgcttttattccccaaaaggacatatcaaccaagcgttattcgacgaaagaggaaccatggattt

SEQ ID NO: 94480 - DNA, 730 bp, Glycine max
  Clone ID: PAT_MRT3847_56326C.1
aaccaatggtactcacatgaacaaattaagccttggaccacaggctaacaaagatttgcatataagtgaggcactgcagatgcagattgaggtgcagagaaggctcaatgaacaacttgaggtacaaagacacttgcagcttaggatagaggcccaaggaaaataccttcagtctgtgttggagaaagctcaggaaactcttggcagacaaaatttgggaatagtaggacttgaagctgcaaaagttcaactttcagagctggtatccaaagtctcatcacagtgcttcaactcagcattcacagagctgaaggatttgcaaggattttgccctcagcaaccacaaaccaacccgccaaacgactgctcaatggacagttgcatcacctcctgtgacagatcacaaaaggagcaagagattcaaaatggcttaagacacttcagcagccatatgttcatggagcaaaaggaagccaaagaagctcccaacaaccttaggaaccctgaaatcaagtggtatgatgatgggaaaaagaacaccttccttgccccattgagcaagaatgaagagagaagaaactatgctgctgaatgcagtcctagcaacttatccatgtccattggacttgaaagagaaacatgaaatggaagcagcatgtatcccgagagactaatcacagaaagcccatcagatggtagaatcaagccacaaacaatgaaaccagtggat

SEQ ID NO: 94481 - DNA, 1944 bp, Glycine max
  Clone ID: PAT_MRT3847_56327C.1
cccacgcgtccgattgcctttctttattcacctttatagaacataaatttacagttatggtgaagggtacttggtggtccacagcacgtcaatctctaaagggcctcttgttaaattttgattccattaacagactgcagaagattgatccttttcatatgttcacattttctatagcaacggtacagaaagttgaagcgttagagtactaacttagtgaaacctttgttactaacattttttttattgatgtctaaactaacccccccccctgtaacagtagtatttattttgagctttccatttttctctctttttcaactttcaattcaagcagctttggaaaaaccaaccagccaacgggtttttttttttcacctcctgaaatttctttggaagaagcttgcacaaggtggagtcaccggtgttttccgtgttttttctttctcagtttgtttttgtgttttattttctggtgagttcagttgagtttatgagtatcttgttgagctgaaaaagaaatctgaatacaagttttcagctttggaagaagcttgcacaaggtggaatcacagagacaggtgttggtttggtaatataggccttggagtgaaaattcaatattttgcatggaagccagagaaggtattagttctggggttacagtgataggggcagaagctccatcagcttaccatgtggctccgaggagtgaagctccaaaccaggttcatgtccctgatggtggtggtgctgctgctacagctgcacctgttggtgtctcacctgtgagtgtggggttggatggaacagcagttaagaagaaacggggtaggccgaggaaatatgggcctgatgggtcagtcactatggcattgtcaccaatgccaatttcgtcgtcggctccgccttctaatgacttttcctccgggaagcgggggaaaatgcgggggatggactataagccatcaaaaaaagttggtttggattatctaggtgacttgaatgcatgctctgatggtacaaattttatgccgcatatcatcactgtcaatgctggcgttagaggacgatgaaggtgatatccttttgtcggtgaacaagaatggcaatttcttagagcatatgtatcttataaatgttaatatttcggggatgagtctggacatgcctactgattggaatgttgtaggtggaggagtgctgttcttgtagccctgaaaataagatatggagcagcaactgttactccaaccattgcagtgtctctctacaccaaaccaatgctgaaaaatgtatgtagcacatgtactgcaatccccaatgcctttgtcaacatgatgccgaaatcagccacagatattaacatatctttgcctgatagttaggttggcgatcgaggggcgcactctctatcctcaagaactcttgctgacaacattcatgactcagctgttttattaatgtttagtgttctctctctttctctcactctcatttaaagattgtttcaaacgtgcttaatgtctatcaccataggatgtagtttcagtgttgtaagttgcagctagttagagtatctgatatatttatcggctgattaggtagatgctgcattctgcagatttatgagtaggctaatttggatgtaatgaaaacttgtttgcctatttatttatgactgaatttgtggataatttcaatgttgtaagttgcagcaagttatagtagctgatatatttatcggctgattaggtagatgctgcattctgcagaattatgagtaggctaattcggatgtaatgaaaacttgtttgcatatttatttatgactgaatttgtggaagaatattttttttaaaaaaaaaaaaaaaaaaaaaaaaaaaaaaaaaaaaaaaaaaaaaaaaaaaaaaaaaaaaaaaaaaaaaaaaaaaaaaaaaaaaa

SEQ ID NO: 94482 - DNA, 190 bp, Glycine max
  Clone ID: PAT_MRT3847_56328C.1
cctttactttttgtgggggcttctataaaagagtggcggatttccccatcacaccagggtgcaagattacaggccgtggagcgggctctcaaacgtcttgaggcaactgccatttcatctaattttagaacttgggtccaacctacagatcgtgtacaggcgcgttggtaactgaatcaactggttactg

SEQ ID NO: 94483 - DNA, 243 bp, Glycine max
  Clone ID: PAT_MRT3847_56329C.1
ctcgagacgctcgagccgccatatttatgatcattacttttttgagcagtcaacagatatggttgattaaacacctgttatgtataggttatgtacagataacagtgattcttacttcttcctcaacaaggtaacatcccatttcccaattccatctggcaacaacagcaactacttcacttgttgttagatactcatttcatttgaagttggtctagaatggatggagtggacctttgtatg

SEQ ID NO: 94484 - DNA, 405 bp, Glycine max
  Clone ID: PAT_MRT3847_5632C.1
tttcagtctaacccggatttacttagttagttgggacttgcttcttagcgtgtagtggatcaaccaggctagctttcctgtagtagagcgcggggagagtgaccatcagggccttgaatagggtgtgccttttttttctttttttaggagtactcttgaatgtactatacagtaggttctcagtgccctaagatcccaatcccagatcgagttccaatcgcagaagtgttctcaagcgaatggcttttactcaacctcaattcattcagttaggacctccctttatgtcatttctatccttgccagcgtgaggagtcagatcggattctagcacttgcatggaatctgggatagtggcaattggcagcctctcttggcatgagcactagcatctagctaacatcg

SEQ ID NO: 94485 - DNA, 462 bp, Glycine max
  Clone ID: PAT_MRT3847_56330C.1
caaaggaaaaatgggaaggggcctggaacgaacgggcggttgggcacgggggctatgttaatgcccatggccactttaatccagttggttttccactctccctatctttaaaaaaaaaaaaaacgctggggggggtgggaccatgcaacgccccttgggattcgtaaagcgcacgggcccggcccactgggaaaagggcctgaaaaacaatgacccccctcaaagccccctcctaaaatttggaatcggccgggaaaaagggaccattttgggcagggcgccgtaatggggcggaaccgattttggaagttgcatgtaggccccctgaaggcgctggaacagaacgtccataattttgggcccaacgtccgggatgtcggggcccaaagtgtaaatgttcaacacgagggggccaagccactaaagacgcagttaaacgttggtctcaaacctcgacgggag

SEQ ID NO: 94486 - DNA, 325 bp, Glycine max
  Clone ID: PAT_MRT3847_56331C.1
ctaagctcggatcttctatagaggggggcctcttttttttttttttttagttcagaacataaagacctacttgatgcctcctccaacaagaagacttgaaaatattacggacacaccgaaagcagttgtcatgagatgacacgctcaaaaagtccagttacacgatcatagatgactaatttaagaaaactacagtataagtaaattgccttgtgccatgctgatggaacctttctgcacgcgctgatctcaagtcattgaattggaggtgagtaaaacattacacgccattttgtgctttaacgccatatattcaggctgagta

SEQ ID NO: 94487 - DNA, 733 bp, Glycine max
  unsure (1)..(733): unsure at all n locations
  Clone ID: PAT_MRT3847_56332C.1
taccatgaattttcccttaaggatatgatgtggttatttagttttaatttttaaacccttgaaacaatggtatgcaaagtattgaggctttgttgtatnttatgcatatcaatttttatataaaagtgttttatatggtaagtgtctggactagagtgctggcctgtagctattcccttgatgatcttggtgtcgaaattnctatcaaactcaaagtagatctttcctcgcatttaagtgaaaacaaatggggtagattctaggggttatacattagtcattgctagttttataaatatttaaattaccagatgattattttaaatattatgagatgaatggccttttctttctcttgtcggtttctggtacttttgattgttgaatgagtgaaaaatagattgaaggtatgatgaaaccgtgtgtatggactacacaatggaattcgttttatataatattattgcaacaaatacaaataattataggagattttattcctatgtacatgatataatatgcctataactataaatcggattctaacatccctataattacaaagatcctagataaataagaaaacaaatcataaaatatagaagaataaatcctaagagttcatctaggatactctaacatattctaagataatatcatttctaacactcccccttaagttgaaccttactaagctttcagcttgttacaagaaaataattcctttccccac

SEQ ID NO: 94488 - DNA, 1678 bp, Glycine max
  Clone ID: PAT_MRT3847_56333C.1
tccgggtgcaatgatgagacgaaacacacaagtgtgtttgggtagtggacgttgccttatggtttcgccgtgagctcacattgttaacgactaatccttcgaccgaggccggggaaaaccttaaacccttttctcgcctccatcgcaggtttctacctatattgctgttctttgcttcgattaggatcagtcaccatgtatcttcagttttacataaacgataacggtgacaaagtttacaccactaagaaagattcgccgctagggctacctacacaatctgctcatccagcccggttttcacctgatgataaatattcaaggcagagagttcttctgaagaagcgttttggattgttaccgacccagcagccacctccaaagtattgagtgatatagaagctctactttttaagtgtcttttgttctatgtttagacagtattttgtgaacaagtgctggtgcctggtgtaaagtgattgagccatttatgctttgtgtttttgaaccaattacatcaaaatctggctcacgctcacgttagactgaagtgacgaatgttagtttgcactataggattttgagttgtgtttgcagtcaatttaatattctcaaaattttatgtgttcgaatataacaattcatactgaattaaatttgtcagattttttataatttcgtttttgaagatttttaatgtggtctacttaataatctcattgttagctttaaattttgttccaactgattattgcaactctttttgtaagattagcttgagaaattgtattggctcatgatgctaagttatttatcttagcggatttcagtgagatttctatcaatgatctgattgttacacacactgaagccaacttttaattttcactatggttttgttttgaaatgcccgtttgtttatttcttgttaagataattcgtggccttaattggtgttttgctatttatgcagcattgtaaaggcaaactgatttgaacaatgagggtgactataggaaattgaaatatggattgtgatcactgatcatagatgggatgatcaaaagagattcatatgatgatattaaggacatctgatttgtctaatatccgcttaaagaattaatgtacatggttatatgagcaataattttgactgaatcttaataacaattttggtgacaaaaaccacagcaatccaagctggagttgtgacattgacttaatatttcttcatttaatatttatttgaatcatatgactataaatggtcatttcgaagatattcatagctttttcctggacaaattatcatgtaagaagccaagaaccttaaacttcaaaggacgagtagtgttttattagaatattggttaaagaatccaataagaagattttttttattggaaaaaaaaaaaaaattaagaatgtttgaactgagcataagctatgcccatagcagtacatcataggaaatgccactgttccaggaatccggctatactactggtactgttccggcaacaaacccaaagcacatgacaatatctatttcccttcccctgcatatagcattccttctgagccctccatgacatgaatgaaaattaatcccaccaacattctttttctttaccttttggcactctatgctacaattctttaaattatccactta

SEQ ID NO: 94489 - DNA, 336 bp, Glycine max
  Clone ID: PAT_MRT3847_56334C.1
tcctctaaagtgggcgggcctgggtaatttttttttttttttttttttttttacagttatacaacacatagctaattaagaccatgcttttttatttctttttcacagaaagtacgaattccttttagcattgttcgagcgcataaatatagttttttgatgtaaaagttgttgacttcaaatagtatatgctaaagggcaaatttgaaaggaatggttttctcacacaaatttgattttctcctcttataaactatctttatatcttttgagtatagacgactaattggaaaggaatggtttttttcggacgcgtgggtcagacccgggaatctg

SEQ ID NO: 94490 - DNA, 764 bp, Glycine max
  Clone ID: PAT_MRT3847_56335C.1
attagcacagcaggtatccaaaacccaattttccatccaagattttcttgaatgtacacaattacactcatggaaaacacagttgatactccaactgaggtataataccaattaaagtagctatccaagagcctctcatcattggaccttactttgattgtcaattgatctgctccaaatgcaatggaacaaggtctaacacaaccagctccaatggaaattaatcccagggaaaggaacaacacagctagttgggcagctgaagcagagttgcaacctagcatgagtgattgacaggaaggtcttagctctgggatcattgcagttaaccacaaagtggttaaaccaagaaggctggagaaggaaccgatgcaaatgacgatgaatctaccaaagtaagagtctgagagaaaggccccgaataaggataaaacgctgcacatggcagaccaagtgttaattacttttgtgccctccacaatagccatgccgtaatcgttgctcagatacagtatcatgttaggcatgatcccgtagctcgccaccttctccagacactcgttcactatgatgaagggcatggttcttaaaccaccctttccctttgtgggtttatcagaagaagtgccattttctaagagcttctcattcgctgcaccggaagactccatcgcttttcttttctatgaagtgtggcgttgaattgaatgaaagagtatggtgcaaagaaattaaaaggcgtaaaacatcggagtttatatgtg

SEQ ID NO: 94491 - DNA, 310 bp, Glycine max
  unsure (1)..(310): unsure at all n locations
  Clone ID: PAT_MRT3847_56336C.1
aggcacgcnnncgnaagnacggaannaggnnngagngngaaantagacngcnagaggtcacngnangancgangtngtcgnngncgaanttnaggncagaataataattgnagaggcnngatggaanagaacaaagnaactcctagantcnggngnagggaggaagaggaaacangaggangaaaccctgctnntnaagaccngncnnananangaananananangcggatngaccggntanaacggaactcnatgnnnangcaaatcnangcgaagnncntcgggcatggatttggangantgccgat

SEQ ID NO: 94492 - DNA, 199 bp, Glycine max
  Clone ID: PAT_MRT3847_56337C.1
ccctgtagcaatcatgtcgcatcgaagtcgctgaggatctgcgggaaacaagttccgcatgtcgcttggtctaccggtggcgaccacctttagctgcgccgacaataccctcgcgtcgagcctctccatcgtctcactgcaggggatcaagggtaggctgaaccggttgccgtcagcttgcgtcggagacatcgttatg

SEQ ID NO: 94493 - DNA, 332 bp, Glycine max
  Clone ID: PAT_MRT3847_56338C.1
tatggtgagtgttgctatttaatttgatgaatttggggtttggttcaaattattattgtgaagctttgttagcagcagtagcagacacaagaattaatttcgatcacgcatctctcataaccctatttattattattgaaattattttttattcgacagtgacagatagaccctcatggcgggtcactgcttcttctgtctctctctctctcttctcaattatggagggattggattggatgcattgcctgatgcaaccactgccagaaaaaaaaaaaaaaatttgtcgaaatttcattggaatcaaaatcaaattttcgagccttactttg

SEQ ID NO: 94494 - DNA, 472 bp, Glycine max
  unsure (1)..(472): unsure at all n locations
  Clone ID: PAT_MRT3847_56339C.1
gcaacacgcaaacttcaggaggataaggtggaagaatcagaagtagagctttttgaggtttatgatgtggtcctatacatgggcataattgatatattgctgagactccaagaacatgcagtctagagaaatttgtttgaatagggattctcgtaattttttatccatatgaaattcatattttagatcaagatctttcaatgttgtattgctattaattttatctttgtctgtatatcttccttgagtagaccccttcagatcataacgacggtgaatatgaagttctgtgcagaacatatttcccatgaccacaaagcgaacctttttaccacctcttagtgttattcgatggagaccaaagaattttgtaataagagtattctcataacttcctacatgatgatagtatttaggaagcatattgagcataacctttagttcatattttttcagtgtctntatcacgaat

SEQ ID NO: 94495 - DNA, 555 bp, Glycine max
  Clone ID: PAT_MRT3847_5633C.1
ataggataatggcaaaggtatctctgtttgtggtgtgtgtcgtttgcattctggcattggcctctgctcagagtgctacaaatgtgagagctacttatcatttgtaccaacctgagcagcataactgggacttactcgcagtcagtgcatattgttcaacttgggatgctgacaaatccttggcatggcgcagcaaatacggttggacagctttctgtggaccctctgggcctcagggccaacaatcttgtggcaggtgcttgagggtgacaaacactagaacaaacgctcaggaaacggtgagaattgttgatcagtgcagcaacgggggcttggacttggatattggtccgttccaaaagctggacactgacgggaatggcattgctcaaggccatcttattgttaactacgacttcgtcgactgcggtgactaaactttgactagctagcgttggttatatgcaaaaggaattgaataaagaaagccatacaagtgctttattcctgaatagtaataaaataaataaatgaaagcaagtaattaatagtatt

SEQ ID NO: 94496 - DNA, 463 bp, Glycine max
  Clone ID: PAT_MRT3847_56340C.1
aacccaagggtaatataaattggaattcgtccttgggcaaaaggaatcctctccccctcttttgggaatcaaaacccccttataaaagcacacaccccctttcagaaataatccgcttcccagcccccaaacccctctatcgggggaaacctccccccaatcgaaggattcgccgaaaccctttttttttttggttaccccaaccccagcgacacctgggcgaacaaagtttgcttcccccccccctcccctggggaaaaaaaaaaaacccctggcccttgagatggcccccggcgcgaaaaaaaaacaaacccccccccccccgaaaccccccggggggccacaccacggccccccccaccttgaagcccgaccccaacccaaccccccctgtgggggaccccccccaatcccctcttgcccagaacaaccccacgggtttcaaaacttaaaaaaccccccc

SEQ ID NO: 94497 - DNA, 617 bp, Glycine max
  unsure (1)..(617): unsure at all n locations
  Clone ID: PAT_MRT3847_56341C.1
ggctgtgaggctgaatcacttgatcttatggtagaaaacaagacaaggcatcaacttttgattggcatgatgagatgggtctgttttgcattcataaaacacttgtccctttataatatgccagatgctttacaattatacattaaattaatatagatcagctgattcagattcttttgttctcctaaattaaggtgctgggaaagtttattcttagtaatcattttgtgagaataaattgtgatgattatcaactggagccatagcttgcagcatattttggaaaagctaaaaatttgcatgtatttgatgatatgccatagctgggtcatattttatttagtaataaattgatgccaaaactaatattttgttntcttttgctgagttattctttgtcatttttggttattcttattcttgcgtctgtgatgggcatcgttctcaacttcaacatgttcttatgcacaaatagtaattcagccttaactactacaactattggtggcgttttcaaagggattggtttccacaaccttgttttcttctttattgggtggggttcagtgcctgcctttaattgtggctggattggttatcatacagctggtggtgtt

SEQ ID NO: 94498 - DNA, 468 bp, Glycine max
  Clone ID: PAT_MRT3847_56342C.1
gaggcgcgcggccacaaacacaaacacgcctccgcccacgcgccagcgctaaggaggaagcgggagcagcgaaaccaacctcggacgcggttacagtgggaaacgagtgagagaacaacaagaaaggaagggcgggccccggtggggtgggaccagggggtggaacacacggagcctcactgttgccgaaaaaagacactaactgggggggtgggggcgacgcacatattatgtggtacgccagcgcccgaacagccctaaatagcccgggaggatgcacagtgagacaagatcgggacggcactacacgatagaagactacgaaggacgtggatgccggactaagacaagggtggacaagatgtgtgggaacgcgtgatcgagaaggcaaaaaaacggcggaaagagctccacacaggaggcgcggagacccagatggagatggaagaccaaacggacgcgatgtgc

SEQ ID NO: 94499 - DNA, 1348 bp, Glycine max
  Clone ID: PAT_MRT3847_56343C.1
gaacaatcagaatctgaacgggacttttatgaagccctgtttgagagatctaaagttcaatttgatcagtatgtcgcacaaggaaaggttcttcaccattatgcaaatatccttgacctactaatgcagttgaggcggtgttgtaaccatccatttttagttatgtgcggaagcgatacccagaaacgtgcagatttaagcagactcgcaagaaaattctttcagactaatactgaattccccgatgaaagcaatcaaaatgatccacggcagcaagcagagttgaacaaacttgcaagtagattacttctaaaatctgcttcttctttgcactcggttcaacctcatgcatacattgccgaggttttggagaatattcaaaagggtgacatcatagaatgctctatatgtatggaatctccagaagatcctgtgtttacaccatgtgcgcataagttttgtagagaatgtctatttagttgctggggcacctcagtgggtggcaaatgtccaatctgtcgtcaattgctccagaaagacgatctgattacttattcatctgaaagcccattcaaggtcgatattaagaacaatgtgacagagtcttcaaaggtttcgaagctatttgaattcctgcaacgtattctgaacacatcaagtgaaaagagtatcgtcttcagtcagtggacatcattttttgatctgttggagaatccattgaggaggagaggaattggtttttttgagatatgatgggaagttgactcagaagcagagggagaaagttctggatgaattcaatgagacaagagagaaaagggttttgttaatgtcactaaaagctggtggtgtgggtttgaacttaactgcagcctcaaatgttttcattatggatccatggtggaaccctgcagttgaggagcaagcaataatgagaattcatcgcataggacaaaaccgaagagttgtagtgagaagattcatcgttaaggacacagtggaagatcgattgcaacaagttcaagctaggaaacaaaggatgatatctggtaccctcaccgacgatgaggttcggactgctaggattcaagacctcaaaatgcttttcacatgagatatgagataatttatttatttagaagctgatttatttctctagattcttagacctgggaagccaattttgtataggttgtcggatcctttctacaagctaaaggcttccttttcttttgtgtacatacatgaaatgatgatatgatcattctgaactctaaaaggaagcccactgttttgtaaatcatgaggctttagtggttatggtaaaagggttaatttcattttggtc

SEQ ID NO: 94500 - DNA, 418 bp, Glycine max
  Clone ID: PAT_MRT3847_56344C.1
ggctcgagggctaagagattggtccataattaaacaaaatgttggctatataccacaatgcttatgctcatccacctgatcagctcaacaaccctgcatcttacacaggactcaagaaaacaagggttcccgtcgaaactcttaaagatcttctactccaccatactcacaacactagctctatgagcttcggtgatgctgcggacctagcttatgtccgtcctgatcaatctttgtcttcatatcaaacgctcgcaccgtgcgatccaagacctctatggagtctctacggggagcttgagcaacttgtccatactatacaagcaatgtggattgccaaagcatactgatgaggacatgcttgatattgaagctagcgatactctacctgagctgtgatcataccctgcagatcaag

SEQ ID NO: 94501 - DNA, 328 bp, Glycine max
  Clone ID: PAT_MRT3847_56345C.1
aaaccccccccaaaaaaaaaacattttttttaaaaaggggttttgaccaacccggggttttttctccaaaaaaaaccggccaaggcctggaaaaaccctcctttggaaaactgtatataaaaccccgggtataaaaggcgggaaaaaaaattctttttgctcctgaaaacttttttttgggggacaaaccggaaaaattttttttattggggcccccatttcctttttataagcccccccttcaaaaaaaaaaacaactttttggctaaacctcggggggggacctgccttttcaggggcattttttttaattgggaaataaacgggg

SEQ ID NO: 94502 - DNA, 111 bp, Glycine max
  Clone ID: PAT_MRT3847_56346C.1
actcggtctcaattcgacccacgcgtacgcgcactcctagtggcaagtacatcccaccctgctttcatcatcccggccatcgcgcttctgggcatgcccctattgaaaccc

SEQ ID NO: 94503 - DNA, 462 bp, Glycine max
  Clone ID: PAT_MRT3847_56347C.1
gggaaaggcgagaaccccagcaggcaccggaccggaagacccgggaagacccaagccctcacctaaaaacccgaacacacgaacgaccaggcggggggaagggaaaagaacccgccgccccacgcaaaaagggggaaaaaggcaaaaggagacccgccgccggggaaggagaaaagaagacagagatgccaggaaccagagaagaagaggcccacaacaagccaacagaagaaccgagaaaagcgcgcccacaaagagaggcagcgaaagacccaaggaagagaaacaaccccgccacaaaaaaagagacaaaccgaagacgcgcagcaccaccacacgccccacggaggacaaccacgcggagggccacaaaacgagaaaccacgcgaggcacagcaagaagaaaagggacaagccaagacgccaagcaggaaacaacccagacaccaaggaaaggacggg

SEQ ID NO: 94504 - DNA, 516 bp, Glycine max
  Clone ID: PAT_MRT3847_56348C.1
cccacgcgtccgtacatgagatgctgaggtagaacagttaatccaggttgcactgctttgctcacaaggttcccctatggaccggcctaagatgtcagaagtggtgcgaatgcttgaaggtgatggcttggcagaaagatgggatgagtggcaaaaggtggaagttctgcgccaggaagtggagttggcccctcatcccaattccgattggattgttgactcaactgaaaatctacatgcagttgagttatctggtccaaggtgactttggcacaacagtaagttaaagggagaaaatagaattatttatgacattttttcagctataatagttttctttcactcttgtcctttcctgattacacgtcctgtaagtcaagtccactgcattgtattcatttacatttgtgcatacgggttgctttcttgagttacaaattacaatatgtatcatatgctgtagtttgatgaagtgaaattttacttagatgaagccattggcgctcaacttttgga

SEQ ID NO: 94505 - DNA, 607 bp, Glycine max
  Clone ID: PAT_MRT3847_56349C.1
ccacgcgtccgagaaaccttccagcctcagcatgagtcccattagttccattggtcatttcttgatcctgttctggttgataattttgttgaccttgcctcattaccgtaatctacaataaggaaaaaaagctattctttatttcctttgggaaatattctgatctgactagccaagcgatagaataattaactcttgaggttaagctatattattcttaatagggctgacatagggaatagttagggtttcatttcctttccaagcttcacattgcctgtcagaatatggagtcatgtcgcccacgattatgcattgatttggatccctctaagtacaagtgactggtatttggctgccctgcagtaatatatgatgttcaagatagcagccacagccgccgccaagcatgaggcattatattccattccgcatggtttctttatgtgggccccttagatgttgcacaagatggatgtgccaaaacctgatgattcattctctcaagtttgctcctaacagtcagtcgcactctttatctgtataaaatgctccaagggaactcgtctggacagggttaattggatcttgtataggtttggggtat

SEQ ID NO: 94506 - DNA, 381 bp, Glycine max
  Clone ID: PAT_MRT3847_5634C.1
aacagattgctcatgacccagaactaattaagtacatacataaaaataagcggagctgactgaataatggataactatcgcacctgatcatcattgatttcacagttaaaattgagaatgggtttatgagaatgtgtattttaaataacttattttttttccttcatagactaaggacttaatacgtttttacacatatggcattatatgattactgatataactagttatttcatgactaattatatacctatattataaaaacaataactaattatattaaattatactcatattataaaaattacttattattataatattcacttatgatctagataattacttattaaatatgattataattatcttaatattcag

SEQ ID NO: 94507 - DNA, 487 bp, Glycine max
  Clone ID: PAT_MRT3847_56350C.1
tacggctgcgagaagacgacagaagggctgtcaagcactattttgtgcctgcatcttgttctcatggtgttttctctcttgtaacaaagattcgcagtgatagcggtgacaagggtgatggaggtgcccaaacgttccatcctgaccatgtttgatgatgccaaaggaaaagggtggggacctaatcttagtatttctgattgtacaattgaattttctaattctaaccaaaacaatagtgctgtgataaacagtagtgggagcaataacaatccttcaaaaaccaatcctatgtatgcttgctttttatgtatatgtaacttcacaagagatgaatgagaaaaatgtgattcgaatcaaagattccactgaatgtgatcaatcagattttataattaatggaaattaatcatccgctgaacctgtggataccttgcaccaaacttttatttataataatgttcaattgttaacagaaaatccattt

SEQ ID NO: 94508 - DNA, 349 bp, Glycine max
  Clone ID: PAT_MRT3847_56351C.1
tcagattcataatattatctctttttcgttttctctacgttttcactatttctgctaatcgtaaaattaaaaaactcaatggcctacacaattatcctccaacatcttacattacctttcctattttttcttaaaatatattccatttacaatctacaaatatatcttttccatacataccctattcaaaataatttcattctaattaccattcattatccttcacattattcctttaatccacccaatatttcattcaacacaatattttttcacccatatatatatatcaattttatcattttcctttatatatttaactatcaattctatcctctctataaccatt

SEQ ID NO: 94509 - DNA, 906 bp, Glycine max
  Clone ID: PAT_MRT3847_56352C.1
aattcggctcgggctctttctttgttttccgtggaaaccaacctatcttcctttgttattttcattctgataaaacaaacatattttcttccacctttttccatctttgcaaaggggataaagggttgctagttgctaccatttatggttttattccgccatttgaaggaaccttatgctcttaaaacaaataaaacccaaagggttctcttgaaaaacaccagaactttcatctaatcaaaacacgtgttggccaaaaacatcaccttctctttattatcgcatgcaagagcttttttagatgctcctttgtgttcaagattgagagaaaacataacctggaaacctatgtcgtctgtgccggcacgaacagggcgacaaagacagcgttatgaggacaatttgcgccttgtctctggatgtattccctatagatggacaaaggacaacacagatcaaatgggggaaacccgggagatatagaagtacttatggtttcttcaccaaacgtgatgaccttgtattcccaagggtggatggaggatgatgagactgttacagagtcttgcccatggcatggcttcttttattacctttgtgacgttaaatgaaggtgcctaacatgtatttaaaacatgccgaatttgaatcctaactcttgtgtactaagaaaatttgattgggagggacaactcaaattttgagtgtttcagatcctcaaaggaaatttgtctccgtgaatgaattgagatactcctttgcaatcatatcaaaaccgcatcaagtaattgttggaaattagttccacatgcttgcctcaattacttggatgtggtttatatatctattaagaacctttacaattggtttttgtgattaaatctaacatggtatttaacaaccatc

SEQ ID NO: 94510 - DNA, 807 bp, Glycine max
  Clone ID: PAT_MRT3847_56353C.1
agattgcaatggctcagactcagtggtataatacctctttttttgggtcaatgagcaaatattttacaatagtcaaactttagaactgaatcactaacacggtcctagataattgattagtttactcaaatcccaaaacatagttcaccgaacaggaaacaaatactcggtgtcgccatgatctgtaaatgtaattaacagtaaatatctcaataaggcaaaaggatttacagataactttggtgtagaaaataaaacttcgcgctccaaaaaggaaatggtaatggaagttctcgaatggagaaatatgagcaaatataggaaataaagagatcctgacaacaactggtaagataaaaagagcaaatcattatcaaaagtcatcatcatcttcctctgcgatatgcttagccaattcttgctcttgttgatgcctctctctcctcttctcagcactttccttttccttctgtgtgtttggtggaaaacgcagtgctcgaactgcctcattgtgcatgttaagacaaaaggcaatccgagaattaaatgccaactgaggctcatttgtagataactactctccagtttccttggataccatccacccattggcatgatccaatgaagcatcaatagccccatcacggatagcctttgctacaatgctctcagcgtcagcaacaggacttgcagagttcaacctcaacttttagctacatcagctagcgagatgcgtgaatatgatatgctgatgttgcgtaaaccagtccggatgacattatgacggagccgaacaatcaaattatg

SEQ ID NO: 94511 - DNA, 1473 bp, Glycine max
  Clone ID: PAT_MRT3847_56354C.1
ggctcgagccctctctttctttgttttccgtggaaaccaacctatcttcctttgttattttcattctgataaaacaaacatattttcttccacctttttccatctttgcaaaggggataaagggttgctagttgctaccatttatgggtttattccgccatttgaaggaaccttatgctcttaaaacaaataaaacccaaagggttctcttgaaaaacaccagaactttcatctaatcaaaacacgtgttggccaaaaacatcaccttctctttattatcgcatgcaagagcttttttagatgctcctttgtgttcaagattgagagaaaacataacctgggtatgatatgactacgagcatgccccgttaatgtttcaacggtttttgtttctttggttcattttcagacacccccatattcttcttctcaattgaaaaccttggtttttgaatctcccctgttttcctttgtgtgcttcaagttctttttgtctttttctagaaacctatgtcgtctgtgccggcacgaacagggcgacaaagacagcgttatgaggacaatttgcgccttgtctctggatgtattccctatagatggacagaggacaacacagatcagatgggggaaacccgggagataatagaagttcttatgggtccttcaccacgacgtgatgaccgttgtatgcccgaacggcggatgggagggtgatgagactgttacagaagctgcttgccgcgaggctttagaggaagcaggagttaaaggaatactaagagaaattccactaggaatatgggagttcagaagcaaaaccagtcaaggcttatgtagcgtggaaggaggctgcagaggatacatgtttgccttggaggtgactgaagaacttgagacatggccagagcagaaaaaccacgctcgccaatggttaaacataaaagatgcattcaaactcagccgatatgactggatgtgtaatgcacttgaggcatttttgagagtaatggcagaagacagaaagcctgagaaccaagaccagaatgtggaacttgaacccccttcaattgtagaagatatgccagaatgccaaagtatgtcacctaactgctataagagatcctctactatgcagcaccatggtatgcctcctaaagccaatcttctgtcacgtgctactcgagaaatagccatccactttggttattgacattatcaggaggacacttttgaaatatgcttatgtaatggatcaacattgtgcaataactccttaaaattgtgaaagaaaaaactatgaagttattatggcttggatgcacaatccatcaacttcattgttgtaggctctttctttctttctttccaatgtgaccatgatgtaaaatgtggtggtgaaagtctcaagtgtatatgatcttaacagttgtttgcttcaccccaaaaaaaaaaaaactcgagactagttctctc

SEQ ID NO: 94512 - DNA, 2811 bp, Glycine max
  Clone ID: PAT_MRT3847_56355C.1
acggcccccacgcgtccgacaacagtctacttcagatagttataataactctgccccattgtctcgggtaggaagctccaacagtaacagttctgccagagttcagcagaagtttactaaagaaaaccgaggttctacaagagaagagcatgttgacaattttcattatcaagatggccgaagaaatgaggtttattttgatgatagaacagcaaattctgagttgtccagtgcacctcctttgagctcctttaagagtaggacctcttctgaaagctcatgggatggatcatcagccaaatcctcaaaatcaactagggagagaagggggaggaaaaatacttcctcaatagcatctcctgtttatgccaagggtaagaatgtttcagaaacttcatctaatcgagtagatgatgaaaatagagagtggactcctttgtcgaccatggcatctaacataccagaaagaagcaattggcccacatctggtacttccatgcatgttccaaggaatcaaatatctggttttgaaactgcccagacaagtggatcagattctccattacccatagctccggtgcttttaggtcctggttctcgccaaagagagaattctggggttgttccatttacattttatcctactgggccacctgttccctttgttacaatgctttctttatataattttccaactgagtcttctgacacttcaacaagcaacttcaatttggaagaaggggcagataactgtgattcaagtcagaattttgattcatctgagggatatgaacacattgaggagaagcgtccggcccacttctagtacttctatgcatgttccaaggaagcaaatatctggttttgaatcttaatagacaagtggatcagcctctggataaatctgcaattcggccgattttggcaaaactcacgtcttccgccttcaatgacgtatccttcacctggtatggtgcctcctgtttatttgcagggtcgatatccttgggatggccctggaagacctatttctggtaacatgaatattttcagtcagcttatgaactacgggccacgcctggttcctgttgctcctctccaatcggtttctaatagacctgccaatatttaccaacgttatgtagatgatatgcctcgatatcgaagtgggactggaacctacttgccaaatccgaaggtttctgctcgggatcggcattccactaataccagaaggggaaattacaattatgatagaagcgaccatcatggtgatagagaaggaaattggaatacaaactcaaaattgcgaggaactgggcgtggccataatcgcaaccaaaatgagaagcccaactcaaagacagagcggttgtctagcagtgagagccgtgccgagagaccatggggttcacataggcatgacaatttcattcctcaccagaatggtccagtccgctcaaattcctcacagagtaatccttccaatgtagcttatggaatgtaccctatgccggccatgaacccaagcggaattcggctcgagggaccaacaatgccatctgttgtaatgttttatccttatgatcataatactggttatggttcaccagcagagcagcttgagtttgggactttgggaccaatggggttctcaggtgtcaatgagctgtcacaggcaaatgagggaacccaatctactggagcacatgaagatcaaaggtttcgtggtggtcacagccaacgatcttccccagatcaaccctcctcacctcatgtctcaaggggtccctgattctgcggtcaggtcagtggccaggagcaatttttgaaaaaggaggatgttcctccttattcgttctaggactgggcatggcagggcatgtcactggggtatactatctgtccattttcatggcattattgcactttaaaaagaaagaatgtaggtccctagtttgtttgtgcccaggctcttgcatgtacacttacaggtgattaaccaactttggttaagtttgtccatccaagacacccatgtttgaggatgaaaacaatggggacaaagaggatgcaggactctcctcccagtctctaccgaaagaaaagaagggatggatggcttttggtgattagatttttattaaaagtttagacacatttgtaacccaaccaaagtagaaaactggcttagattcagaatttagaaaatttaccatgttatacatttttgtcagcttctcttttaaacaatgttgtagttgggtacttgttttagaacatgcagcagatcgttgttgaagttttggacgttgttatagcttattagcaataaaattgtcacgagattattagatgtccaaaaaaaaaaaaaaaaaaaaaaaaaaaaaaaaaaaaaaatcattcgcccgttctcttcccttttccctccccctttcttcccctttattcctccctttttcccccctttttctttcccccctttttcttcccgctttctattctcttttttccgccctttttcccccccttattttatcccccacctttttcccttttttccccccattttttttcacccttttccccccctttgtgtccccgctttcccccccctttttcccccccttttttccccccctttttccccttattccccccccttttttccctcccctttttccctcccctttttcccccccctcttttttcccctcccccttcttttccccccccctatttttccccgctgttttcccccccttttttccttttccccttttttttcccgtttcctcccttttttctttc

SEQ ID NO: 94513 - DNA, 790 bp, Glycine max
  Clone ID: PAT_MRT3847_56356C.1
ggttgcatcagaaaaattgccaccttatcactttgattcaggtgtaaatggagactccaaaagggttggttgactgagtataaatgattatgtgtagatacttcacgacagaagaggaggagaattgctgctgcaaaggtgtgcgatgttgaatcagaacaagaagaaaactttcttacattgtcccttcattcatttccatgtcaatccgatcaagaacagaccccaagtcaaaaagcaaagacattgtttccatccacttgccaatacaacaatggctcaaattataagagaactttgaagaatgttcatttcctacaacatcaactaaaacaagaacattgcctttatgttcgtgaggatagaaaaagagctcaacttcaggctgcagagcagaaatccatggggcgaggaccaattcaacacctgattggtgctgaagttcgggggagagttgatggaccctttgactcagtttcgctctctcctgcagctgtgaatggaaggattttcaggggggtcatattttcacctggagcagcaggagttgtctcaaaagggggcagtgtcgaaccaaagtgttctctaacaagttcttttcctttttcctctcaagcatatttgaactccaatcatgtgggtaatttaacggcttcccaacaagcacctattcgtttgcatgcagagccatgccatggttcatggcaaacgccagttgcattaccatttccaatcattcgaggcactccaagtgttgtttccaaggagaataaaatcaatagtgaccttc

SEQ ID NO: 94514 - DNA, 1132 bp, Glycine max
  Clone ID: PAT_MRT3847_56357C.1
ggaaagttagatctgaaagacaagagttttaggtttgtgggagaagaagaagaagatgaagaagaagatgaagaagaagatgaagaagaagatgaggcgcccttgtcctcttcacttgaaatcaaattcaagaccgccttgccttccttctcagtacattccatttcgaatggaagcagggctttgctattttcatttttaaaataggcattggggtcccttcttgttcctccttttcctttcctatcccaatgcctattttaaaatgaaaacaacgatacactgttttcgtttgaaactattgttaaggaagataacgctgacgagttcttcaatttgattttagctgacggggacctttttttattcatccacagtctctgactctattacggctaaacaaggttttctccattcactcctaattttatgggctactcatttaatttgtgtgtgtatgttatagtgatgcacagtgtcaattgattttctctgatggactttttgcccaagggaaaggtggggaagggagctttttatttgttcctcttttctatccaccctccccaaatataccctagacttgagaagtacactttttcttttcttttctgcttgcccctctttcttctttaacatttttttacatttattgcaatactgtggatcaaacatgctagttcaagggaataccatttgttggaaatatgctagtgctctatcttctagtcatggagcaaactgagaaaaaaaaagttgtaccgttcgagatgatttctggggagtgaatacttcctattaatattacttgcctgcatatatacctttgcagttaaacggtattgaaattttctgctctcataatgtgttttgttaccatttagtattagagtaagctattgttttagtttcttaaaattagaaaaatgtcaactaaatttctgaaattgaaatttattaatagtaactcactgttcgttccattatggactatgataatagtaagttataaaatttaaaaattactctcatatgaactaaaataacaataaacatttttcttattttaaaaattatttggggtattttatgtgctacaacgaaagcctcttggagttttggataccacatg

SEQ ID NO: 94515 - DNA, 729 bp, Glycine max
  Clone ID: PAT_MRT3847_56358C.1
gaaaaatactaactcaatggcatctcctgtttatgcaaagggtaagaatgtttcagaaatttcatctaatcgattagatgatgaaaatagagagtggactcctttgtcgaccatggcatctaacataccagaaagaagcaattggcccacatctggtacttccatgcatgttccaaggaatcaaatatctggttttgaaactgcccagacaagtggatcagattctccattacccatagctccggtgcttttaggtcctggttctcgccaaagagagaattctggggttgttccatttacattttatcctactgggccacctgttccctttgttacaatgcttcctttatataattttccaactgagtcttctgacacttcaacaagcaacttcaatttggaagaaggggcagataacagtgattcaagtcagaattttgattcatctgagggatatgaacaccctgaggtgtcaagcccttccaattctatgacaagggtggctattgagtcatcagagcacaggcctgacattcttaatagtgactttgttagccactggcaaaatttgcaatatggccgattttgtcaaaactcacgtcatccgccttcaatgacatatccctcacctgttatggtgcctcctgtttatttgcagggtcgatatccttgggatggccctggaagacctatttctgtaacatgaatattttcagtcagcttatgagc

SEQ ID NO: 94516 - DNA, 340 bp, Glycine max
  Clone ID: PAT_MRT3847_56359C.1
cccacgcgtccggggaattatgtttcttcatttgataaattgtgttgaaagaatattaaaatttgaatatagtttttacactgcttttgtatcttaaaaaaaaaaaaaaaaaaaaaaaaaaaaaaaaaaaaaaaaaaaaaaaaaaaaaaaaaaaaataaaaacaaaaaaaaaaaaaaaaaaaaaaacatacaaaaaaaaaataaaaaaaataacaacacattaataaaaataaaaaggcggcggattttaaaaagtttaaactttaaaatcaatgagctttcccaagctaatgcgcataaaagggccattaattataataaccaggctaatatttaaaaa

SEQ ID NO: 94517 - DNA, 151 bp, Glycine max
  unsure (1)..(151): unsure at all n locations
  Clone ID: PAT_MRT3847_5635C.1
aaaaaagttacctcggggaaagaaggcaccccctgggaaaaaaggcagttgccctgctgcatggaggacccgaagttttatggggggtccttggagggtccatgggccggttaatggaacccccatncttaaatgaaaagggctctggagg

SEQ ID NO: 94518 - DNA, 499 bp, Glycine max
  Clone ID: PAT_MRT3847_56360C.1
tgctaccaccaccaaaccaaaccaactcattttgttcttctctaattcccttttttttttatcatggaataaggaaaggagaaacagacaaactataccaattccccccaaagccttgtctctcttccaaatctacaatcaaatcttcaaacaccttttcatccaatccttaaaaatcgttacaaggaattatcaaaatactaaatttctcaacatatctatctaagaaggttttggacacttcactaacatcttttgatgatttccacttttacatcttatggtgtcagtatttcttaataggcatttgatttctagatcttgtgacttgggctcagttacgtagatgagatggtgtagatagggaaactaggcttttccatattgtcattgacttttatttaatgaattattttgttggtcagttgtgtatgagactattgaagggatgatggtatcagctacaattaggcgaattgtgtcgccctgttggagacca

SEQ ID NO: 94519 - DNA, 218 bp, Glycine max
  Clone ID: PAT_MRT3847_56361C.1
ttcaccttgtggatcttatcattgcatttgacaaaaagatgcaatcccttctcaatctggatacttgttttttggcagttcctgggagttttgaagggctctcaagaggcgtctcagttctatcaatattttgtaataggcctgattggctgaaggtctgggcaaaaatagagttcaaaaatgcatggaagaaacttaaacctgaactgatagaggag

SEQ ID NO: 94520 - DNA, 438 bp, Glycine max
  Clone ID: PAT_MRT3847_56362C.1
atgggaaaaaggggctaattttgaaaacaaacctgccttgggctggggttgaaatctaaaaaaaaaacaacctccccctacaggtttgattttttttagggattctggaccccaacccttacagtttttttccccgggagacccccaaaagcaattttgttttttgggggggggcaaggaacaaatattacaggggttggatgggctttaaggttttgaaccaatttttggtggagaacccctttttaaacccaggggtttttaaaacccccaacaatttttttcccttttgtcacaaaaaagggggaaggtatgcagggttctcttttcacatgccccgaataaatttttaaacacttccccctcccataattccctagcttaaaagaggccttgagaggggcggggaaaatgagcttgcccttggggggaaaattt

SEQ ID NO: 94521 - DNA, 209 bp, Glycine max
  Clone ID: PAT_MRT3847_56363C.1
ttttaatggtgaaacaaacattccatcatggcactgcccgatacgttagaagatagccctactcaatagggggtaggagttgcagctaatactgctatttcccatgaatgtgacaaatagctgatcatacaatgggaacagattctgtaggataactgaaaattgaagtgtcgagaatgactaatacctaattaaatagacaaccatat

SEQ ID NO: 94522 - DNA, 601 bp, Glycine max
  Clone ID: PAT_MRT3847_56364C.1
acgtccacgcgtacttccacgcgtacgcccacgcgtccgtccacgcgtacgaccacgcgtccgcccacgcgtccgaataaaaaaaaaaaaaaaaaaaaaaaaaaaaaagaaaaaaaaaaaaaaaaaaaaaaaaaaaaaaaaaaaaaaaaaaaaaaaaaaaaaaaaaaaaaaaaatttaaataaaaataggggggggccgtttaaaagtaccaaggtttaaaccccttagcttgcactgtaataatttttatatagagtcactaaatgaaattttagggggggggtttttaaaaagtcgtgagggaaaaaaccttgaggacacctaatttaatccccttgaagaaattccctttttgcccttttggtttaatctaaaagaggctcgcacatggtgcccttcaaaatagtggccacattaaatatgcaaatagagacgccccttttttagggagttataagacggcggagggtggtggggttaaaataagatgttgttaacattttttttattaagtgttcctattaaataaaaagtatattttaatatttttttataaaattttatgtttttaaagaatatatatattataaggattttttc

SEQ ID NO: 94523 - DNA, 188 bp, Glycine max
  Clone ID: PAT_MRT3847_56365C.1
agctcggaacgtcgggaagttcaaaccagcgaacccatctgcggcctctcgccacctgcctacctgtaactgcgctaatcaagcacctttccctgacggaccttcgactgcactctcaactgacccacttgtagtctgactggtcactacgacagacaaccatatcagactgtacttacattgacatt

SEQ ID NO: 94524 - DNA, 121 bp, Glycine max
  Clone ID: PAT_MRT3847_56366C.1
acaaggcaggatagcctggactcctagcacggctttatttagatccaaactttgccttggagcgcgtgcgctccgaccattctccgctggtccaatacatccagaaacgggatcaaaacgc

SEQ ID NO: 94525 - DNA, 348 bp, Glycine max
  Clone ID: PAT_MRT3847_56367C.1
ttattaaatgatataaccaattaattttctgttttgaaataataacccgcgtaccactagtgtacactatgtactccccctttatcacactcacaaaattaaatatacgcattcatgcaatattccgttaccacaagtcacaactatcttacagaaagtaatctttcactatggttactataagataatcacgtacatgccttgctccaatgcaaagaaaaacgttatcttagcaaagggcaaaatgatacttcacactacacttaaaagaccatatcatttgtgaattcttcaaccaaatcatcagtgattagacatgccatctccctttccaatgtatcaatatga

SEQ ID NO: 94526 - DNA, 1122 bp, Glycine max
  Clone ID: PAT_MRT3847_56368C.1
gtttcggaatgagcgttaatttcttatcatggatggatcatgcactcttgaggagacatgcaaaccctgtggtttatcacagtcctgaaacttcaattgaacttcaaaaggagtttaaagggcttgatggggcgctgttgtggcggctgagacaagcacgcagatcacagggtgggttatgaccagtgccacctacatcaccaccacggtttctcaaggtttctcttttaagaactccatgaagttcccacactacgggagtatcatgaccgttaagcagaagttcaaggccaagaaaaaagttaaggtgatcgatggaaaaggcgaatcgattactaggttgaaggttaagaggaggtaccctttgagggtggtcacaaacactaagctgtttcaggatgggtcttataggcttgtcactgatctttctcacactcttaaggagaagcatgtgagtgggtgcttcgtgaaatcgattaataacgagcagaactcaaaagggtggatcgatgtgaagggtcactctgttgtttcgggtcaagcaagcacctcccagaattacagttactttgataggttcacttgctactcacggaatgttgctgcgactaatggcaggattgttgcggacaattcaacttttgtctgtgaattgtgaaaattctttgtagtttcttttttttccgtacatctattttattatgtagtttcctgcatagggtttttttttttttctagggggaagaatgtgtagtaaattatgtagtatgagagtatcttttgaatctgcataatgtatgtattgtttccatacgtgccactgtgcctggatctagacagtagacactgaaggaagacacaagctactgaacctacggttagtaaacaaggatcatatcataaatgtatggctcctagcagagtagagcttgcagacaagcaattttcagcttcaagaattatgcttttcgtggccttgaggccatccatcaagtccacaacaaaagcctaaggattgtttggcttaagaaaatctatttgtatttttacccttttcaaaaatttgtacaagaaataatgaaaatagacaaataaataatggaaatttatttttatttttaa

SEQ ID NO: 94527 - DNA, 307 bp, Glycine max
  Clone ID: PAT_MRT3847_56369C.1
ggccgaactggatcgcgcgctcgaccgcgccgcggttcatcaccggcagcacgccgggcagcgccagatcgaccgcgcaggcctgggtgttgggctcggcgccgaaacgggtcgaggcaccggagaagatcttcgactgggtcgagagctgggcatgggtctcgaagccgatgacgacttcgtagccacgcacgagaagggaggcggtcatggggcgggcggtttgctgcagcgcggacgcaaagcggaaatgctacggcatcgccgcgcccctcgggaaaaccgcaagccgcagccgccccggccg

SEQ ID NO: 94528 - DNA, 537 bp, Glycine max
  Clone ID: PAT_MRT3847_5636C.1
tcggttcaggatgatgaattggttaaactcacactcaaggcactggctgaacaacctgcccagcctactgatgctcagagacatgacctatcttgggtccgggccacgaaacggtttcttaaggccgccgacttggacaagccattagatagaaaattgttaagaacaagttcaaactttctggctgcctccataaatttgcaagagaaagtagatgaagcatcagcatatgtgcatcatgtagcttctgggtttgaagtatcgagaagaatcttcggtgccattccagatagcctgcagccagatgaagagctacgcaaggaacttgggttgactgaagcttccacgaaataaggttaaagaaaaatgattttggaatgttgtgatgttaattaaaatttctagagattctaacttctattcataatcggttacccgtgcattcacaagggtcgtgcttgtctttacacatgttttaaaataatttatgtatataattatttgtttaaaaataaatagagcatatgtttacatttt

SEQ ID NO: 94529 - DNA, 246 bp, Glycine max
  Clone ID: PAT_MRT3847_56370C.1
attgtagcctctacccaatttgaggcgttttgatctctctggctccaagaatctgattgtaatgccatatattgaagatgcgctatatcttgagagtcttaatctcgaaggatgtatacaactcgaagagatcggccatgtcattgttctgtcaccatagctatcttctctgaatctgagagattgcaagagtcttatcaagttgccacggtttggagagggcctaattcttagatatctatgtct

SEQ ID NO: 94530 - DNA, 179 bp, Glycine max
  Clone ID: PAT_MRT3847_56371C.1
aaagaacgatttacgaacaccgacaaacaagagccttctaccctgagcgtggccaccctaatgtgagcgcatatccgggacgaatacgactgggagagtacgtaagcttatctaatatgggggaatgtcctgtcgtgacggactgaccttttgcaacgttagtttggtggaatggcttg

SEQ ID NO: 94531 - DNA, 419 bp, Glycine max
  unsure (1)..(419): unsure at all n locations
  Clone ID: PAT_MRT3847_56372C.1
aagtatttgaagcanatgagtgatttataattttacgattttgttcataattattttagccaagtgtggattgtttttaattttttttaaactatactaatttactaatttgtttttattttgcttttttattatttttatgtgtctcatctcttgttaggaggctagtttttggttcttgtgtttgaaactaagtacccaattttctgagatgagaaaaaagaccaaaaactttttttttttatcagcaaagactaaaaaactttgatataaaataaatgcatttattgttatgattctattctcttaacccgaagtgttgaaatcttttataattttccccccattgtatagctaagtttcngtaggtggtggttttgtgacatatgtttggtagtgaaaattaaatattcgcatgg

SEQ ID NO: 94532 - DNA, 438 bp, Glycine max
  Clone ID: PAT_MRT3847_56373C.1
cccacgcttccgctctaatctctctttattattcaacaaaagttaatataattccggacggctttataccttctcaaaccgcttaacataacaccaaactttgtcatctccataaaccaataaatgagtaaaaaatgcattacatatgtcttaacattctaccaattgtttaaactttctatccataatactctgtttaaatgtgtatcatatgtttgtactattccttttatctttatcttatttttatattttatcttttcattttttcttcaatttatttttttatttttttcatatatttaatttattatttttctcaattttatatatatatctcttttcttttatttttttattttctttttattattattttttttattatattatttatttttttttttttcttttattttattatttttttatttttta

SEQ ID NO: 94533 - DNA, 500 bp, Glycine max
  Clone ID: PAT_MRT3847_56374C.1
ggagagagagaatttaacatttgatcctgttgagagtcatcccacacatcttttacatccatctttattgctcaaataaagggccatttccacccattggccattcatagggaacgtgatccaacaaaaagggaacaaagatgatgagcactttcttcacttgatggagtaaggaagggccaccacctaaaggaggaagtaggcccattttacacccgaaatgcctccgaagaagaagcctgagaggaacttgtcccacccatcaccagtttggagctgatcagtctccttattgcggcccgaaaaggacatggaccgagaacgggatggttcttcttcgataaaagatgattttccatatattgctaggcatacgctgaggatcaccacatgcccaccattgagaaaagagtccttcttgcccaacaatctgacagtttctcaaaggcccggacttcacgaatggtcccaccataaggtagccattggccaagcccacc

SEQ ID NO: 94534 - DNA, 689 bp, Glycine max
  Clone ID: PAT_MRT3847_56375C.1
agtacttaagggaacaaatgagattgaacaatgggaaactcaggcttcaacactctttgctgaacttcagatttcttctgtcaatgaaacattattagagggaaatgtctgtgagctagctgagatgtttcgtgttttacatactgagaaaacagaattgcaaagaatggtggaaaatctgaagattaaatatgatgaagccgaagtgatgcttgaagaacaggctaatcaaattttgaaattgtccacagacaaggatcatcaaaatgaagagctcatatgcctgtgtgaagtgaatcagaagttggagtctgaaatggggtacctacgtcaagagcttggagaaactaaactgagggaaaagaagctaggtgatgaagtacttaagggaacaaatgagattgaacaatgggaaactcaggcttcaacactctttgctgaactgcagatttttgctgtcaatgaaacattatttgaaggaaaggtttgtgagctagctgatgcatgtgagaatcttgaacgtagaaactactccaaagacatggaaagtgagcatctgaaagaaagagttagcgagctggaagttgaaaatggaagactgtgtgaacaattaattgcttatgtccctgctgtcagtgctttgaatgattgtataacatctctggagatgcagactcttgcacatgaaa

SEQ ID NO: 94535 - DNA, 309 bp, Glycine max
  unsure (1)..(309): unsure at all n locations
  Clone ID: PAT_MRT3847_56376C.1
attatttttttctntaggagaaaacaaaataagagggggttatttataaaaaattatcaatcatttggcctgaatatattttaaattttcataaagtacaaaaaataaaattataaaaaatgtacagaatagaaactttataattgtaaaaatcactaaaaacaagatcttttataaaattataccaaaactctacaaaaaaactccttacgtaacataattttttcctgaactttaaagaatataaatgagtttgctaacattatatacagtattgaaaaatatttattcaaaacaataaaatttatt

SEQ ID NO: 94536 - DNA, 415 bp, Glycine max
  Clone ID: PAT_MRT3847_56377C.1
gaccgcgtgggtccggtcgcgagcatacccggtcgacggctccttttttttttttttttttttttttttttttttttttttttttttttttttttttttttttttttttggggatttaaataagtcatccttaaaatttttgtacatttttgttcccttaacgttcgaaaaaattcatttacctattttttcccccccaaatcctttgattttgaagctgtcagaccatgggggggtaatgccatgggggggcttccattttaaagaaaaagaaggctggcaaaaaagggggccaaacattgtagaccaggatctttgaatccctaagaggggattgcgggaaacaaataggggattgacgagacttaggaaaaacaggcttaagaagcaaatggaaagacctggattaaagggg

SEQ ID NO: 94537 - DNA, 275 bp, Glycine max
  unsure (1)..(275): unsure at all n locations
  Clone ID: PAT_MRT3847_56378C.1
gtgtttcgaatagattatcctaagtctttgggaatagtgctgcaatggcttcaagtcaggaggaggtgacccttttgggagctactggaagcccatttgtgtgcagggttcatattgccctcaagttgaagggagttcaatacaaatatgtcgaagaaaatttgagggaacaagagtggacnggctcncnaattcaaacccntttcnncaggaggntccantggttattcnccatggggaggccatagcagantctcctgtgatggtgaatacat

SEQ ID NO: 94538 - DNA, 301 bp, Glycine max
  Clone ID: PAT_MRT3847_56379C.1
cactattgtatgctggagcgctagaaacaactaaggagtgttaactatgtccagattgcaacatatcatggaaggtgcttgagtaggctacttatgatactattattctagatgcattaccgacaacgttcgtgggtattatgaaatgcacaacatcaacaacgtgggtgacagatatggaatacataccacttataagcaccatcaggtagaccgagcgacagccaacagatgtccagttatccgagatagcattcaacagggaatgatgtttatcagtgtaacgatcatggacaaaaat

SEQ ID NO: 94539 - DNA, 153 bp, Glycine max
  Clone ID: PAT_MRT3847_5637C.1
ccgacgcgtccgtcaagcattgcatccttttggatttgtagttcgttttgtcctgtaagtaaaatttctgccaaatcaagaggggttttaaaaccatattgagggtttggcaccaatggctaaaatcttgctggttatatacctggcactctt

SEQ ID NO: 94540 - DNA, 1417 bp, Glycine max
  Clone ID: PAT_MRT3847_56380C.1
ccccgacgtagctttttttcggctcgaggtctttccaacagcatttgcaacattcagacataacataactttcctgcgaaggaagtgttatgccattacatcatcagaactcttttgtctctctggcttgcaactcaactctgctgctgtagcaaagcctcggttctatggcttcctagttgcccatttgagaaaaaacccacaaagatcttgaatttggctgattctggaaatgggttctcagataaggcttctgggtctgtgtctatggatgtacttgtcaagcttaagcttcattggagccggtgctgtgtatggaagagaaggtgaagttgtgaaagggattgttttagttcatgggaaaactgcaattggaaggattgatgatgattctgtttgtgcaactctggattggtggcctcctcagaaatgtgactatggaaaatgcagttggggtcatgcttctctgctcaacctggacctcaacaacaaaattttgttaaatgcagtaaaagccttttcacccttgaaaattagattaggtggcactttgcaagacaaggtcatatatggaactgaagattgtcgtcaaccctgtactccttttgttttgaatgcgaatgaattgtttggtttcactcaagggtgcttaccgatgtataggtgggatgagctaaacagctttttccaaaaagcaggggttaaggttgcttttggattaaatgctcttgctggaaaatctatgaagtctggttctgctgttggaccttggaactacaccaatgctgaatcgttaatacgatacacagtcagaaagaagtacaccattcatggttgggaacttggcaatgaattgtgtggaagtggaattggagcaagtgttgcagcagatcaatatgcttctgatgttgctgctttaagaaacatagttgaaaatgcatatagagggattgaacctaagccactagtcattgcacctggaggcttctttgactcggattggttcaaggaatttataagcaaatctggtaaatctgcagacgtgatcacccaccacatttataaccttgggccaggagttgatgaccacctaactgaaaaaattcttgacccttcctatctggatggagaggctaacacattcagcagcctcaaaggtatacttcaaagttcatcaacctcagtaaaatcatgggttggtgaggcaggaggggcttacaatagtggccatcatcttgtgtctgatgcatttgtctacagcttctggtatttggaccagcttggcatgtcagctgtttatgacaccagaacatactgcagacaaagtttgataggaggaaactatggtttgctgaatactagtactttcgtgccaaatccagactattatagtgcacttctatggcaccgactcatg

SEQ ID NO: 94541 - DNA, 304 bp, Glycine max
  Clone ID: PAT_MRT3847_56381C.1
agtaatcattctgtggcaatatagttgatattttggagacaagattcatttcaacttgccttaattgtcaccattggattcacaggttctacatctgcaccaatgagcatgtcatggatcagtttgcctccaataggtcgatgctttgggaaaaattttccctggattttggtaatcgagattgtaacttatgggcttaatccatgcactatgttttaatctgaataatgattggctgacacctatggcaaatctataccttgagagagagacttagaagagagataatttgatgagtgacatg

SEQ ID NO: 94542 - DNA, 1891 bp, Glycine max
  Clone ID: PAT_MRT3847_56382C.1
aaagaaccccttcttagtatttgagataagaagcaaaggaccaaaaaatgcacatagtatcagggaactgcagccctattttcaatagtcaggggcataaccattaaccaatgatcacttatgtcacttctacttcttcgcataactaaccctcaaaacatgaccagggttggggaaagtgaaacgtagcttgctatacaattgtaacatttttttttgaaccatcttgcgctgcgccccgtcctctatagggagcttgaaccatcttcagctcttgatcccttttcactttcaaggtgttaaaaattcgccccacgatctaatatgcactctgtcatgtgggagcaatggatgtcgagaatttatcgattttgtataacttggctaaaactgtacagaagcaatgcgtagaccgttcacatttctcgcttatctccgattccccctcctcttccttgtcttctcctttttctccatattttcctctttttcacattttctggttctactactaccagtggttttgctacacctcaagactttgatgagaaaacagaggagaaaccagaaaatgcgcatgaagtttcagaaagagtgttgctggataggaatagttaaatctggaatttccttcgaagcacgattgtattaaaaccaaataatgtctataattttgaggaattttttacacgtgtgagataatagtgaaaaggtggtagaaagattgatttaaaagtttatccactatctccaataattcatcgttttgtgtttcggggtggagttaagggtgatcatgatgttcatcatgatggtaaagggtctgaatctatttatggtggcacctttcctgatgataatttcaagattaaacattctcacgctggtgttgtttctatggcaaattcaggacctgattccaatggctcacagtttttctttaccacagtgaaggccagatggttggatggagagcatgttgtctttggcagggttgttcaaggcatggatattgtgtatgtaattgaagggggagccggaacctacagtggaaaacccagaaagaaggtagtgatagcagactctggggagataccaaagaaccactgggatgaggaaaattgaacttcctccttttggtgaccgaccactagcacatgtttggatagcagacacggctggtttgtctttgatcttgattctctagttcttaaaccatggtttacaaattattgaaagtatactgaaacccgatttcttttatatgtaacaatgtaagcaatatttttgctatgtccgttttacgtttttctgtttattgtgtttttcttttttttaatctttcctgtaaattgttattaaacccgttctatcttaaccacgccatcgtcttcgtcctttgtaacatgatcatgagacttttttttcttgtttttgtttttggaagcagcggcgacaattgaagaacagtcattgcattctgcattgtgattcaaggcagacagaaaacagtatcgaagttaaaaaaaaatgctttaatgaaaactacaaaatgataataatgaaaaaatctatatgcagttgcttaggtgtttttagggttattctccaatcaaaatagagtttcactcatgttgacttttaatacaaaccttttgttatgcaaattaccacgataaaactccaattttgattttaaaaacaacaccaaaagaacattcaagttttattcttataatcactagaaagactcgtgttgccattagcctattaccaaatgcaacatatcatgttagtaagtaatagtaatggaaattagaaaacagagcagtttgatttgagcaggcttttttttctttgtctgccccttttttcacttttattggggcaa

SEQ ID NO: 94543 - DNA, 320 bp, Glycine max
  Clone ID: PAT_MRT3847_56383C.1
aattcccagctcatgtggtgtttcagtcacaacacatctcttacaggcacacgatcatcatcatagtagatccaccatcccctccaccaccaccaccgctgtggacaaccttacgtatcaaaccacaatcataaacatctaaataccggccacctcctactacacactctcctcaaccctgatacaaattcctgaccggtaactttaattttaccaccatttcctatacccacttgtatcatatgatcgaccaaaccatcaacataactcattacatgtcaccaaattacattccgttacaatataacacaacttaccat

SEQ ID NO: 94544 - DNA, 373 bp, Glycine max
  Clone ID: PAT_MRT3847_56384C.1
cggctcgagattaggataggagattttcgtaaatcccataagatgggcccatatgcgtgattgctcagattacggcactaagggggtaatgtaaatgtttcgttttcactctcacgttcttaatttttgtttgtgtctctctcgcaggaattaggatccgatatggggttctcggtaacaacgctagttttcgcagtgattggaattgtggcgtccctttctaccagtatttgtttcaacagaggaccttccgccaatctatttcacctaactttggttcttactgcaacaacatgctgctggatgatgtgggcgattgtatatctggcacagatgaaaccgctcatagtacctatcttgagtgagggtgaat

SEQ ID NO: 94545 - DNA, 342 bp, Glycine max
  Clone ID: PAT_MRT3847_56385C.1
acgcgaaggcaagcaacacacgaaccaagtgtaaaattaaggatacacaaacttacagcaccacactctgaatattgaccgttaaccaaccacacagaacagctggatatttgggccctacccctcaacggaaaagaccgtaaccaactactgaaagattgatccgacgtccacctatagttagacccacaaacggcataaaacactataaagctttgcacggaagctgatcaacattgaccgagacatccctaataatgaccttaaatgaaccattcctcgcggttctgataaaccaacaacgcaaagtgcgttcaccgtttaaaggcgggcgcacccacc

SEQ ID NO: 94546 - DNA, 265 bp, Glycine max
  Clone ID: PAT_MRT3847_56386C.1
cccacgccgtccgcccacgccgtcctgaaaaacacttcctttcttcttctgacaccccacactcgccatctcacggggcgcgattgcatcacaacagatgtctgatcaccaattcactctccaactctcgtccaagcaccgccagccctccgccaccaaactaagctccaaagctagaggtccgccagccactaaccactcatcgatctcgcagctaccgactaacacacaacaaccaacaacaaccgtgtacctccgaccctga

SEQ ID NO: 94547 - DNA, 593 bp, Glycine max
  Clone ID: PAT_MRT3847_56387C.1
agcatattcaatataggtatagaagcccaattcatcacatatccaaaagctgaaacagcacaataaatacagaacagccccaaactaattattttggaatctcaggaaacaaaacccaataaccaaagctcctacaaaggtccattccattctttggggaccaaaataccccaagaaaaagagaaatcgattaccggagggacaacacaggagggggaggggttcattattagcgctgcccccattcacatgcaaaggaaaccaccaattcaatccttccactatcaccctttttcctcggctaacaaaaaaaaaaaaaaaaaaactttttaaggaggcctaaatcatgccaaggaatcttccaaatattaaaaaatcttttaaattaaactaaagggggggacattaagaaccccatctattccttaaaaactaatttcattaccctaagggctactagggggggacacaggggaaaaataaaagttggaagaaaaaatggaggggttattctatcgcgggccaatgaacataaaatcctcgggaaatcatttattttcctccctttcccgattccactggttgatcctggg

SEQ ID NO: 94548 - DNA, 471 bp, Glycine max
  Clone ID: PAT_MRT3847_56388C.1
gggggacagagactgaggaacagatcctgaagcgactacgaaatgctgatgctgagattgagcaagggaaatgttctcaagtatttgatttcatcctatacaatgacaatcttgaggagtgtcatgagagacttaaggtaaatgcttctgaagcaaagacctccagagtctttgggatgttttttgaccattaatcatcctgatgttaagtatcatttggtgcagaaactattgggacttgacggttttgtcactgctccacctatatcaggtaaggattttcctagtaaaacctgatatgtagcttcacaacaattttaaaaccatgaagataaattgatgtgtttaatccgtcaatccaacaggccctatagagattgagttaccaatggatcattcagtgtcaaaaattgataacaaaatcatcataaactgcatcttcttaggagagaaggaatcaaagaatttgta

SEQ ID NO: 94549 - DNA, 215 bp, Glycine max
  Clone ID: PAT_MRT3847_56389C.1
tcctctatagcggccgcttttttttttttttttttttttttttttttggaatagtattcttactccaaaatataggatttctacttttttttcaaaaagtaatccaagattgtttttgaccctatttaattcatatgtacgggaatgtgactgtatctttctttttctacgagacaaatactctaagtgacgattaaaatattttcgagtttttt

SEQ ID NO: 94550 - DNA, 230 bp, Glycine max
  Clone ID: PAT_MRT3847_56390C.1
cgttgttgctgcaaaaaaaaaagtgtaagcaatttaaggagagggtataaatatgtctctttcgttgcttaatttctagaaccgcgaaaaagtgcggaacgtttccaaaacgtggggggtgttgtgtaacaatttgcagtctggtctgacagcgacgatgtcgtcctgtgcgtctctgtgatgcagagtgtcttgaagtgagagggtttgtgagttggttggtagtttgg

SEQ ID NO: 94551 - DNA, 353 bp, Glycine max
  Clone ID: PAT_MRT3847_56391C.1
tcattttaaacacacctatctacttattttcgacgggatcaatcttggtgcctggatcagatgacaaacctttttgatcttctaccttgctacacttatagatatccttagtgatatgatcatcaatgtcgagcctaatgctaacttgtaccaggcaactgtgctcatggttttccaagatgtgtaacactctaagccagcagacttggcatcacattattcactgactgtatctatccttgcacagagtgatcaaagatccacaacggctctgttcaaaattgattttaatgcctcgggataacggtacaacgagcatccacaattgctctacgaggccaatctttacaata

SEQ ID NO: 94552 - DNA, 576 bp, Glycine max
  Clone ID: PAT_MRT3847_56392C.1
gcaagtcaattattttcctaatttcactcactttcaagcaaaacagtgatgcaatgttgtaattccgaggaaaataagtttttcgatgttttactaaccagctctttgctgagtagaaacaggaggcttgaaaatcctcgatggatgcagcatgcagctatgattaatttatgggaatcaatttcatcactttgataacgcatatcttgagtgcgtattagaatgggaattttttcattgactttccttcgagagatcaaaaggaggaatggtgcttcgtgctcggctcgatttattagctttcacctgcaggagagttacctgcattttttcacctggatgggaaaaaggagagacaaaattgaacataaagcaaggtcgaattttgatgggtctgttgcgagtttttgttacgccgttataaagaatcgattcctacgtaaaatcactagatgatagcgtcaaaggcatcaaaaagtttcaaaatctccgtgcaaaatcaataattttgtttaacaaaatttggtgatgacggtcaaatggtcggtcatactatggaggagtctcgtctaattg

SEQ ID NO: 94553 - DNA, 530 bp, Glycine max
  Clone ID: PAT_MRT3847_56393C.1
aacatttggctgcttatgacatatgcataatttgtaaaaattttacttgttcttaatttatttgtagataaatatgaatcatgtcatagattgctgctaaaattgatagtgtgtcctcaccttttaaaatagatttaccttgcctcaagtaagattccctaaatgaaacgaggaatttcggatacaagctattaaagctaatgcattgatattgccatattcaaaatatgtctcacccagaaagttataacatgttggctgttgcttctggtggatgaagttacaggaagaagcgaaaccaaacaagttgtaatgcaacataatttgacatttatttttgtttcatcatgcatatccttcttgggaggaaaaaatattacaagatcgatatagaattttgtgatctggttaattttcacacataattcgtaactccatttttcaatttataaaaaatagttaataacttatcacataaaaatcagtcataaacatatatatgattttagacaatatggtattttctccct

SEQ ID NO: 94554 - DNA, 553 bp, Glycine max
  Clone ID: PAT_MRT3847_56394C.1
tcgttgacgcgtgggcggacgcgtgggctggtcatcgttgggatctccatacgccggatctgctaaaatacgcttgatccatatgggcctcctcgaccacttgtgggacgacaccgtcgccggcccaaggccggaaaacggtctcggcaagctccgaaaacaccacaccttcactttccgacctagctccggcaagggtacgccctgcctcgttaatcatactcatataattcaccaacgattttcgttaactacaagtccacaactacaatcgttaactcaactcttatcataattatcattcttttataatctaaccactcgtaccttcgaatcggagaccgatttgtgtgttttaggttgcatgctgtcagatctacaccctaaacatgcttttcaagctcgaatcctccagttccgaatcttctaaatcatttccacatgatctatatgcaataatagtaaaagatgatatagtttgggagatgaaataacctgaacataacaactttaatttggagatacctggttgcatctgaaacgctcatagata

SEQ ID NO: 94555 - DNA, 645 bp, Glycine max
  unsure (1)..(645): unsure at all n locations
  Clone ID: PAT_MRT3847_56395C.1
caatatcgaatccaacaaaatacatggatctatctacactgttgctagctgttctcttcatcgcaggcctcattaatattttcttttacgtacccaccaccaagattggtgcgtggcttcaaactttcttattccccaacaacaatgcttnccaacaaaaccaaaaccaacttagttccttcttcctcttcttcaccaacgaccaaggtggagagtactggttcccaaaagaagaaggaagagcttagaaaagtgttctccactttcgacaaaaacggcgacggattcataacgaagcaggagctgagggagtccctgaggaacatcagaatcttcatgacagaacaagaggtcgatgatattgttgtcaagtacgattccaacggggacgggttgatcgattttgaagagttttgcttgttgactagtgagtgtgtaggagtggatcatgagaaagagggtgatggtgttattgaaaatgaaaaagttgatttgaaggaggcttttgatgtgttcgataaagataatgatgggcttatttcggtggaggagtcggctctggtgcttacttcggtgggactcagggaagggtgaaagattcgagagtgcccagagatgatctataaggttgatatggatggagat

SEQ ID NO: 94556 - DNA, 1215 bp, Glycine max
  Clone ID: PAT_MRT3847_56396C.1
cttaaaactggtatctgatttacaaaaggttacaaacttctcttgcataaagaatggcatcagcaacaataaggaatgcagttgtcacgggagcaaacaaagggataggatttggaatatgcaagcaattggtttctaatggcatcacagtggtgctaacagcaagggatgagaaaaggggtcttgaagctgttgaaaagctgaaagagtttggtgtgtctgatcaagtggtgtttcatcagcttgatgtgactgaccctaaaagcattgaatcccttgcaaatttcatcaaaacccagtttggaaaacttgatatcttggtgaataatgcaggaattcatggagcatatgttgaccgtgatgctttagctgctgctggggaaaaagttgccaatgttgattggagaaaaatctcaactgaaaattttgaagctgccgaagcaggcattagaacaaattactatggagtcaaattaatgtgtgaagcacttattccccttctagaattgtcaggcacaccaaggattgtcaatgtttcctcctccatggggaagttggagaaaataccaaatgcatgggctagaggagccctaagtgatgctgagagcctaacagaagaaaaggtggatgaggttttgaatcagtttctaaaagattttaaagagggttcattagaaaccaaagggtgggccacatgctttttctgcatatatagtctcaaaagctgctttgactgcctacacaaggattcttgctaagaagtacccatctttctgcatcaatgctgtttgccctggctttgtgaaaacagatctcaactacaatactggctatcttagtgttgatgaaggtgctgaaagtgttgtaaggttggctctgctacctaatggaggtccttctggtctattcttttctcgaagtgaagtggcaccattctgatccaaagactgttgtgtacttgaagaggataaataataagcatggtttcatgataagacatgtatcaaatttgtacctagcacaacaagaaaataagccacatgtctgatcactgatggctgcccatcattgatgagaacaaccctatagtgaattctagatattacaatgacattactaatttgagaaatctaattttggatataaagatatctgtttgttaaaattgaaatcggtttatgaaagacttgaatgatctttactagaagctataat

SEQ ID NO: 94557 - DNA, 953 bp, Glycine max
  unsure (1)..(953): unsure at all n locations
  Clone ID: PAT_MRT3847_56397C.1
tttggtatagttgcaaatttcaactcaactaactagtttttctttccacaagagttttgtttgttccggagatcacgtagctaagaagagtaaacattaaacaagaagattggtaattttttaattaagtgcgcgaaaaccgaaaagggtctttgttttctttcatactataaatgtattatcaagttgcataggaaagcttcaatagccccacgcccagagcgacttatcggttgttcgggacaaccttttagtttttggcttcgacttttttaagattctgttttctgggttgcggggtcgtaactcatccagaagaaagggggagcagagaaacaaggtcgatgagagttgagtttataaggttgcagcaatacgagtgaagtttcttcgttggtgctataaataattaaacatgtcttctgcggcagcttcaacttggatcacgtccttctcgtgttcacccaatgcaactccaaatttacctcactggctgagattcattttcctctctccgtgtcctcagagggctcttttgtctggtgttgacattcttctcctgttgactctctttgtgtttgcgctaataaagctctattctaggttcacttccattggcaaccacaactcagagctcgacaagccccttatcagaaacaacagagtttctaaccgaacaacagcatggtttaagttaactctaaccacaaccgctgtttggactattttgtacacggttgcttgcattctggtgtttaccagttccaccgatgggacgtggaagcaaactgatgggttcttttggttacttcaggctataacacaactagtccttgcagttttaatcatccatgagaaaaagtttcaagctgntgttcaccctttgtcgcttagaatatactggattgcaaatttcatcttggtttctttgttcacagcttnctggggtcata

SEQ ID NO: 94558 - DNA, 169 bp, Glycine max
  Clone ID: PAT_MRT3847_56398C.1
tgtggttacagtttacagcaactgcgccatcacctagaccaacaagttcccctttttcgtaaaagtcggcctatcccaaatgctccgcggtggcgtcatcatggacgtcgtcgacgctgatcatgcccgcatcgcagatgaggccggttccttcgcagtgatatgcctt

SEQ ID NO: 94559 - DNA, 469 bp, Glycine max
  unsure (1)..(469): unsure at all n locations
  Clone ID: PAT_MRT3847_56399C.1
cgcctgcagtaccggtccnnattcnnncgggacggacgcgtgcgtacaggtgttagaagactacanaangcggctcacttacaaatattcttctctacctgtgggtgggggcttctgcgttggagataggggcccaatacatttatataatcccaattcaaaaaatggtggagggcaagactccaagaatctgagggtcaagcttattctctgaggtgattctagtgtttgtaaaagctatataggtctacgatttggtaatggtcagtttgattcaacatataaggtaactgtatgagcttcatttttgtcgcaaacaattattctgcaagactctacaacagtcaagtttgatatatgggatactggtggttaactgaggtatgctgttttagcatcgttatattaccatagtgcaaaattttcaggtattgcttattattttaacaagcccaaaattttttagtaa

SEQ ID NO: 94560 - DNA, 512 bp, Glycine max
  Clone ID: PAT_MRT3847_5639C.1
aatattgcatatccacaacttttattaaattatccggggacaaaataacttagaacttaagagccttgggttgttcccaggtgaaatcggggtcgttgcgaccgatgtgaccgaaagcagcggtcttttggtagatggggcgacgcaacttgaggtcacgaatgatgcaaccggggcggagatcgaagttatcctcaacaatcttcaaaatttcagcgtcagacttgacaccagtgccgtaggtgttgacgtatacggagaggggcttggcaataccgatggcgttagagacttgaacgagagcgcgcttgcagagcttggcagcgacgagggacttggcgacccaacgggcagcatatgcagcagagcgatcgaccttggaggggtccttgccagagaaggcaccaccaccgtgagcaccccaaccaccgtagctgtcaataatgattctgcggtcagtcaaaccagcattaccttgaggaccaccatgacgaaccgccagagggggttca

SEQ ID NO: 94561 - DNA, 197 bp, Glycine max
  Clone ID: PAT_MRT3847_563C.1
tgttactatatatacaagagattctgcaaactgaaaaagggattcttactaaagcaaactcaaacaagaacaacttccactcatttggcatctaccgtagtaacacaagatcaaaagcagcttctcttgtatttattgtgttactatatattgtactaggtctcgtgggaaataaaatttttataaattttaatttt

SEQ ID NO: 94562 - DNA, 391 bp, Glycine max
  Clone ID: PAT_MRT3847_56400C.1
acggctgcgagaagacgacagaaggggggcttcacaaatctggaagacccataacccattcctctctctctctctctgttcctgtcgctgtgtgtcatttcgttttttccccacttccatccatcttcgtttttcttcttcttcttctcccttcgattttcatttttcttttcttttttttttctctttacttattactattattattcatcttcgtttctttgccttaagcttccttcgatttttttctctcccgttttcgctgtgtcccctcttagatccctctctggatcacagtgagaaacagtgttgttgagtttgaataaattaatgaaggagtgttaatggatggtggatgtattgggaagctgggagggcctcaaatttaatg

SEQ ID NO: 94563 - DNA, 420 bp, Glycine max
  Clone ID: PAT_MRT3847_56401C.1
aagagaaaaacacttttggaaattgagcgtcaagccgtgagttcattttctaaaaataaacggaatggctaatcaaatactcgtttttgttggttattctaaagccagtaaagcgattgactttgctatgcggcaatactatttcttaggaatacgatacttgaaaacctttggatacaaaacatgtttacacattcttcatattccgcattaatatgactataaccttgttttccattaaatctatttgtgcccctgcagttgatatagttttcaatgcctccatacattgctcttgaagaaaaacctggccgttattcattgctattatagggagctttgcccgctgggttacgcttataaggactctccagatcatgaggatagctgatatcttcaggcaacatatagatcctttcc

SEQ ID NO: 94564 - DNA, 185 bp, Glycine max
  unsure (1)..(185): unsure at all n locations
  Clone ID: PAT_MRT3847_56402C.1
cggacgcgtgtacgaacacaggcggcttgtttnngttgttgaaacaagacacatatattcgggctggattaaaacttacgtgatgggcggggaccaactatactctgtaatccttatatctcatctatctgaagacccgtatagaagccgtaccgttatttcgatgctatggagattctaaaatg

SEQ ID NO: 94565 - DNA, 216 bp, Glycine max
  Clone ID: PAT_MRT3847_56403C.1
actcccacgcttgctcagtgaccaacgaggctgttcacaatgctgctgctgcatttaaagattcgaatcgtctccattcaacaaatgtcagtgccatactggattctcaacaaaagaaactcaaccttccaatactgtcaaccaccactattgtatccttccctcagactctataactcatgaaggtactccccgaattcaaagctaacaagatct

SEQ ID NO: 94566 - DNA, 305 bp, Glycine max
  unsure (1)..(305): unsure at all n locations
  Clone ID: PAT_MRT3847_56404C.1
ntancgaanggggatgtgctggtgacactatagaagagctgcgaaanggggatgtnctgntnacnctatanaagngctgcnnaanggggntgtnctgntnncactntncaagagctgcnnaatgggnatgtnctnttnncnctntctngtanntccntagctgggnnngtgctctttncnctttcnaatncncnntcacngggacgtngagtttgatnacnngtngatcgtccncanggggtncactngncatcctcntaggntnncngatgntcngtgatnnctgngntannnngtcnnnganc

SEQ ID NO: 94567 - DNA, 361 bp, Glycine max
  Clone ID: PAT_MRT3847_56405C.1
ctcactcatcctttcaagttcactttcgacgctggcgaacaattatgcaaccgcacacactgataccatacccttactaagttcattcacctcgacccttatcacactcctataactcgccatcctaaactatcacacctattcctaaaactacttcaacaaaacctactttccaaacataactttgatcgattaatccatcctaaccattctatctttcttaaacctgatctattctaccttatatcaccttctgatcgcaatcatacccgatttcgctcatcttattaccacacatacacctcaaacatacctaagttctcttaccatctatctgaagcatattccattagattctatt

SEQ ID NO: 94568 - DNA, 273 bp, Glycine max
  Clone ID: PAT_MRT3847_56406C.1
gggaacgggggcggaagttttttagagagaaatcctgttatcccaacttcccatgccgtaacaaaagtatggaaggattgtggacctgtattcggattcgggtgcaggatccgtgagactaacattagctactactccagttatctcattttggaccacacccgagtcgactgggatgtactacacaatatgtcgcattagtatggtggatgagggaacatcctatgcttatctggatcaggttttggatgaatgggaacatgtatcccatcc

SEQ ID NO: 94569 - DNA, 370 bp, Glycine max
  Clone ID: PAT_MRT3847_56407C.1
ggggttttttttttttttttttttatatcaaaaggatgattcaagcgttgagtttattgactatattataaacattggccttattcaaaagggtaaaaaaataaatacctaaacccatgagtgggcctccacccttgggattgcgatttccaacatctcacatgggatgtgtcaatcaatggggaccaattggtcataatggtttgggatcactaaaaaacattcctaagggacgattaactcaacaagaaaaaacccccaattgaaatgatctcctaaaaaaggggaaatttgatataatgaagaatcccacctttatagaagagaccgcggaaaccaaaatgaattcaatttgggaaagggacctggc

SEQ ID NO: 94570 - DNA, 318 bp, Glycine max
  Clone ID: PAT_MRT3847_56408C.1
tcaacttgcggaaagcgcgccggctgcggctgatcgcgaccgaagcctgccgcgcggcctcgaacgcggagggttttcgcagccgcgtcgcggccgagaccggcatcgagctcgaggtgatcgaccgtgagaaaaaaaatctaagaaaaaccaaaaagacaaaaataataaaaaaaaagagctaaaaaaaaaaaaaagaaaaaataccggaacagaaaaaaaaaaataatgactatccatgaaagcaaaaaacaaaaacagggaaagaaagcaatagcacaaagaaagaaaaaaaaaaaagagaaaaaaataaaaaaa

SEQ ID NO: 94571 - DNA, 572 bp, Glycine max
  unsure (1)..(572): unsure at all n locations
  Clone ID: PAT_MRT3847_56409C.1
cggatttaaacgtgatgaacacccgaaccaatagacaccagtttttattggtttggtttgaatctaacgtgaataggcaaaaataccatatgtatttgcagtaaaaaaattatttatttttagtataaatattttctttttgaaagggaaattttttttagtataagtatgtatttgcagtaaaaagaaaagtataaatatacatttcaaaattacttatttgtttcaatgattttaaggataaaaagtcatagtgacctttcctaatttttggcttttaccgtttagagttcgccatttgttgagaatgaaatttttgtggcagcgtagaactgcatcaggggtatgtttactaccttacttttttgggaaaattatatttatgctgaataatttatattaatggacaaatacgttatacatttcatttttttaggcaatgtacatttcatattattcataaatgaatgacattatggcaacattagaacatgatagtggcaaaaaaattattacattagtaatatgaatttcatacagacattatttaattactgtgntaaatacataac

SEQ ID NO: 94572 - DNA, 335 bp, Glycine max
  Clone ID: PAT_MRT3847_5640C.1
ggcacagcgagtcggccgagcgagacactagaaacgtgcgatgaaaatgaaggcccttgttttcttcgttgctacaattttggcagcatggcaatgccatgcgcacgatatgttccctctccgaatgaacactggctatggtgcccgtactccggaggtgaaatgcgcaagttgcaggctcgatgcggaagcacacaacatctatgcctttgagaccatccctgcagagtgcgttgcagcaacaaaggagtacatgcatggcgaacaatatggatcagactccggagcagctgaccgttcgggcttacttttatgccggagtcctctcagttttt

SEQ ID NO: 94573 - DNA, 442 bp, Glycine max
  Clone ID: PAT_MRT3847_56410C.1
aaccgtactacggcaccctcttggattgaggaactgggagcggcagtaaggctcctcctgatgtttcgtacagacctaggggaacatgcaccgtgagcctaccgtggggcagccatcagactgaacctgagtggctttttattattctgaaaacagaaccgctatgcaactgtttacaatacttactaccaacgttaaggctcatctgaagtattccaactaaccatccctgattctatatattctcaagggaacgtttactgaaacctccgttacattaatctttatatcttgttgtggcaccaaaactcgcctttgctctgggtgcttctatctggctccacgataaatacgctctgtaggctgtctccacagcgtcttgacactaggagtctcatgagaccgatgatactctcccactacggtttggattgcctttgca

SEQ ID NO: 94574 - DNA, 262 bp, Glycine max
  Clone ID: PAT_MRT3847_56411C.1
aaaaaattaaacttgaccattcctacccctaaacaaagcaaagagctttccaagacctcagggtgaacccaagaatcttgacccccaaaaaaaagccccattttttctacccttcaatggacaaaacttaccaagccaagccccttttacaaatgaagaattcacacattatttgaatctagggccacacattgggccacattctttttttgacctgggaaaacctattttcttggattttttttaattggccttttttttc

SEQ ID NO: 94575 - DNA, 1652 bp, Glycine max
  Clone ID: PAT_MRT3847_56412C.1
cccgggccgctggttcagggcgacccacctaccagggtggtgcctgcgggtgccagcccccacccccgttccgccacttttttttcctgaggggggcaggctggaagggccctgatttgctttgtaacaaccccttgcgctgtctccgttcttgctttcccggctctggctcgtcaaaatcaccttagcaaatgcactgaagctcggaaagtcaaagattggaaagttatattaaaggaatcacaggctgcaatatccttgggtgctgattcagctccactggtctattgtttacatactgaagccttgctgaagctcctaagacatcaagaggcacacgctacctacgagaaaatgccaaaatttgaccttgattattctaacaaattatttggcccggttcgtagtgcttaaattctgctcgagggcgcgcacatttacttggcaaccggcaggtttgaggatgctgtaacagcatctgagcaagcatctaagttagatccaagtagctttgagatgaatgcagtggtaaggagggccagagcagtgacatcagccagaatgagtggtaacttactcttcaaggcatcaaaattcacggaagcatatgctgtatacaatgaaggactagagcatgatccatacaactcagttctgctatgcaatagagcagcatgtcgttctaagctaggtcaattcgagaaagcaattgaagattgtaatgtggcacttatagttcaaccaagttatagcaaggcaaggttgaggagggcagattgcaatgccaagttggaaagatgggaagctgcgattcaagattatgaaatgctgttaagagaaaagccaggagatgaggaggtggccagggccctgtttgagacccagctccaactcaagacgttgcgtggtgaagatattaaggacttgaaatttggctcaaatttgtttttcatctcaagcaatgatcggtttagacattatgtaacatcacctgggatgtctgtggtgcttttctgtaacaaggcaacccacaaacaagtgttattggtgttggagcaaacctgcaagagatttccatcagttaattttcttaaggttgagattgaagaccacccttacttggcaaaatcagaaggtgtgaactgcatcccagcttttaaaatatacaagaatggatcaagggttaaagaaattccaggcagcaaccacgacttgttggaaaaattagttaaattatatagcaactgatggtgatcgcacttcttcgaatcacaacatatggcgcaagaaatgatgaagattagatttttcagaatggaaatgaagatgcccaaaataaatcaagctgattatatttccttcataaatttagtcacctgaattacaaggcagaggaaaccaaagacgaagcataccattgttaaaacctgtagaaaaatgtatagaaaagtgattctttgtgttagtaattgatttttttaatactttggatgtttgagcagtctttaattcttcatattcagtgcatattcgtttggaaaaacctaaactttttttttttggttgataagttatatattctttacaggagtgattatttaggctgtcattctaagttatgagcaatatagtcaaagaaacacgattgtttt

SEQ ID NO: 94576 - DNA, 760 bp, Glycine max
  Clone ID: PAT_MRT3847_56413C.1
ggcaccaatttatttcagattgggaaagccaaaaaaggcactgaattgcaatgaaacaagctcatgtgttgattcggtactcgctttccaagctcaggctcttcaaaatccccttagcaaatgcactgaagctcggaaagtcaaagattggaaagttatattaaatgaaacacaggctgcaatatccttgggtgctgattcagctcccctggttagtttccttggttaaacgtccgtgtttttgaggtttctttgctacgcctaaactttttgtactccaacaattttattttttttttatcatttttggatcgaatgtcacctaatgttccataatagataacactccgagatgggaatcctattattccactttgtttttatataataagtgccatagtgattgattgatcaataagcggctatggtatgcctttcgcttaaaaaatgattatgaatataccaggtctattctttacatactgaagccctgctgaagctcctaagacatcaagaggcacacgctacctacgagaaaatgccaaaatttgaccttgattcttctaacaaattatttggccccgttcgtagtgcttacctattgatgacaggcgcgcaaatttacttggcagccggcaggtttgaggatgctgtaacagcatctgagcaagcagctaaactagatccaagtaattttgagatgaatgcagtggtgaggagggccagagcagtgacatcagccagaatgagtgggtactac

SEQ ID NO: 94577 - DNA, 770 bp, Glycine max
  unsure (1)..(770): unsure at all n locations
  Clone ID: PAT_MRT3847_56414C.1
tcggttttaacgatgggaagctgccattcaagactatgaaatgctattaagagaaaagccaggggatgaggaggtggcaagggctctgtttgagacccagctccaactcaagatgctacgcggtgaagatattaaggacttgaaatttggctcaaatttgtttttcatctcaagcaatgatcggtttagacattatgtaacatcacctggtgagtaatttttgactgtgccttctagcaaaattatattcggcattgcaaataacaaacactgaccagttgtgaacaaattgaacagggatgtctgtggtactcttttgtaacaaggcaacccataagcaagtgttgttggtgttggagcaaacctgcaagagatttccatgaggtaattttctgaagggtaggaattttgaagtgccctaatattcttaataaaaactagttacactgtctcttataattgatttacaatattaggttgagattgaagaccacccttacttggcaaaatcagaaggtgtgaactgcatcccagcttttaaaatatacaagaatggatcaagggttaaagaaattccaggcagcaaccacgacttgttggaaaaattagttaaattatatagcaactgatggtgatcgcacttcttcgaatcacaacatatggcgcaagaaatgatgaagattagatttttcagaatggaaatgaagatgcccaaaataaatcaagctgattatatttccttcataaatntagtcacctgaattacaagg

SEQ ID NO: 94578 - DNA, 354 bp, Glycine max
  unsure (1)..(354): unsure at all n locations
  Clone ID: PAT_MRT3847_56415C.1
cccacgcgtccgtacggctgcgagaagacgacagaaggggtttcgcaacgaaaaaaaaaaaaaaaaaaaaaaaaagaaaagcggccgctctaaaggatccaaacttacgcactctagacgtagcccaagttatagttcttgtatatgggacgctatattcttttctctggcgcgaccttatatccaattcgcggggggtaaatctctaacgttacccactgtaaaaacccttnccttccccaccttattcgcctttttnctcatccccctttccccccctctctttcctccctttccacccccttnccctttctccctcctctttccttcccccctttntttctttttttctcc

SEQ ID NO: 94579 - DNA, 276 bp, Glycine max
  Clone ID: PAT_MRT3847_56416C.1
ctcaattgagactactctcatcatcaactctctatgccggtgttaaaattataaagttccccatcatttggctgactggtgactgaaccgaatcaattttcctgtaaggtggatgagaacaaactacaagctaatctgggtgagggagcgactcttgaaggacatcatatgacatgttaccacattgattgattatcacagaagcatcaattaatatataattctgaatgaactgtttgcgaagataatttgggtgtgcctgtggagaatgctact

SEQ ID NO: 94580 - DNA, 616 bp, Glycine max
  Clone ID: PAT_MRT3847_56417C.1
gtcctcccacctcagtgattcatgtagccaacgattcctctccaattatttcttctatatatgttcatgaatgcaggcatttaggacaacagaagtgattcacatcctaaagcatttgaagttcaaaagcttgcatcttattcacaagtttttccttacaatattctcttcccaagtctcgactcatacaacaacaatgggttttcgcttacctggcatcaggaagacatcaattgctgcaaaccaagcatcttccaaagctgtggaggttccaaagggctaccttgtagtctatgttggagagaaaatgaagcggtttgtcatccccgtatcatacttgaaccaaccatcctttcaggatttgctgaatcaagctgagaaagaattcgggtatgaccatccaatgggcggtctcacaataccatgcaaggaggatgagttcctaaccgtcccctctcacttgaatgacctgtaaatcatgctaatggatacccagatagattagatgaggcaaatttgtacagaaaagacattttcttgattttctattttctacagaagttgaaaccagtttcctgaatgagaagtaatgcagcccaggacacgtttcgtttcc

SEQ ID NO: 94581 - DNA, 1000 bp, Glycine max
  Clone ID: PAT_MRT3847_56418C.1
ctacgcgtaagtctaaagataataaaattattgcagttattaaactatttaccatttatttattttaaaatgttaagtactactataatatccgtgttcaaactaacaggatttctcgagatcatttactacacaaagattaaatctaataaaatgtatttttaattcagagaccaccttttactatacacattatattagcaaccagtaaatttgtacaacttttttttttttttaatcatcaatcctggaaagaaatccaggataacacccaggattttattttcaccgctccaaattattctgcgcgtcccaatgccttccatagtgaaaaagctcatatacctcatacccatcgatagtggctcctccccatcaatgtcatcactaatcagtccagattcatatgcacaaccgaatagagcacccaccagaagacaattagcaaacctttagctttgagcacattcaaatggatgcaagcgtaacgacccttcaggaaaatcctgcctcctaaatgattccaataagggcaagatagaattatggctacgggatagtttttgttgattgctctccatagcaaccaacacatcaccagtttctggtcctgctgaaccaccagctacagaagatggaacaggagcagttggagtccagatctttattgtgctatcaatcccactggttgcaacaacaaaatcaaatggatggcattgtacacaatttacaactttatcaagaagaaaataattgcgtcagacaaccatacgtctgcccgttcgctttccccaaatataccatctgccatcatcacttccagtagcaacatattcacccctttgaccaagaaaactggcttgtttttccccagtccccatattgcagtggccaacaaatctctgtttcatatcacctcctggtccaggctgccaagaagttctactgttctgtgacgaggatgaaggtgattcgcatgagccacttgcacgagcattgt

SEQ ID NO: 94582 - DNA, 432 bp, Glycine max
  Clone ID: PAT_MRT3847_56419C.1
tttcccacgcgtccgcacaatttgattgtgagttaatggatttaattcactaggaaagtgcattgtacctatgaataacatccataattgatgccacaatttgattgtgagttaatggatttggttctcttatttgatacttcaggagtacatgttaagggcagagtttcgtcttcccagtatagtagatgaggaagcaactcctgagagaaaagctcctatacgtgtaaaatttgagataccatattttactgtgtctgggatacaggtattgctccgtgtactgatgtacaatcttcttatattctgaatattgttatgcctgtatgcatctctatcttattaaaagatgaatatttcctgtattttatatctcacacttttccccattggtgtctcacatgtcattttgattatttctctaggcatgaa

SEQ ID NO: 94583 - DNA, 442 bp, Glycine max
  Clone ID: PAT_MRT3847_5641C.1
cagggcgctttcctggaaaagattagatcggagaatcctgggataccatgctttctctttggtcactccactgggggagctgtggtcttgaaagcggcttcccatcctcatattgaagtaatggtggaaggaattatattaacctcaccagctttacgtgtgaagccagctcatcctattgttggtgtaagttttgcatttgttagttgtgcataatgtttgaaattaatgtgtttctgatttgttactacagtcctagccatgctcggtacacttgtacttatatcttaagcttgccgtaaaaacaacctccgtttccaattgttatgtcaattctctgtaatatacaaagttatcattggttcatttgatgttggtgaattggaagcagaataaacacaactacagatgttattttactttgaaatatatatactagatt

SEQ ID NO: 94584 - DNA, 423 bp, Glycine max
  Clone ID: PAT_MRT3847_56420C.1
caaatgtaaaaaaatcagggtatttatatattatatagtaatataactggagtaactgcacacggaccaaatctaatcagagcctaaaaacgataaatgcttaaagtacagaaggacagataacatttatcaagtgctaccaaatctacactactttcacacaacgcgtatcacacactatagactgcataaactgtatggcgcattattccctctacctttatttgcacaagttcttgagatccatggggtgctacactagaatcactatctagacgtggtatgggggaggtggtgatgcatgtacatagcgcggtgtaggaggaaatggattcttgattgggctcttacgaggggtaggatgcacaactttgtaaccatacttactacatccgtaacattcatcaagcacatctacatcat

SEQ ID NO: 94585 - DNA, 433 bp, Glycine max
  unsure (1)..(433): unsure at all n locations
  Clone ID: PAT_MRT3847_56421C.1
gcttctcaacatctaacctctcgaactcaagttcccctttaaactaaaaaagcagatctcatattctcttcaattatccaataaaaccaatatctatataaccttcaaagtaaaaacaaccaatccgaagaagtattatattcatccgaacactagtattatcacaccacgatctacgtataatattatctttaccatacaaacgcaaaaagaatctcctactaatatacaatacgaaaataagtttcttcttgagagcataaaaactattgataataccantccgaagaatatcactacagacatgttcaacaagagaacagaacatatagttgagaagtgcaaatgaaaagtcgttatatatgtgcacctcaaccaccntctggctgtcccaaaagattctgaggaaaaatcctcacctatgagttctgtt

SEQ ID NO: 94586 - DNA, 126 bp, Glycine max
  Clone ID: PAT_MRT3847_56422C.1
ggctcgcggcccaccacaacgcataccactaagatccttatgctaaagaatttgcaatcatgcttagcgagaaacttgctcaagtcgcagctcgcatccttcctgctccacggctcatacatcact

SEQ ID NO: 94587 - DNA, 217 bp, Glycine max
  unsure (1)..(217): unsure at all n locations
  Clone ID: PAT_MRT3847_56423C.1
gngtaatattcatatttccggcttattttacgacggcaganacaaattctggactaaacacgagngcanatcntgctttgncagaagaggacaagatggaggtgattaganctngaggaantacctgatgatgntcttnaaaanagagtccatgaatttganaaactgtnagntcatgaaancnnngcgngatacantncgngntgtnganaattga

SEQ ID NO: 94588 - DNA, 2092 bp, Glycine max
  Clone ID: PAT_MRT3847_56424C.1
acgcgcacgcgagcttggacttgggcgcgagggcaaagtcaacagtgaagaggtgtgacagagagacaaaagaaaagatgtcagggcctcaatgctgttcaaatccaccaagcttgaaccccggtggaggagttgggcatgtggacaaagtgggtggtgttgattcctatttcactggatctcctcactccaaactcgctgttcttatgctctccgatgtttttggatatgaagcgccaaatttaaggaagcttgctgacaaagttggggctgctgggtattatgtagttgttcctgacctcttggatggcgaaccctttaatcctcagaattcggacaggccctttcctgcttggataaaagatcatggaccagtggagaaaggtgctgaagctacaaaacccataattgaagccttaaaaagtaaaggtgtttcagctattgcagctgttggtttttgttggggtgcaaaggttgtggttgaacttgcgaaatccagactgatccaaactgcagtgctattgcatccatcatttgtctctctggatgacatcaagggtgttgatattccaattgctatactcggagctgagattgaccaatattctcctcccgagcttgtgaaacaatttgaacaagtcctagctgctaaatctggggttgccagttttgttaaaatatttcccaaagtttcacacgggtgggctgtgagatataaccctgaagatgcagaaaccgtaaaggtggcagaaaaggccccccaggacttgctggactggcttgtttaacatcataagtgagacatcttgctctgttaaaactgtacaaggagtcaactttctatgcgagaggagcggggtcataacagtgaaggactggtgccgagaacacaacttgcattcagttagactttgatagtttgattagctctaataaggttaaggaccagagagagaaagagaaataagaagaaaaacacaagatgggttattggaagtctaaggttcttcccaagatcaagaaggttttcgagaagaatagcaccaagaaagctgctgctgctgaggccaccaagtcctttgatgagtcaaaggaggaatacaacaaagcctttgaagaaaagaagactgaacttcaaaccaaagttgttgaaatatatgaggcttcatcaactgaaatcaagagtttggttaaagaacccaaggaagctggtttgaagaagaactccacagaagtccagaagttcctagaagagctggttaaaattgatttccctggatcaaaggcggcatctgaagcatcttcaaagtttggaccagccttggcttcaggttcagttttctttgtgtttgagaaggtgtccactttcattgttacagaagaaaaagaagttgaagcccctcctgcagtagaaactaaaacagaagaagaaacaagtagtgttgtcaaagagagggagacagtggttgaagaagaaaaaaaggaagaggaaaaaccacaagcagacgagacaagtgatgagaaaaaagtggaagaaaaacaagctgagactgctgctaaagaggaagagaaacctgctgaaccagcagaaccaccaaagccttgaaaatttcgttttgaacagaagctatatatatgtagctgcttcatgaagatgcagaagatcatatacgtgcattcttagtttgcatatagtccaaaattgtcacataccattcccttattcttttattcctgtgtaaaattggttttgtgctgcttagtttgatattgttgcagatttggtgattgatatgcatgtcaattaatgtttttatgatgaatcgttttgtaatattattcatttttcagtcaaggaattgtgacgtttagtttggttcaacaaaaaaaaaaaaaaaaaaaaaaggatgtaatgtaaaatggtactcaatcaacgtaactgtagtttgcaagaaaataaatgttgtattgttacatgttggaagtggatcttattgctagatgatcctaaaaatgttgctttccgtgatttgagtttggtggacaattgtgatttgagattttaataaatcatattttaaaacctttatgt

SEQ ID NO: 94589 - DNA, 695 bp, Glycine max
  Clone ID: PAT_MRT3847_56425C.1
gtggagaaaggtgctgaagctacaaaacccataattgaagccttaaaaagtaaaggtgtttcagctattgcagctgttggtttttgttggggtgcaaaggttgtggttgaacttgcgaaatccagactgatccaaactgcagtgctattgcatccatcatttgtctccctggatgacatcaagggtgttgatattccaattgctatacttggagccgaggtagaccaagtttctcctccagagcttgtgaaacaatttgaacaagtcctagctgctaaatctggggttgccagttttgttaaaatatttcccaaagtttcacacggttgggctgtgagatataacactgaagatgcagaaaccgtaaaggtggcagaagaggcccaccaggacttgctggactggcttgctaaacatcataagtgagacatcttgctctgttaagactgtacaatggagtacttgagtgaaggatgtaatgtaaaatggtactcaatcaacgtagctgtagtttgcaagaaaataaatgttgtattgttacatgttggaagtggatcttattgctagatgatcctaataatgttgctttccgtgatttgagtttggtggacaattgtgatttgagatcttaataaatcatattttaaaacctttatgtaaaaaataatatctttaaaacatgaagtatttataat

SEQ ID NO: 94590 - DNA, 370 bp, Glycine max
  Clone ID: PAT_MRT3847_56426C.1
ggctgactgaatccctctcaaacttgcatttaacatttatttgctcttatacaaaagcgtgcaagtgagtagttcactgcaagctcaacatattgaatccagttccagggaagaactccatacaattattctttaatagaaaaattgactgtgacttatctatggactacacgattcttaaattctacgatgatctcaaaccgtcacagaggaccttcaacttttcttttcttcaacctgtcaaatatcatccgtctcaacgccttttcgacaacacagccatcgatttcgagttccaatccacccatgacgccggcacggtgcctcccaaaccgacggctcctgtcagaactaccgcggtccatttact

SEQ ID NO: 94591 - DNA, 639 bp, Glycine max
  unsure (1)..(639): unsure at all n locations
  Clone ID: PAT_MRT3847_56427C.1
atcaaaaggcagcatctgaagcatcttcaaagtttggaccagccttggcttcaggctcagttttctttgtgtttgagaaggtgtcaactttcattgttacagaagagaaagatgttgaagcccctcctggagtagaaactaaaacagaagaagaancaagtagtgttgtcaaagagagggagatagtggttgaagaagagaaaaagaaagaaaaaaaggaagaggaaaaaccacaagtaatagagacaagtgatgagaaaaaggtggaagaaaaaaccagctgagacttctgcaaaaggggaagagaaacctgctgaagaagctgctgcagtagttgagcaagcagaaccaccaaagccttgaaaatttcgttcttaatagcttctatatatatgtagctgcttcatgaagatgcagaagatcatatatatacgtgtattcttagtttgcatatactccaaaattgtcacataccattcccttattcttttattcctgtgtaaaattggttttgtgctgcttagtttgatattgttgcagatttggtgatggatatatgcttgtgaatgtttttatggtgaatccttttgtaatattattcatttttcagtcaaggaattgtgacgcttaatttggttc

SEQ ID NO: 94592 - DNA, 302 bp, Glycine max
  Clone ID: PAT_MRT3847_56428C.1
cccgcaacagcgagcgcgcccgcccttaatttaatatatattttttttttttacaattattctctagaccacaaggaggggggcattttaaacacaagcaaacaacccgccacagaaacaaagcagaaaacaaacacatcccataaagctgaacacatcccatatcccacccttaaaagggaatctgcaaaaagcccactaattcacgactaacaaatccaaagagcgaggctcaaaaccccgattcccggaaacccactcacaaactcaaacggacctccgaaaaactggaaaaccgcacc

SEQ ID NO: 94593 - DNA, 463 bp, Glycine max
  unsure (1)..(463): unsure at all n locations
  Clone ID: PAT_MRT3847_56429C.1
gagcgtctaacggagattcggtacggtagtctttctccccagttccctctctgtaggtgggaagttcctttctctcaaacattcggtacggtatactgcttttgatttacaagtcaccttcgctttgagtttcttttagccattttcacaaacacctttcgctcaacgtttaagaacctcataaatttttgttttcttattttggcgccctttccaatttcgagagactgaagtgtgaattgcttatttgccaatcatgatcagaatcagatctaacttacctcttttctctgttgtgctatctcgcatcagccataactcaatcgctgttaatcattgtcatatagtaaagaagccccttatgggtgctactttcaatttctttgacccttttaagtctgaaacttttttagcaccaacaaaagtttggtttctcagtcaagcctttntctacttcatcttc

SEQ ID NO: 94594 - DNA, 337 bp, Glycine max
  Clone ID: PAT_MRT3847_5642C.1
ccttaagtttatttgaggctccacccgcggtacatgctgccctaaagacaaggttatcaaaaggcctctggtgacgaacattgttgaacaggctgaaagggtatatgtgcacgaggacttgttctaccaacgatcctcgcttgcctatcatgttgtcaaaatgcactatagctggccctgtgctattcactatgatgtcgtgagggttacatcccacactgatgagaggaatcatgatcctggcctgctatctatcacgtgcgaggatgatgcaccaacgactggactatctgcccaagacccacgtgctgttggagtacgagctcctgcccgagct

SEQ ID NO: 94595 - DNA, 274 bp, Glycine max
  unsure (1)..(274): unsure at all n locations
  Clone ID: PAT_MRT3847_56430C.1
tttattatttttttttttttttttttttttnttttttttggtggtttttttttatgggggaggggtccgacccgggaatggcccacgggacccgggaggccacccaaattcccaaaacgttcccaaaatgcgggccaatgttaaccatggggataactattgccagagggaaaaccggcgtggaatagaaagccgcacgagtaaaaaaaaaaaaagccaaaggggaaaaaaaaagagagcccacggggaccacaagcaaaaatctttcgggctg

SEQ ID NO: 94596 - DNA, 123 bp, Glycine max
  Clone ID: PAT_MRT3847_56431C.1
ttacttttagattttagttcattatggtgatgtggctttataaatacgaaatgaatttcccttaaattttgaacggcataaaccattcatggaaggttcaagccccccaaatcggggacttaa

SEQ ID NO: 94597 - DNA, 225 bp, Glycine max
  Clone ID: PAT_MRT3847_56432C.1
gaatttaacagaccaacctaaggaagttcaggagtccgagaaaaatggacaccccacagaaaatatgggctctggggttataatcaataatcatgaggaggaaatacagctgcagaataacgtaggaaacatgtccgaggttccagctgaggtgcacgatggaaaaaccgtggataactctgctgcaagaggccgaggaattaagcggaagaagaaaagattgaa

SEQ ID NO: 94598 - DNA, 387 bp, Glycine max
  Clone ID: PAT_MRT3847_56433C.1
gaaaataaaattagcctccgagactgatcatcagagggccataatgacgggattggtgttagaggcaaatggaaagcgtctaattcgacagggaaagtataaagatgcattagaagttctaagcatggcagaggaaacattctctctttgtgatgattctgacacccttgagcttattgacatcattccgataatgcaaataaacatggtgtggtgctactttatgatgcaagacatcagttcgttatcagaggcaggaaaacttcttgcaaaggctagggaaggacttgaagatgcttatgggaagcatgctctacgcgccagacttttaaaaagtggttgctttctagaacttgcatggcatttgagactggagctgctcgaagg

SEQ ID NO: 94599 - DNA, 293 bp, Glycine max
  unsure (1)..(293): unsure at all n locations
  Clone ID: PAT_MRT3847_56434C.1
tcgcatgcacgcgtacgtaagctcggaattcggctcgagnttctatnnctcntnngntngatctnnntgangngttnggccaantannnnnngntntggtcgttcnacnnttagcntnngnnccgttcccancntgctcgggnnanngttacagnnnnntccggnngtnccgaatgntgcatannttncnatnnngcgtganacnntnttnnganannctgtnntcaccnanncngangtacatggcnctgnagnnngnnccancatcactacccantntcnggntcccaant

SEQ ID NO: 94600 - DNA, 440 bp, Glycine max
  Clone ID: PAT_MRT3847_56435C.1
cccacgcgtccgtttcgaaagattttatccattagtatattttaaaaatgactgggataaacgtaagatttcaattattgaaagtgagtaagtaaacaatttaattggattggtcgaatggtatcaaaaaaatggagcactaactgccattacttttttattattgaattaactcgttcaactttgtttttttttttatcatatcttattttttttcatttaatatttttctatttttatttatacatatttcttcttattatattcttatcaatttttattatttactttttattttttttttatttttattttatatatattatatacattttatttatcattcatatttatctattttccatgttataaatttatttatattatttttgttcatctaatttttatttgcgttatatgttttatactatctctatttc

SEQ ID NO: 94601 - DNA, 305 bp, Glycine max
  unsure (1)..(305): unsure at all n locations
  Clone ID: PAT_MRT3847_56436C.1
ccgtcccgaaaaaaaaaaaaaaaanaaaaattttatttttttaaaaaaaaaaaaaaaaaaaaaaaaaaaaaaaaaaaaaaaaaaaaaaaaaaaaaaaaaaaaaaaaaaaaaaaanggggcggccggtttaagggacccaagttaaccaacccttacatgcaacggtggggcctttttttagggggaccaaaaattaaatcccggggcgggaggttaaaaactttttaatggggaaaacctgggggttccccaggttaatccctttgaaaaaattccccgttaaacccctgggggaaaaaacaaaa

SEQ ID NO: 94602 - DNA, 343 bp, Glycine max
  Clone ID: PAT_MRT3847_56437C.1
gtcagacagcgaccttttctggatgaatgtcttccacgggagacattgccatccgggaagactgaagacggggatgactccaatcggagtagcagaactgtgaagcgatggttggggtcgggatggggaacttggccacgggagcatatgcgcgggaggaagctgagccggcgagtactcgcgcgtggcggcgggatgagatgggaagagaggggacacgtgcgagtgtggaccggaagagtgagaggtggggaatgagtgtacaaaaggggaactttgttgatgcttgagtctttgatcgcgcgattgcgatgtcgccgcgagtgccgttaccggacaaccg

SEQ ID NO: 94603 - DNA, 420 bp, Glycine max
  Clone ID: PAT_MRT3847_56438C.1
tgctgccattttttgcctctcctgactacactctaatctactgcactacaacattggtcctactacttaataaacctctctatgctttttctactgctgcctttgaaactgtactcaaaaagctgccttcaaattttacgactatctatcaaagtggagatgcttaaatatttgaggcttctgaagaagactccatgttatagactattggaaccttaacctgatacacaactactgaggaccaaggcactattgtataaagcttcactctcctttcccaagactaccctttcaacctccacagtaaattgtggatctaactgtttccacttaaactatgttaatgcatgacaacttatgcttgagaatactctaagataaatggacgatctgctcatcatgtcataacactccttctct

SEQ ID NO: 94604 - DNA, 378 bp, Glycine max
  Clone ID: PAT_MRT3847_56439C.1
aattcggctcgagacggctgcgagaagacgacagaagggatatgagagaacttttacaaaattagtttatgtctaaattaatggtagcttatgaagaagtttatgggatgtttcgtgcttattttcttctccaattagtgttaagttcttactagatgaaaatggtggacaaatttttaatacattgaattgctttcttattcttttcctgctaggtggtcaagtattgcaaagcacttaccaaagcgaactgataacgaaatcaagaactattggaactcatatctgagaaagcagtttgaaaagaatgccggggattcctcaagtccaaaaccaattatttctgacagtttcccatgatcaaaattccatgacatg

SEQ ID NO: 94605 - DNA, 412 bp, Glycine max
  Clone ID: PAT_MRT3847_5643C.1
ttaacatatataaaaaacattagaatagcggtcatcccactatctgctatcccgctatcccacttttggggtcgaccactctgctccgctgcgccggtattgacaactatgaatttaggtaggaaaagacatcaacaaagacttatcccactaggggaggtcggctacatggatcatacaatgccatttaacacggttaaaaaccaaatttttagaaatattatttagcttgaatctcaatctcccttgttgatttcctccaacgttctttttggtctccttttcactgttttaaaaatcatgcaatctactcttctaattggtacctctagtggccttctttgtacatgatgcccaaaccactttaaccgattttctgtcattttttcctcagccggtgctacactaatct

SEQ ID NO: 94606 - DNA, 1173 bp, Glycine max
  unsure (1)..(1173): unsure at all n locations
  Clone ID: PAT_MRT3847_56440C.1
ctcaaatcccctcgctccgcccaggtttgacatcgacaaaaccctcgaaaagaaatgtaacgctatggtaacntataatgcttccaacaggaccctctatgtgtcttggtcttttaacggagccgcaacacccaattcgaagaattcatcagtttcttaccagattgatgacctcatggacattctacccgagtgggtggatgttgggttctccgcttcaactggcgatctcactgaacgaaacattattcattcgtgggagttcagttcaacgttgaattcttccactgtttcgaataacaattcctcggacaataatggagcgaaggaccggaacgggttgagctcggttgcggtggttgctgtggcggcgtgtgcgattgttttggtggcagcagccgcgaactttgcagcttgggtgataatcatgaagaagagaaggggtaagggtgattattatgataatgatgaaagtggacacacatcggctaagtttgatttggatagggaaactatacctaggagatttgattacaaagaactagttgtagctaccaatgggttcgccgatgatacaaggcttggacgaggaggttcgggacaagtttacaaaggggttctgagtcatttaggaagggtggttgcagtgaaaaggattttcactaactctgaaaattcagaaagagttttcatcaatgaggttaggatcataagccgtcttatacacagaaaccttgtgcagttcgtagggtggtgccacgaggcaaggagagtttctgttggtttttgagttcatgcctaatggaagcctcgacagtcatctctttggggacaaaaaaactttgccctgggatgtcaggtaccaaggtagcattaggtgtggctttggcaattcgttatcttcatgaggatgcagagcaaagtgttctacatagggatattaagtcggctaatgtgttattggacacagattttagcacaaagcttggtgattttgggggcaaagttgttggatccaaggttgaggactcagaggacaggggtagtggggacttatgggtaccttgccccagaatatatcaacggaggtagggctagcaaggaatcagacatttatagtttcggggttgtggctcttgaaattgcatgtggaaggaggacttacaaagacgg

SEQ ID NO: 94607 - DNA, 253 bp, Glycine max
  Clone ID: PAT_MRT3847_56441C.1
ggagaaagacaggtaggtatctccctttgtccttagtgccgggtgcactcatcttgattgtgtcgtgacattgcatctatcgtagaacaagttcatctgcccttggcatggatctcagttcattgaccaaggaatagttgtgagaggacctgctccattgtctctgccattaccacattgtgatatatatttttttaacgtcctgtttgttccttgggttgaaacacatttcagaacacgcgatgctccatgg

SEQ ID NO: 94608 - DNA, 383 bp, Glycine max
  Clone ID: PAT_MRT3847_56442C.1
tacggctgcgagaagacgacagatgggggcagcgacagggagagaagacctaagcgtagagtacgagatctgaactgatgactgcgcgctatgattactagcacttagtctggcctgaaggcacctaactggattacttatgctagggacacatagatcatcagtgccgactccttcaaatgacatagacatgatcacactatgctacaatattgtccgcctgcacattgacatataccactctgtgtcgtgtgtcggatacatgcctactcaacctcttaaataagaagttatgcctcacgatacataccactattacgtcttggtcaaagccggaatgtcaccaggctattaaagatctagtcaagaatgttcaccattta

SEQ ID NO: 94609 - DNA, 339 bp, Glycine max
  Clone ID: PAT_MRT3847_56443C.1
tcactaggtacggcggccgcccttctttttttttttgagctgtcatttgatgagcaatgagtggcaaccctctataaagaaaagcaccaggcacttaacactaatctgcaagaaggcaagaggaaaagcgagggcccattcatagaaaccgggtaggaacccttcggaatcgctcactgaatgcgcatcctgcctctatacaggcatagcaaagattgggctacacccgcgaagagcttggactccagctcagtgatcaatgctgaaggcaagctttcctctcccgtagctggggctctgagacaagatcgcgcccttcacctaagagtgacccagccc

SEQ ID NO: 94610 - DNA, 369 bp, Glycine max
  Clone ID: PAT_MRT3847_56444C.1
tgcactgcgggcgggctgcctttttttttattacaacaaacatgctatatattgtatttcgtactacacgggcacaaattgtgtgactggtccctgacgcataaaacataatgctacctagacacgcaagcgatgaacacatctctaccctacttaccggcggctagttgcccttagcagcgtcgggcttgagttggggaacagcctgcgaacctgaggggccactggtctaacgctatgacttagggggactcccttagaaccaggaatcctagtgagaccccatcgatgggacactcgacttccagactgttcatgcggcttaggtatcaatgacttatgctgggtagcgtccacagactagcggat

SEQ ID NO: 94611 - DNA, 314 bp, Glycine max
  unsure (1)..(314): unsure at all n locations
  Clone ID: PAT_MRT3847_56445C.1
ctcttttatttcttttatttttctttccgttcctttctntttagtattaatcccctttcttttcttttttctgggaggggcctcttctctnttcttctctctattcttctcctttgagctgaccaaacccttttctaccttcttggggggagccttttacagtctgccaagtcaccctcatcccttcattcctcaatcttttaattcaaaaaaaaaaaattctcacaacttgcgttaatcttgtactcctcccattatctaaaccctttcttcaatctttcttagattctctcccaccttttttaaaccccttc

SEQ ID NO: 94612 - DNA, 410 bp, Glycine max
  Clone ID: PAT_MRT3847_56446C.1
gcaaccatactggaatcccatcttgaaagtttcaatcatcgttgctggttactttgttggtgattacgtgaccacttccagacttagaagaggtgctgatgatcaagtttcatctttatacaacaacaatgctttcttaaagaccagagagaacttggttcgctctttcgaacctttgaatagaaagtttactgaagatgaaatccaccaattctatgtcaataagtatagaaaggataatcacgaaagaagatggatctataacccttacattcatggtgaaaaggaagattacgaaagacttatcaaaaacgccacaggcaagactcctgctactgaccttccccacgtcagagctaaaattaatgaagagaataaggagaagattgctgctggagaagctattcaag

SEQ ID NO: 94613 - DNA, 439 bp, Glycine max
  unsure (1)..(439): unsure at all n locations
  Clone ID: PAT_MRT3847_56447C.1
gtgactgcatatgccagtatataatgcaaattaaccatgtcctttctatatgttttaatatcaaatgcagagactttcttctgagctttcgaggattggggttaaaaagtgtggaatgcgtacggcttctgacacttcaaaatattgctttccctgtaagcctcatttagaatccattaactgcttataaccaacgcaaatcactaaaaaaccatgcaataacatgttgcaatgaatcatatctttaaggttgacaccaatgttggaaggatagcagttagacttggatgggtccctctccaaccacttcctgaagcacttcagttacacctccttgaactgtaagtattgtatgcctcaaccagagaagacataaatatatcatatataacaagtgctaactactntgccacgtaggtatccagtgctggaagctgtt

SEQ ID NO: 94614 - DNA, 153 bp, Glycine max
  Clone ID: PAT_MRT3847_56448C.1
gaacaaagaaacaacgcttcatatacccaacttgcgggttcttttcatctgtatacaatctaaatcctcctaaatactcctccctctttaacccatccaatcttacttacccatcccaacgactttccatactcttctttattatcacttaaa

SEQ ID NO: 94615 - DNA, 324 bp, Glycine max
  Clone ID: PAT_MRT3847_56449C.1
acttcatgaccttgtttacccagccgagcagttgactttttattaccaaaggtttggttaaagtatattaatgctgcaatgcttttgatatttcatgcagtatttcttttcaaagtgtcatatttaattgaaatgtaatctatacaaaagtgtaaggaggaatctctatgtagaatttcctgctgaataagaagagcttcccctttaaagagagaaatattgttctagatgattgctaccagatgttgttccctcaaggtttgcatctatggccttttataatctttaaattatttatttttggcattaatattttgtttttaa

SEQ ID NO: 94616 - DNA, 465 bp, Glycine max
  Clone ID: PAT_MRT3847_5644C.1
tacggctgagacgacagaagggcaccaaaataacattgctggtttgattgagatgaattaaggaagacttaactcatgatatagtgagtctcagcttcttttaacaagtcacctaagcaattaagattacaatggattgactcttctatccttttgaggattgttgttggtcatgaaccttatcccaataccccgaattgtacgctcgtatttttccagggtgaataagtaatttaatatgttatcattctatttttattttatttctcacctaattttttcaatcaagaaatccaacatttaattttatttctactatatttctcttttttaaaattatctctctttcatttttatatactttatttctttcctctctaccaaagcatttaggcttaaggcactcgtgtacaagtttaagttctttagcttattttgatttaagtttcttgacttatttaaaat

SEQ ID NO: 94617 - DNA, 356 bp, Glycine max
  Clone ID: PAT_MRT3847_56450C.1
ggggggcacttccactgcgcgtcccaaaggggggggattaaaattttgtgcttcctcacaattcacaaccagacatatatatgcggatgcggctgtgacagtaaagtggctagcggggatttttattcccaagctacttctggttctaataaaaacctcacccttctctctgcgcggggaggatttttccttgcaagtggaagtgacaatctcctcttcaagggccagccaatcatccagcaataatggggggggatctaaaacatcaacactcagggctaggagggggggcagacaactttaaatgcaaaactgcgtgcaacttttgagggggcgagggggtcttttcactactc

SEQ ID NO: 94618 - DNA, 233 bp, Glycine max
  Clone ID: PAT_MRT3847_56451C.1
ccaacccgggcgtggccagtaaaacaaaaacaaggggggggccgcaaacattaagttttggaaaccttgaccaagagactggggaccagcgccgggagaaacagacctttctgttttggtaaaggaaattttttttatggtggttgggaaacttaaaaatgcgaccccggccgtggtttaaaaaaaaaaaaaataaagggggcgggaaaaaaaataataatgcttatccaaat

SEQ ID NO: 94619 - DNA, 506 bp, Glycine max
  unsure (1)..(506): unsure at all n locations
  Clone ID: PAT_MRT3847_56452C.1
ctaacactaccccgtacgccaaagtgtacctctctctattcttcttcctcgatctattcaatccccttgacacgatatccaaataaaaccaagacccagaaagtgatcaagataaagaaggacaaagaaggaatatacatacacacatatacatacacaccatgaaactcgtttggtctcccgaatcagccttacaagcttacatagacacggttaaatcatgtgagaaattcaaggaaaccggggtaccagagttgctatcagccatggctgcagggtggaacacgaaattcatagtggaatcatggtcctacggtggtcccatagctgcaagcgtaggcctagcagttgcagctcgcaacacgggtgcaagacacgtgtgcatagtcccggacgagcgatcaagggcacagtacataaaggctttggctgagatgggggtgtcgccgcctccggaggtggtggtgggggaggcggaggtggcggtgtcgcagctcgcggngctc

SEQ ID NO: 94620 - DNA, 386 bp, Glycine max
  Clone ID: PAT_MRT3847_56453C.1
ttattacgaagttttttgtgagtgttttcccttctctttcttttatcaggatggactactacccccgcgttttaaaaggcaaagggaaccttttatggaaaccgccgcgccccgacctttgatgggaaactaccggcgccctaatgcaaaccgggaacttatcgagaagaaccccaagggggttgtggggaccggaggaacccgccccaaaaaaaagcccccagaaaccccctgaaaagggggctaccccccgggcggctggacaaagcccgggaacctgaaaagggcgcggaacaaaaaaaaaaattttctaaaaacaaccccccctctaaggaccgggggaatcgcccacgccctgatgattcacagagattaagggggggggg

SEQ ID NO: 94621 - DNA, 1004 bp, Glycine max
  unsure (1)..(1004): unsure at all n locations
  Clone ID: PAT_MRT3847_56454C.1
tcgttcaaacttcacaagtcttctcttatagataacgaaaaaagtaattttcctaatcccttcccttcttccttcacttcactatctcctcttctcctttccttggtttcatccttttattactgtcgtagtggaaatctatcaccctgtggatcaattaattgacgcgagtttatgaaatccaattaaatgttctgagaacaaacgaagaacataagataacagacagaaagcgcttataaatggctttccacgagcatctaccgcacgaaatcacgttccagccgttcgcggaggagcagcagcagcagcagttaggtcagagccgggacatgcagcggctcctgccactctcgggcggggcgccgacgtggttgaacaacagcaacgccgccacgctccgccagcagaatttcctccacctgcagccggaatccgccgcgacggcggcgcagcaaaacgacgacgttcgtgctatggatcggaaccggaccgagagcaactctgaagcggacgatttggcggaatacaaagcagatattttaggtcaccctctctacgaccagctcctatcggcgcacgtctcgtgcttgagaatcgccacgcccgttgaccagcttccaaggatcgacgcgcagcttcagcagtcgcagcgcgtcgtcgacaagtactccggcctcggaaatggaaacggcgtcgtcgatgacaaagagctcgatcaattcatgacgcattatgttatactgctctgtgctttcaaagaacaattgcacacatgtccgtgttcatgccatggaagctgttatggcttgttgagtgaacaatctctacaaagcttgactggtgtatctcccggcgaaacgggtgcaacaatgtttgcacttgcttcctctctcacaatcttcttattacgatcatggttttataaattgcgntgtgcaactgtgattgcgtgtggctgcaaccgaaaggtattttgatcactgcaaccgtatcgtgactgc

SEQ ID NO: 94622 - DNA, 1594 bp, Glycine max
  Clone ID: PAT_MRT3847_56455C.1
cggaattttcgggatcccttacgcgtcgggtgaaatctaacaccgagcgtgtagatagtctatgaaatccaattaaatgttcttctgagaacaaagaacataagataacaaacagaaagcgcttataaatggctttccacgaccatctaccgcacgaaatcacgttccagccgtttaccgaggagcagcagttaggtcagagcagggacatgcagcggctgctcccgctctccggcggggcgccgacgtggctgaacaacagcaccgcggcgacgctccgccagcagaatttcctccacctgcagccggaatccgccgcaacgacgcagcaaaacgacgacgttcgcggcggcggcggcagcggcatggatcggaaccggaccgagagcaactctgaaccggatgatttggcagaatacaaagcggacattttaggtcaccctctctacgaccagctcctatcggcgcatgtctcatgcctgagaatcgccacccccgttgaccagcttccaaggatcgacgcgcagcttcagcagtcgcagcgcgtcgtcgacaagtactccggcatcggaaacggaaacggcgtcgtcgacgacaaagagcttgatcaattcatgacgcattatgttatactgctctgtgctttcaaagaacaattgcaacaacatgtacgtgttcatgctatggaagctgttatggcttgttgggagctggaacaatctctacaaagcttgactggtgtatctcccggtgaaggaacgggtgcaacaatgtccgacgatgaatattatcaggcagagagtaatgccaacttgttcgaaggaagcatggatggagctgatagtctcagctttggtcctcttgttcccacagaaactgaaagatctttgatggagcgtgtgaggcaggagctgaagcatgagttaaaacagggttacaaggacaagattgtggacataagagaagaaattttacgaaagagaagagcgggaaagctaccaggcgacaccacttcccttttaaaagcttggtggcagtcacattctaaatggccatatccaacagaagaggacaaggcaaggttggtgcaggaaacagggctgcaattaaagcagataaataactggttcataaatcaaagaaaaaggaattggcatactaatccgtcgtcttctagtggctccaaaagcaaacgcaagagtagtggtgcaggtgaaacaagtaaccagagcttcatgtgaatgaacacctgatttgaactgaaaaaaaaaatagatatatctctattcttcattttatgcaacaatggtgagattcatatatgaccggagcttagagggaaaaacatgaactgaaatggtggaatatggatgattaagagtaatttgtgataccaacatttacttggggggattaattaattacttggttcaattacagaaaaacctagtattgttgtatatgaggctgctgagttgatacctgatactgttgcaggcactatctatttggttcaatgggtatcgaatgcaatatgtattactattacagttcaaaggtttttgataaaaaaaaaaacaacatagaatccttg

SEQ ID NO: 94623 - DNA, 731 bp, Glycine max
  Clone ID: PAT_MRT3847_56456C.1
ccacgcgtccgggtagaaaaagatgaagattgtaatgggaacattctgactcttgaatccgagagtagagttgcagaagctgctgatttgattgtggacagttcagtaggtcttggtggggaagataaaacagagaggggtgaaagtgaagaggaagaaaaagatgaagattgtggtgggaacattgtgactatagaggttccagttgcagagacaagtgagaacatggatgtagatgtggaggacttgagtgttgaaggttatggttttgttgttggtgattttgtttggggtcaagttgagagtcatccttcgtggcctggccggatttatgatccatctgatgaatcttactttgcattgaggctgaaacaaaagaacagacttctggttgcctactttgggaatggaacctttgcatggtgtcaaccgtcacaattaaagccttttggggataactttgatgatatggttaaacagaatagctccatcgattttgccagtgctgtgcaagaagctgtaaatgagtttggaaggcttctgcatttgaagttgagtcatccatttgttgctaagaaaactggtcctgagtccagtctccctttggcgaaaaactctggcatcaaggaaggagttcttgtacctgaaatgccatagagagacttgattttctaattgaaccagcagaattactttcttatgtgaaacaaatttcgcaaattattgagttt

SEQ ID NO: 94624 - DNA, 278 bp, Glycine max
  Clone ID: PAT_MRT3847_56457C.1
aaaagctttaacttgcacgaggattccatttcgttaacaaacatgccaaagggaaatttttgtacaagaaactacatggtccttttaacccgttttctattatgggggaaaccctcccccccaaccttctttttttttaagcatcctttttttatggaacaaaattgtacccactttgggaaattattaaaatttaattatttttattattattttttggacagggcaccttgtttacaggattttaagaatacttaaccaggccgtggcttaaaaac

SEQ ID NO: 94625 - DNA, 127 bp, Glycine max
  Clone ID: PAT_MRT3847_56458C.1
cccacgcgttcggcttcggaatgcacactcactcctaaaacgaaccactgggggtagagacatactgcatcaggattaccaatgttcatatcatttgacgaagcgatgtttttgaaactcatacatt

SEQ ID NO: 94626 - DNA, 688 bp, Glycine max
  Clone ID: PAT_MRT3847_56459C.1
ccggtccggattcccgggtcgacccacgcgtccggcagaagctgttgattttattgtggatggtttggtaggtcttggtggggaagacaaaacagatagagatgaaattgaagggaaagtaaaagatgaaaactatgctgctgggaacatcatgactgttacttctgagaataaagtagcagaagctgctgttttgagtatggatggtttggtaagggttggaggggaagacattagaaatggggggagatgggaaggggttgcaaaagatgaagattgtggtgggaacattgtgactatagaggttccagttgcagagacaagtgagaacatggatgtggatgtggaggactcgagtgttgaagggtgtggttttgttgttggtgattttgtttggggtcaagttgagagccatccttcatggcctggcctgatttatgacccatctgatgcatctgactttgcattgaagctgaaacaaaagaataaacttctggttgcctacttcgggaatggaacctttgcatggtgtcaaccgtcacaactaaagccttttcaggataactttgatgatatggttaaacagagtagttccatcgattttgccaatgctgtgcaagaagctgcaactgagtttggaaggcttctgtatataaagttaagtcgtccatttgttactaagaaaact

SEQ ID NO: 94627 - DNA, 320 bp, Glycine max
  Clone ID: PAT_MRT3847_5645C.1
cacggtcagattttcgtatgtataaaaaaatatctattgcaagagacgaatcccttaattgaaaccacatactactaacgtgtatgtcttagggccgtggggctgcctcttgactagtgcaactcagtcccccacattgttatatattcacacaccctacccgatttaagtatagagtctcttgagtttacaaacagcaccattgatggcggataatgacttgcccaagcttaaactgaaaactcgttcactcaagggtcacgacgacaagccaaactgctaaattgtctaacgcgaacggactaatatgagtgccactt

SEQ ID NO: 94628 - DNA, 354 bp, Glycine max
  Clone ID: PAT_MRT3847_56460C.1
gtcaaacatccgtacatgaactactcgtagaattatacttgaatgcatgacggggggggaaccattgtcggcttagagtacttccactgaaactgctagatctatgttacacaccgcctagtacaaatgcacgctcaactataacaacctgctctcgctcccttaaacactgatcaaaaccttgacggaaaaggtatcccactacctatcactaatatgaatctacttgaagattgcgagtccatgcaagctcagcctagactacatacccttgataaggccaactcactatacatttacagaagcgcttcaagctcatcaatatggcgaaccgaagcagaatctgacatgaca

SEQ ID NO: 94629 - DNA, 703 bp, Glycine max
  Clone ID: PAT_MRT3847_56461C.1
ttgcatgcctgcagtgtgaattggagaattgacactggttcttgtcccttttattgtgaattggagcattgtactgtagttgactttgattttaaaagaaagattaactcgggtattttgttttttcaattctttattcttttatttatttaattaattgattttcagcctgacttgttggtatgcttcagtaaccccgtgccatcaaatttttaagtattcttagtgatgtgtatttttttatttatattatgttctgatcatgatataagcatctaattttatgttttacaaacctttaagtggttgaaaaaagtgagattggttataaaggcctgttcaggtcaccaagttctagtttcttttaccttttctgtagtatattaagcacattcaagtgaatttgttccacttatctttgtatctcttaactttttaggttgagtgatacaattaccgacagcagacgggcatcagtggaggtggaaaatgaatatttagagctgcaaacttggtctgatctccctactgaactcttggaattaatactatcccgtttaagtctagatgataatgttcgagcttcggttgtttgtaagagatggcattctgttgccacttctgtatgtgtggtaaaccaatcaccatggctaatgtattttccgaaatttggtgactggtatgaattctatgaccccgcgca

SEQ ID NO: 94630 - DNA, 445 bp, Glycine max
  Clone ID: PAT_MRT3847_56462C.1
cttaacaaagcgactcatttgtttttgtcacttagaatatgtcctatcgagttactgtatcactactgcggggcaggccaccgacggagatgagtccgtcacgacttgtctatttgactgctcgggggaatggacctccttgatccctcatgagggagtagaattgcccattgacttttcgtggaacttctcgtggacagtgtgggactgtacacctcttactttcatgtatggaccttcccatatgattactatggatagcggtgatacggactttttatatcttgtgcagagaccttagagcgctatgccctttgaccatatgggatgaggtgacgcattttggaatattaatctctgagagaactcacccagcgggccgcgtgcgatattagggcaccggaggctttccagctttatagctaattaatctggaaccgtgaag

SEQ ID NO: 94631 - DNA, 495 bp, Glycine max
  unsure (1)..(495): unsure at all n locations
  Clone ID: PAT_MRT3847_56463C.1
gggattgtggcaaatttctatagcctacattcatggatgagtttggcttttgtatccctcttcggatcccaggtatttgcttcttcatgagcctggataatttcttagtaaaatattacctcttgtgtttttatagaaactaaagcatacaattcacaccaccaaagctggtatgaagttcctgcaaatgaaatttcatgaggagttctccaatctaggtaatattttgcttatgattaatttatttaagttctttgctatattgtttcattccattctacttagcattccactactaaaaaaataagttctaacatcgtcctattaacatcggttatctgaaaatcaatgtcgttaagtacttacaacatcagttttcaaataaccaatgttaacagatcgatttagtgtgattgtaacattaagtatttgaaaatcgatatcgtctaagcacttacaatatcgattntaaaaaattaatggaatataattttt

SEQ ID NO: 94632 - DNA, 348 bp, Glycine max
  Clone ID: PAT_MRT3847_56464C.1
gcttttcaaggttataaagggctcattgagaaatatggtgcatggactccttacggtgctcatgacattaaccagacccaagagagagagtcgcaacacggaaagcatctcctggagataagtaaacgctcgctgagagaccaagaaaaagcactgctgtacatgagcacactgagcctaggaataaacattcaacttgaacaaaagacctggtcacactcttatgagatttcctgccttgtgatcccaagagtaccccatggagattggtagctgatagttacaatgaatagattctccgtgcaaacaacggcaggatcacatgatatcatagtggtgtaaattgtc

SEQ ID NO: 94633 - DNA, 274 bp, Glycine max
  Clone ID: PAT_MRT3847_56465C.1
ggggggacagacacaaatcacaaagcccagttccaaccccacattgaacctaaaaaagcaatgtcacgtccaccattttccccccctcgctcgagttcccgtctcgttgtcggcctgttagcagcattactcttagctcaatcgccaccttcgccttctccttcgtcgtcgtcttcgtcttctgttgcctgcagaggcacactatagtccaagttctccataagacaaatccgcaaacagggaggaaaactagccaaagtcgttgaggactttc

SEQ ID NO: 94634 - DNA, 656 bp, Glycine max
  Clone ID: PAT_MRT3847_56466C.1
ttattagatgcaattccactgtttgatgctctgtatatttatcatgaaaagtgccatttaataatgacgaaccaaatgggctcatgaacattttatactacatcaaatatttgtaaaagactcataggtttactctacagtacctacggagactttgaaaaccttgttcatgggaataaaaatattgtcagccatcggacgaaaatactatgaagatagttgatattatttactgtttctgaacctttgccctctgctttgtggttgatgcttggttatcaaagcttgaacattattttcttttcctaatggatgatgctaataattatttagttctttgggatctgatttttttttcttaataaatcaggtccgaggttaatgaagtccgcaggaagcaagcatctttagaaaacaagggtgtgttagtgttcttagtgtgttgtattttttcaatgctagttatattacggctatctctagatatggctacgagtgtctatagagtattacaaagtgttaatagaacagattgctccaggaaattttgtgccgttagctcttcatggtttctcctattattgaattgtatcattattatttttatattaactctgtgatagtccattttttaaatatgttgttaaccttgtgtg

SEQ ID NO: 94635 - DNA, 577 bp, Glycine max
  Clone ID: PAT_MRT3847_56467C.1
ccctcccggcctgagctggggccaagaggggaaggtgagaagcgaagatgagcagcgacacaaaagccaacagcaacgttggagggggatccagatcgaggttaaatcactacctctatagcggtgacaagaaacatgtcttcgttggtttaactctcatcaccgctgtctttaccatcccatggttccttatgaacagagggaccaaacaccaatctcatcaagattacttggaaaaagctgataaagcaaggagccaaagactctcatccagttctgcttctgccaaatgagcttcatcaatattctgttgaagagcatactttttccggtaacacttaattaaaaggctttaaatatgtttgttggatgtccttttctctctagttttattctatggaatggagatccatcttcctttttccgttgtcccgtactgctaaattagttttttatttgggaaaacaaaaaagaaattatgtataagaaaatttccttatataataaaattggttaggtatgatttacctgtttgaagcacagcaactggatagggagacttctcattgtaaaaaaa

SEQ ID NO: 94636 - DNA, 565 bp, Glycine max
  Clone ID: PAT_MRT3847_56468C.1
gcggccggccttcttttgtttttgtaatcataggataaagtgggcaattggaacaattactcacaagtcttcctctacactccacaattaatagcaccagttcctacttaccgacaatgtgccgcattaacatctagaccatgcaaattcacacttgagtcgccgctgcgataccaatacattgccccacttgtcaaacataaacacccgggggaatcaagactaccgcttctatagctgacacagctcggaggacatcagcctttaattcctcataatcttcttctccaaagactgaaccgaaccaggtagtcataaatgttggccttggccctttctgactgaggaagatcccaatcggacacaatatcgggttgatccacaatgctctctcatccacccaacgaggccgcagtgcctggcatggtcactgaatcagtcacttttattgtggcttgtacatctgcatcaatctcaaaactggcaacaccaccgataccagtcatctgcctcttgggaagctgatgttcaaggagactcggctagcctggatagtagacccgct

SEQ ID NO: 94637 - DNA, 321 bp, Glycine max
  Clone ID: PAT_MRT3847_56469C.1
gtaatcagatccaactgtagtatgctgataagtgaactaaagaactagatcatactacctaaaattaacggtgaaaaatatctaataagaacaggaaggacttatttaactaaacaatatggtgagcatcaaattcagaataacaccctgttctcatacccgatagttcactaatataatttttttttccactatgctccaattgagtccacagatagaccatgaacagtaagactcattttaagaccaaataactcaaaccttataatccaacttttttttttgagatattccccaccttgtttctacccctggtcgaaa

SEQ ID NO: 94638 - DNA, 1408 bp, Glycine max
  Clone ID: PAT_MRT3847_5646C.1
ccgggcggtacttgacggtgcgcgaggccgccctcgccgcgccggcgaccggtgcaaagaggcgtgtgcttttcttgattgttgcggttttcgggggcgccgtccggattccatgagtcaagagggctgtggggtgcttggccgtcggcttcggcatccccgcctgctccggttgccccaccctgggactgcatgggtgggctgcttacttctctccccccggcccggttcttgccaatggattcatggcagaggaactgacggtcgaaaacacatcaggccctgatgctcaccaagcagtggcattcagattagacagtgatctttctgtgattgagaattgcgaattcgtgggcaatcaagacactctctatgctcactcactgcgccagttttacaagtcatgccgcattgagggcagcgtggacttcatctttggaaacgctgcagcagttttccaagactgccaaatcctagttcgtcccaggcaagtgaagccagagaagggtgagaacaatgccatcacagcacacggcagaacagaccctgcagaacccacaggctttgttttccaaaactgtttgattaatggcactgaggaatatatagcattgtacctcagcaagcctcaagtgcacaagaactatttgggtaggccttggaaggagtattctagaacggttttcattaattcgatcttggaggctcttgtcacaccaccatggttggatgccatggagcggtgactttgctctcaagacactttactatggggagtttgagaacaagggtactggctctgatttgtctcagagggtgccatggagtagcaagatccctgctgaacacgtattgacgtattcggtgcagaatttcattcaaggaaatgattggattccatcatctgttggtagcccatcctcgtaaattaggaggcatccgtagatgggggagttttctttaggtacccctttgtaaattaccaataactaatgcaatagcaatatccatattaggaagaaatttcaaatcaatttgagtcgtgctggtgaacaataccaagggttgatcacactcactttattggggtcaccttgtttgaatgatttacaaagtttatctcaagattataaacattttattttccctggtagcccatcgtcgtaaattatgaggcatcagtagatggggagtggattttagggtaccccaatgtaaattaccaataactaatgcaataccaatatatcaatccagattaggaagaaatttcaaatcaatttgagtcgtgctggtaaataccaagggttgatcacacttcactttattggggtgacacttgtttggataatttacaacgtttatttcaagattataatatcttatttttccgttctcatgtttttca

SEQ ID NO: 94639 - DNA, 308 bp, Glycine max
  unsure (1)..(308): unsure at all n locations
  Clone ID: PAT_MRT3847_56470C.1
gtcgcangcacgcgtacgtaagctcggnattnggctcgagctcgagccgatgcctttttgggcacccagatttccacnnttctntgnacnccnnnacnctanntnnctgcgnnatgagggggggttatgggaactcnngcaatcnatcgntcgcngtcntgnccagggtgataggangggtgttgctcgtnggnattttgccnnagntgctgngctggntgtganagncgnttatgacgggatgntgctaatggagggaagntggtgccattggggncggnggnntgncaatcaatatnnggnnncnc

SEQ ID NO: 94640 - DNA, 517 bp, Glycine max
  Clone ID: PAT_MRT3847_56471C.1
ggaaaagctgaagattctcaggacggaaacactgtgtcaagcattaatgttaatgaaagtgtatctgcaagtgattctacatctgagaactcaacgacaaatgcaatgggcttaactaagagatcggtattaccccctccacccgcgggttattttttgggctatcgtcttcctccagggcatccgtgtaatagcttcacactccctcccccacctgctgataaaaagcgtactgggccacgtccatgcccggtgtgttaccttcctgtggaagaagccattggactgatgccagccttgccctcaccttcaccagtccttgggaatttaacatatgtctatgaagaaaatttaagtagagatggagaatttggtgggtcagactttggagggtatcctactttgaagcagagaaatgattcttttgatatacgagagtcgatgagtgtgcactgtggatttgttagaggaattaaacctggtcgcaacacaggatttgacattgatgaagctgacc

SEQ ID NO: 94641 - DNA, 634 bp, Glycine max
  unsure (1)..(634): unsure at all n locations
  Clone ID: PAT_MRT3847_56472C.1
tgggggtctttgcttcccatctctccctttcacctgcttcattgtccatcccctctggggagtgggtcaagaggtactggggaggtgctgagccaaagggatggtgggagggaggggcggtgaaggtgcaagtctggagtagggaaaatgaggtgacatggtatcttgtacacaggatactgggggctgggggaggcgatggatgggtgtggggagggcagaaatcagaccaacaagggttcagggaacaaagaccagttgggtgggatggggggccaaaaagggaaaacagaggagcaattggggatccgagtgtcaagacagggggcgctacaagccaggtaatgccaggactgggggctgggagaggagcagatgtggggatagtaccctctgcgtagggttgcctctctccccttccctctacccagatttcagttttccccgaccttgactccttgaacgtcactgaaaatggcagctattgcaaggagtaggggccgcgggtctacctgctgttaagctcggtggcccaggggagtggtgaggggtagcccagacccctgcctggctctctacacaatacttgaacattcatctgtnaaaaaaanaaaaaaannnnnnannnnnnnnn

SEQ ID NO: 94642 - DNA, 511 bp, Glycine max
  unsure (1)..(511): unsure at all n locations
  Clone ID: PAT_MRT3847_56473C.1
ccacgcgtccgcgctccttgatccactcctcctgcagctcctctccccagcctccctctctttctctgtccttggtcctctccccagcagcctccctctctttctctatccttggtcctctccagataacctgacgcagtggtcacgcttgacaaggagagagaaaggcgttgcagcagctgatccgcgcccgcccggccgggagcgcgcgcaggcgaaggatggaacaatacgacgggctctttcctcccgcctacgtggacgactcctcatccctcctcctggtgcccaacgccaacggcactgcgcaggaggagagaccgcgagcgaggcgcaagaggcgtcgagcagcgaggtgcggcggcggcggtggcgagcttgactgaggaggggaccacaagaagcggcggctgaccgacgagcaggtagagatgctggagctgagcttnccggaggagcggaagctggagaccggcccgnaggtgcacctggccgncgagctcgggctcga

SEQ ID NO: 94643 - DNA, 1166 bp, Glycine max
  Clone ID: PAT_MRT3847_56474C.1
acttgaatttcttttgtttatcaaactcggattcaacccaaccagtttctgcttctgttttcttttctcttacacaaagcaactcagaaattaatctcacatgaccttattgtacgatacacgcaaagactcgtacaatcattatttataagcatgccatttgcaccatctcgtttttcaatactttttgttctattaaaacctagagtatatatctttctttttacagtgacaccaaagaaatgctacaggaaaaagggtgaaatctaatctgtgcaaggtcattcactgttcatccaaacatccctgaggagttcatatctgacggcagattcatcacgactgtctttccacttccagttgggctttgatgatgctggtgaggaggagccactattcaatatggaagataatggatagtttatttcatcgagctcgtcatcactggtgtatgacttcctaacaacagaagatttgcttcttcttagctgagattcacttccaaactccccagtaatgtttgtaatggtagctgatgatggaggggaatatgcagtgggagctgcattgcaggggaagttgctgatagactcattttcatcctcaagatcatcctgtgagtccagagcttcaaaaacatcagtgggaattggatcagggcaaaactcatccgggacaaaattgtctagaatcttcttgattagcgatgcactaaacattggacacacctctttcctgatggatgcatttaagagcatatccttaggaagcatcaggaggtcgcttaaagcattaagaagatggaaggacttgaaggtattttgactttcatcattgctatcaaggtcattatcatctatatcctcaagtgggtcgtcatcatccataccaaatagaccagtcagccatctagaccagttaccaatcgcagtttttagctgtgcaccagccccaaagcttgctcgagccaggtggaatggggagaaccttgggatcactaatgggatcagatacaggatcagtaggaatatcatcatcagattcccgaagaatggcattgaacatagcaacatctaatctagccacacactgctccattatcaatttaggtagcacagacaaaaagccacactcgtgccctccagctcggatagggcaaagctcgt

SEQ ID NO: 94644 - DNA, 281 bp, Glycine max
  unsure (1)..(281): unsure at all n locations
  Clone ID: PAT_MRT3847_56475C.1
aacagaaaaagagaaagaaccacatgaacagcgccactaccctacaaagagaaacccaggacccccatttgatgaccagaaatcggataagcacttaaaaaacaaagtcggaaacgataaataacaaataaacacattaacacaccaaattggccgcacgctgcttgtgcaccccacctggaaaatatctagtatgaaaattgaaccagnaaacacattaactacaaattggagcaaataccacagtgcagtgcttcaaggaaaaaggaaaaagaaaagcc

SEQ ID NO: 94645 - DNA, 622 bp, Glycine max
  unsure (1)..(622): unsure at all n locations
  Clone ID: PAT_MRT3847_56476C.1
caatctcaattttgaacaataatttaaattttaaattttctacaattgacatgttatgtcaacttaatgacaattggtgctatttgattaataaatgaactgatgaaagactcatttacatataaatataagacaaaaaacagcaatataaatttttcatgagcaataatattttttttttcttaaaagaatttcatcaaagactagagttgtggaggagcatactaccatttcgactccacaagtccatactaacgggattgggagaaaatactcaaaatagcaatattcccacctcacttgtagaatagacgagtagacttgctattttctctgaagcaatttttgtcattacattatttagtcttcataaattcgattatgagcacggcagcatatgttcagactcaatcacattgacaagttcagcaagagctcccatagctgctgtgccccctctatgtagcagagagagtgccagttcatgttcattccatctgcttaatccgcgcgccaatttcctcaaagtatccaccttcacttctttgacccatggctgntgcaagactaaccatcaatcccaccaaacagcagacataggttttccatgtaattggattgc

SEQ ID NO: 94646 - DNA, 305 bp, Glycine max
  unsure (1)..(305): unsure at all n locations
  Clone ID: PAT_MRT3847_56477C.1
acgtacgtaagctcngnattcggctacgagagcncnnccantgnnannngcacagcncntnncgngnatanggcnatngngnagcntgcnnacaanntgtcngcantgatntagntaganaanancgcgatggcttcnctangnnngcncgacctgncncancaattccatnatcgntgcttnggaaaganncccaggnnganngncttgnngaganngncnggacatngnganatngnnnagaancnatttaccntaagtntagnncaagnngantgnnggaacntnnnnaanncgaagtgttc

SEQ ID NO: 94647 - DNA, 347 bp, Glycine max
  unsure (1)..(347): unsure at all n locations
  Clone ID: PAT_MRT3847_56478C.1
ttgttgggtcatgttgttcttattattatttggggaaaaaggggagggggtgtggggtgaggggcaatatcaatgttattaaacctggaccagttgtcaacttagttgacgatgtggggtactatttcaactattgagtcacaggatgtattggttaaaccggatatataaaaaaaatatataactatttaatagagattaaaaatgaaaattctagacttaaaattagaatttaattcaataacacttaaatttttcaacatttaatgagtctcatgattntgtaatttctaataaaatttttcttagaatgtggggctttgggtctaaattcaacccccaaaaac

SEQ ID NO: 94648 - DNA, 642 bp, Glycine max
  Clone ID: PAT_MRT3847_56479C.1
aaaacatcaacatcatataatgtaagtgaatattaaaaagacctcattaaaattcggtctaaatatacatcagccgatcttgaatatcatagtatatgtcggcacgacatttcaaactctacacaacattaatccatggtattggttatgtatcacggtccaacaagaacctatagcagtaataaggtaaaaacacagaaaattgaccaatttacagaatcctgccaattctagaatctatgatattctcccctgaatcaatagctttagccagcggcggtgtttccatagagactcagccaagtactttcatcttctccccttctgcctgtcttttttttggacactaactacttctgcgtatacacctataacattaaggaacattgagacaagtcaggataaattataagcatgcacagagtgttaaaattgaatattacagcataatggttttaagtgggactagtcattcactcattcctatggccagggttggcggttcctgaggctgatattctttttgggagatctctcagttcagtttcctgtttttctttttgtttctgggcgatgttttccattccaggagtttgcaaataagcctcagggatagaatagaaagaagggttgaggcaatgg

SEQ ID NO: 94649 - DNA, 368 bp, Glycine max
  Clone ID: PAT_MRT3847_5647C.1
aattaattgtttttttgtttgaggttttaccacactaaaaacaaatttgagcccttttggggaagcccaaattttaacataccctgggggcatcttaatccacaattgtggacccacaaaatgcgtttagaatagatgggaaaagtggcaaccaatgcacccaaaccccatgttattgaaaaaggaaaaaaattgggttgtaaaaagtgagagctttttttggaatgccaacaaatattgctgcctatggttcctagaaaataattcctgcggtggtgagagagacttattttttcttgggatgtttatgaaaagatagctccgccggcaaaaagtttcccagaaacctaaccttttttcataaaaac

SEQ ID NO: 94650 - DNA, 589 bp, Glycine max
  Clone ID: PAT_MRT3847_56480C.1
ggggggggaacttttcttttttttttaaaaaaccccaaaattttttttaaggggctgggcccaattaaatttttccccctaaagggggccggggtttccccccaaaaaaatttttataaccctcccccctttttttttggcctttaaatttcccaaaagattgcaaacaagtcaaagcattttttaatgggggaattgaaaaaaatttttcttggaaaaactttttaaaaacgggggaaaaccgctgggggaattttttaaagttgtttaaagccccttttttttttcccaaggccccccttttttccccctaaaaaattttttttttttggtcccaaaactccccaaaaaaaaaaaaattggccgggccctaaaaaggtggtttttttttcttggccaaaccttgttttttttaattaggggaagcaaacaacccccctgaaaagccacccaaattttttccaaacaattttaatttaggtttccccaagggggcattgggggtattaattttttaaaacccacccaccccttttttttaaaacgggttaggaaaaacaaaatttttttttttggggggggttttcta

SEQ ID NO: 94651 - DNA, 387 bp, Glycine max
  unsure (1)..(387): unsure at all n locations
  Clone ID: PAT_MRT3847_56481C.1
tnnnnnaaaaaacccatttgggggggttttttttataaaaaatttgaacctaaccttttaacctttggttaaaaccccagggcaattccttacaatattgttggggagaggctttatcatattaattaccaatgatttggtgggggggggtgttggggcccnnnncatttaaaacccaatttaaaggtttttattaattaaaataaccctagacaaatttttttcctttttaaaagtttccttcctcacgtcctaaaaaattgccaaaaattcctgttttaaacaggttccaacattgtttttgtgcaacaaacctttccttgggattttcggttttttttgaatgggattcttttgtttctccaaggctttataatttgtcccgga

SEQ ID NO: 94652 - DNA, 1041 bp, Glycine max
  unsure (1)..(1041): unsure at all n locations
  Clone ID: PAT_MRT3847_56482C.1
tggtgtggtttgtgatggctatcttgctgttgttagaggcattaggagagctattatgacagggagggcagtaagggtgaattcacagttgaaatctcacaaaagatttgctaatgcatttccaagattttgcaaacttgttgatgatgccaggctctattgcacaaatgatgtcggtggtccaccacagctcaaatggcggaaggatggtgatcagaatcagaatctgcctgatcccaaagatatcaaatgcttggaaaggataggcagtgtaaatgttgaagctgattccatctacgaactttacaaggatcccagccctataatggaacctggttctgtttggaaagacattgttctttcaccttcaaggtataataatgatcagaaggaattgaaggaattcattcagaaaatagaaacatccatcagaaaacggtaaccattgatattgctgcatgatattttcctcccaaagccaagttttggagtatctaacaaagtttgagttaccaagttttgtatctgctattccctatggtttaattaacgaccgaagaatacaaagggagaaggtcgagttctgcatggaagtcgttttctttgcatcaatatgcaaaccaactctaattcacggttaagtttgcccatgtacatatgtgtgcgtaaattaattaaaacgtacttcattgaagcattttcagttcaaatcaaatgtatataattactgattattgaatctagccttacgttgtaaccaaaacaaaaacaaaaacaaaaatcagggttgtaaactccaatgttgatgggtgaaacttagtttcttttcgttgaagaaaaatagacaaagtatgatccaaaggatgccaccgtgtagcggtcactggaggaagagggttcaattgatgtaggaagagagttcagaaacggtccctgaattggagggattgttttctttacatatcaatcaataaatattaaatcaaaatatggtgtctcatacttgttggttaaaaaaaaaaaaaaaaaaaaaaaanaagg

SEQ ID NO: 94653 - DNA, 1554 bp, Glycine max
  Clone ID: PAT_MRT3847_56483C.1
gacttcaattaatcaaatctatgatctaattttaaatggcatattcgtaaatttccgccaaagcacagaggatattatggacacacaagataacgggtggtaaagaatattttcgcgtccggcgtggtacaaacgaatttctcagtattttttgtttttttcctgcaaagatcaatgtcttcagcatttctagtttctctcccaccaataatggagtcctgttgttgaatgatcgaccaataaaaacatccctgtgttcgaaggtttcagaagaaaagtgcaagctttgcaagtttgaagggtattattattatggcacagttcaccacgcagggtcgcctgaagctgctcttgaatggggagggtgtgtcttctgttttggagcacaaggacccttttctctacaagtgcagatcagttcagacccacaagagaagaacaaggtacgcaggttcttctgccagaatttactatgcatcaacatcatctctgagtagcaaaagccaccgttgtaatgcggaggcacgtcacacttctggcaatgggagtgttcatgatgaatatgatgacattgatgatgatgaggatgaggatgatgaggaggaggaggaggaggatgtgtttgaccgagatggcttgtcttgtttccggggtttggtgttggacatagcttacaggccagtaaatgtcgtaggctggaaacgtgctatatgtttggagtttatggagaaggcagatgtactggagtattatgctaagacagtgaactcccccagtggatctttctatataccagctgtcttaagggttcctcatttacttcaggttgttaaaagaagaataatcaagaacaatcttagtcggaaaaatatactatttcgggataattacacctgtcagtattgctcttcgcacgagaatttgaccattgatcatgttgtgcctgctgcactaggtggagaatggacatgggaaaatctagtgactgcttgtgccaaatgcaactgcaaaaagggtagaaaaactttagaggaagcaaaaatgaagttgattaagcccccaaaggttccaaaggactatgacattcttgccatacctctaactgctgcagctctaaggatgctgacaataagaaagggaacacctgaagaatggcgtcagtatctaaggtctccttgagttaaacttcagtggtagttgtatagtcctgtatgtcatgtcattcacactaaatttatccttgactagtgcaaccatctcattctaaatttgaattattcaccccaaaaaatttagaacggattatcttgcttccaaaatatagtaatggggccacattgtattgtctttagtgcacccacattcaatttcacatttgatgagaatgcagagttgtacaagatccgtactagcatgtaatgcatgccctgagcaaaaactaaacaacatacacgcaaacggttgatactactttagtaagagtaatgctgcttacagaagtttaaattcaaatgcaatcaatcttggtattagtagatatttccatttgatact

SEQ ID NO: 94654 - DNA, 927 bp, Glycine max
  Clone ID: PAT_MRT3847_56484C.1
cccacgcgtccgcccacgcgtccgctgaaggctcagctggagaaatgggctccaactaccttcaagaggtcactggtgcaggtgctaggaaaaatgcagggaaatttgttgttctacacctccgatttgataaggatatggcagcccattcggcctgcgattttggtggaggaaaagctgaaaaattggcccttgcaaagtatagacaggttatttggcaagagagcgttctcagataaagggaaaagcttctctactagctgcacttgactactatgttggcttgcatagtgacatatttatctctgcttccccaggaaacatgcacaatgcattggttggacaccggacatacttgaacttaaagactataaggccaaatatggcattgatgggtcagcttttcctgaataaaaccatagagtggtcagagtttcaggatgcagtggttgaaggtcaccaaaatagacaaggcgaaccaaggctgaggaagccaaaacaatcaatatatacatatccagctcctgattgcatgtgccaagcttagtgactagtagtatacttaaattattattgctcacgatgtagcctgtgtattttatagttcggtgtcttattatttaacattatatatatctagtgaaaataaaaagctacggggtttgttatgatgctcttgataagagtgcttgagagagttgggtattgtgtgggagatgtatttatcagatgatggcattcttagcaggagtcagccatattaatatttataattttacaattcaataacaggagccatattattgtttattattcaattatatcagattataccatagttttcatactagtggtgttactgcaggaaaacattattgtatggtatcttaactaatattttataatatatggaattgagtgttattc

SEQ ID NO: 94655 - DNA, 355 bp, Glycine max
  Clone ID: PAT_MRT3847_56485C.1
ggctcgagggctagtaataatagtggtaataattctaatggcaatagtagtgtgaagaaggatagtgaagatgaggagaagcagatgcagagtaggatgcagcatcccttgggtgataggtcaacaaatcagatgcatagagtggtcacaagtaccatggcaatgcatgctgccaacaagcagcaacagcccaatcaagggaatgaaggaactctgaacttgcagggtccgaaagtgaatggtaatggcaaacaaaaccatcagtctcaccagcaaagcttctcgtattccgggatttacatgaaggggagggaacttgaggaccctgagaataaagcctacatgaaagcaatgg

SEQ ID NO: 94656 - DNA, 2600 bp, Glycine max
  Clone ID: PAT_MRT3847_56486C.1
ctcctttactctctctccctctctattgcccttcaaacacagacacatatctgcccttcgcaaccctccaaacccacatttaactttctataaaaccatcattatgaacatggggtttactctcttctcattctgacccttcttcttcttcttcatctacattagtagttcttgttattcattattcttcatactcacacagcttcttctgggggcaaaaggggtcatttttcagatccgaagtatatataaaaccatcattatgaacatggggtttactctcttctcattctgacccttctctcttcttcttcattagttcttgttattcattattcattctcagcttcttttcttctggggggcaaaaggggtcacttttcagatccgagattgagctcctttacccatcatcatcatggagctcctcgggtacctgaatcagggtcacccttctagaggaacaacacttgttattactctttcattggtgctttcgacacttgtgtccttctccactttcacacatgccttctcttcttctgcgtttccggaactgaatcctataaaacctaggcactcacgtcttctcaggagtgccgtgcaacatgaaactcctacatcacagctttctgaaatatggtcacctctggaaagccaaggatggaaaccttatgttgaatcaaataagccaacattaccagagaagtccgagggatatatccaggtctttcttgatggaggtttgaaccaacaaaggatggggatatgtgatgcagttgctgtggcaaagatactgaatgctactctggtgattccataccttgaattaaatcctgtatggcgagattcaagctccttcatggatatatttgatgtggatcatttcattgatgtattgaaggatgatatttctatagttaaagagctgcctaaagagttcagctggagcacaagagagtactatggcttggctattcgagaaacccgaatcaaggctgcgcctgtgcatgcatcagcccattggtatctggagaatgttttgcctgttctacagagttatggtattgctgcaatctctccattttctcacagactgagttttgacaacttgcctatggatattcaacacctacgctgtaaagtcaacttccaagctttaacctttgttcctcatatcagagcacttggagatgcccttatcagccgccttcgctatcctgaaggctcagctggagaaatgggctccaactaccttcaagaggtcactggtgcaggtgctaggaaaaatgcagggaaatttgttgttctacacctccgatttgataaggatatggcagcccattcggcctgcgattttggtggaggaaaagctgaaaaattggcccttgcaaagtatagacaggttatttggcaagggagggttcttaattcccaattcactgatgaagagttgaggagtcaaggccgttgccctatgacaccggaagaggttggattgttgctagcagctatgggatttgacaatagcactcgtttatatcttgcctctcacaaggtctatggtggagaggcaaggatttcaactttgagggaattatttcctctgatggaagacaagaagagccttgcttcatctgaagagcgttctcagataaagggaaaagcttctctattagctgcacttgactactatgttggcttgcatagtgacatcttcatctctgcttccccaggaaatatgcacaatgcattggttggacaccggacatacttgaacttaaagactataaggccaaatatggcattgatgggtcagcttttcctgaataaaaccatagagtggtcagagtttcaggatgcagtggttgaaggtcaccaaaatagacaaggggaactaaggctgaggaagccaaaacaatcaatatatacgtatccagctcctgattgcatgtgccaagcttagtagtgactagtagtagtatatacttaaattattattattgctcacggatgtagcctgtgtattttatagttcggtgtcttattatttaacattatatctagtgaaaataaaaaagctatttccactcctattcctaatggagtttgttatgttgttcttgataagagtgcttgagagttagttgtgtattgtgtgggagatgtatttatcagatgatggcattcttagcaggagccagccatattattaatttataattttataattcaataacatgagccatattgttgtttatcattattcaattattataaactagattgtagcttacttttcaaaataaaaaagttactgtaggaaaacattattgtatggtttaggactactatgatcttaactaatattgtatcatatatggaattgagcgttatagtaaaaaaaaacaagaaacattagggcgggcgcccttagtctcgtttttttttaaacctatacatctcttattattctgtaaagaaaacaatattacatgtaaccacttgaaacatttttatataaggcccagattaagagacaggtcattattttttttaattgacaaattggtttcaagacttttttttttagttttatg

SEQ ID NO: 94657 - DNA, 216 bp, Glycine max
  Clone ID: PAT_MRT3847_56487C.1
gctaggccttccaaaacacctgcttcctcatttctttcttatccttcctcacaaagcctctggtgggctctatcaaccaaggatgctcaacatttccttgatccacctttattgcgcatgaatcctaaattttacactaagcacacttcttttgggagaaatcaagctatactgatcactgatgaatctgatctactttcctattacaacctccat

SEQ ID NO: 94658 - DNA, 632 bp, Glycine max
  Clone ID: PAT_MRT3847_56488C.1
cttttaccacgggccaaatacagttggtggtgtgttttcaaccacgcgtccgcctaattttattgttgggaactcagtgattgctggtgtcatagggtcattcttcttgttctctggatacttcatatcaaagcaggaaattccaaaatactggattttcatgcattatatatccttgtttaagtatccctttgaagggctcctgatcaatgagttctccaactcgggaaagtgcttggagtacatgtttggggcatgtgtgaagagtggagaggatgtgcttaaagaagaagggtacgggggagagagtaatagatggaagaatgttggggtcactgtgtgcttcatcttggtttacaggttcatttcttatgttattcttagatacagatgttcccagatgggatttggcagggttgtcaccaactaaatgtctatggtgactcttcctctctctctctctgattcacgtgtcttggatgtttctaatagcaaccaatgaagatattctcaacaaaaaaatagcataaaaaattataggtttggtgaaagccaacaaattgtactaacacgatattatgttggtttttgctttacatgattatttaattcacaacaatgtgtttctcttc

SEQ ID NO: 94659 - DNA, 217 bp, Glycine max
  Clone ID: PAT_MRT3847_56489C.1
aactatcttttatgctatcgaacgcgaagtccatcacaccgacttatttatgttcgggatagataacaccgtgctctctaatatcccatactatgaaaaacatggatatggggtggaggaatgcaatgcaacctgatatgatgaatggcttgacactggcgacgcaccggcattccagtaacttcgaaactacatcatgctgttgtgtgctcgcttc

SEQ ID NO: 94660 - DNA, 294 bp, Glycine max
  Clone ID: PAT_MRT3847_5648C.1
gatgaatttgagtgtgatcattaaagttgccatggttgatatcttcaaacaaaaaaaaaaaaaaaaaaaaaaaaaaaaaaaaaaaaaaaaaaaaaaaaaaaaaaaaaaaaaaaaaaaaaaaaaaaaaccaaaaaaaaaaaaaaaaagggggggccgttttaaaggatcaaagttaacttacgcttgattgcaacttaatagcttttcaatagggtaactaaattaaaattaattgccctccttttaaaaaggtctggactggaaaaaccttggcgttaccaacttaaacggctt

SEQ ID NO: 94661 - DNA, 312 bp, Glycine max
  Clone ID: PAT_MRT3847_56490C.1
ggggggtggaggagaaaacatacatacatttttcttggtttttttttctctttaagagagaaaataagtggcttgttatttgtgtatgatcaggcatcaatcaaccaccatagaataaatgaattttttatacacattcttgttaccctactatcaacttgcactgtggttacctcccactattccaatattattatcgccagctatacttaataccttaaacatctatcctcctatgttcactacaccaaacgacaaaacgtcttatcctacaatattgccaacataaaaatactctacgcagcaatgaac

SEQ ID NO: 94662 - DNA, 444 bp, Glycine max
  Clone ID: PAT_MRT3847_56491C.1
acttcggctcgagtacggctgcgagaagcgacagaaggggattcaataagcacatagttcttaagtgaaaggacagtaacttaaggcaaggattaatttcatcatgcattttttttcatgctatgtgctgttataagctgttttgtcgataaacaggcttgtgtgaatggcgtggaatcaagaacaagagtatgctatgcaagacaaggattgtggatgagaaaagcatatatcaactaagatcagtgagaacaccatgctccagaagactattatgaattgtgaacgtgaaggcatgtaaccaaagcaacagtgagtaaaaaggctaatgagactagctagaaagtaccaccttaaagccacttaagctaggcattcttgcagatatatgttcatgtaattcttctagacaaatgtaacaatcttccatgtgcatgtagcaca

SEQ ID NO: 94663 - DNA, 344 bp, Glycine max
  unsure (1)..(344): unsure at all n locations
  Clone ID: PAT_MRT3847_56492C.1
tgccaggaaaaaaataattgtaaggccggaaattgataattgtagggtttttggcgatttacttttttttgcgctggtgtttaattttgtannaaaaaatttcagaagagagtgaaagnncaaaatttctggagcaaggaagagaaatacccatctgaaacccacacatgaatacanaaacagagagaaggagttagagaagcgtttggttaaaatgtannattctcgtgagannaaaaaaattccacttcagagatttaattctttcgccgcttcagatcacnagacagagaaaaaaattattgtgttggatgtgctaaatttattaaaattattcataaatg

SEQ ID NO: 94664 - DNA, 532 bp, Glycine max
  Clone ID: PAT_MRT3847_56493C.1
aaacaaaaaaattttgaattgggaacctcccttgggaccagaaataaatttttccttcccttcaaaaagggggagggatttaaaaaagaattacccatcctttattcttcaaaactttaacaaccgccttattgaacataagaatttgaaaaaaacttttgcaatggtttcaacccaaagcagatgccactttttggttattaaaaacttcttggtttttcttgggaaacttttcaatcaattcccgctttctttttttcaaaatgtttggaatgctgaccttaaaatgaacatattggtccccaaatggggaaaaatttttaggcttgaacccttttttttttaaaaccaccttttgaccaggttgggggcccggaccaatcttaaaaacaacatctccagtaagagttgggacctgaatggttccccccaaaatagcctgggggatacttaagacagcctctacctgaatattataatccttctttacggaagacaggatcttccctgaccttgaggggaacctaaagat

SEQ ID NO: 94665 - DNA, 399 bp, Glycine max
  Clone ID: PAT_MRT3847_56494C.1
caaatcaacccatatcctcgaatttgttgcatgattaaattgtgcttgaatttattttcttgttcttgtgagccatgcatgattattaatctaatagggaaaaaagaaaaaaaaatgaccgtttatgggtccacaagatcaacataatgaaatgggatacgtgacagtttgtctaactctgagagagtaaaaatgacggtaggtttagcaaagggtaccttgttaagcttcttgatcaaggttgatgccatgtgtcgttcgtttttaaatttttgtttatttgtatggtaagtttcattaataatttagttttttattttacttttttttagttactattattgcttttaatgcttatattattttttttataaaatcataaacatttttttttttttt

SEQ ID NO: 94666 - DNA, 180 bp, Glycine max
  unsure (1)..(180): unsure at all n locations
  Clone ID: PAT_MRT3847_56495C.1
aaaaggaaaaaatatatataaatgttattacgatatgtcagtagggtaaagttaggaaaggtggggaggaggatgatatatagcatgtcaggtgtgtgtgtagtgttcctggaggagctagctaggcacaaagggaagtacatgggagtgcaggggtgatggaaancatcattgtaatat

SEQ ID NO: 94667 - DNA, 1079 bp, Glycine max
  Clone ID: PAT_MRT3847_56496C.1
gtcggggtgaataattaaaatgacgtgtcggtgagtgtgttttataagagagaaaggtgaggctgagctcataagtggtgaggtctggccgggttaaaaagaatagcagcggtgccacttgggcagaggaggaggaggaggaggaagaagatcaacaacacatcaccaaacaaccttatggagatttgggccaacatgttttttcccctcaggcgtgtctggctttctctctctgctcgcctcaagcctcgcaaaaacggagcagggctgctcaagcttcaggatgatgtacagacttgtggatatcaagatgtacaagtgatgtgggaaatgctacagagaaccgaaggtgaagttatagaaaaccaccataagcgcaagcagtttcccttctggaggatctttgtatggtccaaccatactcaatctgcaaatcacgcttcaagttaaaaccagacacaagtttcaagtttacaaataaaaccgcttctgcagctggcaagccaccctccttttatcttcccattgccagcatcatgattcttctcttcttcttcttggcttctaaaacttagcacatgtcgtgttcaactcaaactctactaccctgtcacagtacagtagtagtatatatgtaaatataccaatagtttcacacccaagagcttttggggaatagctactgtttctctaactgcaaagcaagtagatttcatgtctcactgacattgaagcagcgcctcgttagcccggaggattacaatagttaactatggtcactgttagtaacaagcagcagagtctttattatctcaacttttgtctctgtaagatcctgagtcaaaacttacaagtgagccaacgctttatgctatcataatcttaaatttatccactttcagaccacaactgtgtttaacaaaagaaagacgcatccaagtacatcaatcatatatatacgtgaatttctatttcattagtccaggatcgtcctcaacctactaatcggtcaaatgtatttgaagcagtacatcagcttgttcctatttataccaattctaaaaggtttgatattatcc

SEQ ID NO: 94668 - DNA, 172 bp, Glycine max
  Clone ID: PAT_MRT3847_56497C.1
cgctctgtttctgactctgcgacagcggctgaggatgccgaacgagcgaccttcttcgctgctcgcacagtttaagtcatcatgggtaaggaaaagactcacatcaacattgtcgcccttggacatgtcgactctgggaagacagctaccactggtcatctgatctacaggc

SEQ ID NO: 94669 - DNA, 266 bp, Glycine max
  Clone ID: PAT_MRT3847_56498C.1
cttatgctaccgagaggggggtgatggagtattttgctacttcacttgtctgctcatagatgcgtaatgaagcctcctgctaatggcttatacatatgacgcattatagcacacgtttgcatctactatcattactgacattacctgtgaagattaatatttaaactggagaagtctagaattttttatttttttgatatataagcctatttttgtacttcatttgaaaggtcatagtttgaaccctctttttctggagatttacc

SEQ ID NO: 94670 - DNA, 470 bp, Glycine max
  Clone ID: PAT_MRT3847_56499C.1
aaggaaaaaaaaaaaccgctggggattccatttttcacctttttgcggggtttgggcaaggtaaatttttccccctactttttaaggataaagatttaacccaatttttccggagggggcgcatgggccctaccttttggggttttcccacccccctcttccaaaaactatgttaataaatgtttttaaaaaaggcccccccttccaaatttatttttggttttttttgggaccctttttctaattttctaggggggctggaaaaccaaccccaccacccggggggggttttcctggtttgcaacctgaaccgggggccggggctccccctgggtggtgaccttaaaaatttggggaacgatgggggggccctccacagtcttgcttgggggggcccctttaattgggcgggacttggagaacccccttggggatggggaacccttgtgcggggtttggccgggcttcct

SEQ ID NO: 94671 - DNA, 421 bp, Glycine max
  unsure (1)..(421): unsure at all n locations
  Clone ID: PAT_MRT3847_5649C.1
attactttgcacgtatataaacatatacatccatctttgcaaataaggttgacatgcagccattgacccaaacaattaggcggtgtaagtggtctgtaatgcgttgaattttgtttatttttttaatctattttaattaaatttaattggattaaattagattatttattttttattttattaattcaattcaatccaatccaattttaattagattgaattaaattatttatggaattggatcattaaaaatgttactttttgtaagtcttaaaaataaattttcaaactcaaaatagtaagaatataaagaatagtcataatatttttaaaatttaatattcataaaacattatactcatataataaacagaaaaaaaagtgaattataaatatatattcaagagtgttatttatanna

SEQ ID NO: 94672 - DNA, 232 bp, Glycine max
  Clone ID: PAT_MRT3847_564C.1
aacaaaaaagcactcttttacttaattatcagaaaatagtgaagcaataaaaataacagctctaaaaagtacataaaagggaataaacacttataagacaaacaccggttactaggaagacacaagatctcaacacgaatctaaaacacatttacgctttaaatggaccctgttcagtaccgcctgtatggagacacttgcataaaactaagacttgttttcatggaccgtt

SEQ ID NO: 94673 - DNA, 341 bp, Glycine max
  Clone ID: PAT_MRT3847_56500C.1
ggcctcgcgtcattttttgtggttatcacataatctattgaggagggcagagaaatacaccgatgagtggccacttcaacacaaatacctagatgtagcccgttgggcccatctcatagaacacaaatttgcggcacccacatgcgtacagctctagaatgctgtaataactattacagaaggaaacgctggaaatatagtgcctttactactgcacgaagcgacctagatctgtcacggtccgtgaaaaaaaaattcttcatctgatcaaacatgacaaggatgcaaaagaaaggaagcacgttttgggcccaaatttagcgtgagcttgaatcgtgagt

SEQ ID NO: 94674 - DNA, 878 bp, Glycine max
  unsure (1)..(878): unsure at all n locations
  Clone ID: PAT_MRT3847_56501C.1
ctactgtgtaaatttcacccattaatatgaatactgtctaattgaatgtgttgcttgcttttaatttacagaaaagagatgatgagaaatggatgaaacatactttggggtaagtcatgtttcatttaaattgttatttacatcagtagacatttggatttagccggttctcttcatttctagtgggaatcctgacccttttagtgtatacaagctttttttttttcttaagtgcatcagagtttgagtcttgattctcttgtattggtagagaaaccaaacagtaaataaaccagtgacgcaagtgaaatggtattttctattgcattatctggtatttgtattatctttaaatcaagtgatccttgattgaagaacctctgtcactgggttgttttcattacagaaagagatgagcctttatgcaattcagggtctttgccatctttaagtaaacgccatcaaatttgaagtgatggcatgatacaatattgagcttgcattgatttttggtggcaaattataaatgtttctgttgaatatcgtatttttagttgaaaattccatattcactacagtttacagttgtaagactaaagaacaatgacttggttattttgcaaccaactagagaagttgaaaagcttgtaacagtcatgtgnggagtgaggtattttgtnttgtgttgctaaccatgagcatggtatatattttggttagtgagccattagctttttgatttgtcaaggcacacttgtagtatcgttgcagggcttgttggatcatatagccctaaacataattgactttagtttgcaggatttggtacagtaacacttncgttttaaaatacttatgtctacgagttgctttcttct

SEQ ID NO: 94675 - DNA, 276 bp, Glycine max
  Clone ID: PAT_MRT3847_56502C.1
ttttctttttttttttttttttttttctttttttcgggggaacctttataattaaaaattttaatttatgtcaccgaatgtctttgttgtaaaaaacaaccgagggccttggggggggaaaccctggtttacaaaaaatatttcacaccaccgtggcgatactttaaaccctttatccccttttaacaattactggattactggagcaccccttcttttttaacaataaattaaaatttgtgaatgcgtgaaccatgttcctttcctttatttggg

SEQ ID NO: 94676 - DNA, 260 bp, Glycine max
  Clone ID: PAT_MRT3847_56503C.1
gccacgcgtccggccacgcgtacagttagttgtgcgccattagatactttagagtgaaccggatgttactctggccttgcatatgttgcgacggacattatgataccacgcccatagcgtgacacaagctaccaaaggcctagaatgtgactgcaaaatggctatgctcagctctcaacaaatatacaaagcgcatctcttatgcttgtcgggggcactcacaatattccgtcttttaaaaccactttttggcagtgcgt

SEQ ID NO: 94677 - DNA, 313 bp, Glycine max
  unsure (1)..(313): unsure at all n locations
  Clone ID: PAT_MRT3847_56504C.1
tggattggncaatacagttaaatttatgattaaactgcaattaaactttagtcgaattggatacgtagattgtgttagtatagagcaataaaagaagagaaagaaataaagggaagaaagaaaaagacacacagtttaacgtggttcagcacacaatgtatgcgcctatgtccacggctacactaggagaactttttattacttgcacataaaagcttacaaggtgtctctatatataacactagtgagacacaagtttttacaaaccaagcgatgtgggactaagcccacacaagttttatagaccaatcca

SEQ ID NO: 94678 - DNA, 321 bp, Glycine max
  Clone ID: PAT_MRT3847_56505C.1
ctttgccaaaggtgaataaaaggtgaaagattaagcaaaaatggtaaaatgattgttgtcataaactctcattttaaggagtttgcttcatctgtacatcttatgggaacatttgaaaagtgttattgtaccacgctggtgaagggaaaaaatgtatatctaccaattttgttacatgggagagtggtgtatagttgtagacttttaggttgcatagctgtattagtagtcttagtttgctcatgtatatgctgttgttgctgatgcaatgtaaaacttactctccaggatacaaatagtaagtgttgatatcttcaatat

SEQ ID NO: 94679 - DNA, 401 bp, Glycine max
  Clone ID: PAT_MRT3847_56506C.1
cgtcccctgctttgggggggggggggggaagacagaacaaataaagatatcaggaaggtgggggaggttaaacgtgagtacaaagtatgattaggaattaagtagtgtataatcgatgaacataccagaaactggaaggaactccaacgaaagccaaaggaatataaaagaagaggatctagttaccccggcatgagaaactaaactaacgggttgggtgtacaaacgggacgaaatagcgcggggcgccactgcaatggaggacaccgccaaagaacgagcccgaccgaacaaaagcaggaccgcatatcaatattggccgattcgcacaagggttttaagcactgttttgggcttacaattcatcgattgcttggtaagcgccttagtgggcagcaaaa

SEQ ID NO: 94680 - DNA, 184 bp, Glycine max
  Clone ID: PAT_MRT3847_56507C.1
agtgtggatggtgaacagtggatcttcctacttcataactaccaaacctactttgggcggaagtccaatgcagactcgttccaaatctcactttctcacattcttcactatgaagaatagtagccttcattctcttcctccttctttattcaccacaattgttgttgccaatggagattgcact

SEQ ID NO: 94681 - DNA, 258 bp, Glycine max
  Clone ID: PAT_MRT3847_56508C.1
cggcattcggctcgggtcgaggtggcttatgacgatatgaggccctccgtcttcctcctgtggcttgtcattacttctgtcctcgcgcactctgccctagcttccatctctctcagcttatgtcgtagactgtgggggcaccccagaggtaacggtagacaatctcacgcacattcctgatgagagttacatcaaggtgggcaaaaccatctccatcatcaagccagacttgttgccaatactctcaacattgcgata

SEQ ID NO: 94682 - DNA, 1329 bp, Glycine max
  unsure (1)..(1329): unsure at all n locations
  Clone ID: PAT_MRT3847_56509C.1
gcacgcttacctcagctcggcattcggctcgagcaacacttccaacagtaaaaaccactctctctctctttctcactttgtccacgtgaagtgaaagaagaagaaactcataaaccatggcaaacacaaataacttcttaacccaacttcacaattgcacccgcaaaaaacctaacaccctattcaccaacctctaccttctcacctttgctacctttctttgtacccttttctacttcctcggcctctggcgccactaccccaccaccaccgccgctgccatcgccgctgtcgcagaatcctcctccctatgcttccaccccaacaccaccgccacaacccaatcatccaccaatctcgacttcgccgcccaccacctcctcccggacctgcctcccacggtggcgcgtgggccctacctccctccttgcgcgtcccccttctccgagcacaccccctgcgaggaccaacaacgatccctttcattcccgagacacagactcgcgtaccgggagcggcactgtccagcaccggaggagcgtctccggtgccggattccagcgccgtacggataccggcagccgctgcggtggccggcgagccgcgacgccgcgtggtacgcgaacgcgccgcacaaggaattaaccgtagagaaaaaaggccagaactgggtccggttcgatgggaaccggttcaggttccccggcggcgggaccatgtttccacgtggcgccgaccaatacatcaacgacattgggaagcttattaatctcagagatgggtctgtccgaaccgccattgacaccggttgtggggttgcaagctttggagcttatcttctatcccgtgacattttaacaatgtcatttgcaccaagagatactcatatatcccaggttcaatttgctcttgaacgaggtattcctgcattgattggaattcttgccacaatcaggcttccatacccttcaagggcctttgacatggctcattgctctcgttgcctcattccttggggccagtatgatggagtatacatgacctaacatgatcgagtgctactaaacttcttctattggatacctacagggcaaacgttaaactaagtgaatcatttttcagttaaaataaacttatatgatcgtcttccgaagaaaaattagatgagagaacatccataaaaaatgaaaagcataggttgattaaggaatgctagtgagtagttgacactctatgaattggaaagagtgttaaaaaaagagtgtaagagaaaaatgctactaacattcatttgagttgattntagcttgcgagatatatntaattcat

SEQ ID NO: 94683 - DNA, 886 bp, Glycine max
  Clone ID: PAT_MRT3847_5650C.1
tatttgcacaaattagtcgtaaatacaaaactacataaacaaatttgaaacggctttcttccatcacccttttggcagttaccaattcaactaccgcatcacatttacaaataaaactcaaaatccaaacaccaccgccacacaccaccttgtctattgattatcatatttattgtgagccttaactctagtattactactacttccacctttcatcatcactctttcagtccaatggggtggtctttctcaatttccgttttgctgtttcttacctttctcattcagatacatggaagaggctttgcagagaattatggttgtaatttgttccaaggaagttgggtttatgatgaatcataccctctttatgcaacctcacagtgtccctttatagagaaagaatttgattgtcaaaacaatggcagaccggataagttctatctcaaatatagatggcagccagcaggctgcaacttaacaagattcaacggtgaagatttcttaagaagacatagagggaggagtctcatgtttgtgggggattctttgagtttgaatcaatggcaatcactcacttgcatgcttcacatagctgtgccacaagccccgtacagctgtttcttaacttctcattcagatacatggaagaggctttgcaaagaattatggttgtaatttgttccaaggaagttgggtttatgatgaatcataccctctttatgcaacctcacagtgtccctttatagagaaagaatttgattgtcaaaacaatggcagaccggataagttctatctcaacatcttttatttgcttttcttttttctttcttttttatctaggcatgacatgccatttgattatttcccacccaatcaggtggac

SEQ ID NO: 94684 - DNA, 565 bp, Glycine max
  Clone ID: PAT_MRT3847_56510C.1
agaatatgggtacttacatcaccacaaacaacatgaattattaatgctgaagttaaaatacaaagaacaattttgggcgcccatgttgatcgaatgccatgatggccttgaaaataacacattgatttcgtagatctgcttttagatttctagttagtggtataactgatacatatatagtattatgacttatgaggtagcatattgaatgttaccattgtattttgctaacttgtatcttcattgaaagtattctattgtggcagtaaagactttcaaaaagctaaataatttttatagttttaagtattttgactttcattagcgagtgaaaataatttgccatgcttgcagctttattgagggtttgtttaacaatgagattttgaagggaaagggaaagggggacaattttttatttttaaattgagtgatatgaattataatgtttataatattaagcaaaagattaggacattaagtttatgctaatctatcattttgtttcctttatattaaaataattattgaattaaaagtcaggtagattaaaggctgttgaaaa

SEQ ID NO: 94685 - DNA, 1017 bp, Glycine max
  Clone ID: PAT_MRT3847_56511C.1
taacccaaattaaaactcattcttcacgtatacaagtggcatactcaaactgattttgaccgcattatcaagcttctcaatatttaaaaaaccattaaattgacactacagatggctaaatgcacaaaattgtgacaaaaaaaatagtacagctttggtatataacaaggatgacctggaacttccaatgaaagtataaaatgcaatgaccgagcacagcggtacctttccttcagaatctagactgaaccaaaactcgaatgcatggacgaaatccccatgcattcaatttcaacaaaagctattctgcacctagaacaagtccttacctggtttagacattcctgctaattgaatcacccaattctgggtggctgaaatcatccatgcctaatcacaaatcatattattcaatttttgcatatatcagatgatacccaactgtttctgaaactccaacgagtggtaagttgcaaggtaatctatcctcaaacatcatgatttagaattgtcctttcaatcagactagccaagcaagtcactaaacaagttggggttctgacctgagggtgtcacacccatcttcctgacttttgcatccttttgcaaagaatctttaacatttggaccctttacagactgtgacaaaggcgtcactgttgtttctacagtagtacctctggcagctgcatttgaaaactctgatagaagattcacattatcccccctcacagggatagaatagtcaccactgccgctctctctactttcaggagtctctgcatagagtgccatgatatctggtgcattcgtaacagcagcaccactacgatttgctgtagaactaaggtttgggtcaagaagtccttccagttgcttgaatgggtccacagagggaggtgcaacagtgacagttggttctcccaagtcaagcaaatctggaggaggagattgttgattagttttctcccgagctactcctcagggtacagctgcggcttttgattcctgagttct

SEQ ID NO: 94686 - DNA, 437 bp, Glycine max
  Clone ID: PAT_MRT3847_56512C.1
agaaaatcctaagcctaaagctttttttttttttgtttttttgtgctctttttgttctttgttattttttttttttttttttttggacaaaataccaaaaacccgggggagaggtttttttgttccagggaaaaaaacccttttgtacttgaaccctactagaaccctttaaaaaaaaagggccttccctgcaaaactccaaaaaggcgttggacggaactaaatctgaaaaagaaggggaaaccccggggggggaaaaaaagggggggccttccccttggggaccgcaccccaaaaaaaatagtgccaaaaaggggcggggggggggctattatgtgcaccccggtttttttaaaaccctccgggggaaggggagggggggcggccttggcggaaagatttatgctgactataaaggggagaaaaggggggggggg

SEQ ID NO: 94687 - DNA, 2440 bp, Glycine max
  Clone ID: PAT_MRT3847_56513C.1
ctacaaaggaatagatgaacttacccttatttattactaaaattttcacgtatacaaatgtcatacatcaaactgattttgaccgcattatcaagcttctcaatgttttaaaaaccattatattgacagatggataaatgcacaaaattgtgaccaaaaaacaaaagtacagctttggtataacaaggatggcctggaacttccaatgaaagtataaaatgcaatgaccgagcacaacagcacctttccttcagagtctagagtggaccaaaaaacccggatgcaaggaggaaatcctcgtgcattcaatttctacaaaagctattctgcacctagaacaaatctttacctggtttagacattcctggtaatggaatcaccccattctgggtggctgaaatcatccatgcctactcacaattcatattattcaattttgcatatatcagatgatacccaactgtttctggaaactccaacgagcagtaagtcgcaaggtaatctatcctcaaatgttatgatttagaatttgtcctttaaatcagactagccaagcaagtcactgaacaagttggggttctgacctgagggtgtcacacccatctgcctgacttttgcatccttttgcaaagaatctttaacatttggaccctttacagactgtgacaaaggcgtcgctgttgtttctccagtagtacctctggcagctgcatttgacaactctgataaaatattcacattatctccagtcacagggatagaatagccaccactttcggtctctctacttgctggagtctctgcatacagtgccatgatatctggtgcattcgtaacagcggcaccactgtgatttgttgtagaactaaggtttgggtcaagaagtccttccagttgcttgaatgggtccacagagggaggtgcaacagtgacagttggttctcccaagtcaagcaaatctggaggaggagattgttgattagttttctcccgagctacttcactgggtacagctgcggcttttgattcctgagttctgtctgcagcactagtactagcctttggaaccttattgctagttgatgatcttttctcagttttagttgaaccaccaaacaatttatctgcaagtttttgcttttcaggagaaatttcaatccgttgctttcttctatcataattatcacgtccttttgaatttacagcagttgcaacatccatctgagtcaccccattcactgagttttctcgtgccgaattcggctcgaggtaattttggtcattgattaattctgcaattgagcagaggagccatggccaaaatcgcacttggaagcacccgagaggccactcagccagactgcattcaggccctcatcgttgaattcatagccaccttcctctttgtctttgttggcgttggttcttccatggtcgttgacaagcttggtggggatgcactagtgggattgtttgctgtggccgtggcacatgcacttgtggtggctgtaatgatctccgccgcccacatttccggtggccacctcaaccccgccgtcacccttggcctcctcgccggtggtcacatcaccatctttcgttccatgctctattggattgatcaattagtagcagccgcaacagcttcttatctcctttactacctctcaggaggacaggcaactccagttcatacgctggccagtggagtggggtatggtcaaggagtagtttgggagattgtgttgacgttttctttgttgttcactgtgtatgcgaccatggtggatcccaagaagggagcacttgctgggcttgggccaacgctggttgggtttgtggttggggccaacatcctcgcaggtggggcttactctgctgcttctatgaacccagcaaggtcttttgggcctgccttggtcgctggaaactggaccgatcattgggtttactgggttgggcctctcattggtggtggccttgctggttacatctatgagactttcttcattgaccgatctcatgttccacttcctcgtgatgaagaaaactaaacaataggattgacaacttggactttcatcccttcttaaaaaatgctgcattattgtagttaatttaatctaataataatctttttttttgcgtgttatgtatgtttgaaaaggtctatttatgtataatatatcgttaaatgatcttccccaaaataagatcaacgatttagttgagatctggcaccctgtgtagactttgtggacaggaatgaatgaataaatatatatttcaatggcttctgctttagatttgagaaaaggaattgagacaagtggtagtgatatgtataaattattttatatagtacatatacattaaattaaattcatgtttagttgttttaatgacataaaaatgttcaattattgaaaaaaagaaaaat

SEQ ID NO: 94688 - DNA, 129 bp, Glycine max
  Clone ID: PAT_MRT3847_56514C.1
caaatcatgtgtaatacaatctatctttatcttaaatgatcattacagcagaggatactgtgccctgaggcctgtcccattcactgcagagaagttcttactcacaggccttccctccctctgaaggaa

SEQ ID NO: 94689 - DNA, 267 bp, Glycine max
  Clone ID: PAT_MRT3847_56515C.1
gcaagttggctggaatattcccttttgtatgccaatccccacaaggaccatgtgcttatagggaacaagtgtgatctgtctcatcgacgggcattgagcaaagaggagggagagcaatttgcaaaggaaaatggacttttttttttaaaggtttttgttaggaccgttaaaaatgttaaaaaggttttataatggcctgttgaaagaatttttaaaaaattaaagaaggggatttttatgtgtccaatgagttcatttggttttaaa

SEQ ID NO: 94690 - DNA, 1290 bp, Glycine max
  Clone ID: PAT_MRT3847_56516C.1
gccagaatcgcacttggaagcacccgagaggccactcagccagactgcattcaggccctcatcgttgaattcatagccaccttcctctttgtctttgttggcgttgcttcttccatggtcgttggtatctatctttaacactttttttgttttcaaaaactcttgtttaactcctagtataacttgcttttggtctccttaatattagacaagcttggtggggatgcactagtgggattgtttgctgtggccgtggcacatgcacttgtggtggctgtaatgatctccgccgcccacatttctggtggccacctcaaccccgccgtcacccttggcctccttgccggtggtcacatcaccatctttcgttccctgctctattggattgatcaattagtagcagctgcagctgcttcttatctcctttactacctctctggaggacaggtaaaaatctcatttttattaattattttaaataacaaaatctataatatttttcaaatcaaatttacccttaagcagctcctggtcaggacttccatctctaggttcttgtatatgaaagaatatctggtgagaaatattgtcccttaaatcaatcttaataatttgagaatttaacctctaaatttctattgtgaattactttaatttgccatatcaaatgcatctaatgaaatgatttaggacattttaagtaaattcatgcacttatgttgtaaattagcatatgtatcaatgtgtattatttgttttgcaggcaactccagttcatacgctggccagtggtgtgggatatggtcaaggagtagtttgggagattgtgttgacgttttctttgttattcactgtgtatgcgaccatggtggatcccaagaagggagcacttgctgggcttgggcccacactggttgggtttgtagtgggggccaacatcctcgctggtggggcttactccgctgcttctatgaaccccgcaagatcttttgggcctgctttggttactggcaactggactgatcattgggtttactgggttgggcctctcattggtggtggccttgctggtttcatctatgagactttcttcattgaccgatctcatgttccacttcctcgtgatgaagaaagctaaacaatatgattggcaacttgcactttcttcattggccttgctgtattttcctacttaagttaataaaataacaatatttcttttgtgtgttgtgcatgtttgaaaaggtttatttatatataaccattgttaataatctctctctttaaaaa

SEQ ID NO: 94691 - DNA, 234 bp, Glycine max
  Clone ID: PAT_MRT3847_56517C.1
gaaaaacctacagagagtatggtggttttgaagatcaaactgctctgtgacggttgcatcgggaacattctaagaatcattatgaggttcaaaggtgtactatcggtgagccttgtctgaagcaaggactcgtagacagctaccgtaacactggacgtgatagacatggtgtcaagcctgaactagaagatctagcgaaacatagccgtggcgcctcttgctaagaatgacaac

SEQ ID NO: 94692 - DNA, 264 bp, Glycine max
  Clone ID: PAT_MRT3847_56518C.1
cggacgcgtgggcagtcatatgaaaaatcatcttcgaatgatacatatgataattttcacaatgtttttggaaaaatcgccatggtttttgtatcatttagtcgtgtgaactcatttaattaactgagtcaatttcgtgccctcagtcagtacactcaccacctgcgcgctggcctcactcagctcaccctcttcgtcactcaccctttcatgccggtccgccctgtcatcgaacatatttggcccgcattcaattactaccgt

SEQ ID NO: 94693 - DNA, 1272 bp, Glycine max
  Clone ID: PAT_MRT3847_56519C.1
tgacacactaataatacacattatgtatactagagagaaaagggatggcaacgatctcgttatcacacagaagagatctctagttgaagctctgaccggttacacagcacaactgacgacacttgatgggaggaatcttacagtctccaccaattccatcatcagtccgacgtacgaagaagttattaaaggagagggtatgccaattcccaaggaaccttccaaaaagggaaacttgaggatcaagttcaatatcaagttcccctctagactcacatcagagcagaaaaccggcattaaacgattattgacatcataaacgctggtgatgcctctccttatcacataccaaatcatgtaagattggaattatttttacccagtttttgattttcaaatggaaattctttcccccgggtcgacccacgcgtccgcccacgcgtccgtacggctgcgagaagacgacagaagggggtgatatgacttgtttcgtctctttcttccacctgtgattcttaactacgcgcacgttcctccggccaaggcaaatcggaaaatgggtgtggactattacaaacttcttcaagtggatcgaaatgtcagtgatgaggatctcaagaaagcctatcgcaagcttgctatgaagtggcaccctgataagaaccctaacaacaaaagggatgctgaagccaaattcaagcaaatctcagaagcctatgatgttttgagtgatccgcaaaagaggggtgtttatgatcagtatggtgaggagggattgaaagggcaggtgccacccccaggtgctggtggattttccggtggcagtgatggcggaccgacgatgttccggttcaacccgagaagtgctgatgatatattctcggagttttttgggttttcaagtccctatggaatgggggatatgggtggccgtgccggcccatctggctatcccagatttgcggatgacctttttgcttcttttagtaggagtgcggctggagaaggctccagcaatgtgccaaggaaaggtgcgccaattgagaaaacattgcaatgcagtttggaggatttgtacaaagggactaccaaaaaaatgaagatttccagggatgtgattgattccagtgggtgagctatctagtttaacttgtcttcttccttttcttattttcatgaagaacatataaagttgcttgttgtaaatgagattgttgttggatggatttgacttactaaattccaattcaggtttgatgatttgctatatat

SEQ ID NO: 94694 - DNA, 551 bp, Glycine max
  unsure (1)..(551): unsure at all n locations
  Clone ID: PAT_MRT3847_5651C.1
tagattcgtagaatggtcgggggattgttaaactaccacagacgtacccgttggttactcctntttttttaaccattgcattaattatattacgtttcatgctcaatccacttaagacttcaaggatacttttccggccatcctgtcgagtatggacttgaagttctctttcagttgtaaggcgcagaagttctatctcttatgttggtttcatatccttggacagtaagatatccagaccaaagtataacgccgctggggatggggcaatatcacatgaccacgatatatcgtattcatgcctcgctcgacgctcctgaacggatgttattgaatgactagtgagatagatagtcttctttccataacaagataccatggccatgatcacccgcaattatcaggatgaggcttacatatttatttgacacttttacgcagatagatttctggacgtcgaacttgcgacatctgactttcaaacatatgaaaagatttcaagacttgggcttatcactgactccaggtgtctgtacaattgtaagtgcact

SEQ ID NO: 94695 - DNA, 444 bp, Glycine max
  Clone ID: PAT_MRT3847_56520C.1
gccttcgttttttttttcgggaggttgatagtcaaaagggagttgcccacattgggcaaatgcaatatggtggctatgacccactggctacaaaaactaatttggtggaaactcccaaggaatggccactggatcctaccttgggacaaaattcctagtgtcttgactaccactgatgagagattggtcggcaccgaacatgagggatctgatccttttcttgggggaaatcaaaaatatgccactcccatgatgcccctagatgaagaaattctttttaaagttgcacaagacatggttgtggaatggtttgattgggttgattgaggaggatttcttttgagaagtttctttaagtgccgccctttatggagttgtgggcttggactatttggaaagaattccttttgccaatatgacgggattccttattttgcttcaccc

SEQ ID NO: 94696 - DNA, 2037 bp, Glycine max
  Clone ID: PAT_MRT3847_56521C.1
ccacgcgtccggcttacaaaacataagttagagcttgcaaattaccttcaattttagttatataggattccctatttggaaacttctattttgtcaccaacagatcaggctatatattcgtgattatgtaaacttggacacttttgttgttttgtcaaaatcagtatatatgtttttttgtaagatcttctaggtcagatagacgtccgctcggacaatgcaaccctttagccgcttggtggaacccttcaaatatcatgtgtttcttagcttcagaggcaaagatacacgtttcacctttactggcaacctctaccgagctctccaagatcggggattccgcgtcttcatggatgatcagaaaattgacaaagggaagaaaatatctcaagaactccccaaggcgattaaggaatccaggatttatattatcgttttatctgagaattttgcttcttcctggtattgcttagttgaagttgttatgattcttgatgagttcgctaaggggaagggtagatggattgtgccgattttcttctacgtggatccctctgttctggttcgtacttatgaacaagcattggctgaccagaggaagtggtctagtgatgacaaaattgaagaatggaggactgctttgactaaattatctaaatttcctggcttctgtgtcagcagggacgggaatatatttgaataccaacatattgatgaaatcgttaaagaggtctctagacatgttatctgcccaattggacttgatgaaaaaatatttaaggttaaattgcttttgtcctctggatcagatggagtccgcatgattgggatatgcggagaagctgggattggtaaaacaactttagcccatgaagtttttcaccacgctgacaagggatttgatcactgtctcctcttttatgacgtgggaggaatttcaaatcagtctggaattttgtcaatactccatggaaaaagggtttttataatttttcaagatattaaacatttcaagcagttggaagacattcgagaactaactaagcagcttggttctggcagcaaagtcatcattacagctcaagataagcatttgcttgatagatatgggattggatttgaaagtatatgtgaaataaaagggtttagtgattcagaagctgatcgattgcttgaattcaaagttcttaattctgcaactgttagtcctaagtatgtgaacattctaaaccgaatcaagtcttatgcccttggtcatccatggactttggaagtaatgtgttccaacttgagtggaaaatcaatagaagaatgtgaatctgcattactcaagtatgaatctataacagatagagacatccaaaagatactagaagtaagctttattgctttggaaaaatgtcagcagcagatgttgattcacattgcattgtacctcaaagaccagaaattggtagatgttgaagctgaactttgtaataagtataaagtgtgccccagattagatattagagtgttgcttgataaatctcttataaaaattaatcaccacggtcaagtgacattgcatacctctacacaggaaatgattaaagataaagcttcacgttttgaggagcatggaaaccaagaaatgcaatttgtcttaaatgatggaagcggggattgggatccgatggaattggattgacaattaccagaaatcttgctgcttcaaagaaaaaagtttacttctgctcctgttcatcagtagttaataattttttccttgtgtgtgtatcatggtttattttgaaatttacatttctgaaaatctggtctttaaccaagctgaatggtgttgtttgatgcatgtaactgacttcacctagcgggaaaaggctttttgttgttgttcttgtattttgaggtttacacttcagtgtgttagctatagtgagttgtttgacttcaaatgctagtgtgtcaatgttttatgttcattatgtgagaatataccattgctatttttaattatagagaaaaaatcttcaattc

SEQ ID NO: 94697 - DNA, 336 bp, Glycine max
  unsure (1)..(336): unsure at all n locations
  Clone ID: PAT_MRT3847_56522C.1
gtttcgttggtgaaaggatttggggcgcgtggggacagtgagccaatgaatgatggatgaattcccaagagaaaaaataatgaaagaagaaaattagataatgaagagaaaaaagaagaggaaaggtaggtttagattttaagatttacacctcctctcttattttcttttttcctttttttttgtacattaatcactgctactaccctgcaatgtctaaaaagaaatggccgtttggttttgtaattcagggtttttttttttgttatatataatctctcaatcaagtcataatacttatcnnaaaaaaaaaaaaaaaaaaaaaaaaaaaaaaaa

SEQ ID NO: 94698 - DNA, 199 bp, Glycine max
  unsure (1)..(199): unsure at all n locations
  Clone ID: PAT_MRT3847_56523C.1
ttttcacnnngcgtacggaagcncgnangtcggcncgaggnacacantnntcatnatnnncgccanatgtganctnttgnggtctgnccgngtncgcngntggtnnctagggagtntcctgnnccgnngttctngnnatnnttttngcnnggntatntctnancgattcnntcgcantnanagccttngctcgnttcct

SEQ ID NO: 94699 - DNA, 327 bp, Glycine max
  Clone ID: PAT_MRT3847_56524C.1
cccacgcgtacgaccactcatagcagcctttttaaggccacacgacacatcagatatgagacgaccacagacagattcatcttacttactagcagtctaaccctctaacaacatcactatggcgtcagaaaactaacatggcaggtaactaggattggcatgtacattattcgtgtgatcaacaccaacgtggatggggagcatattatactgtttacgacgaccacgattaagggtattgaaaagagattcgaccacatctcttgcaagatagctgacgttaacaacaacaacacggatcgtgagttgactgatgcatagttcgac

SEQ ID NO: 94700 - DNA, 495 bp, Glycine max
  Clone ID: PAT_MRT3847_56525C.1
ctcacttgtcatgcactgttctctaatgcatttattctcctgctgagattatggcggtttgatcgtccacctgttgaacatgtgatggggggtgcagcaaccccagcattaggatcacaattaggtcctgagtaccttttattggttcggaattgtatgttagcatcctatgggaaatctccgagagatcgagtaagaagtagaagattttcaaaaatgataagtttttctctcgagcccttatttatggattcctttccaaaattgaacatttggtatcggcaacatcaagaatgtattgctttcacctgcaatactcttgcacctggagggccagtttctcagatcgttgaagcactacttagcatgatgtgcaagaaaataaatagaagtgctcagtcattgacgcctacaacttcaagaagcagcaattcatctctttcttcattggatgatgctatgattgtactcaaagtgcctgcatgggacatcctt

SEQ ID NO: 94701 - DNA, 151 bp, Glycine max
  Clone ID: PAT_MRT3847_56526C.1
gggaagcatatcattgagatacccaaaccgtactggagcggaaaggaattttcaaagatcggaattgttctggcaaaatgtgagggtcactaccgcttaactgacccaaatcgaaagagtatgccacatcaaatactacacgacattacta

SEQ ID NO: 94702 - DNA, 730 bp, Glycine max
  unsure (1)..(730): unsure at all n locations
  Clone ID: PAT_MRT3847_56527C.1
aatttttgcgtgccggttgggttgcttccggggtacccgggtcctttggggctcttttgttctcctgatgggtctgtgaattttgctattttctcgagacgtgctgagagtgtggttttatgcttgtatgatgagaatgacatggagaagcctgctttggagcttgatttggatccttatgtgaataggacaggtgatatctggcatgtctcgtttgagagtgccaagggtttcatgagctatggttatagctgcagagggggtgttcttaagaggaacaaggatgatggttttgctgagcacgttgttttggatccgtatgctaagattgttgggaattcttatcctgatggtgttggatttgtgaagaatcttggatggttggggaaggaacctgattttgattggggtggtgattgtcatctggatttgtccatggagaaactggtggtttataggttgaatgtgaagcgctttacgcagcacgagtccagccaacttccgagtggtttagctgggacctttactggtttggctaagaaggttcagcattttaaagatctaggagtgaatgccattcttctggagccggttntcacatttgacgagaaaaagggaccatattttcctagccactttttttctctgatgcacatttatgggccaatctggtggtcctgtatctgctattgcctctatgaaagagatggttaaaactatgcatgccaat

SEQ ID NO: 94703 - DNA, 509 bp, Glycine max
  Clone ID: PAT_MRT3847_56528C.1
tcgacgcacgcggccgaacacgttaccgtcggccatgtgaggactacttgaccaaccatgccttaacccaacccatactaagccagggggaattgctaagagctatcattagcgtacacttaaacagagcacattggaaggaaggaaacacaaatgcccttggccctacgtgccgcaatgaccatgaacctagctgctggtgagattggcttgatctgtatgattacgcgctccgaaccctaaacgaacccattgggatttacaccaagagcacccacaccgatacactgagatggatcagtatatcccttactaacctagcataatgcgggaacgggttctatgatctaggagtacctgactatgcactacccttgatgaccaatagtgtcacaaagctgctaatgaacactatgtctcttaacataggaccttaccacttcaaaccagcacgttacaaagaatggtttgaacatagctgaagcctgatgatagaaaattgtgcaatc

SEQ ID NO: 94704 - DNA, 235 bp, Glycine max
  Clone ID: PAT_MRT3847_56529C.1
ctggtttttttttgaaaaaaaggacggacaaatatctactataacaacctataacaagtacatcttgcaagtattcaagccaaggacatgcagcgagcatataaaaatccaaaaattttttccccgggggggagtacaaaacatccatacgtcctaaaaaagagctaaatgctcctcccaactagtaccaccagctggtttcagaaacaccatttattaagaacctgtgattttt

SEQ ID NO: 94705 - DNA, 400 bp, Glycine max
  unsure (1)..(400): unsure at all n locations
  Clone ID: PAT_MRT3847_5652C.1
cttaccttaattagtgttgtgctgtgtcaatttctccaaaagtgtctcctattttacatttccaaaatggttttattttcacaaccaccgttgttccagctattgcgccagctcacctgtgaggaactgaacgaccaaacttttactcaactaacaaactctctttggggtggttgcgaaatgccgtgcttatgatgcatgacatcgcatcttcaattgaatcttgacaacctacctgtctnggcgatngaactcaaagactctgttcattcnttattnngtntctcttcacatagtttgcacattttcatcaactttttcccgcttttgntaacgcattccatccttaagatgattttgctccatttaacacgttntttgccgatgacctttccatatt

SEQ ID NO: 94706 - DNA, 240 bp, Glycine max
  unsure (1)..(240): unsure at all n locations
  Clone ID: PAT_MRT3847_56530C.1
ccgggtcgaacccacgcgtccggtaagaacacagaaaggcgcatttagtttttgtcgaagaaaatccgagnaacaggttctgtgcataggcgggactgtgaatcaacgggagtagtaatggtcttgcagccaccttcagtgttgcagcttgcttgagtcttcatggacgtactaagcaagcagtttctaagccaatttgggtcaagaaaatcacctgtacctttccttaagtttttcttt

SEQ ID NO: 94707 - DNA, 659 bp, Glycine max
  Clone ID: PAT_MRT3847_56531C.1
cagaaagttcttcatattattatacaataaaagcaaaagtctaaagttctatacactgtacattctcacacagtgagaatagcataattaacatgataataatatccaataagttgaaaaacaagaaatagtacatgcaaatgcaaagatctaaatgtgagcaaaatttctgctctgttctctcttcttcctcttttttccataattaactgagcagatgaacaagcacttataaacagactttaactcatttgtatggttatcatcatttaacttacagttaaataaccatccaaaacatatataaaccgtgtgttgtggcagacctagacaagctttctttggcacagaacaagaacccttcttgcacaagaggagaatgtacatcatttcttcaaaagcttctgcgagaaaatcttcttggaatacgggctgtttcgagaaacggctttgtgggactcgattgcttcaactagtaaattgtgtaaatgaccctcagaatgtcgaagagctgattgaacaacatagtttgcatggtggatcttgaagcaaatgttcaaagtgaggcgtgaaaagcagttcaagaatgattcttgatcgattctcatcattgaatgcagcaagacatttttcaaccacatgactaccaaacttctgtc

SEQ ID NO: 94708 - DNA, 257 bp, Glycine max
  Clone ID: PAT_MRT3847_56532C.1
gaaatctcaaacagaaatgttcatactgaaagagtaaatcatacctgccaggagtgaagaaagctttgggcaaatatggtcctgccgatgtggaagacactacaggaagtggagctacagatagtaaagatgatgatgacattgacctctttggatctgatgatgaggaggaaagtgaagaagcaaagaggctaagggaagaacgtcttgcacaatatgaatcaaagaaagccaaaaaacctgcacttgttgccaag

SEQ ID NO: 94709 - DNA, 246 bp, Glycine max
  Clone ID: PAT_MRT3847_56533C.1
tcgatcattcttaccaacgaccacatgatgggtccagaggtcaactttttctcgctacgaacagactcaatattgctggttacagagtgtgtataggcagaacttatcaacaacacctatggaggccggaaatgctcgtgaggaggcctacagagaacatgggaaaggacagactagggggcaaagttgacactcatgacctgccttacatgccagcaataataaacgggaccgtttcgtatgcac

SEQ ID NO: 94710 - DNA, 433 bp, Glycine max
  Clone ID: PAT_MRT3847_56534C.1
tccgtccggcacgacaccgagcatggccgacgtaccgcctccgccacaccaagtaatggctatgtggatccagaatattccgtccacgctgaaccacgatgtcattttcctccaatacaacgtattcctaaacatattcgaaatcacccccaaagctacccacccgtcatgcccatccataaaaacgacgtacggcatcgcttgctctcttttgaactctgagacgaatgagcactcttccatcaagaatattgcgaatgcgtttgataactggattgatgcgaatatgaccctccgagaaatcaagctgcttctgcacgtggatcatgataactgggatgcaatcaaggatatagtgccaccacctctgaggaagatattcaatgatgattacattgcatatgatctgatgaacactgaccttcacagatta

SEQ ID NO: 94711 - DNA, 160 bp, Glycine max
  Clone ID: PAT_MRT3847_56535C.1
ccctttcttacgcttcgatcatacacttagttgcttccaatgaagatggtcctgcttgagaagctttgggatgatgttgaggttggccctcaacctgagcgtggtctttggcatgctcagaaaactcaccacccctaaaactattgtagaaggagaaagt

SEQ ID NO: 94712 - DNA, 368 bp, Glycine max
  Clone ID: PAT_MRT3847_56536C.1
atcctttttaatggctaaactcttctactgtattcgtgttgcatgcccttcattgaattgcttgtaggaataactcaatcgatgctttgataaaatacttttgataccaaaaccttttcatcttcaaccttactgtgcttcgcctctagtgcattgatatatcaattaaacaagaagtactatagtagaagtttgttggtatgaacacaggtttctctcctgttgaggactgtgactcaatgtgtatcaatggattttactgttggttttgccattggaatgtgttaaataatttccagttgaccttatgtctatatatagcttgtatatttgcaagtggtgtttggtcaaaatccttctattttctt

SEQ ID NO: 94713 - DNA, 694 bp, Glycine max
  unsure (1)..(694): unsure at all n locations
  Clone ID: PAT_MRT3847_56537C.1
aactaagatcatctccttttgtcaggtcatgatcaaacatacttaaaagttctgaaaaggaaactgaacatgatcaactcttaaataataaaaacaaggaaacagacccaaaacacaaaaaaacaaataaagctagctaacagaatatggtagctccatacgagctataacaaggataaatacatatcctcataaaagtaatttttgaaaagctgcataagtgctgtctgaaaaaataaggctacaataacaccatctccatctgggcttggaagaattgcagccctatctgctggagatctacttgctaagccaaaatgcactggctttccccaaccaaaatctgattcatacactggcatgttagtgaagcttgtgaggaacaaaacattatgattcaaagcataagggatattcacacggtgtccttgtcgcatgaagaaagcccttatgttatccaattgcacttggcctaaacgactaacgtttaattgtgactttacaaactcgtccgtgactgcatgagatgcttcccttatcttatgagcagcaaaacctaatgggtttgatatgatatctccctcangtgtggctacgtttgccacagcattgccaaaatagttatgagggagagggtgggttcattctattgcgaaaattaacactgaaccgaactttgagtaggtcatcacca

SEQ ID NO: 94714 - DNA, 235 bp, Glycine max
  unsure (1)..(235): unsure at all n locations
  Clone ID: PAT_MRT3847_56538C.1
cacagattaataccaccgccgttgctgtttgccactcttgtttttttcatncaaaaaagaaggggccacggggttttattaggaattctatggggcacaaaaaatttcgggggcagtgagaaaccccagaaagcctgcaaaacacggctcgggaaaaaaactccgcctggagccaatggataaatgcgcagatccactatagtgtagggcccaatggctggcccatagcggaccc

SEQ ID NO: 94715 - DNA, 487 bp, Glycine max
  Clone ID: PAT_MRT3847_56539C.1
attcgccgataatcactctaatataccgaagcatcacagcgttgtttgctcagtccaaattcttgaggacctgacgttctgaacccactcacacaccccattaacaagtggcgcactatagacgactcataataaaaaactgtccacgtgtttgccgtggaaacagacaataccgtgcctcaaaagctcgaaattagagctaattttacagcacttaaggagatttgttgctctgccggccaataagcttgccttgatcttggaacagggatcatagtacatgtcctttgactcggcagagctcatcgtatatttcacacccattgcgcgtgtttgcacctggatgaagcttgacacactctaccttcacatattccacataaggcaaagaaagatggccaccaaattgcagaagtatgaaaaatttcaacaacttccatctaccctttccaccaactaagagcaagtccaaagtgttgtcatcatg

SEQ ID NO: 94716 - DNA, 240 bp, Glycine max
  unsure (1)..(240): unsure at all n locations
  Clone ID: PAT_MRT3847_5653C.1
ttgggttgatttatgtgcttatttatgtgcttgcatggtcgtgataacatcctagnaggtgttagaaagagagaaaagggcggccaactccgcctgcggcggccttctttagaataagccttctacgctatcttgctccttagcggtgctcatcgccaatcgtgttcataatatctagatcaataattctcatactaccctcacccaaaggcactaaaccttccctcaattcctccattc

SEQ ID NO: 94717 - DNA, 978 bp, Glycine max
  Clone ID: PAT_MRT3847_56540C.1
cagcacatcagcccccttaggaatagagagaaagagcatagaaagtgagaaaaaaaataaagaaaaagaaacacatgaccaataacactaacaataatgatgagatatatatatatttacggacaacacacaagcacagaaacgcaaacatatacccataacctgatagagaaagagagagaacagaagaaaagaaaagaaaagaagcagagtggtaaacaaagagaaacaacaaaagacttgcaggaaaagcagaaagaaaaaaaacataagaaagataagaaggacaaagagaagagggaaagcaaggaaaagagagagaaagaaggaagagatgggaagcataaggaaaagaaggacaaaaaggaaaaacacagagagaaaaagaaagataaggataaagacaaggacaagagcaaagatagagataaaagtaaaagcagtactgcagatgacaaagggttcccaagacaagctgagggtctcaacgcaggtaaaccccatcaaaaggaaattaagcaagacaataagaagggtatcttgtttgagaacagactcaccaaacagtatgctggcaacaatggggagaaggctagagagaaaaatcatctggctgaagagaacaagggtaaagaaaaggttaaggaaaagaaagatgaaaaagaaaaggccaaggaaaagacagaagaaaggaaggttaaggaaaagaaagatgaaggaaaggaaaaggttaaggagaaaaaagatgataaacgaagagataaaaggaaagataaagagaaggagaagaaagggcatgggaaggacaaagacagggataaagagaagaaaaaggaggagaaagctaaggagcatggtgaacttaaaacaacagagcaaaataaaaacgtgtcagataccacttggtccaagtctgatgcagaacacaaaagtggtgatgaagctaagtcttcaaataaatttttaaaaataattaaa

SEQ ID NO: 94718 - DNA, 524 bp, Glycine max
  Clone ID: PAT_MRT3847_56541C.1
ctttttttttttttttttttttttttttatttttttatttttttatttttttattttttttattttttttttttttttaaaaaaaaggggggccggccttttttaaaaacaaaaattttttaaaaaaaaaaaacccttttttgggaaaaaccctttacttggcctgggtcaaaaagtttttggaaaaaatcccgggacaaaggggtctataaaccaaaaccccccgggaagaggcccgaaaaaaaccccccaaaacaatctgggctaaattttaaaaaaaggcggggatgggaaaaaaggcccactgggccccccaaccacattcgttacccgaagggaaaggaagctttttcccccaggaacgggaactaaaactaaaagggtttaaacctccccccggggaagaaaagggcccctttaaggggcggggaaaaccccccagggaaaagcaaaaatcttttccttgatcataaaaagcgggggggggcccaaaacagtttttaaaaacggggcaggcaaccctt

SEQ ID NO: 94719 - DNA, 2085 bp, Glycine max
  Clone ID: PAT_MRT3847_56542C.1
atggcggttcaaaaactaaatggggataatttcacactagatgaagatcctagagtctcatctgttttacttaggatgctcctctacaaggagtatcctaatggagctcagtatagttacgacttttgttacggtgaaaagcagaaagaaaaaaaacataagaaagataagaaggacaaagagaagagggaaagcaaggaaaagagagagaaagaaggaagagatgggaagcataaggaaaagaaggacaaaaaggaaaaacacagagagaaaaagaaagataaggataaagacaaggacaagagcaaagatagagataaaagtaaaagcagtactgcagatgacaaagggttcccaagacaagctgagggtctcaacgcaggtaaaccccatcaaaaggaaattaagcaagacaataagaagggtatcttgtttgagaacagactcaccaaacagtatgctggcaacaatggggagaaggctagagagaaaaatcatctggctgaagagaacaaggattcaaagttcctcctggagttggatcggaggattaaggatgatgatggaggagctaaccatcaattggttcataaatttacaaatacaaaccatagaaaagatgaggggactgttaggttggtggctaaaggtggtggcaccaggtctgatggtaatgaaaaactcaaggatatgggtcttgatgttaagaagattgatgggcgaggaatacaggatgaggtccggccaattggaaatgcagcaccagttcagaatcatgttggaaattttcatcctagagttgatggaatacccaaactattgggaaagtattttgaaaggaatttggaagcaacagttgaaggtaaagaaaaggttaaggaaaagaaagatgaaaaagaaaaggccaaggaaaagacagaagaaaggaaggttaaggaaaagaaagatgaaggaaaggaaaaggttaaggagaaaaaagatgataaacgaagagataaaaggaaagataaagagaaggagaagaaagggcatgggaaggacaaagacagggataaagagaagaaaaaggaggagaaagctaaggagcatggtgaacttaaaacaacagagcaaaataaattaaaagaaagcaacaaagttggacttataaattcaaattctttcgcacagccttctaggaacagccatgggaacactgtcagtggagaaaatcgtaagaagcggaaggacattgagtcaaatggagttccacatgtcaatgacagtttgcccaataagtttccaaaattgtcttcctctcatccattcaatgaaaatggaagggtatgggaaccttgccaagtatccattccaaatgcttcagataggccacgagaagccaccagtgttaaggtagaaaagaaagaaagcaagataaatgggatcattgaaagtaagccatttgcagcttcttcaatcaagactcccactgccactgtgccagctactttggtaactgaagcatctgcaaagccaccccatccagataccaagtacttaggccaggtatattcagtacctaaggtggagcagtggtctgattttgatgatcaagagtggctatttgacaccaatgtttcacaagaaagaaaatctgtggtgaaatcttcaatagaggttggggagacacctcaggtatgggcagaagctctgcgcatagagcccgcagatgtttttgctcttccatacgtcattccgtactgattgattatttaattgtaacacgatacttgaatctcaattatgtgtgcacaaggaaccctcctttgacactgtgcgggaagaacggcatcatgggccagaaaatgattccaaatttcttgatgcattcttttgttacttgcacactgacagcgagtagcgagtgattgattggttgctatcttaaaaactatttggatggtgactcgtgtcgactgattgtcttgattttcttactgattggaaggggaacatctgtcacaagttgcatgcttggagctgctctttctaattgagaatgagaatgtctaagtgaaactagatgtggtctttgcaactccacca

SEQ ID NO: 94720 - DNA, 313 bp, Glycine max
  Clone ID: PAT_MRT3847_56543C.1
gtaaaatgaattgagcttctctcataaattaaaattaacttgtgcactttagctttttggagaagatgagagaacttctatgaaagttaagtgcataagtttattttaacttataggagaaactaaattcattttaccttattttcttctccatgtaagcgcttatgaaaaaatttatcctggcaaagcctaaatatctaagcctgtcacactttgatggattggttaaactccttttagaatgaaccacaaattatgtagctagctcttatttagaagtttcctctctctgacagcttataattaccaaagg

SEQ ID NO: 94721 - DNA, 235 bp, Glycine max
  Clone ID: PAT_MRT3847_56544C.1
gctgggaacgggctgaaactgacgattctaagaccaagccagatactactgtacacctcgcagagcgactctcaacacggaccatcagctgcatgggataggtgaagcatcatttcttgatctctctaacatatatccaactacctgggagtatataatattctaaggctaatcaatatttccagctcatttatttattcgtttcataaatctctttcaaatcatttcaacatat

SEQ ID NO: 94722 - DNA, 403 bp, Glycine max
  Clone ID: PAT_MRT3847_56545C.1
gacttaaacaagacacatttatgtgcaatcatgcaaagacatgcttataaacatcatcttaatcacaattattagcgtcctttattagggcccttgccccatgaaaccaagcaacgaacatccatgaaagagcccttctttttccatgatgactaagagagtctttgtctttgggtcctagagctgggtacgatagattgttgcttcaagggacattaattagcaggaatttgatttgttgtgctagactagggtgtttaattcctgggcagagggagcagtagggacgttttggcgcccttttttgcgggatttaccagttggattctttttcccatgttgacccttcagccaaaccctaaatagttgcaaactttgtccgttggcaccttcgggtgggggt

SEQ ID NO: 94723 - DNA, 954 bp, Glycine max
  unsure (1)..(954): unsure at all n locations
  Clone ID: PAT_MRT3847_56546C.1
cacaacagcctttgcatccctactatcctggacggtatgttgatactaatccagattcatatgaactatactcgcataatgcaatgcttcacccacctacttgctcttgtttccattgctatgatagcaaacaaagaggttcagtgccagcactgcctgcttcattcattaacagcagattccccgataccccaaatgatcctatgttataccatcatgagatcccaggggcatttggtccacatgttcataattctagaactaccattcctcctctgagcgtccgtgaaaaacaattacacgcaagatgggctagtgatgtcaactctgagatgggtggttttgttcgaagccgtcctcgcaaagtaatgttagctagtagtagccagcgttgctatcctgtagccggtggttcgcccttcatctcatgccataattgctttgagttgctgctactgcctaaaaaaccattggttctggtgaaaaatcatcagcaaaaggtgcaatgcggggcttgttctacagaaatcagctttgctgtcatcaacaagaagctggttatttctcctaatttagaaacaaagggagcttcttcaagaggtgatagtagctctaatgaggttgtgagtagccacatgtcacattcccgaggtcatgtgaataggactggtgctaacttttcatctgatgattattctggttatgattttcattcagtagacagggaacctttttctctggttgctttgaattctaacaagtcccgggagattccgagttttcattcttcatcacttagtacatctgaagatgaaaatagtccagaaacaatgatcgctccaagggaagccactaagtccattcatcggccaactacagactctctatctcctnctgctggttcacctctgcagngagtatttgattactccaatataaccatgcagtaaatcg

SEQ ID NO: 94724 - DNA, 533 bp, Glycine max
  Clone ID: PAT_MRT3847_56547C.1
attcaactttgctacatcattagcaaagttgcggcaagtgccaaccattcggagttggagttaggcttcgattatttaatgtcccattaatgtaatagtgttgaccaattaaaaaaggagtgttttgttcctttagctacataataataggttaggtgaaatgctttctatacgcaattaggatgagaaaaataaatactcattatctgtttattaaggtagcgacgtcaacgtgtgtatgaagataaatatcggagtacattaatgaggaagcgacgagtgtatgaagataccttatctgcggtactcactaccatatttatttatttttatatcattttatacgtaaagaaaatcaaattaagctatagactagtatagtgtgacctaccattaatacaatatgtctgcagtgctgcttaattaatttaccgagggatcttattgagcttatagtaagcataatccttgtatttcttgctcttatatcttggtgggttgtcttggttaaccagctttgggtgacgccccac

SEQ ID NO: 94725 - DNA, 457 bp, Glycine max
  Clone ID: PAT_MRT3847_56548C.1
ccaagacgctagagcctacacccaacgttcaaatctcaccatcgtgaaccccaattgtatcgtccccctcgcaatgtcgcaccccaccatgcccttcatcgtgatgtggttatttgaacaaactcagtttttgagcttgcacaaccccaaaattagcagcgcctccgtcaactacataattgccacaaactctcttccatctcttcgccttcatctcgaatccactgttgcccctctatgcatcgccactgcttcctctcaccaaaccttttactctttcgctgccatttgttcatagatctctctagtgtttcgagttcaataaggtgtgacttgacaatttcttcacatgtttgtcagtgacatcaagagtctggaacatcattagaaccaacataggctctgcgatgacaatcttgaagggctttcactggaatggaagttagtagtttgcatt

SEQ ID NO: 94726 - DNA, 932 bp, Glycine max
  Clone ID: PAT_MRT3847_56549C.1
gtaattggagagaggtgttggcgcaacggatgcgagaagacgacagcagggggaagaaaaaaagcggggtgagttgttgtctatctcttcttctctttgtgttttggctgtggacgtaaaataatggctctgtcttttggttttgggctcttgtcttcttcttcttcttcttcttctttatgtgttctccctccatcagaaacccacactttcatgatgaggccttctgcttcttctggtttgcgcatgatgcgtaccagtcgcattacctgttgcaccctttctcagtcttctaagccagcccgcaaaatccgtggtatcatgaaaccccgcaaagtctcccccgagatggaagacctcgtcggcgctcccgagatggctcgaacccaagtcctcaaacggatttgggcttacattaaggacaacaatcttcaggaccctacagacaagaggactataaattgtgatgagaagctgaagaaggtgtttgcagggaaagatcaagttgagatgctagagattgctcgcttgattagccctcacttccttaaaagtgaaagtgaaagttaggtttttgtatgaaggtcatgcttaggtgtattggacaattacatttggcctgggacatagtggcttttagtttttgtggtactttgaatacagaacgagcattgttgaagtgttcgttttgattgatgtagtcttttcaacaatttagtatttccctgttaggtttccatttgacatcttaaatgttatggttttatttgatcgtaaataaaaaaaaaaaaaaaaaaaaaaaaaaaagcggcaaaaaaaaaaattattattctggtgtttctttgtgaaccgagaaatgtagtaccccgccccctccccattgaaaaagatgggatgccattggagatgataatataattattgtttggttt

SEQ ID NO: 94727 - DNA, 503 bp, Glycine max
  Clone ID: PAT_MRT3847_5654C.1
ggctcgagcccaacaagccgacctctgcattgtccacatcgtactctccctcggattcttcgaacccgcgttcctcgtaacgctattgtttcttctcaatgcttcgatcaaaacgaagacaccgaaaaataatgacaagtgggccatcacgttcgtgctcctcacgtgcctcccctttgcgacgctccaggcattgctcatattctttgcccctttcgagaaccgagtgccggctgaaacctcggtggttctcaacgacggctacggcttcgagaccgtgctctgcgcgtacccttttctgagtagcgctctttttgctgtgtttggcgttacgtactcgacgtggttcttgttctcgtgttggagggttttgtcgcttgtcatcaacaaaggcttgaggatgaagatttacgtgctggcttggattgtgcttgttgcgattccgctgcaaattgtaacgttggggttcatcgttcggtggagcccgcaccaggaggttcacg

SEQ ID NO: 94728 - DNA, 656 bp, Glycine max
  unsure (1)..(656): unsure at all n locations
  Clone ID: PAT_MRT3847_56550C.1
tttacaggacacatggnaaacaaacacaaaaaaaactcaacagacaccacataaagagcaagagggtatttcatatatataaacaaaaaacaaaggtaacagggaggaaaactagcagtcaagcaaagtcaacagtgaatagcaatgattgtaaagcccttcaaggcaataattgagcttattcttcgcctactagttactccccaataattcatcatttttgctatcaaattctggcttaaaacatacccaaatccttgtctccgtttgaaagaagatgacttctaacagatcaaggctctatcctcttaattttatggagcctatatgtaaatatcttaattaaatgtgctctaattaattaagcatgtcatcatccagaaatttattgtagaccatttctgggatatcattttcttaattttattatataaaaccccatttttagtaaatatacaagcaagctatgcacgattatttcattttaaaaatcaacgagaagggtgaaaaaaattaaatatcctacttttttccatgaattgaaaggctttatatatatacaccagaatttttgctatattatattctaggaattagaagaagaagaagaaaacaaagaatactattcatcactatatatgtaaatggggcgtgaa

SEQ ID NO: 94729 - DNA, 816 bp, Glycine max
  Clone ID: PAT_MRT3847_56551C.1
cccacgcgtccgcccacgcgtccgtacggctgcgagaagacgacagaagggggaggctgagttctgtaattgtgttttggctgtggacaatggctctgtcttctgggcttttcttgtgttcttcttcccgtgttctcccaccaccagaaacccacactttcatgaggaccaggccttcttctgctgccttgcgcaccatttccgttagctgttgcaccgtctctcagtcgtctaagccagcccgcaaaatccgtggtatcatgaaaccccgcaaagtctcccccgagatggaagacctcgtcggcgctcccgagatggctcgaacccaagtcctcaaacggatttgggcttacattaaggacaacaatcttcaggaccctacagacaagaggactataaattgcgatgagaagctgaagaaggtgtttgcagggaaagatcaagttgagatgctagagattgctcgcttgattagccctcacttccttaaaagtgaaagtgaaagttaagtttttgtatgaaggtcatgctttggtgtattgaacaattacatttggccttgagacatagtagcttttagtttttgtggtactttgaatacagaacgagcattgttgaagtgttcgttttgattgatgtagtcttttcaacaatttagtatttccctgttaggtttccatttgacatcttaaatgttatggttttatttgatcgtaattattctgctgtttctttgtgaatggacccttttagaaccgaggaatgtagtaaccagcagcctccattggagatgataatataattgttgtttggttt

SEQ ID NO: 94730 - DNA, 830 bp, Glycine max
  unsure (1)..(830): unsure at all n locations
  Clone ID: PAT_MRT3847_56552C.1
cacgcgtccgctcacagtcccacgcgtccgcccacgcgtccgccagtcaccaacaaaacaaaatccaatggcgccgtctttcgcaatcaacggcgctttccccagcgccagagtcactcctccttccgtcaccggccgattcgccgccgtctacagcgaggtccaaaacagccgcatcgaccacgccctccctctcccctccgttctcaaaaaccctttcatcatcgtcgacggtccccaaagctccgccgccggcaaccctggtctcgctccctcccattcactacttcaattttccgtcgacaattagttctacgtaattttgatattgttatgaatattattatgtgccaatagagctgtgcactcttaggtccattatcctttatttgtcttttaacaataatagataaatatgtataatagtttagggacattctagaatgtgtttgttataattctattagagattgtgagtatctctctctctatatactatgtaatcacaatgaaagagcatcaatgaacagaattatctttatcccctttagctgtaggattaggagtaatggtagaatacatgtttccctcacctatcacattatccctctctacagaagtgttgcaaaaagagagaaatttagtgtgcnntncagtatcctcattggaaggtttccaataaaagaaaaaagaacatataaattccatatttagcaataacatttatcttaaaacttccatatttagcactaacatttatcttcaaagtgcatagcggcaagaatgccgtgactcaccatcataccttacactttcaccagtgcagctaa

SEQ ID NO: 94731 - DNA, 398 bp, Glycine max
  Clone ID: PAT_MRT3847_56553C.1
ggaggctcggaattgcatagagattggaatcagagatgctaacaatagcaatagcgttgtttactcttatttaatttcattcgtcgtatcggagtttgatggtttcatcgaagaaacaatacccccattcttcttcaactctctccctccctccgagagaggatcctaaattctaatcattcaaatctaatctcataataatggcggctgtgtcaggaggagggagtgagatatggaaggcccacacggcaatggccatggtgcagttattcaacggaggttatcacgtcatcaccaaagttgctctcaacgttggggtcaaccaaatcgtcttctgcgtcttccgcgacctcattgccctcgccattctcgctccactcgcttacatccgcgtaaag

SEQ ID NO: 94732 - DNA, 957 bp, Glycine max
  unsure (1)..(957): unsure at all n locations
  Clone ID: PAT_MRT3847_56554C.1
cgtncgcccacgacgtccggaccgctcgcgtcacacagtaacttggacaccaactcactctctcaccaacaaaacaaaatccaatggcgccgtctttcgcaatcaacggtggtttccccggcgccagagtcactcctccttccgtcaccggccgcttcgccgccgtctacagcgaggtccaaaacagccgcatcgaccacgaactccctctcccctccgttctcaaaaaccctttcatcatcgtcgacggtccccaaagctccgccgccggcaaccctgaggagatcgcgaagctgttcccgaaactgttcgggcaaccgtcggcggctttggtgccgagtgattcccacgcgccgcatgcaaatcggaagctgaagattggcgtggttctgtccggtggccaggctcccggcggtcacaatgttatttctggaatcttcgattacctgcaagaccttgcagaaggaagcacattgtatggtttcaggggtggtccagctggcatcatgaagtgcaaatacgttgaacttacctcagactatatttatccttacagaaatcagggtggttttgacatgattcgcagtgggagggacaagattgaaactccagagcagtttaaacaagctgaagaaacagtgcagaagctaaacttggacggccttgttgttattggtggagatgactcaaacacaaatgcatgcctccttgctgagcatttcaggagtaaaaatatgaaaactcgtgtgattgggtgccctaaaaccattgatggtgatttgaaatgcaaagaagttcccacaagttttgggtttgatcagcatgcagtatgcagaatgattggcatgttatgatagatgctcgataactgcctctcgctccctcccattcactacttcaattttccgtcgacaattagttctacgtaattatgatatttgtatgaatattattatg

SEQ ID NO: 94733 - DNA, 272 bp, Glycine max
  Clone ID: PAT_MRT3847_56555C.1
acgagtatattacacgtcttgtgattatgacattgagatttgtttcggccattgagagtttattttgttctccgggtatatacacctttttaaggtgcttggtacaaccttattctgatggaaacaacagagccagctagctctaactattcttggtactacttctcacttcggtcaaagaatgctgctgagaattgctacttctcctttttgctagcttcattcttatcaaacacatacagtgggagaagcaaaaaaaaaaaaaaaaaaaa

SEQ ID NO: 94734 - DNA, 237 bp, Glycine max
  Clone ID: PAT_MRT3847_56556C.1
tatgtcttggcccatctgcacgttctcctgctccatgtgctgacccttctttgccggagagtctcattagaatccggtgtcggcaacctctctgtgctcgctgctccggcgattctacttgtggttctgtcggttcggagttcgatccgaaggtgtcctggaagcatcttactcggagtaagaattataaccgcaaaggatttgggtacaaggaagagaccctccaatcatgaatcg

SEQ ID NO: 94735 - DNA, 606 bp, Glycine max
  Clone ID: PAT_MRT3847_56557C.1
ttgatgagtctttttaaagacctattttatattaaagttttatataaatttagcttctctttatattggacattattgacttataaattttttagaaaaattttatataaattatagttttatttatataaaatcaaaattatgattattcaaagcatgaaataaagatgaaaataggtgaactaaattctataaaagtcaagtttagaggactccatcatctgccactatgatggcgttgattggctcagtgtgtgccttgatggtctctatgcacttcaggtctgagattctccacactttcaccgttttgtccagggaagctgtgtatagaatgtcctctgctgtgtttattgccattgccgtgattagccccttgtgcatctgttaagtcatcatgtcaaacaatctagtttatgattatgacatcaatacttgcattgcatctaagaccagtaattatgagtcaatgagtcacataaaaatctaagtggtttcatgatcattgactcattctactagtaaactcccttcatgttaatgatatcttgtaatccggagatcaggtattaaaattgaaatctataaacaaaaaaaaaaagaagg

SEQ ID NO: 94736 - DNA, 355 bp, Glycine max
  unsure (1)..(355): unsure at all n locations
  Clone ID: PAT_MRT3847_56558C.1
tcttgnacccatgtggcctgccacgtggcctccgaccgctgcttcctggctccgagccttcgaggcttccgaggttttggttctgcaagtcctctccgttgtccctgctcacctcttcctcggtcgagtttgagttcgcctttctgtagcagttgctgctattcgtcagagtagtagtagcgttagttgttgttgctagttctccatcaactctagctctcttatcattccccccccccccaaacacactgcgttatttttttcaacaacttctcttctcttgtactactagctagatagatactaaagcttttctatttatttatttatttgccggcactgagttgagttaatt

SEQ ID NO: 94737 - DNA, 474 bp, Glycine max
  Clone ID: PAT_MRT3847_56559C.1
gttgttccttttggctaaagtaaaaagttcatcatgaaagatatttaaatacaaacagccgtggctaattttgcatctttcaccgaaattaatgttctgtttcattgtttgtgatttgaataggtaaaggttgttccacagttcttatacctgctagagtagtacaggctttgcaactccactttgagcaaatggctgccacgactgggcccaaacctggtggcttccctcccctacatggtacttaattatcaacatgcactcttcttgtggactaaaacaattatactatttggctttaatcaactgtggtttaattgtgtttttatgtatccataaatacagttattaatcaacagttatagttgacttaatttaatcaattatgtattaaatatgtttcaacaaccagccaataatatttatcagagaaaataggacattaatgtttttatattgttatccaatcaaaaa

SEQ ID NO: 94738 - DNA, 447 bp, Glycine max
  Clone ID: PAT_MRT3847_5655C.1
agatcgcaagacgctattcattgcattccgatgaccatttatgaggttataccgcctcaccactcagctctcaatcttactttaggcccttttgatgcccttttttcctttttaatgtatctcacaccatcagggctgagggcagtgataaatttcaaattccctcccttccactctgtatttctctcgaactcaagcgtcttaagcattaaaccacaacatttcccctcatgtaataatatcgtcttcaatcttcatctaagctatgtctttcacctaccacattccatgatgttttacccttattgaagtattaatcttacatgaaagagagttgctgccattattatcacatcagtgatatttctttcttcagtaattgatgcctaccgttaaacaatttatacaattacatattcaacaatggaaaggatatttcatccacta

SEQ ID NO: 94739 - DNA, 157 bp, Glycine max
  Clone ID: PAT_MRT3847_56560C.1
gggcgagggatctgtaaatgctaccgatgcagtattcacagatgtcactctcgaagctgctttaatctccgtcacagaacaggctcttagtaagcccgtagatgcacttgatgacctgcatcgtatagcacctgcctcactcatcaagatctgccta

SEQ ID NO: 94740 - DNA, 343 bp, Glycine max
  Clone ID: PAT_MRT3847_56561C.1
ggcacggaggaagcaacagtgacagacctaataagcattagggtcaacattatatataccaacatttatccataaacactattaacagctgattggtctcagcgcatgacagcctgtagacatatgacacagttccatcgatctactctttcttgactaacctgggaatatacacgtgctgcctgcagatcctattgtgagcccaaagggctgctaaggtgctacaccgagactgacacatatagaattatgtatgactcggctcagctgaaacagaagatgtatactaacagctcgttatgatgatacgctttccgagcatgccgaccactcgcggaagctt

SEQ ID NO: 94741 - DNA, 403 bp, Glycine max
  Clone ID: PAT_MRT3847_56562C.1
gactgccaaccatctaatatgctcccgcagatgggctatctatctttacctacacattggggattatatctcttgtactaaaaaaaagacatctcaaaactagacttgctcacccctaaagaaaacaaaaaatgcctggcgcactaaaagagcgccacaaaactaggactactgacacattggtatgaggttctcctggtgcatgctccaaacttgcgtgttgaatcccgtgaccctgaaagggggattggcacctgctaatatgctattttacacaccgtatgttcgagatgcgcacttcgacatgaggagcgccttcactgcatagacagatcttggccaacatctttgaatttagccttcccatctctgggagagtcccccattacatctacctgctcaa

SEQ ID NO: 94742 - DNA, 795 bp, Glycine max
  Clone ID: PAT_MRT3847_56563C.1
cgaattcgagctcgttacccggggatcctctagagtcgacctgcagtcgcactcaatgcacctcccgtgccgccgttactcactgtcgtcttgtcaccaatgttgttgccaaccgctgtgagtccacaccgccaatatcgttccaattttcactccaatttagaagtcaggtttttttctaccttgcttttcagaattttgttatgcattgttacatttattgtagaagtgctggcttggggtaagccttggtgcaatgccttggagttatttattaactaggtttaagaacttgtgggcttgtgagagtaattttttgacggagaatcgaccatagtcgtaaatgttgctgttttggggagggagaacgaatttgcaataggatggatctggggtggattcgcatgcagttcccggtgagacagaagtggtaggattagtgagtaattaagaaacaaagctttgaagccatgttggtttgacagaggaaagagtgagttattgtgttgatttgtgagtgttggttgattgttagctgtggtttgaaaaccagtttcgtgaagttcaatttataggcaaatgagccaactttttaacgagagagacacctggttatcgatttaattattcatttacaagtgccagtacatgttttgtttttgtggtcccattctatttgaacattccgtgataatattctcaatcaccatttacttcctttccacgttttctttcaccactattatcatacattgctttctctccaactttgtagctcaacttgttggtcaaatg

SEQ ID NO: 94743 - DNA, 264 bp, Glycine max
  Clone ID: PAT_MRT3847_56564C.1
ggctaaagctacttttgtgtttttaccattcttcaaaaagagtggttctttgtgtgtgtatggcgatgataactacactcgtgttcatgaatatgtcaagccttactttaaaccttcttaattgcaaagctatctagctactcataacatcaccactactgatgctatcgacaaaactagtgcaactttgcaacttacaaagttcacaaaccttgcttttctgatgacaaactttcaagcaccgtctactgctttgtgggtggc

SEQ ID NO: 94744 - DNA, 370 bp, Glycine max
  unsure (1)..(370): unsure at all n locations
  Clone ID: PAT_MRT3847_56565C.1
tcttttatatctttactactttcttttcagaagcaaaatataaatagggtacatgtcttactgaaaacaatactccttanancccatctgatttctttcctaatgttgctgaaattagacaataattatacaggcgttacagtttaaacgtgaaaataaattctccaaatgcttatttttaagtagttttaataaagccattgctctcacctgtcaaatcaccttcattaattatctacgccaccaccttttgtatgcattttagtatccaacagttagagctgggccggaacactcccaacccctttcacatactgtagtaatgaaatccacctacaatggtaaaaaacaagcaaaccaatccaatggg

SEQ ID NO: 94745 - DNA, 173 bp, Glycine max
  unsure (1)..(173): unsure at all n locations
  Clone ID: PAT_MRT3847_56566C.1
cccacgcgtccnggcacgcgtgcggtataccctattcgctttaagtctgatgcaatctactaacggcggagctttactttttataactttcgtggtcttgcctatttgcctcttgagatgcccttgagtctcatatcatgtgccatcgcttatcgacaaagaggaggtcattg

SEQ ID NO: 94746 - DNA, 2181 bp, Glycine max
  Clone ID: PAT_MRT3847_56567C.1
atgtggtgtggtaatgatatgcatgaaagggtgatgggagtgcctcaaaaggaccctgaaaccttaataaaagcagattctattcaatatttcatgctccaactcctcactaccagtactacccctctccccattctctctttctttgttgggacttccaccatgagtgacgccggcctctgccttccgccgcagttcctcgccggagacacccacagaaccctttcgaactccgatttcagcttcccttcggagttcccttacgagttccgagtgtcttctccgccctccacggagaccgagagcagcgacggcgaagaggacttcctcgccggcctcactcgccgactcagtcagacctcgcttcacgaagctcgcaagcagttctctactgtttcggagattccaaggaagacccgtcagggtttggtcggttcccctcagtcgacgctcgccggaatcggcagctggtccggtcggagcaccatttccggcgaaggaagccccaacgggtacacgcgtgtcccctcgccctcgacgatgccgtttgacgaaaacaacgacccctgggaagtgatttacgcagtagcaggacaaatcgcaaggatgaagataaacagcaacaaccaagttccaccacagtttgattttcacaacaatagagggttactcactcatcatcgccctaaccagagtttcaatcagcttaaccaagttgggagagcaaagcaacagtgtggttcggtttggggaaggccaactaagccaaactatttggtgcagcagcaacaggttcaggttcaggttcagaacagagcgcgtgagtttggacacgatagtgtgaatgtgaaatgcactcgtccatctgcgtggccccctttgcaagttgagcaacagaataaccgggtacagcttggcggatcgcgggttgttatacccggtgggggtgggtcttctgtgaaaaaggggtgtggtggaactggggtgttcttgcctcgccattatgaaaccccttctgagccacctcgcaagaaaactggttgtgcgcctgttttgttaccagcaaaggtggttcatgctttgaacttgaatattgatgacttgaacgggactacccaaccgcgtttctcgaatgcttttgctgtagattatgatgcgattttagcgaggagaaacgcgcttctgatgcaacagcgagaagaggcagctaactatgaaattcgcctccctcaagagtggacttactgacaaaagaaggcacaagttttctcctaaagaaatttgaagtagttttattttggttgttttgacagaagaagaaattggaagaatgtgtttggctaggttaggaagaaaggggttgcattgcagcttttgggacctggtttttagcggaaggaaatagtgaaaggatagcagttttaggcaaggcttctttttttcccttttctcgtttttacccttttatttctcatttgtaataagagaggattagcggcgtccttttctcttgcgttatcgttttttttataataatgatgtgggcttactaccaaggtttggtgtggttcaacttaaccaaagtttcaagtcatgtgttgaaacttcgtcgatcacccatgttactatccccgctcatttttatcatattttggatagaagagctaattttattacattgtaagtataacttattacaaactatataccataataatgagcagggattttcagtaaaggcacacatgggtaatcgaccaattttcaacacttggacttgaaacttggccaacgttgaaccataccataccttgcgctttagccccatcagtgtcatcaccataaccataaggcaaatgaaaacgacccgcttatcctatcttattacaacaacttataatattactataaaaagggtaaaaaaaggaaaaagaagccttgcctaaaactactatcctctcactatttccttccactaaaaccaggtcccaaaagctgcaatgcaacctttttttctccctagaaaaactagatgttttatttgaacctaaacactagcccaaacacattcttcaatttcatcttctgtcaaaacaaccaaaatagactattccaaatttcttcaaattccttaggagaaatttgtgccttcttttgtcagtaagtccactcttgaggaag

SEQ ID NO: 94747 - DNA, 1032 bp, Glycine max
  Clone ID: PAT_MRT3847_56568C.1
cgcgagagcgaagcaacagtgtggttcggattggggaaggccaaccaagcctaataactatttggttcagcagcaacaggttaaggttcatagtagagcgcgtgagtttgggcacgagagtgtgaatgcgaaatgttccttgttcatctgcgtggccccctttgcaagttcagcagcaaaacaaccgggtacagtttggcggatccgggtctagggttggtggatcttctgtgaaaagggggtgtggtggaactggggtgttcttgcctcgccattatgaaaccccttctgagccacgtcgccagaaaactggttgtgcgcctgctttgttaccagcaaaggtggttcatgctttgaacttgaatattgatgacttgaatgggactacccaaccgcgtttctcgaatgcttttgctacggattatgaagcgattttagcgaggagaaacgcgcttctcatgcaggagcagcagcagaggttaataagtgttcggcgagaagagcagccaactatgaaattcgccttcctcaagagtggacttactgacaaaagaaggcacaaatttctcctaaagaatttgaagaaatttggaatagtctattttggttgttttgacagaagatgaaattgaagaatgtgtttgggctagtgtttaggttcaaataaaacatctagtttttctagggagaaaaaaaggttgcattgcagcttttgggacctggttttagtataaggaaatagtgagaggatagtagttttaggcaaggcttctttttcctttttttaccctttttatagtaatatcataagttgttgtaagaagataggataagcgggtcgttttcatttgccttatggttatggtgatgacactgatggggctaaagcgcaaggtatggtatggttcaacgttggccaagtttcaagtccaagtgttgaaaattggtcgattacccatgtgtgcctttactgaaaatccctgctcattattatggtatatagattgtaataagttatcctttccatgttat

SEQ ID NO: 94748 - DNA, 518 bp, Glycine max
  Clone ID: PAT_MRT3847_56569C.1
ggccggccggttcgggactccatcacttctcgccttccaatctcactttgcgaaggaacaaatggcccacctaacatcaactacttgtctgatttttggccttgttatattcacttcagtgatatcgaaggggaacagctgtgagctatccgtaattggaggtggttgccctgatttaaaagaatgcacagaaacgtgtcgtccttgttatcgtggcataggcgaagtccacgcgtactgtgtacctgcaagtggaggaattccatatgatcaatgtgtttgtagaatgatgaatggagcaccctgtaaccctgctggaccaccgatttgcccccgaccatggccacctactgctaccattgccaccaatcactctcaaactcacaatgcaactccttaattactcaatgttaacacctacatatataatgcatggatatattattactttatacaccaagactccaagagtcatatcaacaccaataaatgaatgagaaattttccagttccattat

SEQ ID NO: 94749 - DNA, 1904 bp, Glycine max
  Clone ID: PAT_MRT3847_5656C.1
ctgcggtgggtttgaccatttgctggatgatgatgatcaaatggctggaatgaaactgactagaaagttcgtgtcagcatcattagttagtggttcaagtgatgaaaattggtttgctgtcgcccccaaaatagaaacaaagttgtctcgagcaagtagaacccgtttagcaaaagtacgattagatgaaaaggatgtgggagaacttgaattgttacttgagggatgtgaatcgagtttgaaagttgaaattgtgggttgggacatgtgattggaattgggggagagggaacgggtaagggaatggctcgtgatgggagtgtcgtccctgcggacccgcaggcaatggcggttgtgaagaagaagacgcagtcttcgaggagttggattctgtttgacgccactgggcaaggcacgttgctcgacatggacaaatatgccatcatgcatagggttcagattcatgcgcgtgatctcagaatccttgatcccttgctctcttacccctcgaccattcttggtcgtgagaaggccattgttcttaacttggagcatatcaaggcaattatcaccgctgaagaggtattgctgagagatccaacagatgaaaatgtgatccctgttgttgaggaactgcaaaggcggttgcctcaattgagtgctaccggtcttaaacagcaaggagatggtaaagagtatcttggtggccaaaatgatgctgaagccgctgaagaagaagagtcaccctttgaattccgggccctggaggttgctttagaagccatttgtagttttcttgctgcacgtacaacagaattggagatggctgcttataaggcattcgatgaacttacctccaagattagtagtcgaaatttggacagagttcgaaaactgaagagtgcaatgacaaggctgactgctagggttcaaaaggtcagagatgagcttgaacaattgctggatgatgatgatgatatggctgacctatacctgtcaagaaaggctggttcagcatcaccagttagtggatcaggtgctgctaattggtttgctgcctctcctaccataggatcaaagatatctagagcaagtttagcaacagttcgtttagaagaaaatgatgtggaagagcttgaaatgttactcgaggcttatttcagtgaaatcgaccacacattgaacaaattaaccacactgcgagagtacattgatgataccgaagattatattaatattcaacttgacaaccatcgtaatcagctgattcagttggagctctttcttagctcaggaactgtttgtctatctttctactctttggtggctgctatatttggcatgaatatcccatatacttggaacgataaccatggttacatgttcaaatgggtagttattgtctcaggagtattttctgcggtgatgtttctcattattacagcctatgctcgcaagaaggggttaataggatcgtgaaaatcaatctactgaaaaaaggggtgaataggactcctacatataacagtctaataatgaatttatgttgaagaggtttttattgtagatggttcaacatcatgttgagttattggacatgcttcatgttgagttattggatctgccatttcctcacagctattctgttctctggattcagtcattataacagattgcaaatacagtctacagattcaaagttgattcttgattttgaataatttcaaaggccttgatacttaatttaattataattaagttgaatatgctagtctttacatactttttttctactatttctcttctgttcacttctatgtaaacaaggataggataagtgccaccgaactccaaagcatttcatcaattagatacaaaatttaattacattgaaggctgttctt

SEQ ID NO: 94750 - DNA, 605 bp, Glycine max
  Clone ID: PAT_MRT3847_56570C.1
ttctgattttggactagccaaaatttgcacaagaaaagaaagtatgatatcggtattcggcacgaggggaacagcaggctatattgccccagaagttttttcaagaaatttcggtacagtatcacataagtcagatgtgtacagctatggaatgatgatcttagaaatggttggaagaagaaagaatattaagactgaagtaaattgctcgagtgaaatatactttcccgattggatttacaatcgccttgaatcaaatgaagagcttggtttacagaacataagaaatgaaagtgatgacaaattggtgagaaagatgacaatagtgggcttatggtgcatacaaacccacccttccactcgaccagccataagtaaagtgttggaaatgctaggaagcaaagttgagttattgcaaattccacccaaaccctttttgtcttctcctccgacctctccagtccatttatcttgtgagactttgtaacttgttaactcgtgagctagaataatactatataatgaactaaaatgttacagtatttcaaatttataactataataatctgattccatgggttttaaaaaaaaaaaaaaaaaaaaaa

SEQ ID NO: 94751 - DNA, 1608 bp, Glycine max
  Clone ID: PAT_MRT3847_56571C.1
aattcatagggttcatggtatcaccttatcgtacaaacaagcatggagaggcaaggagcgtatcatggctgcaatgcgtggatcttttgaagaaggttatcgcttgcttccacaatactgtgaacaggtgaaacgcactaatccaggcagtattgcatctgtttatggaaatcaagctgatggttgtttccaacgtctcttcatctcctttcaagcatctatatatggctttttaaatgctttccggccactatgggggcttgacagaacatatttaaagagcaagtatcttggaacattgcttcttgctactggatttgatggtgatggggctctctttcctctggcatttggagttgttgatgaggagaatgatgataattggatgtggtttctgtctgaacttcataacctgcttgagattcacactgaaaacatgctaaggcttactatttcgtctgatagacagaagggattggtggctggcggggcaccttggttccccccggcctgcccccgtctttgtctcctgcccctgcgtggctgctcccgtttgcatttttttggctccctgcctgtcaccctcctccgggtggctgcttttgctccctctgcattgatgtggatgcatagattttggagattgaagagatatcacaagatgctgcatattggattcgaagaattccacctcgcctctgggccactgcttattttgaggggcataggtttggtcatttgacagccaacatagttgaatctttaaacacttggatattggaggcatctggacttccaataattcaaatgatggaatgcattagaaggcagctaatgacttggtttaatgagcgccgggagaccagtatgcagtggacatcaatacttgtaccatctgccgagagacgtgtagccgaggctcttgatcgtgcacgcacatatcaggttcttcgtgccaatgatgctgagtttgaagtgatatctcacgaaggaacaaatatagttgatatcaggaaccgttgctgtctttgccgtggctggcagctctatggtttgccctgtgcacatgctgtggcagcacttctctcctgcaggcagaatgttcatagattcacagaaagctgtttcactgttgcaacttatcgcaagacgtactcacaaaccatacacccaattcctgataaatctctctggaaggagttgtctgagggggatgccaacgctagcaaagctacagaagttgttatcaatccacccaaatcactcaggccacctgggagaccaagaaagaagagagttcgtgcagaagaccgtggacgcgttaagcgagtggtgcattgtagtcgttgcaatcaaacaggccactttagaaccacatgtgcagctcccatctaagttgctgaattaataaattggacaacctttagttatgttatgttctctttattatttatttaggcttgatagcttagactggcgagtaaatgatctctgttatttactttacattaatgtgaattaattcgtacagatgctctatgtgtatatccttcagtaattggcattgttcttcaataacgcatatagtaattgcataatttttgttct

SEQ ID NO: 94752 - DNA, 580 bp, Glycine max
  Clone ID: PAT_MRT3847_56572C.1
tccgtggctggcagctctatggtttgccctgtgcacatgctgtggcagcacttcttttcctgcaggcagaatgttcatagattcacagaaagctgtttcacggttgcaacttatcgcaagacgtactcacaaaccatacacccaattcctgataaatctctctggaaggagttgtctgagggggatgccaatgttagcaaagctacagaagttgttatcaatccacctaaatcactcaggccacccgggagaccaagaaagaagagagttcgtgcagaagaccgtggacgtgttaagcgagtggtgcattgtagtcgttgcaatcaaacaggccactttagaaccacatgtgcagctcccatctaagttgctgaattaataaattggacagcctttagttatgttatgttatgttctctccgtgcctgtagtcctttttattatttatttaggttttatagcttagactggcgagtaaatgatctatgttatttacttgacattaatgtgaattaattcgtagcagatactctatgtgtatatccttcaataattggcattgttcttcaattgcccatat

SEQ ID NO: 94753 - DNA, 349 bp, Glycine max
  Clone ID: PAT_MRT3847_56573C.1
acgcgttgcctttgtagaaaagctcagcggcgttgcgcaccaattgacggacgatgagaagagtgccttccgtcaaacattggcaccctacaaaattccaaaggctgtccaatatatgccgttgccacgcaatcaccttggtaaagtgcagaagaatgttctacgcgcgatgcccgaactaaaagaattatttgcagtgaaaaaatgaaaattatttattaattaatttttatatatttagataaattgttaatgtagaaaatgaatgaatacatatgtaacaaaatcatttattgtaaaataaaaggactaaatatctgagaaaaatttattttcctaacatgaaaca

SEQ ID NO: 94754 - DNA, 193 bp, Glycine max
  Clone ID: PAT_MRT3847_56574C.1
cgtacgggttatcaagattaattgccaaccataatgcttttttggtcaacacttatccactccatctgaactctggtgttcttaaaaacttacccgttcgtgtactgatacttccccttttcataaacttcttgcttgtctcttacctagtctcccttaacgaaaagctctacaccaacgtcaactatttctt

SEQ ID NO: 94755 - DNA, 849 bp, Glycine max
  Clone ID: PAT_MRT3847_56575C.1
attctatccatttttacagatttaaacattttagaaattgtccaccctactcttaaatcgtaatcttacttctgatttagtcaatgataataaaaaaccaacttagtccttttctatttatattagcgctgtgcctttccgtcactcaaaccgctatctcgaccacgtactcgttacgactcatatgattcttctttaaaattacactaaaacaatgtgcaaaagacaaggcgatttgcgtaattgtcaaccaccacaccaaccaagccgcgtcgttctttttagtcactgataagaacaaacttccaccgtccgcggccatggcaacgctgtcttccgccgtcactctcgccgctaaacccctctcactacccctaaaccaccgcgccagagcggcggcggcgttccactctcccaaacctcatctcaagagagcggaattcaaatttttttcgaatggctcagctgcctctgtccactcccttacccgccgcctccgcgtttcctccaacgacgctcacttcaattcgggtcccgaggagagccagcaacaacagtcgtcgagttttgctgagttcatcacttccgagagagtcaaagtggtggccatgctggctcttgctctcgctctatgcaacgccgatcgcgtcgtcatgtcggtggccatcgtgccgctgtccctcgccaacgggtggagccgcgccttcgccggaatcgttcagtcgtcttttctgtgggggtatctggtttcccctatagctggaggggtattggtggatcactatggtggcaaagtggtcatggcttggggagtggccttgtggtcactgctacttttttaccccttgg

SEQ ID NO: 94756 - DNA, 368 bp, Glycine max
  unsure (1)..(368): unsure at all n locations
  Clone ID: PAT_MRT3847_56576C.1
cttccattttaggctctgatccatggcttgaatagacattattactctatagcaattaattacagaaagaatgaacttgaagagaagatgttgcttaggcttcacaaaaagaagtggactgatggtttgacactcaggcatnttgattcacattctagaactaatgaacagactgttcatgtaagttgagatttttcaatgtaaatgactcagacttttaatttctggtttcttctccccacttcaacttgtttttaaactttttctttgtcaaatttattgtatatatgagatgagacttgcataaataatacaaggcaaagggcaatttaaatgttactgcacacattcctgactttttgcacagc

SEQ ID NO: 94757 - DNA, 604 bp, Glycine max
  Clone ID: PAT_MRT3847_56577C.1
aacctcttgggctgatttatgtgcttgcttatgtgcttgatgctgcgaacctttgggctgatttatgtgcttgcatggtcgtgagaagataattgtgggccaacctttgggctgctttatgtgcttgcatggtcgtgagaagatgatagaaggggatcccgagcctgaatcaaataacctaacctaactcgttctgactacggagaggaaaatacccgggcccccgcctccgtcttcttccgctccagtcctcgacgcgatggcgaagagagtagaggtgaaagaccgtccgataaggaggtatgggccttagggcagacgtccacctgataggtaacgcgtatacgcgcgtaggagtgacggccctactggcggctagcgttgaggtttctcctgtaaacgtccccgtagtaggttacgccgactgaaaccatcatcgttaaagaggttacgaaacaaataaataaataaacaaacaaacagtctcaattgatatacacgcatgcagcgctggggcctcagtcagtcaggcaggcatgcgcgctccccggcactgacttcagcccggcggaataagcgcggtactacgactcagccacacaca

SEQ ID NO: 94758 - DNA, 430 bp, Glycine max
  Clone ID: PAT_MRT3847_56578C.1
cccgcgtccgtttgaatcataactaacctaatatgaatcgtagatttaaggtaaaacaatttaaagtatcgtatctaaatggaaatattaataatatatacaaggccagacaactgcttaaaattgttttaccttaaatctacgattcatattttgtaatctataatatacataatgtagggatttttttaaaaaaaaaaaaaaaaaaaaaaaaaaaaaaaaaaaagagaaaaaaaaaaaagaaagataaaaaaaaaagaaaaaaaaaaaaaaacccccaaaaaaaaaaaaaaaaagggggggcccctttaagggatccaattttaactccggggggggggaaaggaatatttttttttagggggccccaaaattaaatccgtgggccgggttttaaaaagcgggggggtggaaaaacccggggggtccc

SEQ ID NO: 94759 - DNA, 1322 bp, Glycine max
  unsure (1)..(1322): unsure at all n locations
  Clone ID: PAT_MRT3847_56579C.1
ccccgcgtccgctcgattcgagggtgacgagggatagcagatctgaatctcatcttcccaaaaccctctttcttctttttctcctctgatctcatttcaaacctaaccctaaccacaacagaggaagatgttgacgaaattcgagacgaagagtaacagagtgaagggcctgagtttccacccgaagcggccatggatcctggcgagtctccacagcggcgtcatccagctctgggactaccgcatgggaaccctaatcgacaagttcgacgagcacgacggccccgtccgcggcgtccatttccaccactcccaacccctcttcgtctccggaggtgacgattacaaaatcaaggtgtggaactacaagctccaccgctgcctcttcaccctcctgggccacctcgactacatccgcaccgtgcagttccaccacgagaatccctggattgtcagcgccagcgacgaccaaaccattcgcatctggaactggcaatctcgcacttgcatctccgttttgactggccacaaccactatgtcatgtgcgctttgttccatcccaaagaggatcttgttgtgtcagcttcgctcgaccagaccgttcgcgtttgggacatcaactctctcaagcggaaatacgtgtccccggtcgacgatatcctgcgtctcagccagatgaacactgatctcttcagcggcgtggatgccgatgttaagtatgttttggaaggccatgaccgcggtgttaattgggcttacttccatcccacgctgcctcttattgtatccgctgccgatgatcgccaagtcaaactttggaggatgaatgacacaaaggcatgggaagtggacaccttgagagggcacatgaataatgtttcatgtgttatgttccatgccaagcaggatatcattgtgtcaaattccgaagataaaagtattcgcatatgggatgcaacaaagagaactggaattcaaacattccgccgagagcatgacaggttttggattcttgcagcccatcctgaaatgaatctgctggcagctggtcatgacagtggcatgattgttttcaagctggagagagaaaggcctgcatttgttgttagtgtgattcattgttctacactaaagatcggttcttgtgtttctatgaattcccaacacaaagagatgcacaagtacttccgttccgacgaccgggctctttaagcttgaatcaaagcccaaagactctttcctatagcccaactgaaaatgcttttcttctgtgttcagatgganatggtggatccttatgagttgtattggatatcaaagg

SEQ ID NO: 94760 - DNA, 156 bp, Glycine max
  Clone ID: PAT_MRT3847_5657C.1
tgattgaagagcatgtatttgctttggttggtcagatgggtagagaaaccttctcaggaaccattgagctgctggctacattatgtcactctacgctgtgcacttcacactctttagtaggccgcttttatcttcaagatcccgtagtggctgttt

SEQ ID NO: 94761 - DNA, 284 bp, Glycine max
  Clone ID: PAT_MRT3847_56580C.1
tggagatgcactaataactgactttgctacagatgcaaaaagacaatttccgggaatagtcgatcataaacgatcgtccgattctgctgttcttccactacagttcagtattactgttatcaaacgaaaactggctatgtgaccgagttgcacattggagtgtaccgctgaccaaaaacatctgaaatttatggatacaaaagtaccacagtcagggttagctatcagggaaaactcaatggtaggactgttttcaaatcagggtttggtacagattatccaat

SEQ ID NO: 94762 - DNA, 360 bp, Glycine max
  Clone ID: PAT_MRT3847_56581C.1
cacgcgtcagttacagctgcgataacgacacaaaggggtcgtaaaagcatgcacaaagttgatgggttgacccctgaacagcgcaagcaaagacatcccaaggcacttcacgagatggcggcactaaaagctgcacatgatgcatgagggaatcatgcatgtagaaccttccatcttggcaatatttcaattagtggttagagttcgacattgttatttgaagacatggaatttatagaatatttaagttgcattaatcgtgcagtatgatgtctgcactaacgtcatctgtgacagatgaatatataactactacaacactgaaaagtgttatcactcaggggctgaatctagatcttg

SEQ ID NO: 94763 - DNA, 303 bp, Glycine max
  Clone ID: PAT_MRT3847_56582C.1
ataaaacgcctatcgtctctttatataaaggggacctgtgcaaatcgcgacctggtcattttagaaaataaattcttcatttgccgaacattacagtatccaccccgcatgcccaagccatgcaattagactcatttccatctaaaatgagcgataggtcatatggacaactatgccataacgccatattgcataaaaagacggacctaccgggacgattgatgacacatggttttgatgttttctgccaaggatgctgacccaaatgaatcatgacatcaccatcatgttttgagttatggc

SEQ ID NO: 94764 - DNA, 414 bp, Glycine max
  Clone ID: PAT_MRT3847_56583C.1
ctttcttgtgcccccacagatagatccgcgggtggggaattctggcgttgatgttaaactgccttctaaatcggaaaaggtggactctacaaaggcacggcaagtgagtgtaccgaccgacaaatatgacagagtcggggctgcaacacatgcgagagaggatggcactgaacaggaggatcatgatcctcccattgggggagttgccagattggcacatacaatggtgcctctagacgaagaggttcaggctaaggtggcaccagacatggttgaagagtgtcttgatggtgttgaaactgctagaggctccagggaggatcttaaaagttctgaatctaaaaggggacgtgggaaagacacatatggagggaccatcttgcgccgcgatcgatgggcatacttatgggctga

SEQ ID NO: 94765 - DNA, 1913 bp, Glycine max
  Clone ID: PAT_MRT3847_56584C.1
ctccgtcaaaccctccaacacacaccttctctcaacgcccccattctctttctctttccctaacgtccccgacgacgccgtaacgtcctccctttcatggcctcttgcgacgacgacgacgacttctctctcctccgcgacgacagccaccaccacctccaccaaccctacgcgccgcaccaccaccacttctctccctccgccgtcgccgcctccgtgccgcccaagcccgttgccgaagctgaggacttcgccaaccccttcgaagacgacgacggtagcgccagcgagaagcgcaaggagtgcgacgagatcggtgagggagccgcctcgtacggattcaacaacaagagatctaaggcgactccgtcgaacggcgtcgccgtgtccggcggcgccgagtaccgcaaggaccgggaggagtggagcgacacggcgattgtgtgcctcctcgaggcgtacacggagaagttcacgcagttgaaccgggggaacctgaggggaagggattgggaggaggttgcggcggtggtgagcgaacggtgcgagaatcaatcaaagagcgttgaacagtgtaaaaacaaggtcgataacctaaagaagaggtacaaattggagcgacacagaatgagcagtggctgcatttccaccagccactggccttggttcaagcaattggaacagatcgtcggaaattctctcccggcgaagttctccgacgaggataaagcggtcatttcagccggaacttctccccggcaatcgaaaagatatggagtggcaacacccagcactggaggtccagcaaatagcatgaagtccaaagcattgtcaaacagtagatggcggatggtagtcctcaaaattagtggggcagctcttactggatctgatacctgcaatattgaccctaaggtggcaatgttagtgtcaagagaagttgccatagcttcccgccttggtgtggaggtggcaatcgtatgctggaggtcgtgattctctcctctggagaggctcgggtaaatgtgacaggtttagaaagatgtactgcgtaccaagttggcatgatggcaactgtgatgaattcaatattgctccaatcgactctagagaagatgggtgttcagactcgtgtacaaacttcagttgccatgcaggagtttgctgaaccatacaataggcagcgggccatcagacatcttgagaaaggaagggttgttatatttggtggcattggttttggtgctggcactcctcttttctcaaccgacatagctgcagctcttcgtgcttcagagcttaatgctgaagcagttctaaagggtactaatgtagatggtgtatacgactgcaactcacgagacaacaatttcacttttgagcacatatccttcagagagctaggttcaagaggtgtcacctctatggatatgtcagcgctgacattctgtgaggaaaatgctattcctgttgtggtttttaatctactggagcctgggaacatctcaaaagctttgtgtggagaacaagttggcacactaattgaccaaactggagcaataagctaacagttaattcatccaattcaattattattagtcgcaccggagccatcaagttgagtgggatatttgccatgactgagattcttgaagaataaaatataaaatcttgacagattcagcgtgtgtccaagttagtggaaattgtactttggaactgtaatcacaaattccctatcactaattttaggtggttgttgtacttttaataagtttatgtaaaaaagaaaaaaaatgcttttgtatattattcctagatgaattgtagcatagtaatgtattagcagtagtcatcctttgttagtgaatgtaaacagatagagtaattcaactttatttattattcctttt

SEQ ID NO: 94766 - DNA, 294 bp, Glycine max
  Clone ID: PAT_MRT3847_56585C.1
tcggatattcgtacgaaaacatactcaatggggcagggggagatttgatagcgtgaagttataaaaaataaaatctgacggaagttttaaaaaatccatcgtttcaagaatgctgcatctgaggactttaacgaaagaaacacgtataccgcaaaaaaatggttcctataaagcgataagtttaacaactgcggagcattgcactcagcgattaaatgctggggattcaagttaaatgacatcaactccgcgctccatatcacaatagtcagccgtccctacttgatgaattcc

SEQ ID NO: 94767 - DNA, 509 bp, Glycine max
  Clone ID: PAT_MRT3847_56586C.1
gaaaaaatattaatattttaaatagtgaataagaattttttaatagcaagagggggaggagtataagaattgatgaaaaggagaaaattgttaggatggggtttagttaaaaataaacagtaactttaagctaaatgaacgtgaagagataaggatggatgcacaaacctagtgagatggaggtgatgcagaaaaaaatgattggatatatgataccccacgagaatctagataaccaaacatgagggataagctaacttgttggattgggccttaagagcacacatacacaaaattagcccattctggaagggtataagaaattggaattgagaaaagggtgggattgggctctgcacaatgagggtatagaagtggggatgaaaaagatggttacagtcttttgatagaatgcataggtgtgcagaatggttctcagaaagtttagaacgtaggagaagacctcgtgcaagacaaaaataggcaagagattttcagagacaagctgt

SEQ ID NO: 94768 - DNA, 150 bp, Glycine max
  Clone ID: PAT_MRT3847_56587C.1
taggtgttatatgtgtgtatatgggttgagaagcctatgtaaacaaccaaatctagagaaacccagatctctgttcgcccatttgaaggaaaggaaatcttacacctctctctccaagtactgattcgcgccaagtccgacgcgcccaga

SEQ ID NO: 94769 - DNA, 245 bp, Glycine max
  unsure (1)..(245): unsure at all n locations
  Clone ID: PAT_MRT3847_56588C.1
tttttttttttttttttttttttttttttttttttttttgttttttttttttnnttttccgtaaactgggaccagtttttttcagctttaattcatgttgatttttttatgagctttaaaaagtcaaaaagaaggggtcataatacatcactttaatgagtttccaaagcttgtgaggaacaacaaaagaagaagttttaaactgttgcacaagcctagcttttttaacataggtttttaacttt

SEQ ID NO: 94770 - DNA, 585 bp, Glycine max
  Clone ID: PAT_MRT3847_56589C.1
acgtggcaataattcgctatgcccattccgtaaagcgatctacgcttacggcgggatgggtacagcgcttggatgcccgttcaaccagacacctgcattcggtgtcacttaaagtgcacttttcggagatgaaggatatgaacactacacgtaagttatcggccattattggtgcctcttttgccgcgtcgatggcggtttcacaaagcgcgcaagccgatcaatccctgtttggtttccaaccgctgtcacatggctacaatctggcgatgctggaaggcagttgcggcgccgacaagaaaaaagaaggctcatgtggcgaaaagaaaaaagacggcaaatgcggtgaaggcaaatgcggcgagaaaaaagccgacggcaaatgtggcgaaggcaaatgcggtgaaaagaaaaaagacggcaagtgcggtgaaggcaagtgcggtgaaaagaaaaaagacggcaaatgtggtgaaggcaagtgcggtgaaaagaaagaagagaaaaaataacgctgattagcgttatgccctagtacaaaagccaaaggcgaacacgaagctcacgaagttcgcgaagagcacg

SEQ ID NO: 94771 - DNA, 351 bp, Glycine max
  Clone ID: PAT_MRT3847_5658C.1
ggaccaaggtcaaagggtgaagggcttgaacctctcgcctgatttctggagccaatcctgacatgaagcagctgaggagaaacggtgccagtaagccgatgattcgattagctagcatttcaaattggctgaggtaagcactcactgaaccttgttgtgtcaatttgcacagggaccccgtgggatcctcatattgggaaggagcgaagcgggcctcgagggcatgaaggagaccgatccaagaggatacctgaccactacgaatgagccattggaaccaggccaaggcaaggccttccatggcaaaggaggaaacaacaaggcgttcgggctcaagggttgagtgacagt

SEQ ID NO: 94772 - DNA, 177 bp, Glycine max
  Clone ID: PAT_MRT3847_56590C.1
tattatcatttttcggcccaccagaagtattctacataccactaaaaggtccacagaagcaccttcataacatgcctgaacaagccccccaccaaaaacctcaaaaactcaacccaaatttctacataaaaacttgccccaatgcccaaaaaatcgtggccgatgcacttgcagaca

SEQ ID NO: 94773 - DNA, 542 bp, Glycine max
  Clone ID: PAT_MRT3847_56591C.1
caacgttagcattgttggagacaatatggacttgtttttgctctgtattttattattcatatgccttctaaagttggattcttggatctcttcatgactaatttggagtacacatatttctattagttggcttttgttgtgtgttatgaatgccatgtttttaacccttttgtatagctagctaaatgctaaaggtatagattttggcctaagattctagttatctgttaaggaatggaaagatgtgagcatgtaatttatttgtattattgtggttgtttcataaattatgtggttaactagtccctatgttcttcatgtatttatggttgacttgtttacaaacattatggaggtaaacttgctcattatgttgtgccttcttaaatttatttttgacatctacatggtaatctccttttatttcgtttattttttaatccatttcaagatgtcttcatatgagtagttcaataaagtatgctgatctccatagtttttagacctttcctaccacaaattagtggtagaaagatttggat

SEQ ID NO: 94774 - DNA, 257 bp, Glycine max
  Clone ID: PAT_MRT3847_56592C.1
attctatgtacccatggtggtccccatttgtttcgtgtacttttattcttagtttcatttactttccgtacccctttttgacgtgcttcagtcatttacttaagtcattttctcgcctaatcaaaaaataaaataaatttccaacgatcatttgaattgtaatatccattaatttctgttaaaatgaaatccaaccgttcggtcatgccataaccacgttggaaaccaaaaagaagtaaaataataatataataata

SEQ ID NO: 94775 - DNA, 553 bp, Glycine max
  Clone ID: PAT_MRT3847_56593C.1
ttccaggaaggtttcccgtcatcactgtatgacgtcctccttctttggggggggggggggggggcaaaaggtagaatgtgggcttggtggccgaagataaaaagatagtacaacggtgattttgggacttcagtaaaatggggtgggcggcgggttaagtaagtgcgtggaaggaatgtgtagagatgaggaaggttacagacgtaagaagacgagacttcgagaggaggaggaggagcgagagatcgacgagtgagaccgagaggaggtagagtggacatgtagtaagtgtgccgcaaggaagggagggttgtatttacacacgaatgtgaacgtgtaacaagtttacggcaaaagagtgcggtttgcgtagagcgtcagtggcatagggttatacattggcaagtggtgcattgatattcggttggttcggtcgttagtaggagggcatgtcaatcatatgtgccgtgataaaatctgggtgtgttgtgcgatagcgagagcgtgggcgttcgccacgggtgggttctagaacgcatagcaatgcacaaaa

SEQ ID NO: 94776 - DNA, 782 bp, Glycine max
  unsure (1)..(782): unsure at all n locations
  Clone ID: PAT_MRT3847_56594C.1
aattcggctcgagggttccccaagagattctgttggacatgggactcacacagcatcaatagcagctggtgttcatgtcaacaatgctagttattttggtttagcacaaggaacagcaagaggtggttcaccttctactaggattgctgcttataaaacatgctcagatgaaggatgctctggtgccaccatactaaaggctattgatgatgctgtgaaggatggagtagatataatctcaatctctattggactcagctcactattccaatcagactttttaagtgatcctatagccattggagcatttcatgcagaacaaaagggggtcctggtggtgtgttcagctggcaatgatggtcctgatcctttcacagttgtgaacactgcaccgtggatatttactattgcagcttctaatattgataggaacttccaatcaactattgtccttggaaatgggaaatatttccaaggtactggcattaacttttcaaaccttactcattcaaagatgcatcgccttgtctttggagagcaagtagctgccaaatttgtccctgcatcagaagctaggaactgttttcctggatcactagatttcaacaaaactgcaggcagcattgttgttttgtgttaatgatgatccaactgtttcgaggcanatcaagaaactagttgtacaagatgcaagagccatagggataatactcattaatgaggacaacaaagatgctccctttgatggcagtgcatttccttcacttcagttggcaatcttg

SEQ ID NO: 94777 - DNA, 2617 bp, Glycine max
  Clone ID: PAT_MRT3847_56595C.1
gcattagcctgttctttgagagtttatgaaaaagcgtccattgaaggaacagaagattcacatgagggaagatatgattctgatggttcagagaaaagccttgattcatttgttatccagctgtttgaactcatgttgacccattgtgggtaatccaagactgggaaaggtggttgtggctaatatcagagaattggtgtactatactattgcttttcttcaaatgactgagcagcaagttcatacatggtctgtggatgctaaccagttcattgctgatgaagaagatgccacttatagttgccgcgtctctggtgtgcttttactggaagaggtggtgaagtcttctgctggttaagtaattttgtccataacagatgatgcaaaacagtggttcaccgagtctcaaattagaaaagcagctggtaatgcaagctggtggaggataagagaagctactctttttgccttatcgtctctttcagaagaactgttggagacagaggaaaccggatttgattcatgttgcctgttgcacctggttgagcagattttcactgaagactctctaataggtcctcttgaatatccctttttatatgctcgcatctttacgtcagttgctaaattgtcttctttgataagcaatggtttactagaacactttctttatttagcaatgaaagcaattacaatggatgtgcccccacctgtaaaagtaggtgcctgcagagcacttactaaccttcttcctgaagcaaaaaaagaaattgtccaatcgcaattgttgggtttaatttcatccctcacagatcttcttaatcatgcatcagatgaaaccttgctcatggtacttgatacattgcttgctgcagtaaaagcaggtcatgagtcatcaacattagttgaacacatgatttctcctgtaatccttaatgtgtgggcatcacatgtttcggatccttttatcagtattgatgcactggaagttcttgaggctatcaaaagcattcctgaatgtgtacatccattggtttccagaattttgccatctattggaccaattttgaataaaccccaagagcaggctgatggtttggtagctggatcattagatctggtaacaatgttactgaagaatgcccctgctgatgtagtgaaagcaatatatgatgtctcttttaatgctgttatcaacataatccttcaaagtgatgaccacagtgaaattcagaatgctacagaatgtttatctgcttttatatctgagggaagacaacaaattcttgcatggggatctgattctggatcaactatgagaagcttacttgatattgcttcaagactgctagaccccaaattggaaagctctgggtctctctttgttgggagttacattcttcaacttattttgcatttaccaacacagatggctgtacatatacaagacttggttgctgctcttgtcaaacgcatgcaatctgctcaaaactctgtcttgctaagctcattgctaatttacggctgcgagaagacgacagaaggggttcctaatgttggacaatttattgatttgctgatctcaattcctgcggaaggacatggtaattcctttgcttatataatgtcagaatggactaagcagcaaggggagatacagggggcatatcaaataaaagtcactacaagtgccctggccttgttgctaaccagtaggcacaatgaattggcaaatatacatgtccagggctatcttattaagtctggcgagggaataactacaagatcaaaagctaaatcagccccagatcaatgggtaatgttgccactttctacaaagatagtggctttattggcagatgcattaactgagatacaagaacaagttttggccgctgatgatgaggatagtgactgggaagaagttcaagcagatggcattgaaaatgataaagaatttctttattcagtatctacatcttcgggaaaagccacggatgaacaacttgaagcaatggtgaaagtatttaatgaggatcaagatgatcactatgaagatgaccttttaagtattgctgatcctctcaatcagataaacctggcaaattaccttcttgatttctttgttagcttttctcagtctgacagacagctcttagatcacatttgcaagagcttgtctcagtctcaacgaaatgccattcaaatggtactgaagagatgagaatttcgtgtcctgtcatcgagtgctgtctcaaggatgggttgataataccagagagagtgaaacaaagaaatggttggaaaccaatatcttacattgttcaggttggggaatctgtctgcagttctgaaaggtattttctttctgctgcagtgttcccccttgtatgtctctgattcttttttattggatgtgttatgtatgtatcggatatcagttttgcttttatatggtttcggcccatcaattcaccgaatcttttgtttgtatatcaattgtgcatttattaaaagaagggggaaaaacatcagttggtagcataatggtgcattataatgtcaattggatgttttctgaagaaaaaatgaatgtcaattggattggttcctgctt

SEQ ID NO: 94778 - DNA, 736 bp, Glycine max
  unsure (1)..(736): unsure at all n locations
  Clone ID: PAT_MRT3847_56596C.1
cggacgcgtgggcggacgcgtgggaaaaaatcccacacttaaagatttttataattaatgattaaaaatcaggaattgaagattaatacttatgtcaataacaatagagataacagagcagggtcacagagactagaaagagaacagaagcgagcaggggctttgctagaaatgctgaaagatgcctgaatacatgttggagaaaagtgagtgtttgtccagaggatgatataaaggattagagagaaccgaacagagcaggttgcagaggtgggtaggaaaatgctggaaatcatcagagaagaacggtgtttgtccagggagacaacacaaaattaggtcactgaaagcatagggtttcagtttgaaccttttgctttaatgaaaggggatgagaaattatgtgtctgccccctaaacagctgtaaatgatgttatttactgcggtgaaattggatttttgttgctgttacctgtcataccacctgcatcttgctacacaaacncactatagtggtggtgaccgctgcattgccaagctgtaatgcagattcttctctgtagcgtcaaattgtgtgacagtgacaccatgccatgatagtggcatgatctagcactattgacatctgtggnatttgtgtgttagttatgggagaagtgcgtttagggaagcaccaagctcacattcatctgaatctcacgtgccttcatttattntttctttattggttttaat

SEQ ID NO: 94779 - DNA, 1175 bp, Glycine max
  Clone ID: PAT_MRT3847_56597C.1
gccacgcgtcgagttcctccattttttcatcctatggtaccgcctccgcatgttgctgttcctggttatgctttcccacttggtccaggaccttttccaggtgcagaaaaccctttagtgaagcctgtttctcaggcacccggacaagcttttgctccacctgctcatgctgttgatggcaaaaatgttcagcctctggtgcggggagatccaaatgcctatgttggcaatttttctaatggaagaacaaatatccaagaacaaggtgaccatctaaatcatgcttggcatcatcaaagaccttttccttccagagtaaacattcctatgcaacagggtttgggcccaaggccatttatacgacccccattttatggtccacctccagggtacatggttggtccaagcttcccaggacctgcacccgtttggtgtgtccccatgccacctcctggctccattagaggaccccatcctaggcactttgtcccatatcctgtcaaccccacacctcagccaccgcctccagaaactgtatcgttgaggactagtattgtaaaacagatagactattattttagtgatgaaaatctgcagaatgaccattaccttatttccttgatggatgaccaaggatgggttcccatatccactgttgctgattttaaaagggtcaagaagatgagcacagacataccttttatccttgatgcacttcagagctctaatactgtggaagtgcagggtgataaaataaggcaacgcgatagttggtcgaaatggattggagcttcctcaggaaattcaggatcatcaacagctcaggttcaacagggccaacttgtagatggtgctttcaattctcttgagaatagtgatgctgttggagataagatgaaggagatttccgaagaaaatcctaaagatgctgttcatgactcaatttttgaagagcataatcagccaaacagagatatgttacaagtttcacttatgaaccaagaaaaaaataatgagggccatcgttctaatgataaatcacatgaaggtgtcaaattttgtgattttgaaacaactaataataatttatgtagccaacaagaagttgagcccaaagtttttgacattaatgaggctggaaacctggatggattgactgaataggatgttcagag

SEQ ID NO: 94780 - DNA, 971 bp, Glycine max
  Clone ID: PAT_MRT3847_56598C.1
tacggctgcgagaagacgacacaaatttacattaagcatagtacaaaacaatgaagaccaaactgctagcatttctcctcttctttgccttgactacaaaaccactactacttggagcagctggagctgctccagagccagtgattgatacatcaggcaagaagctgagagctgatgcaaattaccatatcatccctgcagtgcccttcaccatatgtggctttgttggctgtttcactggtggaggcctttcactagacagcatagatgaatcttgccctcttgatataataatcgagaaagccaatgaaggcctaccactgagattctcaccagttaacaccaaaaaaggtgttattcgtgtctccaccgatttgaacatttttttctctgattctgatgaaaggtgtccacaccattccactgtgtggatgcttgatcaatttgatgcctctattggacagacatatgtgaccactggtggtgttgttggaaacccgggtgagcacacaattctgaattggttcaagattcagaagtatgaggatgcttataagctggtctattgccctagggtgtgcccctcttgccaccatctgtgcaaggatattggaatgtttgtggatgccaataggagaatgcatctggctctcagtgatgatcccttcaaaattaagttcaaagaagcctgagatcaaagctctttcaaatgatggcaaaattaaatgacaatccatgaatacgtgtgtttataatgatcgatccttgaaattatatttctttgtgaagaattagtaaatgaataaaaaaattaagagtgtatgtttttgtcctgctgttacaactttaatttcactattaaataataaatacaatttttaataaaaaaaaaaaaaaaaaaaaaccctcaaatgatggcaaaattaaatgacaatccatgaatacgtgtgtttataatgatcgatccttga

SEQ ID NO: 94781 - DNA, 714 bp, Glycine max
  Clone ID: PAT_MRT3847_56599C.1
cggacgcgtgggtttcttccaccatccacagtgtagaacatatttgatcaagtttacttaaagtttttgaatattttgatcattgattccatttgaatgatctatgcagaaccaaaaccaaaggaagaggcaccggacttcagcaaattcatgaatggggacttgtcatcattgcttacagtgattccatcttccaatatgcaaggtcatgagtggcacaacaacagtgcccgagaaatgtccaatgtccaatcctctgttagtggcatgacagatgacaattttggacttgatatcaaacccatagcttcattgtttcctctctccaacaccacaaaccatgatgaaaaccaaggatgctactcttgggacaatttacctggtctctgctaaggttgatccggattgaaatggttccaaagttgtgtaccaagataattttggaagctattttataatgttaatgaagaagtttcatgtttgatgcaaatgatatatgtcgttgtttgaaaccgttagactagccattgattttgtctatattacagcttataacttaggacatatttgattcaaatttcttattgtacgtaattattataatcaagggatatattattacttagataggtgataagttggggtaattaaaaaactaattaaatgaaactacttaatacaaatcaaattatatttaaaaaaatctaaataata

SEQ ID NO: 94782 - DNA, 1032 bp, Glycine max
  Clone ID: PAT_MRT3847_5659C.1
gcgggattagaaacattatggcttcctatttctgggaaagaaagtgaataagaacgtcatgaaattagtattgctgagagatccaacagatgaaaatgtgatccctgttgttgaggaactgcaaaggcggttgcctcaattgagtgccaccggtcttcaacagcaaggagatggtaaagagtatcttggtgactcatcttcttcagcggccctggaggttgctttagaagccatttgtagttttcttgctgcacgtacaacagaattggagatggctgcttatcctgcattagatgaacttacctccaaggtacagaataagctaacaaataagccacgcgtccggcaggcttatttcagtgaaatcgacccacattgaacaaattaaccacactgcgagagtacattgatgatactgaagattatattaatattcaacttgacaaccatcgtaatcagctgattcagttagagctctttcttagctctggaactgtttgtctatctttctactctttggtggcggctatatttggcatgaatatcccatatacttggaacgaaaaccatggttacatgttcaaatgggtagttattgtctcgggagtattttctgctgtgatgtttctcatgattacagcctatgctcgcaaaaaggggttagtaggatcgtgaaaatcaatctactgaaaaaggggtgcataggactcctacacatataacagtcaaatgaattatgtcgaaaagtttcatattggagatggttcaacatcatgttgagttattggacatgcttcagtaacaataactgttaaagggtctagtccttaagttgatacatattattgagggctgttagcctttgggatctgccatttcctcagctattttgttctctggattcagtcattataacagattgcaaatacagtctacagattcaacgttaattcttgattttgaatactttcaagcccttgatatgtaattaaatttataattaagttgaatatgctaatcttaacataaaaa

SEQ ID NO: 94783 - DNA, 292 bp, Glycine max
  Clone ID: PAT_MRT3847_565C.1
aggagcaaaaagctgaacttttacctttgggggatgaaaaaatgtcctttactttgaatgaaaccttaactgctctttttaagattaaatatcctatcttaatttattttatacaggggtcgcggtaagcctaaactgggaacattaggcgtaacgtgtgaggtgaaaaattttagcttctcacttttttttagaatacaacactgaacgggcgttaaagctttgcaagggagtaatattcccaaataggggttttccttttggaagaaagagagaacaatttttgtatgaa

SEQ ID NO: 94784 - DNA, 273 bp, Glycine max
  Clone ID: PAT_MRT3847_56600C.1
attacttaatctttcttacacacaacaagggaactgaatttacaaccttgcaatcgccttacttgctgcgcatacgctccttcacaaaaccctactggaccaaacacagcatcctggaggagcagccactcactctaaagtaccacaacggttctttactgacaggccccgtcacctgggatctatctgtgacccgcaccataaccttcatccaacggtccatcattataaactgtataagcgcctaaagcagtgcgccaaacacgcctatcc

SEQ ID NO: 94785 - DNA, 1361 bp, Glycine max
  Clone ID: PAT_MRT3847_56601C.1
tcggaattcggctcgagcttcggcagaacgtctcggttatgctaccgagcagcttgccttctacacaggacccacagttgggggtctgcttaatgccacctttggcaatgcaactgaaatgattatatcaatttatgcattgaaaagcaatatgataagggttgttcagcaatccctactcggttcaatcttgtcaaatatgcttctagttcttggctgtgcattctttactggtggcattgtccactacaaaaaagtgcaggtttttgataaggcagctgctgttgtcaattctgggttactcttgatggctgtaatgggaatactatttcctgctgtgctttactttactcactccgaagttcatcaagggaagtcagtcttatctctttcaagatttagcagctgcataatgctactggcctatgcaagctaccttttctttcaacttagaagtcagcaaaatgtttatagtccagttgacgaggaaggagataatggtgaaaattctgatgaggaggaagaacatgaattaactcaatgggaggcaattatctggcttgctatcttgacagcatgggtatctatattgtctggataccttgtagacgccatacagggagcatctgagtcattgaatatgtcagtggcttttatttctgtcatcttgcttccaattgtaggcaatgctgcagaacatgccagtgctatcatgtttgccgtgaaggacaagcttgatatcactattggagttgctattggatcgtctacacagatatctatgtttgtgatccctttctgtgtagttgttggatggtgcatgggaaaagaaatggacttaaattttcaactatttgagactgccacactttttatcactgtgttagtagttgcatttatgatgcaggaaggaacctcaaattattttaaagggttgatgcttatactatgctatctaatagttgctgccagttttttcgtacatgtagaccctaaaagtggtgatgactaaatatttagtgtaggtgtggcagttgtcaatgctgcatttctttaccactttctgtaacaaaaaggtagtaagcagggtttttgaaagggttcaggaagattcttgcattcaacaagacctgggaacccccgatgtgatcacgggcaatttaccgtactgaaaattttaagccttgtattatatattgaattttgaaagtatgtgttacggtattattttttatctccatagctttcattcattcaccatagaatcttgtagcctttcggctctaatctccaatgaatcacgttgaaagcaaaaaaaaaaaaaaaaaaagaaaaaagaggaaaagagaaaaaagaaaagg

SEQ ID NO: 94786 - DNA, 195 bp, Glycine max
  Clone ID: PAT_MRT3847_56603C.1
tccgtttctctctttccttaggagggtggatggtttggaaaaatggattcttgccattttgaagggggaaaaaaaacccttggaaagggaaattgtaggtgtccctttccttgaattttaaaacccaaagaagcaaaaggctggagttacctgaaggggatttgagcaaattcctttgcttggggaaattgaaaa

SEQ ID NO: 94787 - DNA, 183 bp, Glycine max
  unsure (1)..(183): unsure at all n locations
  Clone ID: PAT_MRT3847_56604C.1
ccaacatcaaggcggagctttgctattcatgaggtgaggttgcgacatttcagcattggttgtaagcaccataccagaattggaagaaaattcttggtcatcagacttgtgatgtnncnnnaccnnntncttntggttttttttttttttttttttttttttttttttttttttttttttttt

SEQ ID NO: 94788 - DNA, 121 bp, Glycine max
  Clone ID: PAT_MRT3847_56605C.1
ccccctgatagacgtccctccgcatggagagagctttgcgcgagctagtgtgagggttcgcatagagtgaccctcactatggctagcgctggcctcgacctaaacagaccaagcaggcagg

SEQ ID NO: 94789 - DNA, 229 bp, Glycine max
  Clone ID: PAT_MRT3847_56606C.1
ccaatatatttcattctctctgtggactgccagacctctaccttcaacatgcacttctacgtcaagacccttaccggcaagaccatcacccttgaggtgcaaagctctgacaccatcgacagcttcaaggccaagatccatgacaaggaaggaatcccctcggaccagcaacgtctcatttacgccggcatgcaacttgcggacagacgtacccttgctgactacaaca

SEQ ID NO: 94790 - DNA, 145 bp, Glycine max
  Clone ID: PAT_MRT3847_56607C.1
gaacacagtgagaggcctagggagattggtgctaatcatatggatttttgtggtgttaattatcaattcaagctacacagctagctcaacatccatcctcacagtgcaacaactgtcatcacaaattgaaggaattgatagcctt

SEQ ID NO: 94791 - DNA, 361 bp, Glycine max
  Clone ID: PAT_MRT3847_56608C.1
tctagctatgtcgatcgaactgtccaaggtcctgtcacgagcgaggccccgaggccttggtgggttgcggtgtagagggcctgcatacgctggttagcaggcacgccccaccgcaacggcgaaaggtgcacttgcagccgtactatatagtaatgtaaacccaacgccgtagggtttgcacacccgggcctaaagtaacgtgatggtagaaataggtacgccggcagactgttaagaagtgtaacgtgtttaaccataggcctattggtatgcagtaagtcaatgcgggaggagcgttaaatccgtacgaagccccagccccattaggatggggatgagccacgtttccgaaaaagttgaa

SEQ ID NO: 94792 - DNA, 422 bp, Glycine max
  Clone ID: PAT_MRT3847_56609C.1
gcgtggacaagataagcaaccaatcaaatttcacaatattaccgtgcacattcaaatatttattatatatttgtaattatttttgttagtagtatttgaatgatactattttatataatagattataactctgtcatcatcaattcactattaggcaatttattttggaatagtaagaagcaattatgtcttaatatattttttttaatcttccgattccatcagaagataaatatattatgataaaaaaatatttttgttaaatatcaaactggagcaatatatgcacgatttaaccttcattacattaagtaactatccctaataaaaaaaacgttaaggtgcaaccatgaagaataattaatagtatttggataattagattgattgttttataaaacttagtttcaatacactttttc

SEQ ID NO: 94793 - DNA, 323 bp, Glycine max
  Clone ID: PAT_MRT3847_5660C.1
cttgcgcacacccttttgaccttgttacagtctcctctcttactctgtctttacttaataccccttttttattgaaatcaatccaggaggagcgcagggattctaccactatatatattaatgccagtcaaagaaagggctatgtattacttactaactatggcatctgattatacccgctaggcatgatctagacgcgcgaaggcatgctgaataactgcagctatcaaaaataccattgaattccttttcattctacaaagggtcatgaaaatcgcgttctacactcttgccgggcggaccatatcgatctatgatggcag

SEQ ID NO: 94794 - DNA, 178 bp, Glycine max
  Clone ID: PAT_MRT3847_56610C.1
ttgttgccgaagcggctccagggggggaacctcacgccctgcgcagaagcacatcatggtgaagattctaggccgtggtgatgacgatgatgatgatgacgacgacagtcacattctcaggaccatgcggggaagaataactacatacgcgaggaacgaaggataagacgaagacgat

SEQ ID NO: 94795 - DNA, 1014 bp, Glycine max
  Clone ID: PAT_MRT3847_56611C.1
ctttgaaaactcttaaaaaagaagctctgggattctgattctctctccggcgttgcaactggtgcctccgtcgttttcatccctaactccacaccttcgacgccctattatgatcgcaatgggcaagggctgtgggtgaggatgatatcgcaacaaattggggaacctaaatcatctaatggatataagtctctgaattctgaaaaagaaaggggtagtaagtctgataataagcttctggctgcaaactctgatccgggtctatcaccaagttcttcagttggttcgatgtcttctgaaaaatcaactctgaatcccaatgccaaggagttcaggctcaaccctaatgcaaagagttttattccgtctcaatcacatgctaggccccgctcccccatgtctgatggttccttctatttcccagctactgtatccaccataccaaatatgccagccatgtccatgggtattggagttgggactacttttgcagggccacaaccagtcgtatataatccacaagcggcacaaatgccatcccaaccatattttcatccaaatggaccacagtatggacaacttcttggtcatcctaggcaagttttatacatgccaagttacctccctgagatgccatataagggacgggatcattgaccacttatagttgaatgcattcttgacaacttctctctgcttgaaaagaatgaactgagtggatggcttgaagagtttcaaatgacaagaatatcttcggcttatgggaggatttcgataaaaaaaaaatgataatttctaggcaagttggcttattattggatataagttaattaatcttatattcactcatacatcttttgggatttctcagttttcggttatgtaatagcagtagcttaactcagattggcattcccccccttaggaggaggaggaggacggctactactactattattattattattattattattattattatgcaatatttacttttgcaatatttacttt

SEQ ID NO: 94796 - DNA, 1754 bp, Glycine max
  Clone ID: PAT_MRT3847_56612C.1
ggctcgaggaaattgagggtgaggaaacacaagatcttcatctagcagaggaaagaggcctttaccataactttgatattgatgaagaaaccagattctcttcagtctataggggtaaaggtgttgatgatagtggatatgatgaaaatgaggacaggctcttggattcacataattctgaaacttttgataatatttatggtttagtcaataagagcccaggtgaagcaagtggtcggaaaggcagtaatggagctcaaacgtggtcaaatttctcctctgtgtttcatgcacagaatcactcagagttatctcagtcaagttctggtgtggatttatgtcgctctggttctaaagatcatgctaagcagttagcatctgaactccctgccctgagttgctcattttcagatggagaaagcaggattcagacttagatagtaatcaacatggagacaatgctattaccaaggaagaaaatccaattcaagctgaggaggatgttcaactgtcaagatctgaggattcacaaggaccactctactcgaagaaggatggctctgataaaggggtattatcttctaatgccagttcttatgccccttcatctcatacttcatctaaaactcatgagaagatgggatcacatggagatttggtcgagggttcagcatcgggcaaggctaatggggaaacgaaatctgtaaattcacgtggaataccatctgggtcagatttggttggaggcattgcagcatcttctgttcctggtttatctccaagttcatcagtttgttcactgtcttctgaaaaatcaactctgaatcccaatgcaaaggaattcaagcttaaccctaatgcaaagagttttattccatcgcctgctcggcctcccactccagtgtctgatggttccttctattttccaactaatgtaactactgtaccaagtatgccaggcatgcccatgggtattggaattggacctacttttgctagtccacaaccggtcatatataatcctcaggtagcacaaatgccgtctcaaggatattttcatccgaatgcaccccagtatggacagcttcttggtcatcccaggcaagctttatacatgccgagttacatgcctgaaatgcaatacaagggacgggattattgacgacttggctattcacattcttattggcaagtgaaatctttgcttgaaaagaataaactaagtggttgtcctgaaaagttttaaacgaggatatctgcaggttatggaaaaatctctgaaggctcattatatattattaagttcgctaattctgggatataattttatgaccttgtgttaactcatacatcttttggggtttctcaggctttggtcgtgtaatagattaactcagattgacctttctcattcctctttatttaactctttaatgccatgcaaaatttactttttaatttttcttatagtcgaatgcattctcggcaacttcgctctttgcctgaaaagaatgaactgagtggatgacttaaagagttccaaatgacaagaatatcttcagcttatgggaggatttccataaaaaaaaaatgataatttctaggcaagcaggcttattatgggatataagttaatttatctaatattcactcatacgtctttttggatttctcagttttcggtcatgtaattgtagcttaagtaagattgatatttccccctcagtattattcttatgcaacattttctttcc

SEQ ID NO: 94797 - DNA, 498 bp, Glycine max
  Clone ID: PAT_MRT3847_56613C.1
cccacgcgtgcgcggacacaaagatggctaggtatagagctaattctgggagatagaaaaggtccgggaagattctaagacacaatggtacctgaatagttgaatccaccccctcgtctcgtgactgaccatggatatgtttcgaatgacgaactatgcggagaacgaggatccatcagacgggaacatctaatgagggtgtacacggatgacaatgcccaactgcattctttactccgacaaccttttcaaggatgttttggaaagtatgggaaactatcattattggtaaaaggtatctggagggtatgacaccatgctgccaacggctgctatagagcagatgattgacatagcctatatgactgacgagtctgtatgcacaggggatggggatggacacatgattggccaaagatcattgtgttggaaggaatatgttcaggaatgctagcaggaggtgcttgacacacatggcctctatgtggaatagattga

SEQ ID NO: 94798 - DNA, 321 bp, Glycine max
  Clone ID: PAT_MRT3847_56614C.1
gaaattaaaaatgaggtaaaataataatcctcctatcaaaaaataccttatagtaaaagggggggacttatcaatcagacgcggtctctttgggatttctcattcttcatggcattaactaatcactgaagtgaaactttggctattatcaacccgccaagtcaagctcagtccacatatcctcgctgaaatacgttaagaaagtctatcatctcagtttttcttaccaagcaaaaaggatcatttttaaggtccaacgcctttaaatgatcaccttgcaagtaaaaaaaatctgttgcttcacccattataaagaactac

SEQ ID NO: 94799 - DNA, 338 bp, Glycine max
  Clone ID: PAT_MRT3847_56615C.1
ggggggtggtaaattgttttttcttttttttttttttggccaaaaaacatcacttaaacccgaattaaacaattcattgggttcaggctgtgttagggcaaacctgtgtcccaccaacgggggggggtaaaaggccagcacatgggtaaaaaactaaaggttattcacaacacccattttatacaaattcggatggtcttgcctccgaaaaaaactttcaaccgggaaaaaaggtggtaccagttagcaggggggggggtttaaaggggggttggggggggaccaagccaatggtgtgttgttgacaaaggggggctatttttaccggggggggcagg

SEQ ID NO: 94800 - DNA, 304 bp, Glycine max
  Clone ID: PAT_MRT3847_56616C.1
aagggaaaaatcgcaaccgattggtaaaaaaattgcccctaaaccaacgctttaaataaaaaccaatttcgaccaactgggaaggaaccaaagggagcttccaatttttctccaaaaaccatcccaggggcccctttaaaaacaaaccaaaaaagggggtaaaaccggccccccctgtaattaacctttaggggaaccccggaaaccatttggaccccaaaaaaggaccatttttggctaaaacccgtttggttggcccacggccaccccctgagggggggctttttcttttttgggcgaaaaa

SEQ ID NO: 94801 - DNA, 451 bp, Glycine max
  Clone ID: PAT_MRT3847_56617C.1
gtggctgcgacgtggaaatcagcatatcggcaatgatgatcttagagttttccgtcgcaaattggatctgatgaaacgacatgagtttgtctgggagccatacacaccaactgtgatggcagcgctgcctcaaatttgtgtggttggaagtgtagtctggttcgcggtggtgccactgatttgttttcatgttgttgagtggcaccaacccgatagggttttacgacaatatggattgcaacaacctattcccgggtgtccttcgcaaccgcagaatctgcatggcataacgctcaaaggcaaacaagatgagaattggttccacctgttggccccaatcattaatcagtggaacaatgcagcgcagtttacggtcgacgtatatcctcgacagcagggcctactaggttttaactctgactatatggtgtggtataggcgtaaaacaaag

SEQ ID NO: 94802 - DNA, 309 bp, Glycine max
  Clone ID: PAT_MRT3847_56618C.1
tttttacaataacaatgatgcaacctattctattgaatcataagatgaatggatagaatggccatttatctacccaatagtaaaggaagacaccgcactctcagttcctaacctttataatacactagcaatcttaaaccgataatgagtgagtaaccgatccccacaaaaaattaaggccatatttccattcacagctttactcctagacggaatgcataacaaccagtttaattattccaaactcttatatgtgagcaaggaccatctctaataattactctttatagtggttacaaggtttaacta

SEQ ID NO: 94803 - DNA, 194 bp, Glycine max
  Clone ID: PAT_MRT3847_56619C.1
cagacggtttcaacaagactacagaacgggaagcaggagtcccacaacatagatcgtcctaccagaggactattacgaagatattgcactaacgcgacatcgaaatggttgtcatcctctagttcttaaccatctagcagataatcaccctactaaaaggagaatcgtcatcactgatgaactcgcgcatacat

SEQ ID NO: 94804 - DNA, 495 bp, Glycine max
  Clone ID: PAT_MRT3847_5661C.1
ctcgagccgattcggctcgaggagctctattatcattttttgggtactgatcaatcacaagatattctgtgttggagggatcctgagaatcctaaatatatgtttggaggaactgttactgaggatggcaagtatgttcttctctatatcgaagaagggtgtgatccagttaacaagctttattactgtgacttgtctgaacttccaaacgggctggaaggttttcggaatgagagttccctcctcccatttgtcaagctggttgataaatttgatggacaatatcaagccattgcaaatgatgacacattgtttacatttttaactaacaaagatgccccaaaatataaactagtccgagtagatttgaaagaaccaaatgcttggaccgatgttatcccagagtctgaaaaagatgtgcttgagtcagcacgtgctgtaaatggtaatcaactgattgtgagctatttgagtgatgtgaaatatgttctgcaa

SEQ ID NO: 94805 - DNA, 420 bp, Glycine max
  Clone ID: PAT_MRT3847_56620C.1
ggctttgtgatcgaacaaatatacgcacatcatgtgtgcttatatttgttcgatcgaatgtgcacagtatggctttgtgatcggtcaacataaattgtggcaaatagatccttgactataatacttccattaaaatatttgcatacaaatacaaaatatgtgaaaagaaaattctgttggtaatttttagatgtattggaaacgagtataaaacacgaagaaaacatctaaattttatttgtggatcaacacaaggcagaactagtggtatagtataacttagatggttaataacctatgtgctgtaattcgcatatattacaactcaacggaattattggaatttgttggtgatccttacagcaggttcagtgtttcaaagttcattgcttatttgcatatagcaagtagggactattc

SEQ ID NO: 94806 - DNA, 395 bp, Glycine max
  Clone ID: PAT_MRT3847_56621C.1
cccacgcggccagcggctcgtctataggatccaagataacgcgcgcgaccgtgcaagaggaacaacctttctatagaggcacgaacaacgagtgcggtcttctatagagccacctagactggaatagctggacgctggcccacccctgtttgatggggcaaaccctagatgctgcccatgtgaacaggcttgtaagagagcaggatggaccaaactggagaagaataaataaggccggtagggaagggcaatgcaaacggttgccgagcatgaatgatgaatgggacgctccctttaactgtccataaagcgcgcagtatgaggggggtacccgcacaacgaccactttacttgccagacccgtagggcccgacccgtagaattactgacctcgc

SEQ ID NO: 94807 - DNA, 319 bp, Glycine max
  Clone ID: PAT_MRT3847_56622C.1
ggctcgaggtgctgcatggatcagggactctatggtcgttgctaagggtattcatcattctgaaggtctgccaccatccattctgagacaagtgctgctctaggacatgatgagactggtcaaggctccgtgcatggcgcagcagagcgctttactattgatagattcctgggctgatcaggggggatttcaccaaggagcattaggttgcccccaggggccctgagctagggtcacactgggattcacacaacacaggaaagagacctttgactgtcggggaccactctaccgactcgtggtgatttaaagacacagc

SEQ ID NO: 94808 - DNA, 338 bp, Glycine max
  Clone ID: PAT_MRT3847_56623C.1
ctgacgcgtgggggcagatacgaagggttgacttaacacgagatatggtttgcttcgacagaagaggaaaagatggaagtgatttgaaaccataggcattccctggctgatggttctatgcaaaagcgagcttcatgaattttgaaaaacaatgttgctcacgaaagcctcaaggatcaaattcctgctgttgacaagttgtatgctactaaggattataagtttgcaaaaattatgaaccttagacaaagtgatgtaggggatcttaaactttttactgatgggaagttgtatgagggttagcatattcctgtgtctaatattagtgcaggggagaa

SEQ ID NO: 94809 - DNA, 388 bp, Glycine max
  Clone ID: PAT_MRT3847_56624C.1
ttttcactttactttttctcatttggtgcggcctcaaccgacgtgatggacctggtccggcaccgtcgtcaccccaacctccgtctccccctcccggagccctccgagcgccgcctacgggtacgactatcactctctgcgaccaccaccagactaccagaactcacggcgacgccatatgtcggcgtcgatctgcagaagactcgcatatcttggtcacggaaacggcggcacacgtttacaaagtcctgcacatggctcacttcgccgcctacgcgctcaagatcattcactaagacaccgacgacacgcaggcgctgtcgtatcctgtatgaaaccttcatgcttcgacgtgttaccgactgtccccacgttgaccgttttcaca

SEQ ID NO: 94810 - DNA, 501 bp, Glycine max
  Clone ID: PAT_MRT3847_56625C.1
ggttttgtttttttttttttttttttttttttttttcttttgaaggataaaaaaagataaaaattgttttaatttgaatcccagggactcccgatgtttttcggttcttccagggccattcaaagtaaatatgacaatgtgagacatggttatttaagttgcttttacaaccatattccgcaagtttctctaggaaacggtataaagcggttttttggaattttccagaataaaccggaataccatggaatcccctgtataatattgctgaatattgccggtttacgggtggaaaaaggtcaaggaaaattggggcaaccttgaccacccttaattattggctgtaatcttttgctaacattggaaaaaaaaggagaaataaggtgttccccggccctccggggcccaataaaggcaacccctgggggattcttggggcttgaaatgcctgggattttgtccctttaacccacaaaagccacaacctgtaaaggattgaat

SEQ ID NO: 94811 - DNA, 698 bp, Glycine max
  Clone ID: PAT_MRT3847_56626C.1
gaaagctgcgcaaacctcatgcaatttcctctgttaaactaactgttaactattaactataaggttatatggttaaaatgtaggagaaaccactatattttttcaacatcaatacagaagtggaaagggaaagacaggtgataagaatcatcataatacaattgcaacaaaccgtaagtccgtaacaatgaccaagagcttccagccatcctgatcctatattgcaaatttcctattctgtcattgactaatgttaccatggtacaaatcctgaactgctctggatgcattcttagcctttcttggttaccatctacctcagatgacctcacagagccttgattatagcctcagcaattccaaaattttgttttatctaatttctaacctataagcagttctatgacatttaaatgtttgaggcagtacttcagtgtacatactaaaatactagaaaccactaggagcttctcttgaaagacttagcttgtacaataatacttgtcacaattgcaataaaatagtaataagccgtaagtaaaacgctaggaaaagccagcaatttggagaatggactggtgaagctgatctagagaactgaacatatcctgtaaagcttccagttgtgttggtcactggagttgtatcaggtacagcaatgttcttgcaagatccaaaaggtgctccctcctggcagc

SEQ ID NO: 94812 - DNA, 322 bp, Glycine max
  Clone ID: PAT_MRT3847_56627C.1
cagttgcttcatgcccaagtattagtggaaaaacgtagatcgtatcggacattattagaactcggtaatggggagggaaagaatcatggggcgtactaacctcaagaaggaccagatcctgatactgattatatgaaaggttatgagtcatggccctaaattgataatgttcatgataagatactgatagccgatgattaatacatgctgaggaggtctgcttacataaactatacatcaatgtgtggcgccagaagctatgagaatgacatgttagatgatcaaccatccgatttatttaatacgcaagctgcacacggac

SEQ ID NO: 94813 - DNA, 386 bp, Glycine max
  Clone ID: PAT_MRT3847_56628C.1
cgaaatgatactaatactttaagaattttttctggctttgcctattaatgaacaagagggggatcctggcatatgtgagactcatcaaaacatcgcgattgatcctgacatggtcaagtgggccaactccgtttgcagacatgctgccccatgactcaccaaaggagtactgatcctcacactctttcgatctcaacagcataagtatcaccaccaaagacacattacaaaactcaccccaaaccctctaaccaactgctttatgactgtgctaggacactctcagaccgcaatgaaccgtattccacatctatgataaacaagctccgccatatgtgctcaatccagggtgacccttcacagagaattgcatgttacatggcagg

SEQ ID NO: 94814 - DNA, 263 bp, Glycine max
  unsure (1)..(263): unsure at all n locations
  Clone ID: PAT_MRT3847_56629C.1
tgtagaaanggcaagganaagcctctaagagaggaaccatgccagnagcancttgttgggggtccaggggagcctgaaagcaaagaagacctgnaccattgggcctagcaatggactacnagagtgaacttgacatcanatnttcacccaaaacctnaaggaattgggtanatntgtctgttcccttatgttaccntcatctancccantcnnaactaatgtggaanttcnaacnaacttganttnccancacatgtttagtg

SEQ ID NO: 94815 - DNA, 511 bp, Glycine max
  unsure (1)..(511): unsure at all n locations
  Clone ID: PAT_MRT3847_5662C.1
gattattttgtctacgttgtcagcagcctctgaccgcaaatccacgagatgttagttttgtgtgctagccacaaacgcagacgcaacccctggcgcacattagccaccattagctgtctcactctaacatgcgcttctccagccgctgcagactctgctccacttgctacttcctctagaagaagcctttttcaaatctctctgccaccggacccgcttttcttctgttcatttgggtttctctcttccaatttatggcttctttgagacctaccctctctcaactttccctttcccaatccaattttctcagaaaatctacatggaacaatcatctaccttgctatttacacaaaaggatcgcaaagttgcaaacttttacctcttctaaatcttccactttcagggtccgctgtagttcttcagagaccaattagcaaaacaatggtgaagagcctncagagtcattatttatgaagggaattgagaggagaggtatgacccctacttc

SEQ ID NO: 94816 - DNA, 691 bp, Glycine max
  Clone ID: PAT_MRT3847_56630C.1
cacaaatttcccttctcaagctcacaccgagctttctttgggaaggaatttcagtgttggaggaggaggaagaggtggaggagctcttgaagaaccaccaccacataacaacaacatcaacaataacccttattatcaaacccaaaaggctcatttgcaacatcttcatcaacaccattctaatgcttcaagagcaacgacaagtactactacaagctcctccaatcacatgagtcacataaactatggggtttctttgcttgatgtgtcatcagaaggaatgaggccaatcaaggggattccggtgtatcacaaccgttcattccctttcttgcccttggaacattcaagatcagacaaggatcatcatgccaaaatgtgtttatatcatcacatgcctacatatccctctttgtcctcttcttgttctcctctatgcccttcttcttcttcttcttctccagctgcaccctacttcgccgcgaccgcagcaacagcagggggtctggatcccatgtcctacctgagctgctcaggtgggaccacaaaccccgcggcgcatagggctgcaacagccacaaggtgtaaaggaatttccggggaggctttaaaattttatcatccattgcaccaccatcaccactcattaacatcatcggcatcaccacaatatggggttggacctggaccc

SEQ ID NO: 94817 - DNA, 155 bp, Glycine max
  Clone ID: PAT_MRT3847_56631C.1
acgcgatctttggaggagcaggttcatggtgattaccttcaccatgcgcttaagcatgggtcttcatgctcccctggtgttctaggaaccaatcatgccgatcataatagtgggaggtcaaccactaaaatctgtagagcctgatagtcattaaa

SEQ ID NO: 94818 - DNA, 606 bp, Glycine max
  unsure (1)..(606): unsure at all n locations
  Clone ID: PAT_MRT3847_56632C.1
cgccaaccatcgcggcacaactcctggccttcgccctcctctgtcaccgccgtctccgccgccgaaaccggttaccacaaccatactgtcggcggcggaaccggctggtccttcaactctaccaccaacacatccgccaccaactactcttcttgggcttcaaatcaaaccttcgacctcggcgattatctcattttcaatacaaactcgaaccaacggtggttcagaccttcaacaagccgaaccattcttgaacttgcaccgccgattattccgacaattggaacccttcgtgtaccaaacggcggaagcccgtggttttcggcgaaagcgttgaccgtcgttgttccgttgaccattagttggaccgaactaacttcttctccgacgccggcgaacggtgtgcagtgccagcgcggcctcggcttgccgccgagtctcaaccagccgcctccgccgccgtaccaggagcctccgggtcccgacgccgctcaatctccgccgacacgggggcgcagtctcccagcggcagcgctttcgcgaacctcgcagactgcgcgtggggtgnttacggcatcgttctggggttgctgctgcagtttctgt

SEQ ID NO: 94819 - DNA, 215 bp, Glycine max
  Clone ID: PAT_MRT3847_56633C.1
atataaataacagggatttgctataccaaaagatgcacaaggaaaagtttgcaatatttagattctcatggagcagccagactaacttaaacatggctgagttgtgaatgctgacattacaagctgtacaaatacatgaaacccaagagttatggttggtgctgatactgtagtgaaaaacgcttattagcttgggttacacggcaattcttggg

SEQ ID NO: 94820 - DNA, 237 bp, Glycine max
  Clone ID: PAT_MRT3847_56634C.1
ctattatgaagaagcaacaattgtaaaagttgttgcttttggttgattgtctgtttggtgatttgccaatggataaaacagatttgctctttaatttttctctttgattttgtatgggatgttgattttgacgtttgtctttctctaactttttcagcttaagggttaattttgtatgaatttgtagtctgttctgtcattgttccttgtaacgctaaatttctttgatatttaaat

SEQ ID NO: 94821 - DNA, 187 bp, Glycine max
  Clone ID: PAT_MRT3847_56635C.1
ggctcgagctggttcgacactcccacggcacatgatttctgcgcacccctattccactacaggtctacgatgcgtcgatcattgatactcaacagggaaattgattttatagtgatacaactaaagcgattctatgggttaaatatatttccctattcggaaatggatgtgaaactggtacaataat

SEQ ID NO: 94822 - DNA, 2417 bp, Glycine max
  Clone ID: PAT_MRT3847_56636C.1
ggctcgagctcgagcccgctcggctgcagatatcaaatcgaacagccgcaaacccttcctctgaactctgatccgcactggcactgaagccattgctgtaccttccaaaccctagcgtagccacgcgctgaattgcgatacgatgatcgtgcgcacatgaggcggcacggcacggcacgatgatgaacacagccaacggcacgatgatctcaccgtcgtcttcgtcgggaacggcggcgcagtcgccgggactgaagacctatttcaaaacccccgagggaagatataagcttccaacggcatcgtgctccggtgctgttgttgattcgaccagcgctgcaactgcaacagcaagcacaaacatcaaacagagtcattgttattgtaacgtaaaatcacatggagaaggaagctttgaaggaccaaattgaaactccaaagcactgaacgaactcaattgaaaccctagcacagagtcatacatagatagtagcgtggatagcagtgtgtgatgcggtgatcgcgatcacgatgaaaaatgcaaacggcttgatttcgacgacgtcgtctaatacggcacagtcacaatccactggcctcaagacgtatttcaagactcacgaaggccggtacaagctttattacgataagacttacccttccactcttcttcactacgctcatggcaaaaccgtttctcaggttactctggcacatctcaaggacaagccggtgccttcgacgccgactgggcagtcttcaactttcagtgccaccagtggggtaaggtcagcggcagcgagattgtggggaggaagcaatggaagccggtctcttagttttgttggaggcaatggtaccagcaagagtcatggggggaactctaggattggttcgattggtgcttctagtacaagtagtgcaatggctaatccgaattttgacgggaaaggaacttacttgatcttcaatgtcggagatgcaattttcattagtgatttgaattcacaagacaaggaccccataaagtctattcacttcagtaactcgaatcctgtgtgccacgcatttgatcaggatgctaatgggcatgatttgctcattgtgatgcgtcagacgttacaacaaattttggtatctcatgctgatgggaatttgtacgtatatgaaaagaacaaagatagtgctggtgattcttcattcccggcaaggatcaaacacaattttcggttgcccatgcacgtaacagtaagagtaatcctatagccagatggcatatatgccaggtaatcacagtatttctttctctcgatgggacttacatagcaactacagttattataaaatgctggagcatggatggaaaatatattttgacgggaggggaagatgatttagttcaagtttggagcatggaagatcgcaaggttgtggcatggggtgagggacataactcatgggtcagcggagttgctttcgattcatattggtcatcaccaaattcaaatgacaatggagagactgttagatatcgatttggttctgttggtcaggatacacaattgcttctatgggacctggaaatggacgagattgtagtgcccttgagacgtccacctggtggatccccaacttacagtactggaagtcagtcatcgcactgggacaatgttgtcccattaggtaccttgcaacctgctccgagtatgctggatgttccaaaaatctctccgttggttgctcaccgtgtgcatactgaaccactctctggcttgatatttacccaggaatctgtgcttactgcctgccgggaggggcacattaaaatctggatgaggccaggggttgctgagagccaatcaagcaactctgaaaacttgttagctaccagcctcaaggagaagccttcactttcaagcaagatcagcagcaattctagctacaagcaatgactaaatcttaatctaaagggaattttaagaaattttttttatatggtttgtttatcttttatccagttggtttcctagttttaacatagtgattcaagtaaagatgaaccaactggtctattgtatattcagttatttacggatgagcatgccattgatggcactgagaggatgggagagagagttctctccggctgcctgctgtaattataaaacggctgttattaggatatctgactagtgattacaggaataatgtgaaaattggtccttggagatcggtacttttgaagtccatacatacaagccattatttattgtgttggcatttacaaaaataaaacgacaatgacgagactgttggatatcgatttgcttccgtgggtcaggacacacaattgcttctatgggacctggaatgggtggggttgggggtcccctgccgacgtccttctggtggatccc

SEQ ID NO: 94823 - DNA, 272 bp, Glycine max
  Clone ID: PAT_MRT3847_56637C.1
gatccttaatgactttcttggacatccatggaaatggcagtctagaaaactcgagtggtagtcatcttgatcctaatggcgcatctggatgtacctcacagcagcgatcttaacactcatgatcgagttcacatatccagtgtggtgcaccataatctgcaggtgagctgcgtgatcggaactgagcgaccagcttcaaacacctgaaacgcaattctggaggcccttccggactcaatttagcatactctcatcgctccggtcaatctctc

SEQ ID NO: 94824 - DNA, 2262 bp, Glycine max
  Clone ID: PAT_MRT3847_56638C.1
cccctgctcgagagaacaaagggtgcgaacaggaataagcgaaaaagggcatcacaagttggaattacaccaagaagtggggttacaagagcgaagaacaaaaacatttgtgttgtattggagttatttatatttatacgctcgtaactcgcacatagtatccctcagtcattccgtgtccatagttgcaagttatctaagcccagtttgtgtttcactcacacaccgtttccagtaacaacaaaacatcatgctttctcgcccctcacatcaatttttctgtttctgagatccgcgccttctcttcactttcagatggttctgtctctgtagctcggaatcagacgacaggagaatttgctgggggagagtttcaatttttcaaatcctgtcgttgattcatttgggggaggaggatggaaagaaagtgaataaccttctggaaatgaatagaggggaaggagcgaatgatggtttttctggacctggaccaaatgattcgcttcttcctggtcttattgatgatgttgccttgaattgtcttgcttggcttagtggatccgattatgccgcactatcgtgtatcaataaaaagttcaataaactgatcaatagtgggtatctatatgggttgaggaaacaattgggggctgtggagcatttggtgtatatggtttgtgatccaagaggatgggtggcctttgaccccaagataaacaggtggatgtcattacccaagataccttgtgatgagtgctttaaccatgcagacaaggagtccttggccgtgggctgcgaaactgttagtcttcggtcgggaactgatggagtttgcgtatttggaagtatagcatgatttgtcgtggttgggtgaagtgccaggagatgaaccagccccggtgtttgtttggatctagtagtcttggttcgattgctattgttgctgggggaagtgataagtatggaaatgttctaaaatcagctgagttgtatgactcttcaacaggtatgtgggaacttttaccaaacatgcacacatcgacgtagattgtgttctggtttttttatggatggcaaattctacgtgattggtggaatgtcaagtacaactgtttcattaagttgtggagaggagtatgatctcaagacaaggagttggcggaaaatagaggggatgtatccatatgttaacgtgggtgttcaggcacctccacttgtggctgttgtggataatcagctatatgcagttgagcatctgactaacatggtgaaaaaatatgacaaggaaaagaacacctggaatgaattggggaggcttccagtcagggcggattcttctaatggttgggggttggctttcaaggtttgtggagagcaacttttggttgtgggtggacaaaggggtccagagggtgaatctattgtgctgagttcatggtgtcctaagtcagggatcagcaatggcaccatagattggcaggtacttggcgtgaaggagcatgtcggggtgttcgtgtataattgtgctgttatgggttgttgagataattttagattgactcaacagaggatgctggtatccacaatctgacttagccttgaagggtgcctccatgttcaatcacctcatttactgggttaattgttgccgggatagctttccctagctcagaatttggtttcgttctttttaacatggtttatttggatgtatttctcactttcgaggtccataatactactaaattgcatttgatattactgagtaggcttacacagatatgttctattatcttctttagccaaatatgtaaaccaataaatgaaggattttcattgtttaatgttcattgcttgcttcttctgtgctgttatgggttgttgagatgattttagattgactcaacagagaatgttgatatccacaatctgacttagccttgaagggtgcctccatgttcaatcacctcatttactgagagttaattgttgctgggatagctttccctagctcagaatttggtttctttcttttttaacatggtttatttggatgtatttctcactttcctggtccataattctaaattgcatttgagattactgagtaggcttacacagagatatgttctattatcttctttagccaaatatgtaaaccaataaatgaaggattttcattgtttaatgataaatacttcaatgcttcttctttgctttggacaaattgaacatctgttacagccaacatacggttctaac

SEQ ID NO: 94825 - DNA, 1376 bp, Glycine max
  unsure (1)..(1376): unsure at all n locations
  Clone ID: PAT_MRT3847_56639C.1
cggacgcgtgggcaaaacaaaaacgacagaacaaagggtgcgaacaggaataagcgaaaaaaaggcatcacaaaggggaattaaaacaaataagtggggttacaagagcaaagaaagaacaacattatttggtgttgtgttgtgttggagttattatatttatacgctggttcctcgcacatagtacccctcagtcattccgtgtccatagttgcaagttatctaagcccagtttgtgtttcactcacacaccgtttccggcaacaacattatgctttcacgcccctcacatcaattcttccatttctgagatccgcaccttctcttcactttcagatggttctgtctctgtagcttggaatcagacgaaaggagaatttgctgggggggagagtttcaattttcaaatcttgtcggtgattcatttggtattgtattgcactcgcgtttctctctttctgttttcgtcaaaggttatggtttttcgtttctagagggaggggtggtttgtttttattaagtataaaggcaactatggaataaatgaatagataagagatcggtggcatgtcgatggtgtgatgaatgaatttgtttttgtgggtagaggcggcacatgaattgaagggggtcctggaataattataataatggtttttgcttctgcctttcatgattgatttcccatctgctatggttttgttggggtgtggtgaggattccttgtcatgacaaagaaattacgtttgggttgttcttttcagggggaggaggatggaaagaaagtgaataactttctggaaatggataggggggaaggagtgaatgatggtttttctggacctggaccaaatgattcacttcttcctggtcttattgatgatgtagccttgaattgtcttgcttgggttagtggatctgattatgccgcccatcgtgtattaataaaaggttcaataaactgatcaatagtgggtatctatatgggttgaggaaacaattgggggctgtggagcatttggtgtatatggtttgtgatccaagaggatgggtggcctttgaccccaagataaacaggtggatttctttacctaagataccttgtgatgagtgctttaatcatgcagacaaggagtccttggccgtgggctgcgaactgttggtcttcggtcgagaattgatggagtttgccatttggaagtatagcatgatttgtcgtggttgggtgaagtgccaagagatgaaccaacccccgtgtttgtttggatctagtagtcttggttcgattgctattgttgctggnggaagtgattagtatggaaatgttctaaaatcagctgagttgtatgactcttcaacaggtatgtgggaacttt

SEQ ID NO: 94826 - DNA, 484 bp, Glycine max
  Clone ID: PAT_MRT3847_5663C.1
tacggctgcgagaagacgacagaaggggggggtctgaatcacagtccacacgaaggaacaaaaccaagaacaccactttactttctctttccttctccgccactgttaaggcttgagaagaagacaatggtggcttgtgaaacatgaagaggagcactgtgttatgcatgttcaatggcatgtcattgtgcttcttacaatgcctttacattttcaccaaccagagagttcatcaccaccaccaccaccaaccacatcatgtcaaaaacatcatccactactactagatgcagaccctttctcttgtccatcaccaatgccacaccatcctacaacacccttgtttctgaggctgttaggcttttggttccttcagcaagatttgaagcttcaaaactgaaggttgttctattggaagatcagataaacaaacacgctagtattattccaagaacctacattctatcccattgtgactttacag

SEQ ID NO: 94827 - DNA, 652 bp, Glycine max
  Clone ID: PAT_MRT3847_56640C.1
ctgttgtggataatcagctatatgcagttgagcatctaactaacatggtgaagaaatatgacaaggaaaggaacacctggaatgaattggggaggcttccagtccgagcagattcttctaatggttgggggttggctttcaaggcttgtggagagcaacttttggttgtgggtggacaaaggggtccagaaggtgaagctattgtgctgagttcatggtgtcctaagtcagggatcagcaatggcaccatagattggcaggtacttggcgtgaaggagcatgtcggggtgttcgtgtataattgtgctgttatgggttgttgagatgattttagattgactcaacagagaatgttgatatccacaatctgacttagccttgaagggtgcctccatgttcaatcacctcatttactgagagttaattgttgctgggatagctttccctagctcagaatttggtttctttcttttttaacatggtttatttggatgtatttctcactttcctggtccataattctaaattgcatttgagattactgagtaggcttacacagagatatgttctattatcttctttagccaaatatgtaaaccaataaatgaaggattttcattgtttaatgtttaatgttcattgctgcttcttc

SEQ ID NO: 94828 - DNA, 434 bp, Glycine max
  Clone ID: PAT_MRT3847_56641C.1
caaaactcttgacgccacaaaggaacaacaacatagtactgtaccgtttatgccatccttgcaagatgttaatgttaccatcgataaaacaaaaccccataaagaagtcgtcgctaacctcgtccaaggggaaaagaggaataggaatagcagtttagtgagaattgaagaagacttggctgaagcaagagtagctattcgcagagcgatactaaagagaaacttcacatcagataagaaagagatctttgtccccagaggatgcgtttacagaaacgcttatgcttttcatcaaagtcacatagagatgttgaagagattcaaggtgtggacttacaaagaaggtgagctacccttagcgcatgaagggcccatgagttcaatttatggaatcgagggacacttaatagcccaaatagacaatagaacaggcc

SEQ ID NO: 94829 - DNA, 291 bp, Glycine max
  Clone ID: PAT_MRT3847_56642C.1
acaggaaaggaatcacttcatacaagcaaaaaatgttattctaagctttactattttcaagagcaagttgaaccacaattcatagcatcttgtctacatctttctatgactcctcaaggacttgagaccctcatcataaatgacctccacactggtgctaacgagatgtcagagagatgggaaaagcaaagcaagtgcgagccccatcacaaatcacctctacaccaatgcaaaggatataacggagaagcggaagaggaggcatgcgtcacaaatgaccttcacactggt

SEQ ID NO: 94830 - DNA, 451 bp, Glycine max
  Clone ID: PAT_MRT3847_56643C.1
aactccacagtctaatttttttttgggagccagaaaacaaacaaaggggagcaagtacaaactaaaagacgccacgaccacgacccaacagagaaagaaccagcactaaaaaaaaaaaagacccagaaaggagagacgacccacaaactgcagacggagctattatgaataacaatcaccgtgacagatccacacaatgtttttgtgggaaggttctactcgctaactacagaacttaacttatttcaacaggtctttggcagacttagtaaactctcgccccgcctcctgcggtgccacctagaaaaccttgaccgtcatcgagcgcttctcctgaatgccctcctcccgaccctgcattctgaaaacaaactttttgttgccggtcaccctaaagtgcaaaataaattgccaccgcctgtaactttgccaacaccgccgctaccgaaag

SEQ ID NO: 94831 - DNA, 129 bp, Glycine max
  Clone ID: PAT_MRT3847_56644C.1
tggagtttcggaggggtctgccccgagacttcatggattacatgggggcccagcattcagattctaaggatccgcgaagaaccgctttcatggagaaggtgcgggtcttggttgcccgcctgggacact

SEQ ID NO: 94832 - DNA, 306 bp, Glycine max
  Clone ID: PAT_MRT3847_56645C.1
ggaaaaaccgccgagggctttccccatggaaaaaataaaccgggccaacaaataaacaggaaaaaggggaaaacctggccacccccggggaaaaggctttaaaatggcttcaacccaaaaaagggaaaacgggtggttccccccccaccccccccaaagggaaaaaggaaaaaaaaaaaaaatttgggaacccaaacccgaacccccaattggtttaaggaggggcaagaagaacccctttttcaaaagggggttaaaagggaacctcgggcaaacttaatgggtggaacacagtttgaccaaaag

SEQ ID NO: 94833 - DNA, 333 bp, Glycine max
  unsure (1)..(333): unsure at all n locations
  Clone ID: PAT_MRT3847_56646C.1
gggcagaaaatcttttcatttatagaaacccttcattgggaacacatatgtacaacacagtgttacattatcttgttgaagccaaggaaagtgacacggtgattgcaattttcaagaagatgaagttatgtggctgccaccctgattctgaaacatacaatataatgattgactgttgtaccatcctaaaaagttacagatctgcttgtttgctgctttcaatgatgatacggaaagggtttcatccagtgatttgtacatataacgctatcattgagattttgtgggaagatgagacttnatgaanccngatctttgaaacaggtcatntgg

SEQ ID NO: 94834 - DNA, 310 bp, Glycine max
  unsure (1)..(310): unsure at all n locations
  Clone ID: PAT_MRT3847_56647C.1
gcttgccccanttctgacactaattccgttgcttttctaccatgttggaagccatggtactcatttttcaactccaagttcttcaatactttacagaacttttgagacattttttgttgctgtttacaactccccttcaacttgtagcttctcacccaatgggaggcccatatcgcagcaagactcttaatcatatccacctgacctgtatcattgccctgagaagaccnngggtcttctatgagtggctcctgcataactgatgatgtaagcagcttgaacttgaagcacacgctgagagagttggaaa

SEQ ID NO: 94835 - DNA, 583 bp, Glycine max
  Clone ID: PAT_MRT3847_56648C.1
ggctcgagggtgcatcatagggatgatcactcaagattaagccaatcactctctagttatcattctttcccaggtgatgacattcccttgagtggttcatcttacagcaacagggattttgactctgaatctggacgttctctatttcatgctgatattacagctggagtattacaggaaattgcactgaagtgtggaactaaagtggaatttttgtcttcgttagtggctagcacagcactgcaattctccattgaggcatggtttgctggaaaaaaagttggtgaaggatttggtagaactagaagggaagcccaaaataaggctgctgagtgttcaatcaaacaattggctgatatatatatgtctcatgctaaggatgactctggttccacttatggcgatgttagtgggtttcatggttcaaacaacaatggttttgtgagtagtggtaattctcttggtaatcagctattgcctaaagagtcagtctcattttcaacttcatctgactcatctagggtttcagatcctaggatggaagtctctaaaatgtcaacagattcaatttctgccctcaaag

SEQ ID NO: 94836 - DNA, 393 bp, Glycine max
  Clone ID: PAT_MRT3847_56649C.1
accagaaaataatcatttttatctcatgaagtatatttttcattggcaaatcttactagttctatttgtttcccaatacatattcatgctcaacctttttaagtgcacgctgagtctaactctaacatagtacataaaaatctcttatttgatttaaaattcggaggattgaagagaaaaaagaaggcaagatctttgtgcctaacctttgcgggccaaacaatattgagaggaatttattctttttaccactcccttccccttctttaaaccaaacaactcatgtaagtcccacctgaaatgaatataaagcaattttacctccttcgtgccaacgtctctatactttttttccatcttgctgctgaagtttttgtgtccacattggagggg

SEQ ID NO: 94837 - DNA, 491 bp, Glycine max
  Clone ID: PAT_MRT3847_5664C.1
ggaagaggggaaggaaatttgtaataaagaaaagggggaaggcagttaaaaaaaaacatttttttttgggaaaaaacaaatattttacctacttatcggtaccctttttttttcacttggttttaaaaacatacagcctggaacaacggacaagtaactcaatacacaataatcggggctacaggggggggggggattttttaattccatccaaggggaaagtctgttcattgccagaaaaatcgttatcaggggggaaaaatagcatggaggggccctccttcctttttttcaggggaacacaggggcaattccaaaatccttgggcaacctcagcagctttatcatcgtaatgccggcaagggcacaggggggcccccaacgtttttttatgggcagccaacaagtaactcaatacacaataatcggggctacatgggggcgggggattctttaatttcatccaaggggatagtttgctcgagccaaat

SEQ ID NO: 94838 - DNA, 516 bp, Glycine max
  Clone ID: PAT_MRT3847_56650C.1
ggggcaacttcaccacccccacaggggggaaagattttattgggtcttgattaaaaaaaagccattgaccccttacataaaagaaaaaaagctcctaactaaaaaaaaaacatcaaggcattaaaaaggaaaggagggtatctatccacttttttgaaacaaaattttcttcccccatgcaagggcaagggctttaaaaaaacaggggatgggggaggctccccccacttaagaaaaaccaacaagtttttaactaatctcccaaatcttacaaaccttttttgtataacgggcctcctgaaacaacgggttttaaaaaaaaactgatgctttgttccacctccaaaaaacaccaaattttgttaggctgggatcactaacaacctgagcaaggctctttccggcttaatcttcagaaacaaaacctttggttatgtacttcgggaagggagggaacaaagttctgaacaagggaatgggctctttgaaaggcctgttggggcaatgcaaccgggg

SEQ ID NO: 94839 - DNA, 232 bp, Glycine max
  Clone ID: PAT_MRT3847_56651C.1
tggcgctctctttgtcatggtcatcatggatggtgcttcttatctcaggaaggttgatcttaaaagttatacatcatatcacgtactatctactgcctttgagaagatgttcctaacctgtcctaccctaagtcagagtggctcccatggagctccacgaggattactgttgagggatagaatgctgatggatcttttgcctggtccttagtgtgtactatcttatgaagac

SEQ ID NO: 94840 - DNA, 263 bp, Glycine max
  unsure (1)..(263): unsure at all n locations
  Clone ID: PAT_MRT3847_56652C.1
ggatgtcttgtgcttatagggaagcgaccacatttacttcataaagggggtaaaaacagatagggattatcacttatactggactcataatatgcaacatcttttttcactgnnataactgtctttcccctaacatttcacctttattttcttgctcaacttaaaggaaatattatccttcgactattaaacgaacttaacactcttaatcaacatgatgtcacttatctgggctagggcaatgttattctgctcattgaaac

SEQ ID NO: 94841 - DNA, 403 bp, Glycine max
  Clone ID: PAT_MRT3847_56653C.1
tgtactggtgcgttaaaacagcaagccataagctactgtgatgaatgtggcagctatagaaattatcatggatgggactggaagagccgaatgtaacatagttggtgcagtgcttacgagagatacttatgataccaacactgaaaatgcctgtggtagtatttttgatgcgcctttcaaaagtggaagggccattcagatggttacatatgctaataccattgagcagattgaaccatacatgaattcaaggctttagctttcgaataccactaccaatggtgatcttgatgaaaggaaagaactatcacaggataaagataatgtactatgtgatgtttatgtgttgccatcaacatacactacaactagattgacaggatggcgtttgcaaaaagacaga

SEQ ID NO: 94842 - DNA, 295 bp, Glycine max
  Clone ID: PAT_MRT3847_56654C.1
agggataactggcctggccgttttccaaaacccaatcctcaactggaactaattggaatgccgaattttggtaataccaaaattactgaaaatggcgcaattccttgaaaaagttaccaaatcccaaatagaaggcaaaatggtgggaaatttcaaaggaaaattgggtaaagcaaccaaagaactggacaatccaacctccgtgaaatcaagcaataaacccaaaccaaattcacaaaacccttaaggattcaaggtctggaaattccccaaaggcttccccaaggtcctttgg

SEQ ID NO: 94843 - DNA, 481 bp, Glycine max
  Clone ID: PAT_MRT3847_56655C.1
tgatggatcgctaccaggcgcactatgcctttcaccctctacgtcttgactaaggaccccacatgtcctcaaatgtaacaaaaaagctgagtttattcttggcacatgtgcaatggctgcatctctaggaatcgttgtgggacaaccatggagtgtagtctcttgctttgaacctggaactgaccctatgcaattgctcctttctcctttggtactcttctgcgaacccagatgattctcatggagtggtgttgaaatcaagagatggaaggacttcttcaaaccatactcacagacagcgcaatgttccactccatggtcaagaacgtctgagaaatttgccaatgccactggcgagacacgctactcatgacgcaaattctctgcacctttgatgttggccgggactatcaaggatggacttcacattccgcataccaataagctcaaaaaaatgaaattgactgagataaacgatgcc

SEQ ID NO: 94844 - DNA, 292 bp, Glycine max
  Clone ID: PAT_MRT3847_56656C.1
gttattaatgttactaaattaagtgtttcgattttatgtgcgttacttgtttatcgtgactgctagaaaataaccccctaaaccaagggggccaaagacagcgagcaaaaaaggggccgtagaaacacagcactaaagcggaaccggaaagcaaggagacccagctgcacaaccaaggtggggaggggcaagacgaaaaagacgaagcgcccctgaggcggacttttgatcaccccgggggggcgcaaaatgggcggggatggccccaaggggcatatgccgggacatggca

SEQ ID NO: 94845 - DNA, 532 bp, Glycine max
  Clone ID: PAT_MRT3847_56657C.1
actgataattctctgcttccccattcattactattcatggcttatataataagtgaaaatcactacattagtggaggtccacatagtggaaaagcataacagaattgtccagatggcaattcacaataacaaactaagaaatataaacaataaaagaaatactgaaagggaagatatttgttgtcccgagccatgttagtccttgtaacgaacaggcatggtaatcttcctcttgggccttccttcctctgttggcttgttggtcacgtctgaattgccctcttcatgagttatattgccctctctttcctgttgactgtccatacccagagtaatcataatgtgaattaggtatacttggaccaggtgtttgtggaactgctgctggagttgaagaggaatcagaacctttgagtgaggttaattgaaagtgcatcagctagtacagttttcaagctcttcttaagcctctcccgatcaagcaggagtgtgttgattacattgataaggaaaggatcaaatctaccactca

SEQ ID NO: 94846 - DNA, 274 bp, Glycine max
  Clone ID: PAT_MRT3847_56658C.1
gaaaagaggaaactccttaaccgattctaagagagccgatcccagccttgctgtgtataagatgggagccgccaccaaggctatgaaaccattcggctaggggaaggcattgatagacccttatcaagccaaagaggccttccagagctttcttcctattgtggaggagttcaagatggtattcaacagagaacattctgtacactaagcaatgtttggtgtgggcatagctgctgaagcaaaatggaagaccatgtctgatgctgaaaaagca

SEQ ID NO: 94847 - DNA, 161 bp, Glycine max
  unsure (1)..(161): unsure at all n locations
  Clone ID: PAT_MRT3847_56659C.1
gcgggtgttggaatgngtacttttgcnaaatgcngacnattgnggtnncaacanaactatatgacacncatgacganccagagcaggcccaagagaacccacaagatacngcacganancgngaccctgcgtgaagganaccngctganagcctgaggagt

SEQ ID NO: 94848 - DNA, 1987 bp, Glycine max
  Clone ID: PAT_MRT3847_5665C.1
tgattattttgtctacgttgtcagcagcctctgaccgcaaatccacgagatgttagttttttctagccacaaacgcagaccaacccctggcgcacattagccaccattagctggctcactctaacatgcgcttctccagccgctgcagactctgctccacttgctacttcctctagaagaagcctttttcaaatctctctgccaccggacccgttttcttattttcgagtgtggggtctgaatcaagcctcacacaaacaatccacgagaagttagtttattccacaccactttactttctctgaggcttgagaagaagacaatggtggcttgcgaaacatgaagaggggcactgtgttatgcatgttcaatggcatgtcattgtgcttcttacaatgccttttcattttcaccaaccagagagttcttcgccaccaaccacatcatgtcaaaaccatcatccactactactagatgcagaccctttctcttgtccatcaccaatgccacaccatcctacaacacccttgtttctgaggctgttaggctcttggttccttcagcaagatttgaaccttcaaaactgaaggttgttctattggaagatcagataaacaaacatgcaagttttactcctagaacctacattctatcccattgtgactttacagctaatctgactttagctgtgtccaatgtgatcaacctagagcagttgagagggtggtacgagaaggatgatgttgtagctgaatggaagaaagtgcaaaatgatatgtgcctacatgttcattgctttatcagtggtcccaattacttcctggatctggctgttgaattgagatatcacatattctccaaggaaatgcctttggtactcattgttcattttggggttctctcttctaagttatggcttctttgagacctaccctctctcaactttccctttcccaatccaattttctcagaaaatctacatggaacaatcatctaccttgttatatacacaaaaggatcgcaaagttgcaaacttttacctcttctaaatcttccactttcagggtccgctgtagttctccagagaccaataagcaaaacaatggtgaagagcctccagagtcattatttatgaaggaattgaagaggagaggtatgacccctacttcattgcttgatgattacaaacaaagcgactatggacttgatgaagaggtgtatgtgaatgaagaagatagaggtttcccaaaaagaaaagctgtctcaaccaatgttgagaggagtctagacaatcagagggaacgttctatggcactgaacagtgaaggtcttgagggcttggaacatcgtaataaacttcttttgacaattggaggaacattcttcttgggatttgggccattgatcctcataattgttgcatctctttccgctctttacttttatgcacttttccgtgagcatcctgaattgctggattctatagttagagtatattttcattcttgctcagaaaaatataacagaatggaatgttggggacctctcaaggatgcaatggagggaaaacaagcagatcaattccaagggtcaataagaagagatagtcccgaaaagttgcggagcccaaagtccatcttccaagctctttttgcttttcttctttgaactatatcaataacttgaattatttgtttgtatcccaattccccccccagctcagaaattcaagtgggttagacaaagcaaaattcagcttgcaagaatgaaccaatcccaaaaggaaactatgtatctttgggaagacccaaaaccaaaagaaaaatgtgaagttgcacaaaagcagatttcctgtgcccccaaggcaatttgcttttatgatttctgtgactgctattgtaaaattttaaaattaaataatgatacgtggataatttttaacattacaccccttccattcaaatacgagtaaatggtatgttccccc

SEQ ID NO: 94849 - DNA, 264 bp, Glycine max
  unsure (1)..(264): unsure at all n locations
  Clone ID: PAT_MRT3847_56660C.1
gtggaagangaagagaaaagagananaagggtaaagtaancctagagtggtgaatcgttctgcaaatatggaagctgtttgctcgaagaagngttggangcatttncgaaagcctctacnaggncgtnatgcgtcgnaactctgtctacgttaccttcgtcatcgctggctccttcctnngngaacgggctgtagntatggagtccacaatctctgggagnctaagaatggtnggaancgatatgaanacattcctgtgnnagg

SEQ ID NO: 94850 - DNA, 263 bp, Glycine max
  Clone ID: PAT_MRT3847_56661C.1
aaaagtaaaaaccattgtgcttccgcctttcaatattgaggactctgtgtggcagttacagttcctgaaaacaaagataaaataaaagtactaacttatctcaagtaaaaaatggttaaataacctcataaaagataattagtgtaattaatcatatactataattcaagatggtccaatcatattctttataaagttgtttaacctatttttacttgagataatcttataaagtagcataagaggtgaacaaatatattcat

SEQ ID NO: 94851 - DNA, 937 bp, Glycine max
  Clone ID: PAT_MRT3847_56662C.1
cttagatatgagatggacatgttggccttctctggttgtgcccatggttgtgacatcaaagaggaggaggaactaacaagaatgagatatgcataccctgggtggaaggaaaaagttattaattctgagcttaagaggaaagaaggtttgtgccctataacacctgaggaaactgcactagtattgtcagcacttggaatagatcgcaatgttcaaatttatattgcttctggagaaatttatggtggagagaaaagaatggcaagtttactaggagagtttcctaatctgataaggaaagaaattctgttgggaccttcagagttgatgtatttccaaaatcactcctcacaaatggctgcagtggattatcttgtctccctagagagtgatatatttattccaacatatgacgggaacatggctaaagtagtggaaggccatcgcagatttctaggattcaagaaaactatactactggatagaaggcttctggtacacctgatagaccaatactataacgggttgttgagttgggatgagttttccactgctatgaaggaagctcatgcctatcgtatgggaagccccaagagaagagttatcattccagacaaacccaaagaagaagactatttttatgccaaccctcaggaatgtttgcaattgttagatgaaccattagaaagcacataatcttggctagacacacctggctctgatttaatcactgttctcaatcagaaggcaaaggcaattgttattgattattctgtacatgaaatattctcttaatgaactaagagaactgtgccactgccaaataatataaatttcttgtattagggaactagttcttgtataaagaaatggcaaagtggcgtcacatcttcctcaatgcaaagaagtgcaaaagataacagtactttatttctct

SEQ ID NO: 94852 - DNA, 619 bp, Glycine max
  unsure (1)..(619): unsure at all n locations
  Clone ID: PAT_MRT3847_56663C.1
gggccgggaaaaacgcggcgacccacgcgnccggaacaactttcncagcagcgaagcccggcgcgagcagaggcggcggcggcgcgggncccaaaagcgcgccacccaagctccggggcaaacccgacgctatggctacgctcggcgctcgcatgggggccgccgcacccaccggcactccgacggcctcgctcgacttcgaaacctccgcgggcaagagggggaagagtaacctcgctggacacgaccagcacatcgggaaaggagggagggattagatccctctggtgcagggggctagcaaggggataaagcagatcggcgccatgggatggggggcgcagggacctgctcaggcacagaatttgcgggactcgcttgctgaggcaaagcctgacattgggggcaaggggggggctcaggaaaggagctcgctcctttaatgaggctcgcgcagctggccctagcgaggagaaaggaactgagggtgacatatggggaaactaccccaggcagccaccccgcgcggctctggaggggggaggcggcgcaggccggggcccacgaacacacagggtgcccacaggaaaccaaagaggaaacgggggggggggcccag

SEQ ID NO: 94853 - DNA, 332 bp, Glycine max
  Clone ID: PAT_MRT3847_56664C.1
aaattaaaactcctaacaattgccttgcgaataaaatattaggggggttgaaaaacactatatatctactaatcaataccaaattttctttttactatattgaaacacacaagttgagatactggacatcacataactcatctatactctattgtgcaaactgaacactagtaactacactaaacacaaccaatttcacatccagattttggtacagaaaaatgatggtggacaaacataatatgctgagacacattgtgaagtaacaaacattatttaaacccgtagcaaaatcctttagagaaagtctaacttataccccttgtaataca

SEQ ID NO: 94854 - DNA, 1593 bp, Glycine max
  Clone ID: PAT_MRT3847_56665C.1
cttcattcactgccgttacgccaaacaccattttttcttccttccttttttggttccttttccggctgcgagaagacgtcagaatgggaaaccaaaaaccaatagcaatacatttccgatttccagacagaggaactactcagcttagcttgagtattttcaagaggggatcaaagggaagaagaagggaaggactcaaacttgcacacgcaacctttggttcctttcccaacactcaccatggtggcagattctaagtccaattccgacctctccttcggaaaaatctttgccagcagtgctttctctgcatgtttcgctgaggtgtgtactattcctttggatactgccaaagtgaggcttcagcttcaaaagcaagctgtagctggtgatgttgtctccttacctaaatataagggtatgctgggaacagttggaaccattgccagggaagaaggtctttcagcactctggaagggcattgtgccagggttacatcgtcaatgtttgtatggaggcttaagaattgggttatatgaacctgttaagactttctatgtggggaaagaccatgttggagatgttccattgtcaaagaaaattcttgctgcatttacaactggtgcttttgcaattgcagtggcaaatccaaccgatcttgtcaaagttagacttcaagctgaaggaaaattacctcctggtgttcccaggcgctactctggatctttaaatgcttattcaacaattgtgagacaggaaggagttggggctctttggactgggcttggccccaatatagcaagaaatggtatcatcaatgctgccgaattagccagctatgatcaagtgaaacagactattttgaaaattccaggattcactgacaatgttgtaactcatcttcttgctggtcttggggcagggtttttcgccgtctgtattggctccccagttgatgtggttaagtcgagaatgatgggagattctagttacaagaacacccttgattgttttatcaaaacattgaagaatgatggacccttagccttttataaagggttcctcccaaattttggacggctgggatcttggaatgtgatcatgtttctaaccttagaacagactaaaaagttcgtcaaaagtttagagtcgtcctgaggcgagttcccgttgagaattttctaaggggactggttgcaactgcaaatgtagtggaaattgtagaaaataaaggtccctttctcttcattctgctaaccaggatgtggtcaaacatttttttagggaggaaaaatttgatagtaaaatgagaatgctattcatatatactagcttttagcaattgccatatattctgtgggattgcatgcagttgtcatgtatttctctttaaactttattatgaaccgagcttggacatgtcacgagattcgtttcaaatttggcgggggttcaagcctcaaaaccaatgttttattcattcatagatttaaacacaacatagcccttgatcaagaccatttgtcttataatggtggctatgatagtaagtatctaaattcacgcaattgatgcatcaaaaaaaaaaaatat

SEQ ID NO: 94855 - DNA, 492 bp, Glycine max
  Clone ID: PAT_MRT3847_56666C.1
cttcagactggagatccacatgtaagtcagtaacagatcagcatcgcattgattaccccttcattggtattgaaggagaggatgaggatgaagatgaatatggtgatgtagatcatgacgatgagagtcatgatgagaatgatgatggtgagctgagttttgactatgcacaaaatgaatgcgagcaagatgtttctacatttgagaactcaatgaaggaaaacttggataggcttcgcaggaattcattctccttcaaggttaggtcagctagccaatctgccccactttttgttgataataagggtgattctagcgaaaagttgaggcacatgcggcaaactttatcacggaagttcaattcatatgtgctgcctccaccagttgatgggaagagttcaatatctttgaggtcaagtaatcaagtaccttcaaaaataaaggcaaatttaaatgagcctgtgaagaatttgtggcattcatccccactgg

SEQ ID NO: 94856 - DNA, 296 bp, Glycine max
  Clone ID: PAT_MRT3847_56667C.1
acaactccatgctacaggtttatgttcattatctttcacttcaaaaatggtaaaatgtaaatttaaactgtttgatcaataaatatacctatactgcatcataatcaaacgatatctctattcctctaactacctaacctacattcattatactaagtagatttaaattcatatcatatcatagctattaacattattaaatatttatatactcacaatttaacacatcatacataaccttattcataaacttttatactctatactgcctaatgagttatctaacttacattaat

SEQ ID NO: 94857 - DNA, 249 bp, Glycine max
  Clone ID: PAT_MRT3847_56668C.1
cggcattcggctcatcacgagcaatcggctgagagaattttttcgggactaaacatcgaacaattattaagctactaaaaatggacttaagctgatcttcaggactacaacgaataagcaaagtttacgaggtactacaaacgaacacccacaaaagcagagggaccaaaaagtttataaaccctacttagtagctcattaccttatgtagaataccgtacacgttttacccaagaaactattttgact

SEQ ID NO: 94858 - DNA, 251 bp, Glycine max
  unsure (1)..(251): unsure at all n locations
  Clone ID: PAT_MRT3847_56669C.1
gtcgaaagggaaggaaaatagtcattctgtatggnaaaangttcagaagaacagttctgatgatggtagtggtgacttgaagaaagtaaacacaacttcatcacaatttgcttctactctagaaaaggatccttcagttatgcaaagaatgtaattctgttagtgtaaatggtgtatcaaaaactgaagatnaganacacttgaaaaatnaaattggtaggaaatcncnaagctanagtggagtccggtgc

SEQ ID NO: 94859 - DNA, 275 bp, Glycine max
  unsure (1)..(275): unsure at all n locations
  Clone ID: PAT_MRT3847_5666C.1
ctcttcanccgcgcnatttcccatttccagcaattcccattccaanccttcnaaattcttccaccttctnctaccaaaaacccctctgctcanaatcgccttcntcttcntcancaanaccgatctcnactnntcccccttatgggagctcttcttctnttnctcgnccttnccacctcttcaacatttacatcgactctganncgtccttcaacctnantctccctctttcccctcttttccgtaacaattcatctcntccaaacgnancttng

SEQ ID NO: 94860 - DNA, 224 bp, Glycine max
  Clone ID: PAT_MRT3847_56670C.1
ctttctttttttttttttaacacgccaactgagctaaccattactattaatgtgatgggctagtgagcaagagaacaattattacatttagaattcaccccctgaaaaatggagcgctagagaatgtttttcctccgttatggaaaaatgagagaaagcggatgaggccaaagacaatgccccaagcatatgtaggtttcccctgtaggggctgatctcaagtt

SEQ ID NO: 94861 - DNA, 514 bp, Glycine max
  Clone ID: PAT_MRT3847_56671C.1
gggctgcatgtttataggctcctggttagcatccacaaaggttttgaacaaatatctgagaaaattctggcaactgatagaattagaagagaagtagctgaatatgaaacaaaactggcagccacggcttccagaagcttagatgtgagcgaactaaaagctaatcttgatgccattattagagaaaaagaatagcctgaataacatttgcagttaagttaatttcaggaactcatttgaaactggcaaccccaacttccagaagcttagatgttatcaatctaagctgatcttgagattggtatttgggaaaatgaatacctcgacaaacagttacaggacatgtgacattatttcaacaagtcattgggtaccaccatttctaacagtcaattaccattcttcatgtttttgtgttgcaaagttccatataggaacacattatttatttgtttcttattgtttaaatgattgaggggagtattcatacttgttttgtccatcgtttgatagt

SEQ ID NO: 94862 - DNA, 501 bp, Glycine max
  Clone ID: PAT_MRT3847_56672C.1
caattcgatccttagataatcatatattgttaactcagtaaaaaaaaaacaactaaaccgatcagtggtgggtgcgtttctgaaaaaacaaggaagaactacccacttttacacaaaacctatatcgacggtgaaagcacccataccttcaaactaaatccccatgccgaccgggcagggggacagaccctataaattaacacaccggaactggtacgggtaaacggttatgcgtatacagacaacattgaaaacgtggattgaatcagggtctacatatcaccggggagaaatttgaaagggtgtcaattctatcagaagtaacccccctgataagtaagagccaaagcctggggatccccatcagaggcctaacgaaaattcatgggagctgcctcactagacccttcaaaagctggaacccgctcgggcgaataagcataataaagatcccaacgcggactgagaggggcctacatgtttggtggccaaggggatttt

SEQ ID NO: 94863 - DNA, 200 bp, Glycine max
  Clone ID: PAT_MRT3847_56673C.1
tactcaaagaaggatgtgaaaattaaaagccgaatgatatagtcatatacaagtttaacttcgatgtgttctgcgcacaccagattacaaagtgcctagtgaaatcaaatagctaggagttatcataaatcacttaacctagaacacatccgctaggattgctgctgtcccatacggatgcatgctaccaggttgcattg

SEQ ID NO: 94864 - DNA, 330 bp, Glycine max
  Clone ID: PAT_MRT3847_56674C.1
ggaaaaaccccgttttttattaaagggccttttaaggggaaaaaccccctaaccccctttgggtccccaaaatagcctaatccccccccccccttaactgggccccaatttccgaaaaattttcccccccgcaaattttttttccctccccgggcggaaaataaaaaaaactggggggggcaaaaaaaaaatcccctttttaggcgggaaaagggccccccaggcggaacaatggggaaaaaaatctcccttaccctaaatatttggaaaaacaaggatcccgtggggccccccaaatttaaccccttggcccccaaggggggggggatt

SEQ ID NO: 94865 - DNA, 583 bp, Glycine max
  Clone ID: PAT_MRT3847_56675C.1
tttatgagtcaacaaaggtgtgtgacggcattacgacttcatgaacatttgagacagcccaacacgaagctagcttatgctcatgatgttctgttcttcgatcccagcttacaccgtgctgtactcattagtcttcttccaaagtcaagcaatctctgtgttcgaaatggctcgtatgaagcaaaccgcaaggaagtccaccagaggaaaagcttcgagaaagcaacttgccacgaaagcagcacacaagtccgctccggcgaccggcggcgtgaagaagccgcaccgtttcaggccaagtacggtggcgctaagggagatccgaaagtaccagaagaacaccgagcttctcataaggaagcttcctttccaaagacttgtaagggaaatcgctctggacttcaagaccaatctctacttccacagcagcgccgtctccactctccaagaagtcgcagaggcctacctcgttgtgctcttcgaggacaccaacctctgcaccattcacccaagagagttgccattatgcccaaggactgaggcctaccttgttgggctcttgtttattttcattgaatattga

SEQ ID NO: 94866 - DNA, 253 bp, Glycine max
  Clone ID: PAT_MRT3847_56676C.1
cccaaccttgtcgggactgtggaacaatccaagagaattcggtgtgtctctcttgctatcaggtctactgtcgtcgttacatcaatggccacatgctccaacaccatggaaattctggacacccgctggtcctcagctacttcgacctgtcagcctggtgttactactgtcaggcctatgtccaccaccaggctctcctagatgtgaagaacatcgcccaccagaacaagtttggggaggatatgccccaccc

SEQ ID NO: 94867 - DNA, 108 bp, Glycine max
  Clone ID: PAT_MRT3847_56677C.1
cggacccaggaggcaatgaacggcacagctgcagggattagggaacctaagtgaagctggtgatcaggagtgtaacaaagataagctggaatggaaaaaatgtgctaa

SEQ ID NO: 94868 - DNA, 450 bp, Glycine max
  Clone ID: PAT_MRT3847_56678C.1
actattattacctaggccgaaccatcagtggaaaaaggagcttggcattgtggaagccccatggaaccacccgagcctacatcaagtctgcctacaggtactttggagggagcagaatcttgtgcattacatcactcctccacagcacccccctatttgaaatagattacaaactggataagaacgatttcggtacccgcatactagccggagcaagtttccttccttactaaaccggagtaccgggtaatctatataattgtggaacctttgaatcctacgttttgtacaacacaaagtagatatattggatggtgtaaacgaaaaagaagtgtagcatagctctggatatgatgtttgtatagggaagctgttctttacagagaaaaggaagatccaaccctggatgaaaaaccaacggtttatggctatgtttaagttaaacaaaca

SEQ ID NO: 94869 - DNA, 386 bp, Glycine max
  Clone ID: PAT_MRT3847_56679C.1
ggctcgaggattgctgattcgagagattccaacatgaatagaaaaagagatgagttgagattccctttgaagaaatgatggcttcccattggcaaagctatgaagctggtcaaacttagggctctaacttgggaatagacgtaccattccatggtctctattggagagatggctcaagctgctaaggagaagacctaggaaatggcccaagctgcaatggagatgacccatctaacagcccaagctgccacggacatgacttgcgacacttcccaagtggctaaggagaagacccatcagaatacatgagctgctcatctaaagaccttagagatgggccagtccaccaatgaatcggtcccgtcagggaaggacaacacccaagg

SEQ ID NO: 94870 - DNA, 292 bp, Glycine max
  Clone ID: PAT_MRT3847_5667C.1
gacttcgcatgtcacgcgtgcacgacgctcgtgagtctcggatatagcgctcgaggaagaagatggagatttgtcatatctgtcatatgagaagagcggaggagctatcagctctggctccattgcggcggtggcgatcgccagacgacgtcgcctggctgtctgattactgctgccgaatggaataaatgggactgtgactctgtcgttgacttctacgctgacttgatgcgaactctggacgatgctgatgcagacgacgacgaggtcgatcaccatcttcaagacatcc

SEQ ID NO: 94871 - DNA, 298 bp, Glycine max
  Clone ID: PAT_MRT3847_56680C.1
cgaaaacctacttctaaacactttcttcgtttgatttcaactttcattgagatcccataattatgcttcaacggagaatattacattttgatggaaaaccatatcaatctttgaggaaaactaacaaccatggccctacttatcgcttgtcaaccatgcaagctttactataccacacaatggggacactttctcggatcgcctcacaagttatccattcaacatgccctcgcctgagacgcgagacgattactataactgtatgccgattgtcatgatcgagatgccttttaatata

SEQ ID NO: 94872 - DNA, 340 bp, Glycine max
  Clone ID: PAT_MRT3847_56681C.1
gggtgtggggtgtttttttttattttttttttttttttttttttggtttttttttttggtttttttctttttggttatttggtggtgggagtgcaaggaaacccccccgccgaacaaaaagacaaacttgacacccggagacaaagtcctcctcccgggggggagaataagacaggccggggcgccccgaaaaaaaaaacgcacgcgggggggaactggggcatagaccccccccaagattttgagaccacaaacccagcacgaaaaaagctcggcccccgcgacaaaaacagggaacaaccccccggcttgctcacttggctcgggggcaaaaacaaaa

SEQ ID NO: 94873 - DNA, 316 bp, Glycine max
  Clone ID: PAT_MRT3847_56682C.1
cgatagtgtcttgcaaatatatactcgaggctatagtaaacaactactggttattcaagggggtggatctggaggggacactactgctgctgtggtactagctgatatcgtagatattcaagacttatttcctagaagggaaattctcgtgagccatcctaactatagaatgtagaaagtgcatctgctaaaggatttgacctggatagaatctgatgcccgtatctctctggtagtgcaattgtaaagattgaatacacattgctcaggaggaaggatataacatgagccttgatagaatacgttcattttgact

SEQ ID NO: 94874 - DNA, 526 bp, Glycine max
  Clone ID: PAT_MRT3847_56683C.1
tgttttttccctccaaaaaagttgggaagggaagctcttttcctcccctggagattctttaaatcgcttaacctggtgaggtgcccacagattaataataaagggctccagcttgtgagtcagtttcccagattgtgcattttacggttaagcaagtgtttggggatctctgatgatggattaaagccacttgttggatcattgaaattggatttcttggccattgaagattgtcctcaaatttctgaaagaggtgtccaacgagctgcaaagtctgtgtctttcaggcaagacttatcttggatgtactgaatgaagtccgttgccatattttatttccttacgttccgtcttggctatcttcaatgcttctctatatcttctatacgttgtatatcacaccacaatttcacacatacgtaagattattctgttgttgtattttttatttttttatttttatgtcaaattctgttgtattaaaaaatgtaaaaagattgataaaataaatggcttctttggctat

SEQ ID NO: 94875 - DNA, 642 bp, Glycine max
  unsure (1)..(642): unsure at all n locations
  Clone ID: PAT_MRT3847_56684C.1
ctttctttctgagcacttcagaggaagatggcttcttcttacaggagacgcactcttggacgttgggaggacttattggtgcctttattgaccttgttttagcttatttcttgttgtgtggatccgcttttgctttctttgtgtccaaatggtttagattttttggactttgtttgccttgcccctgcaaagggagttttgggtttaggagtagccgtttctgtgtgcatagattgctgttcgaatggccttctaggaagatatgttccattcaagttatggcggttaagaggttcccttttgatctggtttgggttaagggtcattcatgctgtgccaatgataaagttgttacagagagaacacatgataatagggttgttgagttggaagatgaggcatcttgcagttcatgttcaggaccgtgtttgcttcccttcgttgattgggaaaacgtgtatgatgctaaggggaagagggtcatgagtatgaaacgaaggtctggagttcggtgccataggagggctagttatgattgtgcgaaagtttcttcagctgttccttcagaaaacctgncatctgatgttgncctcattccttgctcgccttgtgatggcagtataattagagataaaacaaatg

SEQ ID NO: 94876 - DNA, 131 bp, Glycine max
  Clone ID: PAT_MRT3847_56685C.1
agcgcattgggaacgctatgtggacaaacgtacggagcggggcaagtgacatgctgcgcatgtacatgcatcgctcgcgggtgatactgaacaccaccgcgatcctgctgacgctactatacatattcact

SEQ ID NO: 94877 - DNA, 2015 bp, Glycine max
  Clone ID: PAT_MRT3847_56686C.1
gtaccccagaatcacaattcatttcctcatcagacataattatttgtctagttttagttttgccgactcgcttcacattcgttatctatttcattttattttaatccttttcaatgaaagtcattgcggagtgatagaagagcgagattcacttggaaatcttctgaagagcttccgagtttgcgaatgagagaactcggcattgactcagagacggttcgttatattttcgtggccgatggtttatgctagattgaaataaatttgcattgactatgggtgtctctgggaagtggattaaagcattggttggtctaaagaaatcagaaaagccagggtcttctgagaaggatggaaatgttggcaagtttcaccatcagagaaggcatggtgttgaatttgataatggtaaatttccgaacgaattggataatgctgctactccacctgttgaatatgataatggccatgcaaaccttgatgcccactattcatcttcttcttcacaacaagcacatgatgctgcacataatcaacagatgagggaggaattggctgcgatacgcattcaaacagcatttcgattatttctggctaggaataaactacgccttgtgaaagcatgtggtaaggcttcagggccattgtaagaggccatgcagtgagaaaacaagccgcaaaaacactccgttgtatgcaagctttggtgagggttcaggctcgtgttcgggcaaggcatgttcgcatggcattggaaactcaagcatcacaacagaagcatcagcaaaaccttgcaaatgaagctcgagttcgagaaacagaagaaggatggtgtgatagtgtaggatctgttgaagaaattcaggctaaaatattgaagagacaggaggctgcagcaaaacgtgagagagccatggcgtatgctctatctcatcagtggcaggcaggatcaagacagcagcctgtttcctctggtggatttgaaccggataaaagcagctggggttggaattggttggaaaggtggatggctgtccgtccttgggagaaccgctttgttgacataaatatgaaggatggagtaacagtacatgaagatggaactaaggatgataaaaatgaaaccccacctcagttgagctctgcttacaagaaaccattctcatcaaacactcatccaaacctgacaagtcaaggaactggtcccactatttctgatggctgtgattcttcatctagtatgcctgcaggtttgccagaatcatcaaacacacatcctgttaagccgacttctaaggcaaatgctgaaaatactgttggagaatttaactcaaaacctagaattgggtcaagatcccatagtaatccaaaggagagaacatcacaggcagataagcaggccaaaaaacgattatctctgcctaacaatggggctggagctggatgtcaaatagtcaaacaccctgttagcactactaatgtgattagggataaacctaagctcaacggaagacgggatgcgaatacaaaaccagttccatagctgaatggaagaaaggatgcgaacataaacacacggatatgtattttcgagaatctcaaataagggaaatcactctcttctctattgatatatatggccatttgttgttctgtgcatataatgtgaagcggtgagggctttgtacctagtccatccatgaagagttgaagacggtgaatatggttttacagttttgagattggcttgggttgtgacttgtgataggaataagatttgcctggttgatacaagtttgtttttatttatttatgcaatacttgttgtggtcagtcagaatgtcagttatgtgatagcatgtatttatgtacacctttcagtgtgcaattgccttatgtcgcattatattgttgccagatgttctttagtgagcatacatacttctgcgtagatttgattgcttgatcatactttctctctgatttttattatattagtaccaattgttaaggac

SEQ ID NO: 94878 - DNA, 716 bp, Glycine max
  unsure (1)..(716): unsure at all n locations
  Clone ID: PAT_MRT3847_56687C.1
actcaataaaaaaccgattcataaaaacttcaactcaggaatcctggttcatactttaacatttacctcaaaccaaatggtgacacgaggagataaattctgaagtcttcnncacacacacnacacacacacatatatatattacacacacacacatatatatattaatattcatgcataatacaatagtattacacggatcataaaaactagttggtggttcaagttgcacaggatacagtgtggcatgcaaccattgtatcagttggcagctgctgcggctgcttcagcaggggcaggattaagagtgatttccacattatcatggactccttgcagcagtagctcaccctcgtatgtcagtactttacgctttttcgctgctcttagtgttccaacaagtgcttcaaatatatttgcgcattcatcatcgttaaatagtgttccaaatgttaccttgtaagaaccatctgcttggaccttaccaagcctcttgatttcttggctgagacgctgaacctcttcttcaacattcatggttacaatatcttcccttaacaactagaaccaccaaaaaagaagaaaatatccttccccagttccaacggggatctgaataataaccagcagggtcaggttcagcaacagcagcagcagtgggcggcggcgcagccgcatcagtatcagcagcaatggatggccatgcagtagccggc

SEQ ID NO: 94879 - DNA, 317 bp, Glycine max
  Clone ID: PAT_MRT3847_56688C.1
gacagccgcagcgttatttagtgaaaagcgacctttacgacctatggctgtctgacagactaagaggatttccagaggagagcacggtcgctacaatagagccgctgatgcctttgccaacatagactggtaccataccaatgccacttctctcttccaggtcaagaatattcgcaaaatcctcgtctctcgtacacatggaaccatcattgcagtccaatgactcacacatcaggtttttgaagtctcattggctgatctccaacgggattaatagcactccttcaacaacattcgtttgagatctgacgactttc

SEQ ID NO: 94880 - DNA, 162 bp, Glycine max
  Clone ID: PAT_MRT3847_56689C.1
ttggggtggcttatagctaaccccaaacttgagctacggtcccttcaaaccttctactcttccttacatttacaataaagggaacaatatttcttctagatattcccataccatggatcaagcccatcctatgaaacatgaagcgggaattctaagatactt

SEQ ID NO: 94881 - DNA, 370 bp, Glycine max
  Clone ID: PAT_MRT3847_5668C.1
gacgaaggcgtgctggttaaaaccggtggcgaagtcctggtgtgcgtgcgcgatgcgatcggcaatatggaccttgcgcagctgcgccaggtgatcgaacgggagttcctcagccggcacgagcaagagcaaagcgttcgttcggccttggctaaactggaaagcagcttcattcgccgcttcgccgccctgcatcatgagtgacgacgagaaaaagccgacacccggcgaaaaggccttcagccagcaagtcggcagcaaggcggcccgcaaactcaaggctcaacgccataggacgcggaccgtctggtcaggcctggggatgatggggctgatcggctggtcggtggtgattcccaccctgctcggc

SEQ ID NO: 94882 - DNA, 268 bp, Glycine max
  Clone ID: PAT_MRT3847_56690C.1
cgtggtggtggtgaccgtggttactctcgtggtggtgacggtggtgatggaggctggagaaactaagggttgatgtcggtgaataagggttaaggataagccccgtaaatttaggtggggtttgagtttgataaacttaatggttttgtgtcaccgtggtcctggtttttgacaataaaacctggttgttaatagtcgatttaatgaaatgataatcggaatttggagtaaaaaaaaaaaaacagccaggactgacgacgtcgcgaag

SEQ ID NO: 94883 - DNA, 152 bp, Glycine max
  Clone ID: PAT_MRT3847_56691C.1
gtcactgaaagtatatttgaaactaaaatttaacctaaaagttcagtttgaaagaaataattatctggaacttttaaaaaccgcaatctaaatatgcactttttcttacctctccgatgctcaatgaaggactaggggttccaattattaca

SEQ ID NO: 94884 - DNA, 251 bp, Glycine max
  Clone ID: PAT_MRT3847_56692C.1
tggttcctctatagcggccgcttttttttttttttttttttttttttttttgtctactttaagcctacgtttgtttttttatacattgagcgtaagtattttcttgtggatgccgaatataccattggtcccggatttttagctccatattgagggactttttattattctcaatgtgtggatgggaaacacccctcaaaggtaccaggagttatttattctttcctcatgcaattgcccaaaatgcatta

SEQ ID NO: 94885 - DNA, 632 bp, Glycine max
  Clone ID: PAT_MRT3847_56693C.1
tatgtggtgaatcaagtgacagctggggactatgattgtccaaggaaggtcttaaagttcttaacagatctccatgctgcattccgcatgcttaatctacgaaatgattttttgcgaaagaagtttgatggtatgttattacttgtaccttgtctgtgcattatttttttttttcctattgtcactgcattaccttcatcagataatggtactgacgttgcattcccaatgttgtcacaaatatttatcatcctaaagcaagattggtctactaactatagtgagtaacatcattaacataacagacttatttagaaaacaggtaataatttaataaacatatgtaccagctgaggattactccccccccccctgatgttaagattcggggtttgccaccgaatggtgagccagttggagccttggagatcaaggaatcgcaggccaatcttaacggtaagttctgattcccgagttcgcaacagccaccatgattctccaactctttgcatgtgtggcctttagatgtctcagtattttgaaagtagattggtggtataagtagtctataagatgttgaactttaaagatgagaacatctgctaattaataatactttgggttttgaattt

SEQ ID NO: 94886 - DNA, 285 bp, Glycine max
  Clone ID: PAT_MRT3847_56694C.1
tttttacttttttgttaattgtcatcaggggaaaaaaaaatgggattactttacaagcactttaactattttcggggggaaactgtattgggcatatcccctttcactccggggggagaccgaactaattgaagagctaaacccctctaaatacaaaatcacacttcccgaacaaaatcaatatttattatttgacgcgctccggcaggaacttagggttcaaaaatactggaacgctacccaggggcacacgaaagacttttattgagcaaatccccccacact

SEQ ID NO: 94887 - DNA, 339 bp, Glycine max
  Clone ID: PAT_MRT3847_56695C.1
aaagcacaataaaggagacctttttaatggaatatgtaactccgggtagtctttaattaactgagaactaaccacaagttctttggggtagaacccatttccctcatcaaagggtgaagggtctggtgccataatctggaaatttccttaatctggggatgagatctttccccgaccaccaagacctgatttttccccggtatctggatttgactatattctggaattctcttcacatttctctctctcattcctttccttacctttgcaaacctatcccattggccctttggaacatatggattggctaggaatacctacccccctgaactaaaccgg

SEQ ID NO: 94888 - DNA, 310 bp, Glycine max
  Clone ID: PAT_MRT3847_56696C.1
gtccttattggtgtccaatgcaatagcatgcacgtatacagccatgtctgtacttcttggggtaagaaacagaagtacaagcaaattcttgaggtcattgatccgctggatcgacacattcatagaggctttgctatttatacggaactgggctcgtgacgcactctgtatcacttactacaaaggaaactctcatgtgaattggaacacggtgtgcactgactttgggaaatgttgtgatcaaacggctgcttcgactgatgtgtcactgattggatcattatcattactattgctcgtggttattcct

SEQ ID NO: 94889 - DNA, 799 bp, Glycine max
  Clone ID: PAT_MRT3847_56697C.1
gtattcaaacgacagcgtttgactgagaagtctgacgtgtactcctttggggtggtgctcttggaggtattgtctgggagacagcctttgctccgcatggtggagaagcaacaggtgtcactggttgattgggcgaagcatctatatcagaagggttctctgggtgccattgtggatgcaaaactaaagggccagatagcaactcagtgtttgaacagatttggtgaggttgcgctaagctgtttgcatgaggatgggacccagcgtccttccatgaatgacgtcgttggggtgttggagtttgttctgcagcttcaggatagtgctgttaatggagtggtgcctttggtggtgagtggtggggattatgaagatagtgaagacatgtttagcagtacccacagtagcatacaactttcggattatagtaacagcactgggttgaacaccacaagctatgggagtaaggaatccgacaggttaatcgtcccggagaatgttttctctgagattaatgatcccaagggacgatgaagttactgttcaagttcaggttgagtttgctgtttactgttcaaaataagaaacatagttggaatgttggttatatattatgtgaaattagataaactatttggagatacctatatagaaatctagaagttctttaacgttttctacgtgttcaaatatttagaagtgcatgtgaattaggaagatgttagaaataagaatgttttgtagttatgcttccatgactcgatatttggaatcaagaaagtttgagttctttacatcc

SEQ ID NO: 94890 - DNA, 952 bp, Glycine max
  unsure (1)..(952): unsure at all n locations
  Clone ID: PAT_MRT3847_56698C.1
ctcgagccgttgaggaggactcgtctgaaaatattgacatacatatagttgccaaagaggaacaggagcctccgccggattgtcctactatactgcaaaatgagaagttagataataacaattctgactttgaaaatcaagaatcacagctgcatgaattaaataaaaggacgtacccgctagatgcagaagctatagaaattgctaatgaaggtgaagttgatttgtttgatggaaaacggatagaccctgacgagtgcggatacacaatttatttgcatgaaggtttgaccacagaatatgtttgccatttccattctgtgttccatttactgttcctagagggctaatatttatttggagccctgacatctgaattaatgaatatgcttgcaggatcttcaaaagttgatgggcagacagattctacgggggtccggggccccccccgggttgtcctgccctgcccatctgaatgcccctcgggagaaaacattgtttgcccttctcaaaaggttgttgtattggatgaggagaagatatggaaagcgatgaatattatacgtaagatagtaggatatgaaggtagaatgcaaggatcatgttcagatgaattaaaggctctctacatcttcactggagttgagcccccaactggtactctcgatgaccccgctgaaatcaaggagaagctccacttccttatgtccatcgttggaattaagtcgaatgatgcttagacatgtgacatgtgacacatctgtgtattgttttttacatatttcagttaacctgcaatgtgtgttctttttattctccgtggatttccctggggataggtggaacccaagaaaggaaaggaaaattattcaaaacttacatgttangntataagtatggagttttaatgagtagaaaaaaaaaaaaaaaaaaagggcgggcctgttttaga

SEQ ID NO: 94891 - DNA, 537 bp, Glycine max
  Clone ID: PAT_MRT3847_56699C.1
cggaattcccgggtcgacccacgcgtccgattcccctcatataaaaacgcaacctttttcttctttctgctctctccgtgcgtctttttttctcttgaacaaaaaaatcacctttcccttattagggttttgaaatgtggagggagaatgggaggctctgaatccgtttctgtgccactttccatttccaatggcgaagagccccaattgggtgcatcttcttcccccgccgctcctcctgagccatcagatctcaatcacgcggcggaggaagaggcactctccagggagcttcagagcaagttggatttgaaggatggggatgagagtgaagagagagtttcggacttgatactatggtagaggtgtttgtgatgaagaaactggtaagcctgacggagatagtaggggttgggagaccaatagttggaatgaggaagtgggtgttgatgctgaagttcatgtttttggtgatggtgatgttcatgatgctggtgatggtgatgttcatgatgttggtgatggtgatgttgatgt

SEQ ID NO: 94892 - DNA, 234 bp, Glycine max
  Clone ID: PAT_MRT3847_5669C.1
cgttcgtactgttgttagacacgacagaaggggggtcacaacaaaaaaaaaaagcacgactgcgttctcttttctctccaaaaacaaatgataatgtagccacccctcctctatatgcttcccctttcggggccacattttttctaacccctgagacctatcccaataaagcttgcttggcccttacctcctgatgagccgggcttttctctccccttttttcattagcacaaa

SEQ ID NO: 94893 - DNA, 753 bp, Glycine max
  Clone ID: PAT_MRT3847_566C.1
attttattttgcaaggattaattcatcatggataatggaccaaatagtatatttatgggaactagaatcaaataatgagaaccaaaagcaaacactcttatttgtagggactaaaacagaaaatggtatacacaacggagaataaaaagatttttgagccaaaattaatattctgtcatgaatggttgtatgatccattggaagttggttacttttttattctttacttgtttcttctgtgatgacaattgggcatctagaaatatgatcaggtttataagttataattcaatttatcctatattgatcattaattaaaactaaacatcgacgaacatcaactagatcctagatataatgattattgttcctcatcaacctatgaactcatagatcctaatgaagaactctacataaaacttctttctaatttagaaattcatatgttgcatttatcatttggttgctcaatgaatttgcaagtcgtgtgataatgtgaaaggagataattgcatttgtcaagactgattatgatacttcctattaatgggtaaacccagaggtcaagacttgataggctgtggattttttattctatagattggagacccaaagtttaagtgttactcagattaatacagtgtaaaagcaaacttagcaacttcattgatgattatcaaactaatttctgcctaataaaagctttttgtcaggatttttagtttcaattagaaaaacaaactttgggttact

SEQ ID NO: 94894 - DNA, 286 bp, Glycine max
  Clone ID: PAT_MRT3847_56700C.1
ggccgccctttttttttttttttgagatgcatatcacttactaggtgaacttgctcttttggcagggggttgataatggacatatgatatagtccatcgtcgctaacataagggaccctatgcacaaataacatttcaaggtaacatatgaaatatgagcgatcacggtaatatagtgttattagggcaacatatgatgggagccatttgacaagcagttgggatgcttatgacccttagggccgaaggctggtggcgtctattacgtacacttcgtcgtgattat

SEQ ID NO: 94895 - DNA, 1272 bp, Glycine max
  Clone ID: PAT_MRT3847_56701C.1
gagacttggaaagagcagaattgtgattcaaagaaggaattgccttcccctgcctgcaaagatgaaccagtccctcccccgcgtgccattggtctctccgtcctcacctgtccgtggtctcaggatgaacataaccgggatgaacttgctgagaaatctcctgaaagaaagttgtccggtctcacttctccagcagaagtaccattgaactcttcatcctcaactgttcttaaaaaggtgcctgacacttcgatgccaattgacaatacttccctcttcagccgtttctacctttccaaacttgacatttcggtggacttagtactgccagaattgtatgaccagtgcatgtgtgctctgaatattgacaagaatgctacaggtgatgcagttgccaatacagaactattattaaagaatggttcaagaacacgacagaaatatgctgccaccttttcaaggcattcaccttttccagaaattgataattctatcttccagagagccatagacctttacaagaagcatagcatgaacctacttaacaagggggaggtagatgatattgcggtatccaaccagatgcaagtggatgagtcatttcctattcctagtttggagaatgggcatgtttttgtctcagcatccaatgggataaaagatgtgccaatgcctacattagaatcaggcaaagtggaaactacatctcctgcaaaggagcaattggaagagatcaatcaaacctacggccaaatggaggaagatcataacaagactggcctgtctagcccatcttctggttgtgcgaaccaagaagcagctgtagcaggtttgcaagagaaagagcccaaaatcacttatgataaggtgaattcaggggatgcaaaagaggattactccttggcagctaaaaatgaagctcagttggcccatactttgcaccgagagggagaaaacatagatagcgaagccaaaactactggttttgcccattgtgcagatgaaaagctgggttttggtgacacaaaggttaatcctaatcccttaattgttgaggatgggtctcccaaagcttgtgatgctttgatgcctggttcaaatgagtctgagtcgctaattttaagccggatacatcattctcctgaaagtacacattgagacaatttctatatctttcattgctttttatccatcaggttttaatttcctccctcttttttgttgctttcattttgagcgagaataaaaggaaatggcattcatattccctag

SEQ ID NO: 94896 - DNA, 267 bp, Glycine max
  Clone ID: PAT_MRT3847_56702C.1
gcgcaatgtagattagagaaatttaattagtgtaaatttgtttgtgataagtaatgttttctagggtgtactgtagatattcattccctgcgccggtggttctcagttcttgacaactgggaagggtcggggaaatgttttaatttgtatccgagcatccaacgctgacaagaggtggtttaaccggtgcatgaccatgatgtagtcttaatgttgaagtctttaatttttatttatttttgttaaactttggttctgtcgcttagt

SEQ ID NO: 94897 - DNA, 369 bp, Glycine max
  Clone ID: PAT_MRT3847_56703C.1
aaaaaaaaagaaccaaattgggtaaaggcaaattacgggccccggggcctttatttcttgtttaatgggcctcccctaacataacaaacaaagccaaaaggggctccccccatttgaaaaagctataactttttctaaccatctctggccttgaaaggtttaaaaaaaaaaacgtgggggaaaaaacaacaaccctgccctggttggaagcggggccacaaacatttttaacaatcggaggggcatgaattcaaccaaatatcttcacatctgttttgaggaggcattgagcgggcgcacaagcaaaaatcacaggagggttttaaaacctcaacacaaccaaaactggaggacggaccctttagaaaa

SEQ ID NO: 94898 - DNA, 334 bp, Glycine max
  Clone ID: PAT_MRT3847_56704C.1
ggaccggtccggaattccgggtcacccacgcgtccggaatttttcttgatacttgttcttggatttttgtcttgggtgttggtgaagatggctatgggtggccaaaattttgatactggtgttattattgtgggactgatagtgatatattctgcttgaaaagtgtaaagaatgcacttgaaggtggtagtgctagggtggtcccatggtggctgtaatttaaaaaaaatttccaacaacttggtggtgggttttaaccccaataaattgtgttttgattttttaaagttctttctgcagttcctggctgttcttaacctccagaagctgcatt

SEQ ID NO: 94899 - DNA, 501 bp, Glycine max
  Clone ID: PAT_MRT3847_56705C.1
tacggctgcgagaagacgacagaagggaatccccccatatgggcctttcaattggcacccatctattccaagccaaggcctgcatatcccttgacaaatcccttcttttgagcatcaaggcaaaaaaaaagccttttaaattgagtgttcatattagggttaggtactagttccacatttagcttaacaatgcttcctttattttcattctctactgcaacaatccatggtggcaagtcattgtaagagacaacatgtacaccctttgtggtttgttggacctttctcttagctcgataaaattgcatcttactgcctggtttaacaccatatttttcaagaagagtttgcttcattgcaggatagcttatgtttggatcaaccataattaatctctctaatttctttgcaatccacttacaatttgcatcgttgttccttgttgttttgatgcaagtatgaatattataatatgtcttgatttggaaggctaccttatct

SEQ ID NO: 94900 - DNA, 244 bp, Glycine max
  unsure (1)..(244): unsure at all n locations
  Clone ID: PAT_MRT3847_56706C.1
tgaagtgctaggcactcgggctctgtggaatgggtatctttagctccttaacaagagcgatggacatacgcgatcatgtatcccccaaattcgtccaactccaaagctaggcgactctttaggcctgcttaatcacgcacactgttcgacattctcaatgcctatcccagacttgtccactgtactgatgaatcaagaaganaataaaaagcaaaaatgctatttnaattgtatagactaaaaa

SEQ ID NO: 94901 - DNA, 426 bp, Glycine max
  Clone ID: PAT_MRT3847_56707C.1
ataatacaagaacccaatccaagctattcattaatcattattaacacacacaacacgcagattttttctaaactctaatccccaattttgattcctattcctactagattctatttagcatatcatatcctttctatctaaatttctttctttgtttatctttttttatttatatttcatttattatattatatcttttatttttattatattgtttcttttattataaatttatatttttatatctcatttcatttatcaatttaattattttttttctcataatatattattatatttatttaataatattattttatttttttatttttatattcttatcattcttttattattatttttttaatcttatattaatttttttattcctaattcttatatatatcttttttaatctttttatct

SEQ ID NO: 94902 - DNA, 313 bp, Glycine max
  Clone ID: PAT_MRT3847_56708C.1
ggcttgatgccataagtaatattgattctatatcttatatgtcacttttcttccgaggatacgggtgaagcagtacgaaaagaaaatagtgcagcctgctcaattctccgtttagcttctagttgtttcatgtatcgttgtatttataaaatgcaacatcccaaaactaatgtaaatacatgaatcaatgagaaccctttttgcaaatggagaaagcacatctcccccacctaattttgttgatgatatgatgtgctattgttattcaactaggaaaaaaaaaaaaaaaaaaaaaaaaaaaaaaaaaaaaaaa

SEQ ID NO: 94903 - DNA, 143 bp, Glycine max
  unsure (1)..(143): unsure at all n locations
  Clone ID: PAT_MRT3847_56709C.1
gtgctttgttggtgccaaaataggtattattaggcaccaaatccctacaataagtgatatgatgaatttgttgagtgttgcaaccctcttttgtaaaatcagttatgcacccaacgtcttcatgattcatgtacatanggact

SEQ ID NO: 94904 - DNA, 255 bp, Glycine max
  Clone ID: PAT_MRT3847_5670C.1
ggctcgagcttcacatacctatgtttttttcagagggcctcacatgatcggcaatgccattggagtccctacgaaagacccatgaattggtgcacattatgagactaagaagactcctagagggctacttgggcttccagacattctgtgcttcaaaccttacccggacgtcatgggcgaggtcgggcgtgctgaacagcagaacacctccctcaggctgagaactatgagaccgtgatagtggctgagtcacca

SEQ ID NO: 94905 - DNA, 598 bp, Glycine max
  Clone ID: PAT_MRT3847_56710C.1
ggcaggctacagcttggaagtctgtgctttgtaggtgtcatttgctaacaaactttgtttacacttcgtagaaaattaataagccccccacaagcgtttgactttgtccatgtatattattaaaacatcaaatatcacacccgcaaccttaacctgccacttatttatcacatgtagctttcaacaaagtgcaacaaataaaggccaagcagttttaatcaacacacatgggtatgactatgattattgaacatttttggttgctgttgaactcaaagtattctctagccaagattcaaggactaatctcttaaaatattaagatttatttaagaagttaaattctcttaacatatgttttttttttcatgtacatgaatataaggatcaaatgtttgatcactacatgcttaaagaataagactatttgtcaatcatactatacggttttgttatttgactatttgttactcagaacaacttgtattgtttatgaaaatggaaaatttggaagtggggagagaaatggatagtggtggtaactggtaagaacataattaaaaacatttttaattcatctaataaactgactgagcaa

SEQ ID NO: 94906 - DNA, 355 bp, Glycine max
  Clone ID: PAT_MRT3847_56711C.1
tttttcgcgcccgtttttactaagcgtagcagaggggaggaactgggccaactgtcacttcttcttcttctaaaatacattcataacatagatgaggggcattcttaaccgctgggaaaaacgttcatagtgaatcctaggtatagagggctaatgtgaagtacaccgagactgagatatagtgcgggtacaactacgaaaacaccaaacatgtctacgagaacaggaatggtacttatcaaaggtatggataacccaaagttcgtaactaccaatttaaaaccaacacccatggtttaaaaatgggggggatgcttgcaggttggggtggaaaccaactgctctaccctcaccg

SEQ ID NO: 94907 - DNA, 495 bp, Glycine max
  Clone ID: PAT_MRT3847_56712C.1
aaggtttcccgtcatcactgtatgacgatccgccgtctttgggcgtcggggtggggaaaaacgtaagacatatcgaaaagggtactacagggcaaaaaagcccgtttaaacgggaagatagggacaaatgtgaaagggtattaacgtaggggtaaagaaacaggggtattatatgggatagaaacgtgttagatcgcttccagctaccgtacaggttatccgaaccctaatcagatatacagtgtcacaacaaaagtagtatacaaacgaatagaagaccttaaatggggaagtagaagttgtgttggtagctattagtggtacgcattgtggtattaatggctgtagaagttggtgttaccgtacgtacagtggtacccgttgtacacaatggtttcgtggttagatttgtattaatagattaagcaatcaagcatttgtgccgtagatagcaccttaaaggcacctgtcactcacacaacatctgaataatat

SEQ ID NO: 94908 - DNA, 806 bp, Glycine max
  Clone ID: PAT_MRT3847_56713C.1
tgtgattcagattccattaggacattgttgggttgaagaagacacacccgcttctagcttggattcaaattcatatggaccaattcctttggccctaattcggggaagggttacccatgttgtgtggcctcctcaaagaataggagctgtcaagagtactccaccgcaacgattatcttctttttagttggatccactagtggaataatgctatattgttgggcttcctcaaaggataggtgcgaaagaactacatcagaagtgttatcttctgatctctgacgttgttcccttacatgttccttgatttgtcagtggaaaggatagttacttacctatttgttgattgggttgctagtgtaaaccttgaatccctcaaatgttggttacattctaagcaaggtaacctaaaggttacaaatgagatgaatgatatcttaaagcagaataggtgaaaaaacttgcataacaatgtttagaaggatgctggtccgaatgtgataccagctttctcgagtagttgtccagatgtcacgatgatgagcagcaatggtgattactagcatagatatgagaaattaataagctaaattactcatgtggtactttattttaggttataattcaatctctttttgttctcttttaaaagatgtgtcaggatgtggtagttactactaccccaattcttttagcactcattcttaccagcgttaattcttgaggtgctgtaatttgagatgaggatgagacctttgtgaacatcgtaattatatgattttatgatcaatatttactattttttt

SEQ ID NO: 94909 - DNA, 314 bp, Glycine max
  Clone ID: PAT_MRT3847_56714C.1
aaggggagagagcacgaccaacaacagacggcccacccacaaacagcagcgagcgcaaaaagacgacgcaccagcacaaaggcagggggagaaacagacccaaccgcaccgccgaagaaaaacccgcccaccccaacagcagacgaaggaagggaagcaccgcagcagacccggcaacgacgagcacaaagagcgcgcaaaccagcacgcagcaccagacacggctacaaaggccagggagaagacacgccaaggaaggaggcgcaacagcactgaccgacaccagacccccgaagaagagcagaagacggcag

SEQ ID NO: 94910 - DNA, 289 bp, Glycine max
  Clone ID: PAT_MRT3847_56715C.1
gcatgacctttcataattcagggaaatggaaccagcttgccgtagtttcttggagtgatttctatcattcatacttatttcttttaaattcctattccagggaaaaaattatggagggcctcaattggctcatataaattattgggaggcacaccggcctttgaggaaagaagcactctgggggatctaactcaaggcttggccggggcacctaacgaggtggcttccccaggctccacttttggccccaccaccaggggccaccaatataatcctaattccttcccct

SEQ ID NO: 94911 - DNA, 467 bp, Glycine max
  Clone ID: PAT_MRT3847_56716C.1
tttttaacacttcttttttttttttttttccttttttttttatcgggggttctattcaaggtattttattttttcttcacacaaccacacatgaaatttacaattacattccacttctttaaaaaattactctaccttggatttttggaaggaatctttccactccctcactttggaactttcaacaatctttccaaactgaactttttcagcaaaaaaaaaatcaccctcaatgattggaacaacgtcgcatccctacaagtcaaacattgaattactgaatacgggaaagaaatctctatcttctacaagggcacaaaaactaaccccgagctttgcattcctttaaataacatgcaccggttggcaaaatttaaaaaaaacaatccccttatttacatcgcttaaaaacaagcaaaaaaccgatttaattttacaccccttttctttacaacccaatatcttct

SEQ ID NO: 94912 - DNA, 1879 bp, Glycine max
  Clone ID: PAT_MRT3847_56717C.1
gtcctgttccatctcgttggaagggcacctgcatgaaatcacaagacttcaattcctccaattgtaacaggcaattaattggcgcaagattttacaccgaccctactggaaacgatgacgacgaaggggacaacacgccaagggattcggtggggcacgggacccacgtggcatcgacggcggtgggtgccaccgtgactaatgcatcgtactatggtctggcggcggggagcgcaacgggtgggtcctcagaatcaagattggcagtttacagagtgtgttctaactttgggtgtcgtgggtcggccattcttggggcgtttgacgatgccatttcggatggagtggatgtgttgtcgctgtcgctgggtgcatctcctgggttccaacccgatttgaccactgatccaattgccctcggagcattccacgctgtggagcgaggcatcctggtggtctgctctgccggcaattccggacccagctcctccacggttgtcaacgacgcaccttggattttaactgttgcagcttccactatcgatcgggattttcagtccgacgtcgtcttgggtgtcgacaaaaccgtcaagggcagagccataaatttctcccttatttcaaattccgtcaagtatccaatgatatacggtgaatctgctaaggcggccagtaccagcttagctgaagcaagacaatgccacccagattctttagatgcaaataaagtcaaaggaaagattgtggtctgtgatggaaaaaatgatggatattcaactagtgaaaaaattggtacggtgaaagaggcaggaggaataggtctggttcatattactgaccaaaatggagcaatagcatcatattatggagatttcccagcaaccgtgataagctcaaaagatggcgtcacaatcctccagtatatcaattcaaccagcaatccagtggcaacaattctaccaacagctacagttcttgattataagccagcgcccgtggtgccaaacttttcatcaagagggccttcatcgctttcaagcaatattctcaagcctgatattgcagcaccaggagtgaacattctcgctgcatggattggaaataacgcagatgatgttccaaaaggaagaaaaccctcactatacaacataatctcagggacttccatggcttgcccacatgtttcagggcttgcaagcagtgtcaaaacacgaaaccccacttggagtgcctctgcaatcaaatctgccatcatgacttcagcaattcaaattaacaacttgaaggctcccataacaacggattcgggaagggtagccacaccttatgactatggagcaggggaaatgacaacgtctgaatcattgcaaccaggcctagtttacgaaaccaacaccattgactacttgaactacttgtgttacattggacttaacataaccacggttaaagtcatctccagaactgtccctgctaatttcagttgccctaaggattcaagttctgatctcatctccaacatcaactacccttccatagcagtaaacttcaccggcaaagcagccgtgaacgtgagtagaactgtcacaaacgttggtgaagaagatgaaacagcgtactctcccgttgtggaagctcccagtggagtaaaagtcacagtgactccagataaacttcagtttacaaagagtagtaaaaaacttggctaccaagttattttttcctcaactttgacctctttgaaggaagatctgtttggatctattacttggagtaacggcaaatatatggttcgaagtccatttgtattaactaaatagtgaaattaaaagcagtgatgaataaatgcaagttaagttcttcatggtgcttactccgc

SEQ ID NO: 94913 - DNA, 561 bp, Glycine max
  Clone ID: PAT_MRT3847_56718C.1
taggaaaagacgcattcattcaaatgcaagtacagcaatatgaagtcatgaactcgtcagtcctaagagaaaactagaatcataatggaacccaaaatacctttacttccaaccaaccaacggtgtgccgcattaccctatcaagtccattctttttttcctccttgatttcttctgttagcacaggacacaaatattgcatttgtgccggcacaaaggagaaaatcatgatatcatcaagttgtttaaaggagaaaaaactaatctctcaatttacagacttttctctctacaatttctatcctatatataaaaagcaggctggccatgatggcagggcaataactcagataacttgttttcatagaacacaagtcttttccagcgctacccctgcaattcccttcatgcaaaatgatagccatatattcccaactaacttaacaagagcctgaacacgttgcctatagaaatgataccttccacacgcctgctgccagcctctatgaccacaagctgtctaacaccaggatttgccaagcgctctttgtgcaatgaatc

SEQ ID NO: 94914 - DNA, 213 bp, Glycine max
  Clone ID: PAT_MRT3847_56719C.1
ataacatgcagaattcatcaattttaaaatttaaaataaaaaaaaaaaaaaaaggccaaagaaaatatataaaaaatagaacaaaaaaacaaaataaaatataaaaaaaaaaccttaacattttaagggaatcattcttgattacattgctattccggacttcttctaattctttacattccctcaaactcaatatactttaattgggtttaa

SEQ ID NO: 94915 - DNA, 248 bp, Glycine max
  Clone ID: PAT_MRT3847_5671C.1
ctggagtacagtggcgtgtgtgtagaagacgaagcagccactggcactgaacaattatcctttgatggagttggcttttcattcagccctgtacccagcatctctgtcttgtcgagcgaggaggttgtccttggtgccttgtgcattgaagacacgctcttgtatcgaggaggctctggtgagtgtggaagcatgcaacatggcatctcaccctatcaatttctccaagttggatggaacatggcgcc

SEQ ID NO: 94916 - DNA, 357 bp, Glycine max
  Clone ID: PAT_MRT3847_56720C.1
gacccaacagcgatgcttccctcatcacctacactgagagcgtgctgagcacccatacatcctgcatcatacgctctacgatgcacctcgttgaggctacagaacgctctttatcgatgatcttggctcacaacactgatcataagagaggctctaaccatggcaagcggctgcagcacctcattaaggccattcaagcccattatcgatcggggcaagtttcacttcagtccatgaccactatatcttaaatgtccactatgcatgatgacatttgccacgcggcagatgagaaaagggtgaccatgaccatttagcctttacacaagcgggggaagatggtcggcatggaaaatg

SEQ ID NO: 94917 - DNA, 1037 bp, Glycine max
  Clone ID: PAT_MRT3847_56721C.1
ccacgccgtccgcaacaaccactttatttccgtgatcataattaaacttgactgtggcttttccttccatccacttccctcattggttctcttggtccattatagtttgcagtgttcctccaaggttttgatctcaatccattacaaactagacaacctaatatccgttgctttcagtggaatgaagatgtaactcatcagggaacggaaatgccttcatgatgggctttgggcccaaacacagccgacttaataaagatcaacaaagcaccaagtatctcaatgatgagattgaggaccctgcccctcacaaagaacatactaagcaacagttgaagatgcatgttgctcatgctcaaaactatgaagttgcatgtaatgcaattatcaaccactgcttcacttcttatgcattttggcattgcttctttcaggctgcggcagtatcttatgctaaacaagttgtaaagctgatggatagtttgctcatggcagggaaggccacagttgaaatgaataaggagctgaacactcagaaaatgagagcacccttgttgcacaaaactgttattattttcacagatatgttactttgccagcacacagacctcattgatggcttttatatattaaagctcctaaaagatgatggtcataatcaaattaattaatgcaccctctttgtcagggacaaggatcttaaaccatcaagtacttgctgctgcttcctacacaaaaatttgcttcaacgaggtcctgagttcttgtacactactgaagagagttcccctttgatacttcaaaattttacccggttttaatcatatgctgttatagcctaagtatgagatcctgagttcttgtacttccgaagagagttccccttggatacttcaaaattttacactattttaatcatttcctgttatatcgtatgagaaactgagttattctactgctgaagagagtttcccttggcaacttcaaaatttgactctattttaatcatgggtttaatgtttatgcattgacaatgt

SEQ ID NO: 94918 - DNA, 123 bp, Glycine max
  Clone ID: PAT_MRT3847_56722C.1
cttccgcccacccttccgttttcacctaaccagggtatctaattaccgacaaccatatccttttagcatggaccatcatctaatgttcctttaattgggctttagtgaaatttttttttctgt

SEQ ID NO: 94919 - DNA, 237 bp, Glycine max
  Clone ID: PAT_MRT3847_56723C.1
gggtctttttgttttttttatctgccaaacaaaagaaagagcagtgatcctaattcctaggcatacatgttgcaagcaggctaaaaaaacaacctattacttttgacacttaacaggggacaacagtgatacaggggaacgggctaaatctattatggcccaagatacaaacctaattgtatagcgtcattatgaaggttctactcaaaccaaatgtctaccttgacttatccgggg

SEQ ID NO: 94920 - DNA, 173 bp, Glycine max
  unsure (1)..(173): unsure at all n locations
  Clone ID: PAT_MRT3847_56724C.1
gcagncatggccacccacgcggctctagcttctacanggatcnccacttnacacnangttcccntccaaggcttcanactcttncccanngcagtgcgnctcaaagaganttgaggtgnnagaantctctgggctaagatccgctncangtgtgacatgtgntaangatggct

SEQ ID NO: 94921 - DNA, 173 bp, Glycine max
  Clone ID: PAT_MRT3847_56725C.1
ttaaacgtctcgacagacctttcaatatgacacaatccttttggtctaaggtctatctaactctaaccatttagactttcaagctagattgaggtctgtggatagagatctttgtctacgccaacaacattgtcctcttaaatattaaaaagccttgatatatgtgaacttat

SEQ ID NO: 94922 - DNA, 150 bp, Glycine max
  unsure (1)..(150): unsure at all n locations
  Clone ID: PAT_MRT3847_56726C.1
gggtantggcantgagttccccttgcngttgcgcttgcgcttctacgagttggngtgttgggtatgggtatggaagtggtggcgtgctttcaaattcaaaagtaacaacgaggagggcaggagaaatatgcatggcacattcagtttgtt

SEQ ID NO: 94923 - DNA, 480 bp, Glycine max
  Clone ID: PAT_MRT3847_56727C.1
ggacactgcgcggggatatataggcacatattgatacgtactaagaacacatttgataagcaatcgatattccgctcagacattcggaatcatgtcgtgtcatgcgtacttatatgaacacctgctgagtgatatcgatggctaccacctaactcatgcctatattgtgggtcacgacgggagactcgggagctcagactagccatacttgactcagttcaaagacgatgacataactgctgtcatgaatgaccttaacaaacctggatcaattggtccaactgaatttgtctctcgctgtgcacacataactaggtcatccagcagccatcctgtggccgccatactaggcactatgggggctggtggtgatactgacatgaagaacgatgcggacctgatcattggcgtggatcaacaaacaatggctgccgatcagagattactggttgtgcaaaggcttagaaattattctattga

SEQ ID NO: 94924 - DNA, 401 bp, Glycine max
  unsure (1)..(401): unsure at all n locations
  Clone ID: PAT_MRT3847_56728C.1
tgatttgttcgtcggacaactttgatcccttttgcctgctcgagggtggaagattgcaagcgagggacatgctgcatcatctctggacgggtccaatctctaatgctactcaatagaaaggatttaaatcaaagctcgcgccatgttattattgatttatttgaagctttcattatgtaggtggcttcttagctctcagatgatgctaagatactngtatatagcatttgaatcaatgtgaatgtgatcatatcacattacctgaatggaatttgatggattaagctaattatgtcattgctgctactttggcataatgcctaattggtttacttgatgcatgctcttctttntcaagctgtgtcctttgtgtaataaattggaaagattgttgtttcttt

SEQ ID NO: 94925 - DNA, 129 bp, Glycine max
  unsure (1)..(129): unsure at all n locations
  Clone ID: PAT_MRT3847_56729C.1
ggagataagacagagagaagtgtcttaataaacgctcttctgtgaagaactggannggagggcnagcgggcttctctttcgtttcgatcttggatctgtggaaatgagagagtgcatgtcaatccggat

SEQ ID NO: 94926 - DNA, 213 bp, Glycine max
  Clone ID: PAT_MRT3847_5672C.1
gatttcattttgtctaataatctgttttttcagggttttgctttgtgctttaattttttcttcttctttcgtttgtaccattttctatattgctttctgttcttctctatttttggttttttctttcttcctctaactatggatgcaggatctttgagttcttccttaaccctcacttcacgattcactgtctcctttcaagagctatttatt

SEQ ID NO: 94927 - DNA, 257 bp, Glycine max
  Clone ID: PAT_MRT3847_56730C.1
ataaaatcattttttattgcagtggattacttcacacggcagggccaacctatctcataaggggtgtgcaaacaattggtgcatcaccccattgacttgaagtagggattccaaaccgggcgggccattttctaacatgcagagaaagcgcattggaacgcataggatacccacatctaatcacaagtgggggaaaagccattgttgaaaaatcccttcccaaagcaccaaagtggaccgatttagccaaaacgatt

SEQ ID NO: 94928 - DNA, 279 bp, Glycine max
  Clone ID: PAT_MRT3847_56731C.1
accgacgcctccgaaagaatctatggcgaccaataaacctgattacgtaaaaacggcatccggcacattgctagatcccaaaagatccactctatccttccccttgatcatgcttctgcaattcactcctacaatgatatctgcgtaattcgaattctaagtccttaagccttctattgatcttatatcaacgggaaaaacaatgtaatctgcttctaaaaaatatcatgcacattctacacctgactactgaagatcaagctgttaaatcccatccct

SEQ ID NO: 94929 - DNA, 184 bp, Glycine max
  Clone ID: PAT_MRT3847_56732C.1
ctctttgatggcagaattggggaacatggatctctttatgatacagcctgaaagtaattgaatatgatattaacagtgtgtcattctacatggctatggggtttccaagggtagggggggggaaatgaccagaccccttttttaacctcaaattttcctcctaggacaattgataatgtgcggc

SEQ ID NO: 94930 - DNA, 386 bp, Glycine max
  Clone ID: PAT_MRT3847_56733C.1
gtcaaaaaaaaaagcaaaagcaaacaaggggaaaaaaaaaaaattgggtttcccccggggaagaggaaaaaaaaaaaccctttaaaaaaatgggggggggggccaattttttaaaaaccggaaatgtttttaacggcggggggggaatttccaaaaaaaagggggccatttggggaagggcccccaacttggggggggcccctggccatgtttaaaaataaaaaaaactggggggggcccactcttttggggccgtggtaacaaaccgccaaattctttttgggggtttttttgaccccaaccccggggggagggctttttcctgggccccattttaattcccttttggggcctacaaaaaactgggggggaaaaagggattgggg

SEQ ID NO: 94931 - DNA, 202 bp, Glycine max
  Clone ID: PAT_MRT3847_56734C.1
cggcaaattaagtgggttcctcacatttctcaatcaagggttaatgtaagggtataatcttatttttctcacttaatataatatcatattatgatctcacagatgtacaaaagtcacgtggttaaagagttaaaaaccatgtttgataggtaacatttgggccttatttacaaatattgaattaaaaggaattttaattttg

SEQ ID NO: 94932 - DNA, 500 bp, Glycine max
  Clone ID: PAT_MRT3847_56735C.1
tagaatggttaggggaaagggaatcaaactccgtgctcctattgactcattccttcacgcgcaaaggagggaattggaagccatcgtcgctgcttacccaccttgtggcgatcgactcatctacgacgatgccagccacaccgatgcccttgtctctggaaatggcggggggtgcaggcaccacaatataggaaagacagatacgccatgaggacaccgatgagaggcccttacgcacgcatcgacactgcattggatgcccaacacatggattctattgcctgtgaagctgaacataccctagcgtattccgaatcacacaatgaacatatagtgggcgatggagtgattctataacgatgtgtaatgggaatattaggaatttgctcattcctaagcctactataacattgcaagctctaaagataatgaagactgactgtggcgatagccactggttggcaaacaccaaggcacgccaggatcatacgctggggagg

SEQ ID NO: 94933 - DNA, 493 bp, Glycine max
  Clone ID: PAT_MRT3847_56736C.1
gattgagaggattatctctcctggttttgttcttactactggttactatatgccatcttaatgtgtgcgacttgtctattgcatactaactgatatgagttgttatcctgaatcttttcatgacgtatcttgtgaccgaaacgaatgatctggctctcatgggagtccgagttacatgtgtaccaatcttgcaccaatgtacgaccgttctggatgagttgatgcgcgatcctgttatatgacacaaatatcatttctaaccatacctaatgatgattttacactttcgacttgttatcttacaggatatatatctgacggacacatatatgtcaccagacagtcgtgtaacaatcatatatatgcatcattcagtgagcttatattatcgtgtagtcagatgaagagtgccatcgtagatggaatgactctatcggtttattctgatgtgttctaccatctctatgcatataatgccattgtgatagatgtc

SEQ ID NO: 94934 - DNA, 358 bp, Glycine max
  Clone ID: PAT_MRT3847_56737C.1
tcttaagcttgctactgagtttccacactgcataccttaggtcttccgaattcgaagttaatttgcaagatggctaaggaaaaggctcagatcaacattgtggtggttggtcatgtggaccctgaggaggcaaccaccatttacgagctgaagaagcctgttgtggataaatacgctacgtggcatgccatctgagggcattcgcgttctggcctagaagggagctcagataatcatgttgcaaaatagtctggaaccctattgtgtcagtgtcatcatcagtgtgttgtttaagcttgctttgtatagggacgttctttgagatcgaagtctggatgagcacttccctcttatgtat

SEQ ID NO: 94935 - DNA, 1247 bp, Glycine max
  Clone ID: PAT_MRT3847_56738C.1
catcgcaaacactcaaactagttaacacatgggagtgccagggtttcgaaaatgttctccggctcccaaaccctaaacgccaggaaaaagagaggcggccctggcgggtctcaacataaaaatacccacccacttccctcgaccaacacttccaattctctttctttctccctctctatgctttcgaaaatgttctcgggatcccaattcgacgccaccaccgccttctccggaggcggtttcacgtcctcccagccgtctaccctcaacgattcttctcccgcgccgtcaaacagccgcgaaactccgggtttggtgccggtgacagtgaagcagataagcgaggcctctcaatccggtgatgaaaagtcgaatttcgtgatcaacggtgtagatctgaacaatgtaacactggttgggatgatgtttgagaaagttgagagaaatactgatgtcagttttgttttggatgatggaacaggacgaatcaaatgtcgaagatggattaatgaggcttttgacacaaaggaaatggaggcagtgatgaatgatatgtacgttcgtgtttatgggcatttgaaaagctttcaaggtgttaagcaacttgttgccttctctgtcaggcctgtgacaaattttgatgagatcccttttcactttattgattgcatccataaccatcttcgctccaaaataaaggtggaaggaatcacttctgcaaatccttcatctggctcatctttggaaactcctgtcaaaagtgcaccaaatggatctcaggcattatcatcaaatccagtatgtgcacagcatagcgtggatggacttaagggtattgataaattgattatggactacctggagcagcattcagatatgtcagatggacgtggaatacatgttgatgaactatcacgggagctcaagcttccaatggaaaagatcaaggttcctttatatgcttttttcccttgaggctatgcaaagatttgctcatgatgtaaagctgtttatgatgtcaggttgtcgttgaagactcttgcagatgatggagaaatatactcccccatagatgccgcccattacaaaaaagcttgatattttatgtaatctgaggaatatagctaaggattaataggatatgacccatgacctattttgatttcaagtttcgagatttgtagatatgtttctggatgaattgatattttatgctcaaactaaaagaatcacttctgttaacgctt

SEQ ID NO: 94936 - DNA, 220 bp, Glycine max
  Clone ID: PAT_MRT3847_56739C.1
ttctcctatggcaagccaactcaagtccaccttcactaaaactcttgtagctcccaagggcctatctgactctttaccactccacctcctgccttataacaggcaatgtagctgcactgctagggacatacaatcaaaaaagccaacctaccaagtgattcaccctatcaacagggatgcatttatggaaagcctacgaacctccattcccaccaaccct

SEQ ID NO: 94937 - DNA, 177 bp, Glycine max
  Clone ID: PAT_MRT3847_5673C.1
gagaaacgtgtgattatgacacgagatgcaaaggggcttatacatgattatgtgacaaggaaccaattgtatagagtgaagactcttctaagaaatgaacagctactcaagggtattgaagctttatagatggaaatcaatgatgatcagctaaggtcaaggtgcacatattgcagt

SEQ ID NO: 94938 - DNA, 344 bp, Glycine max
  Clone ID: PAT_MRT3847_56740C.1
ctataatgttaaaccccgaaaaggaataacaattttttgggccggaaaaaaaaaaaccccccaaggggggaggaaaaaaacaaagccccattgggccaggtgaaaaggaaaagcccactcttcccaaatacccaaggtccattccccactaacaaaaaggattaccattttaccaatccgggggggggagtaaccttccgaggggccaaggacagggcaaattcccgcaaggggtgttgccctgggcgccaagtgcctgagttccagtccctggcccccttttccctaaactcaaattctggttccagctaaccacgctttcatgcccgggaaatccccccccc

SEQ ID NO: 94939 - DNA, 1286 bp, Glycine max
  Clone ID: PAT_MRT3847_56741C.1
tttctttgtagataaaacaacgaaaggactgcgagaagacgacagaagggggatgcaaaagttagtagtagtgaagaaaatgaaagtccttgttttctttgttgctatagttctagcagcatggcattgccatggctcagaccatgaccatgaccatggccacacctaccaaattttccctctgagaatgaaaactggccatggtggccactacattccggaggtatcatgccaaagttggaggcttggtgtggaagcacacaacgtcattgactggaaacaccgttcctacaagattagcgagggatatattggaaacattacatgcttggcgaacaaaataaatcagactctcaattggtttacaactacgagtttttttcaagctagaaacttgctctatttttgtctacacaacagtttgatcttgtttgttgttctcttgcttctgctcctccattggtgactgtattcggctttcttttgtttcctcgttcacttctttttcttctgttctctcaggtgctgggttctcttctaccgcaggcttcacttcctctgtcacttctattgcctcattagcttcaactggggcttcttcttcctctttttcttctttggtggtttcttgcttctggttcttcggctgggattaccctgtggtagctggttgttttgggataagttttctcaatattgggtttacccagggtttgcttacattttcttggcacatggctggttgaacgttaagattgtgcaaaccgtaatacagggaggacaaagtaggaaaatgcagaaggaggaaaagtaataaaaggaatgaaattgaagaaacaagtatgagcaggagggcatttaagttgcctgatcccatgtactacattagttgaggtctctagggctcttactagcatgttcctatgaataaaataagatgcatgttgtaataatggagagatcgacttaaaccaaggagcactcgttaattaattgctatgtatgtgactttgtgtgagacaaaaggtcacgtggtaagagactgtacaagcacaacggtgttttatctttcgtggttttaataaatcatgtgtgctataattccgttaatttagcctccgcgggccagaacgggctttcctgcgctgggctggatcccgggccacactgggtgctggcacttgttgtagaaaatcactgaggatgatgctgaaaccttgagcactgtgagtgtgagaaagaagatggtggtgagaaagggtctgagactgagcagcattgagccc

SEQ ID NO: 94940 - DNA, 256 bp, Glycine max
  Clone ID: PAT_MRT3847_56742C.1
cacgaaaccccgatagcactttccttatcttttccgaatccgaggagtggcagtagtgtgtggtttttcacaatcattacctcgtttcagctcaattttgttaattgggcttccattcattaaagtttacaagtttgcggctttcaaacgattatatggggagttgtgtgtctaaggtgattgcaaatttcagtgcaacatggtgtggtccttgtaagatgattgcgccatattacagcgagttatctgagaaata

SEQ ID NO: 94941 - DNA, 933 bp, Glycine max
  Clone ID: PAT_MRT3847_56743C.1
agaacagtaaatctacttgaatacaataatatttttacaatcctatttttaataccatccctacattccctgttttgtgataaaaaattgttaccctagaaatttaggatgttggacaaacattattccaacaaacttgaaacagacgctggtcatttatgttgactcaagaaaagaccagctgtttcatgggcggtgatgagagagattaccggtgactctcaataaacgatgaggtttgctgcacaaagcattccacgtaattaacaaccaattagaagaaatgaacggcaaatcaatttgcatttcgcttcatatataaaataataaaaataaaatacgttccgtttttttttttttttcaaaagtttatgaacatgatacatttgactttgatgactgccttaacgtctacacttgtacagggacaatttacacattgaaaacttaaccaacccaaaattttagataaaataaaaggggaaaagttgaaggaaaaaaattcaagaggattgcttctaaaatgaattacactatcaactgcaactacagattcctttatacacaaaaataggccattcaagttaataacatggcccaggttactaggttagtggatggatggatccggtttaaactcctggtccccttggcctgcgtttgccatttgcatttactattccagtgcgtgttccgaaagcagacagtatacaaagtattttgcaacgaaaaatagtttcatttagtagtaaccttatttgcactctttagcacctgccctccttagtacgagaaaccgtcaagtaaagcccgcaaatttcttttttgcttcataatatactttgatatcatgaatcatgagagccttgaaccattaaaggaatacgcttagcactgtctgcgcgaaagctgtcccctttaaatgcaatctcc

SEQ ID NO: 94942 - DNA, 502 bp, Glycine max
  Clone ID: PAT_MRT3847_56744C.1
agcgatagctctttccttatcttctccgaatccgaggagtggtagtaatttgtggtttttcacaatcactacctcgtttcatcttaattctgttaattgggtactaattaagctatctcaaacctcaatttttttgaggcttccattcattaaagtataaagtttgtggctttcaaacaattatatggggagttgtgtgtctaagaataaagctagggataatgattctgatcataatgtggattttgctgctgggaatgtgaaacttattaccaccaaagaagcgtgggaccaatatttggaagaagcaaggagggatggcaaaattgtgattgcaaatttcagtgcagcatggtgtggtccttgtaagatgattgcaccatattactgactttagcacttcatgggacatcaaagccacaccaactttcttctttcttaaagatggacaacaacttgacaaacttgtaggagccaacaagccagaactgcagaagaagat

SEQ ID NO: 94943 - DNA, 744 bp, Glycine max
  Clone ID: PAT_MRT3847_56745C.1
ccacgaaaccgcgatagctctttccttatcttctccgaatccgaggagtggtagtaatttgtggtttttcacaatcactacctcgtttcatcttaattctgttaattgggtactaattaagctatctcaaacctcaatttttttgaggcttccattcattaaagtataaagtttgtggctttcaaacaattatatggggagttgtgtgtctaagaataaagctagggataatgattctgatcataatgtggattttgctgctgggaatgtgaaacttattaccaccaaagaagcgtgggaccaatatttggaagaagcaaggagggatggcaaaattgtgattgcaaatttcagtgcagcatggtgtggtccttgtaagatgattgcaccatattactgtgagttatctgagaaatacacttctatgatgttcttggtagttgatgtggatgaactaactgactttagcacttcatgggacatcaaagccacaccaactttcttctttcttaaagatggacaacaacttgacaaacttgtaggagccaacaagccagaactgcagaagaagattgttgccattaatgattcgcttcccgaatataagcagtgactgttttcttattcatgttgctgtgccctttgtcctttcacaagtcataactagtgttctacatttttttttcccgtgagtgtcgttgtattcttcctcggatgtaaatataagacatggcacatgaattt

SEQ ID NO: 94944 - DNA, 2110 bp, Glycine max
  Clone ID: PAT_MRT3847_56746C.1
ccacgcgtcgtctggctacaccatttcccaaacaaacccaccacctgaccggagcctagttataatatataacaaaacccagtaactaaagaggcttcaatgggttcaataggtacggtgtgttcaagcttcattagagcacctccgtggcgcagtggctcagttactctttcaaaaccctgaaaatccaaaatcagccatggtttcaaatggtaggatgctgtgttcaagcttgattacagcacctccgtcatcctccctctccagaactactccatcctacttctgctcatttccttctcgtagaatcatcttcacgccaagaattggatcatctccggccccggcccaggcccaggcccagcccaaggaagccaagctctggggtggcaggttcgaggagggcgtaaccgacgttgtggagaggttcaccgagtcgatctccttcgacaagaagctctacaaacaagacatcacgggaagcagagcacacgcttcaatgctcgctcaccagggtttgataagcgagattgacagagactctattctccaaggattggatgaaatagagaggcgcattgagaatggagagttcaattggagagctgacagggaggatgtgcacatgaacatcgaggccgcgctcaccgacttgatcggtgagcctgccaagaagcttcacactgcgcggagccggaacgatcaggtcttgacggattttcgcctctggtgtcgggacgccattgacaagatcctcctgagcatgaagcagctccaggtctcgctgatcaccctggctttgaacaatcagggcctcattgttcctggctatactcacttgcagcgcgcgcagccggttttgctgcagcatcttctcttggcttatgttgaggagattgagcgtgatgctggtcgtttggtagattgtagggctaggatgaatttctgccccttaggagcttgtgccttggctggtacagggcttcctattgatcgattcatgacttccgaagctttagggtttacggctcctttgaggaatagtatagatgctgtttcagaccgagattttgtactggagtttctttctgctaatgccatcacagctgtgcatctttctcgacttggtgaagagtgggtattgtgggcttcggaggaatttggattcatcacaccaagtgactctgtttcaactggaagtagtataatgcctcagaaaaagaatccagatccgatggaacttgttcgtgggaagtctgccagagtcataggggatcttgttactcttctcacattgtgcaaaggacttcctcatgcttacaaccgcgatttgcaggaagataaagaaccagtagttgacagccttgttaacaagggtgtgccctttagaacgtctcacaatatcgctggaaaattctgttgctttatgaaacgttgaagaactgccaactgctggacttaagccttgatgagctgagaagtataaatccagtctttgaggaggatgtgtatgaatttcttggagtagaaaatgcgattaagaaatttgtctcttatggctccaccgggtcagcatgtgttgccagccaacttgattattggttgaaaaaacttgaaatgaagtgaagattaccctactgtcatgaaattctcatcgtgctagggaagccaattcctaaaacatggaataatagctcgctgccttgccaaagttgctggaacacgtaattctggaatcaaccaagatgatacctttgagtatttgaagcgtgcgagagcattagttgttatatgcaaattagtcagggttatgtactttcagaatcaaatgtgccatgccgtaagttatgagttttttgcattttacattacctcctgtatttctagaattcgagaacatcagttgttatatgcaaattagtcagggttactgaataggtagtttcagaatcaaatgtgccatgccttaagctatgagctttttgcattttacattaccaccagttcgactgtaattttcagcgtgccgaatgaattttgtgtagcttttaaccaaataaagttatctttagccaccagacggcaaaagcttttttcattttttgattgg

SEQ ID NO: 94945 - DNA, 334 bp, Glycine max
  Clone ID: PAT_MRT3847_56747C.1
aaatgaccaagttcacaatactgctgataggtctgaatttatgggtgacccagacttgcagagcgtccaaatggcagctccagcaagatacgatgtcgaagattggtacatgtggtcatagctgacgtcctgagagaaccacatcatggataagatacacgcgacaagaatctacaccatgatgatcatgacgacaacaattagattctcatgaccatgcggggaagactcaactacctaaggtggaactgcagacaagacgacgacgtaacacaagaaggacacatgccgaaatgatggacagacacgagcgacatgagaagcacaacatgcc

SEQ ID NO: 94946 - DNA, 259 bp, Glycine max
  unsure (1)..(259): unsure at all n locations
  Clone ID: PAT_MRT3847_56748C.1
ctcgagcctctcgagccggattaatgcatttagacattttcctcttattgtttaccctgatgaagttaaatttattccattctttatctgtgcaatcaccatatcagagacctttttgcaatcttaatgatagttccagtaaatgagcancacaatttacaaatgctgggataactgaatgtactgaagttttgctttgaagtttaaaagtcattaagatttatttataaaaagggaaacccttggtgcaacaatgggg

SEQ ID NO: 94947 - DNA, 1386 bp, Glycine max
  unsure (1)..(1386): unsure at all n locations
  Clone ID: PAT_MRT3847_56749C.1
gctttccttatcttttccgaatccgaggagtggcagtagtgtgtggtttttcacaatcattacctcgtttcagctcaattttgttaattgggcttccattcattaaagtttacaagtttgcggctttcaaacgattatatggggagttgtgtgtctaagaaagaacaacggaaataaattttttaagtgtgtcttcgtgggatagctttgtcaactttgtggagccttaatgcttctagaactttgaaagcattggtaagcaagttgactgagaagtttcatgtttctaatgcttgtanaatcatgctaaggataatgattctgatcatgatgtggattttgctgctgggaatgtgaaacttattaccaccaaagaagcgtgggaccaatctttggaagaagcaaggaggggtggcaaaattgtgattgcaaatttcagtgccacatggtgtggtccttgtaagatgattgcgccataatacagcgagttatctgagaaatacacatctatgatgttcttgttagttgatgtggatgatctaactgacttcagcacttcatgggacatcaaagccacaccaactttcttctttcttaaagatggacaacaacttgacaaacttgtaggagccaacaagccagaactgctgaagaagattgttgtcattaatgattcgcttcccgaatataagcagtgactgttttctcattcatgtttctgtgccctttgtcctttcacaagtcacaactagttttctacatgcttttttttttttttttttgccgtgagtgtcgttgcattttccctcggatgtaaatataagacatggcacatgaatttctccaatccaaagtgacgttgctgtatttagaaaaagcctgttttgcaaatataaaaaaattgttgtactttgttgtttaaacaaattcaattttgtgccatgacatttggctcaattaccttgtccccttcatttgtttgttttgaattaaaagtgatcacaaaaactaaatacaaagagaaagagtgagagatcgttgacctacttgatggtttgtagcaatgcatagtatagtgtatagattttttttatcagttgggctaactgatgttgcactccttgtttgccctcactcctaaaaaattcttgatctatagtaaactaataatgatgcattcgattttaaatttctgcatattaatattacgatattttatactaacatgaagattaaatataaagctatctgctcattttaaaacaggataatgtgaacttaatttttatttaatatttttttactactttaattttaaagataatataaatattaatttaaaataaataatatagtttgatagaaaagaaagagagatgggaagaa

SEQ ID NO: 94948 - DNA, 337 bp, Glycine max
  unsure (1)..(337): unsure at all n locations
  Clone ID: PAT_MRT3847_5674C.1
cgacggcagacaccaaaccgggactaaacacgagaaaaacctcgctcngacagaagaggaaaagacggaggcgaccagaaacagaggcacccccgcagacgcccccgcaaagcgagcccacgaatccgaaaaacacggcgcncacgaaagcccgaaggaccaaacncccgccgccgacaaggcgcaccccactaaggttaataagtttgcaaagattatgaatcttagacaaagtgttggtggggatcttaaacttcttactgatgggaagttgtatgagggtaagccattcctgttttaatattagggcggggaaatcatgtgttaaatcccctat

SEQ ID NO: 94949 - DNA, 1000 bp, Glycine max
  Clone ID: PAT_MRT3847_56750C.1
ctctcgagtctctcgaagggggcttcagaggaatttggattcatcacaccaagcgactctgcatcaaccggaagtactttaatgcctcagaaaaagaatccagatccgatggaacttgttcgagggaagtctgccagggtcataggggatcttgttactcttctcacattgtgcaaaggacttcctcatgcttacaaccgtgatttgcaggaagacaaagaaccagtgtttgacagcgttaaaacaattttggggatgcttgaagtatcagcagaatttgctctaaaaattactttcaatcgggaaagaatacaaaaggcattacctgctggtcatcttgatgcaaccacactagctgattatcttgttaacaagggtgtgccatttagaacgtctcacgatatcgctggaaaatctgttgctttatgtacgttgaagaactgccaactgctggacttaagccttgatgagctgagaagtataaatccagtctttgaggaggatgtgtatgaatttcttggagtagaaaatgcgattaagaaatttgtctcttatggctccaccgggtcagcatgtgttgccagccaacttgattattggttgaaaaaacttgaaatgaagtgaagattaccctactgtcatgaaattctcatcgtgctagggaagccaattcctaaaacatggaataatagctcactgccttgccaaagttgctggaacacgtaattctggaatcaaccaagatgatacctttgagtatttgaagcgtgcgagagcattagttgttatatgcaaattagtcagggttatgtactttcagaatcaaatgtgccatgccgtaagttatgagttttttgcattttacattacctcctgttcgactgtaattttagcatgtcgaatgaattttgtgtagcttttaatgaaataaactcatctttagcacccatacggctagagttgtgatgtgttgattggaaaaaaagaaaggttaaatttt

SEQ ID NO: 94950 - DNA, 701 bp, Glycine max
  Clone ID: PAT_MRT3847_56751C.1
ccacgcgtccgcccacgcgtccgtacggctgcgagaagacgacagaagggtgattatcttgttaataagggcgtgccatttagaacgtctcacgatatcgctggaaaatctgttgctttatgtacatcgaagaactgccaactgctagacttaagtcttgatgagctgagaagtataaatccagtctttgaggaggatgtgtatgaatttcttggagtagaaaatgcaattaagaaatttgtctcttacggctccaccgggtcagcatgtgttgccagccaacttgattattggctgagaaaacttgaaatgaagtgaaggtttctttaattgtcatgaaattcttatcgtgctagggaaaccaattcctaaaacttgaatgataactcactgcattgcgaaagatcctgcaacacgtaattctggaatcaaccaagatgatacctttgagtatttgaagtctgcgagaacatcagttgttatatgcaaattagtcagggttactgaataggtagtttcagaatcaaatgtgccatgccttaagctatgagctttttgcattttacattaccaccagttcgactgtaattttcagcgtgccgaatgaattttgtgtagcttttacccaaataaagttatctttagcccccaaaaaaaaaaaaaaaaaaaaaaaaaaaaaagcggccgctctagaggatcca

SEQ ID NO: 94951 - DNA, 111 bp, Glycine max
  unsure (1)..(111): unsure at all n locations
  Clone ID: PAT_MRT3847_56752C.1
ggaaacctggtggtggtggaaggccntctggggatcttcncaaatctgcattnaaagcnncactttggttccattacgaaaaattccttgcatgagttccaagactgcctg

SEQ ID NO: 94952 - DNA, 410 bp, Glycine max
  Clone ID: PAT_MRT3847_56753C.1
cacttaattaatggtttataggtatgcttcaaaatcagcttatgcggtcgtaggattggcattttttgacggggagcaggggattcaaatctaatcctcgaaacgccgtgctcatgcttaacttattgccacgccttagtgtctctggtgcattcccacacgaaacatcgcgatatctaatataacaggcatctatcctacatcagcgtgaacaccaaaaacctactgtatcttctcctaatactatccagatactatctcttttacaatcacctcttcttcctctaactgaattactcccttaccacactttttcaataacccttcttcatcaattaacgagggcctctttttaaaggcataaaatttttctatcaccacccaggaaacgtttattatcttcctttgcc

SEQ ID NO: 94953 - DNA, 343 bp, Glycine max
  unsure (1)..(343): unsure at all n locations
  Clone ID: PAT_MRT3847_56754C.1
caaaccgaccacgcgtccgggcggctctttatctcattcttcaaccctttagtaacataacaccaaaatccacnaagtcggctttttttaacaaatcaacactcccccaccacacataaatactgtcaaaaccaacacgaaacaatctaataatgaagcaaaaaaaattatataatcgatttcctacaattgctttatagatattttaaaaactttattactttacatacttaatcaattctaagcatcactttccaattttataaacgctaaaacatctgtatacatcatcatatattccaagctttaatttactgcggtttaaaataatatcaccaataca

SEQ ID NO: 94954 - DNA, 813 bp, Glycine max
  Clone ID: PAT_MRT3847_56755C.1
gtctttgttcacccctctctccataccagggctcactcctctctctgcggtacttactcctctctctcggtctctcctcagaggtttccagaactcctctctccagtaccagcactcactcatcagtctgcggggactctcttttctcagacgttccaagaactccgatctcgacccatagtctcattcccttgcgatttcgacccacactctcgttgtgccacggtgtgttcattttttttcgttaatttgtaatttattttttatttagttgtttgatttcattagttttgtattgtgggtactcattgtttgattttgttaatttgtattgtgagtatttttgcaaatttgttaggaacagaccttgcactgtaggtgcttgtgtttattataagaactttggtttcttcactttgtatttattcttccctgtgtttattcatcaagctttgtaacccacccatgcctctaacttttggacagatgtaagtaacaaaagatgttgatatttgcatatcatcaatatcaatcatggtagttatatatttctagttgttgcagtctgcagcactgccttttaccttattatgttctaaaatgcttccttatagatgaaaccatagatagaacatacttaattctttgatcctacaatccttttgatttaaaaatttaactataaaacatcttgatcccattgatttgattattcaattgatttaattattcatttgattagttgtaccaaattaaaaaattaaaaaatcttcttaaatgtcttctctttcttcatcactgaaagtctaagaa

SEQ ID NO: 94955 - DNA, 309 bp, Glycine max
  Clone ID: PAT_MRT3847_56756C.1
tcggcaaaaacggcctcgttcaccatgacagcttgcattcttggcaacccagacgtcaccgaccggtcgggcgtcgcaacgcacaggacatcaatcgtcatgaatgctgacaaatctgtgaagcatactaggtcacctgtgactatgacatggatcgcaacagcggaaggaagaacctgatgttcactcgcagggacgcatgttgcatgcatctgaagctgagataggcgaaggacgacgatcctaaatcactaacccgagaagccatgaaaaagtctgctccgatatgtgtgaccatgccaactgcta

SEQ ID NO: 94956 - DNA, 126 bp, Glycine max
  unsure (1)..(126): unsure at all n locations
  Clone ID: PAT_MRT3847_56757C.1
gaagcacgcgtacgnnagctcggnattnggctcgagctgnacttggcctgnngctnnttncccttncccggtnagatactcgcncccgaagtttgntgcagntcatcaaacnccngaccctaaatg

SEQ ID NO: 94957 - DNA, 225 bp, Glycine max
  Clone ID: PAT_MRT3847_56758C.1
ttgaacataaacacattgcatttagataacaaatatctcgcaataatataacaaccactaccaacagaagcggagtggttgcttaacaaagcgccaaatttactagacgagagggaatggcctatcacagttctttgtggcggcggacaaacagcctataatctaattttttttaagcagtgcttaggattccacttgtccaaaataatgggtgaaagaccgcct

SEQ ID NO: 94958 - DNA, 409 bp, Glycine max
  Clone ID: PAT_MRT3847_56759C.1
ggcactgtacaaccacgtcagatcgagaatctctctcttcaccaaatgcacattcctcacttcccaacaatccactctccaacgatccctcattacccctttcattggcctcacctgcagaaattacaccgacatgccaaaacaaaaggaaaccaaatttaaagtccctctaactttagttagaggttcagaaaactatacctctactttatatatgagatctgggaaagccaatacagtgaaaaaagttaacactaagctgcggcaatttagtcacacaggaaataataatcccatatggggacagtttataagggactgatctataactacaaatattagacttaaagtggtccacgatatttgtaacaaagccaaattttggaatatgacaaagaacttcctatta

SEQ ID NO: 94959 - DNA, 195 bp, Glycine max
  unsure (1)..(195): unsure at all n locations
  Clone ID: PAT_MRT3847_5675C.1
tcgcangcangcgtacgtaagctcggaattcggctcgagnngctgcngagaaactntccgctcacaaatccncagtagatnggannggacgaaatcagtganaatgagaagaanggattnattagnncncgtcangngntatnttagtggcggaggnngnangnnganangtgnnngntgnagangnntatggtc

SEQ ID NO: 94960 - DNA, 310 bp, Glycine max
  Clone ID: PAT_MRT3847_56760C.1
tgaagccgatcgagtacgcccacaagaatactacacattggcacatactattaatatataattccctcttcccgggatcttatcctccataccgtggctatccccctctatgataatgcttcgtcattaactcgcttgaatccaaagaaatcctgcctaattatctgaccttctacagatatatacatagatctaggacgcactaccaccatatcgtaacccactaccattaatccgatacgaatcaacgacatcctcatataaacaactctaacgtgccttgactaccacatccatatccgacgccatc

SEQ ID NO: 94961 - DNA, 287 bp, Glycine max
  Clone ID: PAT_MRT3847_56761C.1
ggctcgaggaacaaaccaggttacagtattgaggctgcccgtggggtagctcatggtgacccatgaggccatacttatgatatgggaggaggtcgatggtaatactggcaggagaagatgtgatccgggcatagaagctcctagtaggaagactgatggcacactaagagctgcggcggggaagccttcccattgagagcttatgaggactccaggggtgattaactctaagatactgttatctgcgggtagagagaacatggtgaactgtacgtgtgacggacttg

SEQ ID NO: 94962 - DNA, 310 bp, Glycine max
  Clone ID: PAT_MRT3847_56762C.1
tacgcctttattgttttacttaatggacaatggctgatttaacaatgactcaccacgggtagataattgtaatacttcaatatatctatggacgccacactagttacacagctacattgaatgtaaagtaacacttagcaaaacagcattcaagaccacttattaaacaaatatccgaacggtcgatgaatcgacagcagcttatatacctaatggtgtagcatctgaagcctttttcctgaaattcacagcaggactctttaactgggactatgatgcaaattatgatgcataaaatagccaagattat

SEQ ID NO: 94963 - DNA, 248 bp, Glycine max
  Clone ID: PAT_MRT3847_56763C.1
cgctagcgaccgccctttttttttttttttttctatatgcctggggcgaaaaaaaaaagccgggctctccaaaaaaacaactactactaaagatacacattttccccctaacacacaatacattttacttctaactttatctcactatctcacacatccactaataataaattaccacatatcatcacatctaccacctttcattattttcattataactctcacttcctctttaacctttttatcct

SEQ ID NO: 94964 - DNA, 532 bp, Glycine max
  unsure (1)..(532): unsure at all n locations
  Clone ID: PAT_MRT3847_56764C.1
atttgctatgatgaacatggagatgcatgtgactgctccaatttccttgatgtggactggctttcttcttctggaaattcttgtgaagaggaattgcttgaaaggtcaaccagcatctcctcggagaatattgcgaatgaactaataactactgagacatctgcaagtgaatctggctccagcattaaggtcagtatatgttgttagttgcagaatatcattacagaataacataatttgcttccactaaggaaatatcgttgacttgtagttagttaagaagaaaaaggcctttctgtatttcttttaagtcctatgaataagtatcaatgacacaattacttgtgaatttgtggtcagaacttagaacatctacttgacaatgcaagtattgggaatctagatttggttgtcctagtttcagcaattgaagacctcagtttttatccacangttctctacanacttcagcattaaatactttcagtatcaaattgggtatgtacatttgttngtctaaattcaattttga

SEQ ID NO: 94965 - DNA, 587 bp, Glycine max
  Clone ID: PAT_MRT3847_56765C.1
aagtaaaaaatgtctttaatcagaaaggatttctatttcctcaccacaaatacattaaagtaaaaaaaaaaaatacacataaaacatacatttatacaaattgggaatcaggggaaagaagcagagcctgggttagggctgaggatccggagcaactgggggatggctagtcatctgtggctctgggtgtcctttagtcatctctctgtctgtggtaggcaggacaggcggacataggatgcaactccagtctgatggcagtgttactggcaaactgtggcaacgaggctcctcgccaggcagtttcttcagatcaccagggacgacaggagacagtggagttggtgggaccggagtgcccggggcaaaatgggtgaagggctgtcctcctttctggaggacaaggatgacaccaatgctggctccagtgcctatggggctgtggccagaggcggagccttgggagctgaggggagggttacaaattggagtgctatgaatccaggtgaggttcatagctggccatccagtgagatgccaaggctgctttggtttcaaaactaaatgtcccagctgtgtttggccca

SEQ ID NO: 94966 - DNA, 391 bp, Glycine max
  unsure (1)..(391): unsure at all n locations
  Clone ID: PAT_MRT3847_56766C.1
ggctggaacccggctagtccgcttgttcaacagcaaggatanaatagacgagaagaccctccagatncagatagttcaagttgtagaagaggaaaacacatgcgtccttctatattatttctctttcctcacgaaagagacaaactgctaccagctatgagacaacagtcacttcaaggaaggatccaatgtccaacggccacttaaagttatagaaattctctggataacattattcatgttctaaacgtgacactctttgcttagcaaagtcatctaattgtattcaaactaaagaatttatccactctttggagtgttgagaatctgaggatccattgccaaagctttgaagttcgtgaaagacacgagagatatagcgacactcaat

SEQ ID NO: 94967 - DNA, 190 bp, Glycine max
  Clone ID: PAT_MRT3847_56767C.1
cggctcgagataaacacataagttcctatgtgaatacattttaaaaaggagttaatttttacaaatcatttgaatcatagtgaaactccaacatccatgactttaattacttcatgggcattcggcatggctaaagacaattaatgcacactactttgcaaatttgacccctaaaaaatccccccttttt

SEQ ID NO: 94968 - DNA, 509 bp, Glycine max
  Clone ID: PAT_MRT3847_56768C.1
atattaaaaatgattgaggatatgccaaaaagataaaaaataaattagggaaaacaggaaaggggaaaaaaaagggggaagggggggtggttttaacaataggggacagagcaagctaagacaccaaaataggggagacacagggatcgaaacaacccaatatagagaaaaaatttctttggcggatgataatataaagcaaaaccaaaagacaaggaagattcaacaaacttataccataaactagaaaagttcgatggggaaaaaaaaaagcggaggaacaaagaaatgaaagggctggcttcacctaaaagaacttacgggtcatgagcccacagacaggggtcacccacaagaagaacttctggagcacggccagcaacttggggattccggcaacaaattcttcaaaaggggggattcttggggaggggatggcatagacaccagggccaattgcaggaccatactggacacctttggggaagacggacagaaacttctcgggg

SEQ ID NO: 94969 - DNA, 1996 bp, Glycine max
  Clone ID: PAT_MRT3847_56769C.1
attcggctcgagaatgacaacggtagctgcttctcttgatgccaaagaggtgtctacctccaaaactgaccaaaaccaagtgtgtgactgtgatccccaaactagccatgtcttcaaatcaaaattaccagatatcccaatctccaaccacctccctctccacgcttactgctttcagaaactatcccaattctccgaccgcccatgcctcatcgtcggacccgccgccaaaacctacacctactccgagacacacctcatttcacgcaagattgccgccggattgtccaacctcggaatccgcaagggcgacgtggtcatgatccttctccagaactccgccgagttcgtcttctccttcctcgctgcctccatgatcggcgccgtcgccaccacagccaatccgttctacaccgccccggagatcttcaagcagtttaccgtctccaagacgaagctgatcataacgcaggcaatgtacgtggacaagctccgcaaccacgacggcgcgaagctcggcgaggacttcaaggtcgtaaccgtcgacgatccgccggagaattgcctccacttctctgtcctctcggaggcgaacgagagcgacgtgccagaggtggagatccacccggacgacgcggtggcgatgccgttctcctccggcacgacgggtttacctaaaggagtgattctcacgcacaagagtttaaccacgagtgtggcgcagcaagttgacggagagaaccctaacctctacctcaccaccgaggacgtgctcctctgcgtgcttccgctctttcacatattctcgctcaacagtgtgctattgtgcgccctcagggcggggagtgcagttttgttgatgcagaagttcgagatcgggacactgctggagctgatacagcggcaccgagtgtcggtggcgatggtggtgcccccgctggtgttggcgttggcaaagaatccgatggtggcggattttgacctgagttcaatacggttagtgctgtccggagctgctcccttggggaaggagctcgaggaggctctccggaacaggatgcctcaagctgttttgggacaggggtacgggatgacagaagcagggccagtgctgtccatgtgcttgggctttgcaaagcaacctttccaaacaaaatcaggctcttgtggtaccgtagtcagaaatgcagaactcaaggttgttgaccctgaaactggtcgttctcttggctacaatcaacccggtgaaatttgcatccgagggcaacagatcatgaaaggatatctgaacgatgaggcagcgacagcatcgaccatagattcagagggttggcttcacaccggtgatgttggctacgtagatgatgatgacgaaattttcattgttgacagggtgaaggaactcatcaaatataaaggcttccaggtgccccctgcagaacttgaagggcttcttgtaagccatccctccattgcagatgcagctgttgtcccacaaaaggatgttgctgctggtgaagttcctgttgccttcgttgtgagatcaaacggctttgatctaactgaagaggctgtaaaagagtttatagctaaacaggtagtgttttacaaaagactgcacaaagtttattttgttcatgctattcccaagtctccatcaggaaagatattaaggaaagacctcagagcaaagctagaaaccgccgccactcagacgccttaaaggctagctagaacctgcccccttttttcttggcaatattttccttattttttatttatattattggtttcacacgtgtaatttacgtatcaatgcttcacggcattaagccaatccgagaagcagttgcacttacgtataatcattgtatttttatgtccattgtccaccaccatgcctgtattgtggttttagatcactaattttcgagaccttgtattattggtgttatcaaatcctttctattcttcaaaaaaaaaaatttttaactcg

SEQ ID NO: 94970 - DNA, 513 bp, Glycine max
  Clone ID: PAT_MRT3847_5676C.1
gccgcggtgtcggacggcgggagagagacggcgacgtgcgacgtgacggtgacgtcatcgcctggcgattcgagcgggagtgccgaaccggtcgagagagaaccgatggcggaccggaagaggaagggaagggaacatgaggaatcggagtttcagagcgaggtgagtgagtcactgagtcgactcagttcatattttatttatttttggtttcacgctatgtatcacactcacaacacgttccatatgagttggtgttggctatcgtgcaccgggggagtgacgtgtttacatgagcacactcccttgcattcaattcaacgtctatgtgttaatttctcaatcatctaactttcggtgagtggacatgtccttggtgtcgtttctctatcgaaacccttaaacgcgacccggttgcataccgtgatgccacgtctatattgtaagattcaagaccttctaacccaggagcatgctggattggattttatggaccggcatgactcatcttcc

SEQ ID NO: 94971 - DNA, 401 bp, Glycine max
  Clone ID: PAT_MRT3847_56770C.1
aaagcacaaaaaactccgaaaactttatattattttacatgcgggcctagaaaaaaaaggccgctttcaaattagtcaggcggaacaaagatggggagatcccacgatctttaaatttgacatttgccctaaatatttaacaaaaaaggggggttgggaaatgagataaggtttggtctcattcaaatacagggtcccaaacctttacttttaagaatttggactttccttgtactccaggaaaatggggttttaaggggctaatccaacccaggcccttgggggggtttccagcataacttggtgttttgacggggcattaacccctggccttctccgtggaaccaaaggggccttggtcaagcaactggaggagggcccaaatgggtggaacgagggga

SEQ ID NO: 94972 - DNA, 422 bp, Glycine max
  Clone ID: PAT_MRT3847_56771C.1
ataattgctcattatttctagcatgctccttttctctttttgtctgaaccaatctgagagtgagaaagaaagtgaagcctgcctcgttcaccaagaaaatctaggaaatgataagaaaataattgttaatgttgtgattcaatattttgatgaagaacttaaaaacaatgttgtcttttaggctataaaattgaaaaaaattaaaaaaggaggtaagaaacaggtctaagtaaaaatcaacggcaatacggaagtgagactgcatatgaatgcattgaatttatgtgtccgatattgtccatctttttttacctttatgtaatggagagcccattaggttactgaattctactgggattcttgtagttaaagttccattgtgcttttatgatgaatataaaaaatagatgcacttttctggt

SEQ ID NO: 94973 - DNA, 191 bp, Glycine max
  Clone ID: PAT_MRT3847_56772C.1
gggtatgcgcgcgtactagagctcggacgtccgctcgagtgacgaagttgttaaaaaaatatgcacgaccatgcccatgcctaatggtccaataacaaaggataaacgcatccttcgttttctctacggtgacatagggataatgctactagcatgcattgccctagggatgtctatatacagagcgagga

SEQ ID NO: 94974 - DNA, 1418 bp, Glycine max
  Clone ID: PAT_MRT3847_56773C.1
cggacgcgtgggcgaccacttgccacttccaacccacttcaatgcttttgcagatctggtgcacgcgccgtcgttcgcttaccgacgtgtggagaggcagctcgagaatgagttacgtttgcagagcctctctgaccgcgtggcggagctggagatcttggggctattcatttttgtgcatattcggttttattatttgcattttatggaccggcgagtcactgatggcgaaggcggcgatgaactctcacgcgccggcactctactttgatcttattgtattttctgtagcatgggtggggtcctgtctagaaaaagtaatgttggtggtgctcaactcagttggctgagtctaattcttggcagtactattcttggcaatctccacattctttgagttagtttgtatcatcctgtatgcaatctacttcaccaaattgcccatagtgaaatattaccattcaaaagcagcattagagggataaaaaactgttgcagctaaccttgctgttgttggcattcaaacaaagactgatgatcaaggtggatatgatagcaaaaaagaagagcagttgagcaacaaacaattatttgttgagaaccatgattatgtagttggtttattttatatatttgtggtaacactgtcaatctttcctggatttttgtatgaaaatactggaacacatcagttaggcacatgcaaaatatggtgaccaaggatggatgattctgctagcctccttcttgggactcaccaatggctatctcactgtttgtgttctcactgtggcaccaagaggttacaagcttaagccttttggagaagctgaaggataaaaaaccctttggaagaccaaaattctgccatataaccataccattgagtaaggctctggaaatgcaaggcaaacaggttgatgctatggtggaactgtcaaagatatgccttcttctacgaatatttcctcctgaggagtcttagttcttaggttaattcttaaagttaagaattgttcttaacttggttcaccgttgaaggaggatgacatggatgccacatgcaaagtcggttcttacttcttaaccattaaaaaataattaagaggtaatttgtgagacccattttaaaggaatataaagatgtgggataacttgtgagacgcatttgaagttcttaaaagagttttatcatttgagtgaaaagtcgctaaacttaaaattgatgtggcatggtaagactaggacccataaaagagttatgaaccccccctatggtgttcactattggaggatgacctcgtcattttcactaagaactctatggatttgtgttttgttttaccttaactcctttggatttcatttatattttttgaatatttatacattgtttactatggtagagctttattttc

SEQ ID NO: 94975 - DNA, 212 bp, Glycine max
  Clone ID: PAT_MRT3847_56774C.1
tctcgagccgattcggctcgagaattttcaaggaaaaagcatcatagtgaaaaaatgtcagagtccaaggatgaaaatccagaccttcctcccaagtcaaagccacaggaggaacatggttttgccatggatttgacattagcctggaaagtctaaggccctcggatcatatattcctggtctctaaccccatgtctccttttctcttttcc

SEQ ID NO: 94976 - DNA, 342 bp, Glycine max
  Clone ID: PAT_MRT3847_56775C.1
agagcttgacctcgatgcaccccttccttagcttcggatttcgcttgaggccaaagcctttggtactttattcccccagggagggccctaagtttctctctcttcaacttaaaagttcaccctcacccctcttcttcttcttcttcaacccttccggaccggggcggtttttccagggtccaccaaaatggggggctttcggttaaccggggttttttcccccagggcttaccttaggggggggggggggtaaaaccaaggccccttggtgggtttcctaatcaacccccatggaaagggggggtttaaagagcttaaaatttaaagggcccacctccttgg

SEQ ID NO: 94977 - DNA, 1518 bp, Glycine max
  Clone ID: PAT_MRT3847_56776C.1
ggctcgaggtgttgccaagaacgtgaaatggacggctgagatcacgggaaaaggggagaagagtgggagctcgaggaagtacacgtttcaggtgcagagtggggatgctgagaagaaaaaggagaaggagaaggagaaggagaagaagaagggaaatggatcgcgcattgtggagattcacgagccaagtggtcatagagatgtggttttgagacaggttgggtagctttcacctcccttgcatttgccaagaggtttggagctgttcaaaatgagaggggcaaaaagaaggacctgtctcctcaagatgctgccttgttgatccagatcagctttagagcttacttgatccgtaggtcaaaggctctccgtgcccttagagaactggccattgcaaagtctaaattaaaggaaatcagagcccagttcaataacttttcctaccgacgtcatgtagctcgtgatgcggaggaacgccagcggttttctgagaaaatcattgtcttgctcctcactgttgatgccattgaggtagtgatctccatttttggatctttctttgtggaacagattgaactttttccacaatttttgaactgctaaacgtcatatcaaatgttaatatattagtaagtctgtaatttacttttatagtccagacagcacaatataacctagtagaaaacatgtatatatagatgagtttgaatattcataggtagctgacgtcgtttttatcgttatctttactaccttatttaacagttatgcaagcatcccggacactgtttctaatatacatttctctatatttggttcaggaattaggcatggaagttctcttatttctatagaattttaacagtgattctgatgatgtgaatgaaaatacagttattaaaaattcgagtcactaaaaatcaactcattctaaaccaaatgggcatttatactttatctatttagtcatgttttactagccaaagaaacgggaaggaactgcataccagtcagagtaaggagaaatacttgacagttgcctaacaccataaaggaacagaataccaccatttattggtttttctaacagagttgctcatttcctgtttcctagggatctgatattatggtaagatctgcgaagaggtcaatggtggatgagctggaagcaatgcttgatgtggtagatccccagcctggtggaagatcagcatcgctctacttcaaaagaaggacatttgatatgcctgatggagtcatcaggaaggaaatagaagaaggggttgcacaggttgtgcaaatgcttgaagaagcagagaatagtagtgaagcatgaccgtgagatcaagaaagtaatatctatctgtttatttcgtgttttccttctgctgttgtagtttgtttgcagagacgtattttagtctaagatttcaagacttctaaattaggctttccatccaatggtatttgttttgctgaacttttggcactttctgaacgaaaagattggcttgtgtt

SEQ ID NO: 94978 - DNA, 234 bp, Glycine max
  Clone ID: PAT_MRT3847_56777C.1
gtctgcatcggcgaaagagatccagtgcaaccaaccctgaacagacggctggtgctgctgccttggctgatacaatgaccacattctactgtacgaacaaccagagttattggatggtaccattcacaccctcacattacagttctcccttaccatgtttatgtgccgactcacgcaatgcatcaacttcttgatgctggagttattgggttgattgtttgcatggacactgag

SEQ ID NO: 94979 - DNA, 1757 bp, Glycine max
  Clone ID: PAT_MRT3847_56778C.1
tttttaaacacatctctagaaaataaaaattaaagaatgagattcagggccaaaacagaagtacaactgttcaagcatctgaccaaggtctaaaacataaagggtgccttatgcgggcagcagtctgaaaactaaaagtctacataaaactgtaagaaaatgccctacagttcttcagggccccagagaaaaagaagggggaaatgaagaaaattgaacaaataaaagaaagcatagatcataaaactgctcttacggaaggaggccttccgaaacacatctctagaaaataaaaattaaagaatgagattcagggccaaaacagaagtacaactgttcaagcatctgaccaaggtctaaaacataaagggttgccgccttatgcggcagcagtctgaaaactaaaagtctacataaaactgtaagaagaaaatgccctacagttcttcagggccccagagaaaaagaagggggaaatgaagaaaattgaacaaataaaagaaaacataaaattagacatggctttctttcactagtcaagtcatctgcactgcactaatggcggcctactggttgcctcaggcagctgcttgaattggcccattggatcggaagccacgaccccttccacgatatccccccctgccacggccacgaccacggccttgaggtacatcttggttgtatcctccatcttgcatgtcaacatggggcccattgtaccctccccttccacgaccacgaaagccacgtcctcttcctctacccctgcccctagcatttcccctattgcgatcccaacctccatcctcataatcagctgaaataaagccattacctctgccccttcccctgcctcggccaccacgaccatgagcacgaccattgggcgaaccctctccttcataatcaaaatctgtggcagccttcacctggtcagctggtaatggaggctgataccccacagatgatgtatcaagttccttctttgaaagggttactgttatcattgacacatgcctcgttgtctccaaaggaaggaggccttcctctaggggctcccaagtatcagtgatatcagtggatccaattgctgtattctggtggaggcccacaatcctcctcttgatcaactccacaattgtcacggttttgttgatagctctccccattgctttgaaaacaatttcattagaacctttctcctgaagcaagctcatggcgtaagtaatgtagttgcgcatccttccctgactagtaatccggatctcgttttcatcgattggagtttcagctcttggcttctccaccttctggtaccgatccatcgcgatagctaaggatagagtttctttccttcgcgaacaaacacaaaagagcgagccctcttctacggctttgtattttctattgcgccctctcattttgaacagctccgaacctcttggcaaatgcctgtctcaaaaccacatctctatgaccacttggctcgtgaatctccacaatgcgcgatccatttcccttcttcttctccttctccttctccttctcctttttcttctcagcatccccactctgcacctgaaacgtgtactttctcgagctcccactcttctccccttttcccgtgatctcagccgtccatttcacgttcttggcaacacccttcagcaacctcttcttgttttcctcctcttcctcagcatcccacgtcacgttcctatccttcggcaccttcacctgcttcttcatcttct

SEQ ID NO: 94980 - DNA, 165 bp, Glycine max
  Clone ID: PAT_MRT3847_56779C.1
cccactcgttttgccacgcatgacgaaactgagggttgaccgacagcatgatgaacctgaaaccataaaaaggagggttgttggtcctcgccataaagaaaatgtccaaaatcatccggcaaatacacctccaggaatgaagaatttatcatgatatagacatga

SEQ ID NO: 94981 - DNA, 270 bp, Glycine max
  Clone ID: PAT_MRT3847_5677C.1
atcaaactgagtcaattcggttttgaattccaaccgctccacccatcttgattcctcttcccttcaccaaatcccaaagtttccaaaatcctcttttttttttttaaaagccgtctctcttacaatacaataagcatccccatgtctagttttcccaaaatctcatcatttccgcttggcttaacctctgttctctgatcctatcacacacacccttccatctttcgtccccctttgatttaattccaatccttaaaccatagtcattca

SEQ ID NO: 94982 - DNA, 417 bp, Glycine max
  Clone ID: PAT_MRT3847_56780C.1
aaaaaaaaatcattattttctaaaattttatttacaaaaaaaatgggatgttacatgcaatgagagtcaaactttttaaaaattatcaaattaaaattgtatgcttgttttgtattttgaattaaaacaattgcattcctgctatgtttgctgttgaaagcaccactcttgagtttgaatcattggtttagtctttcatgctaaaaaaaaagcatgggctgatttgttatgaagaaattggcttaattcatgtatggcattggaatataggttcttaagtagtatggttttttagccatattggatcttttgctataggcaaacaaaactttaagtttggaggagttgttaagtgcctaatacacgtacttttaagatactaattaagatatttttatcatcatttcttaaatttaa

SEQ ID NO: 94983 - DNA, 2463 bp, Glycine max
  Clone ID: PAT_MRT3847_56781C.1
ggacaaagtgatgagcgagcttgtcatttaaatgtttaactgtccaaatcatccatccttaaagccgccaaaatacgacagaagggggagctgacacatacaaacatccatcatcattattattttactccgaacgagttgacaccgattccactcactcaaccatgagccgattcaggcgttttgagctcatagaacaaccacctttcttccactcctgctactctttcccttccttcgtcctccaagactcactctctctcgacctcgacctcttgccacttcccagccacttcgacgctttcgcagatctggtgcacgcgccgtcgttcgcttaccggcgcgtggagaggcatctcgagaatgagttgcgtttgcagagcctctctgaccgtgtggcggagctggagtcgcggttcgaccgtgtgctcggcggagatcggaagtacacgtggacagcggagatcaagggagcggagaagaacgggttcgataggaagtacaagtgggttgcggaggtcgctgaggaggaagataagaagaagaagaagaataagaagaagcaggtgaaggtgctgaaggataagagcgcgaggtggactcttcagctggagaatgaggatgctgaggaagaagaggagaagaagaagaagttgctgaagggcgttgcgaggaacgtgaaatggacggctgagatcacgggaaaaggggagaacagtgggagctcgaggaagtacacttttcaggtgcagagtggggatgctgagaagaaggagaaaaagaacaagggaaatgggaatggattgcgtattgtggagattcaggagccaattggtcatagagatgtggttttgagacaggcatttgccaagaggtttggagctgttcaaaatgagaggggcaaaaagaaggacctgtctcctcaagatgctgccttgttgatccagatcagctttagagcttacttgatccgtaggtcaaaggctctccgtgcccttagagaactggccattgcaaagtctaaattaaaggaaatcagagcccagttcaataacttttcctaccgacgtcatgtagctcgtgatgcggaggaacgccagcggttttctgagaaaatcattgtcttgctcctcactgttgatgccattgagggatctgatattatggtaagatctgcgaagaggtcaatggtggatgagctggaagcaatgcttgatgtggtagatccccagcctggtggaagatcagcatcgctctacttcaaaagaaggacatttgatatgcctgatggagtcatcaggaaggaaatagaagaaggggttgcacaggttgtgcaaatgcttgaagaagcagagaatagtagtgaagcatgaccgtgagatcaagaaagtaatatctatctgtttatttcgtgttttccttctgctgttgtagtttgtttgcagagacgtattttagtctaagatttcaagacttctaaattaggctttccatccaatggtatttgttttgctgaacttttggcactttctgaacgaaaagattggcttgtgttagagctgtgttatttaactaacgactcagaaccttgttcatttgtacataggttatgcgatgcatcttatttctctgttcaggaaaaaaaaaaaaaaaaaaatagcatataaaaaatcttgggggctattcatttttgtgcatattcggttttattatttgcaaaatagggaccggcgagtcactgatggcgaaggcggcgatgaactctcacgcgccggcactctactttgatcttattgtattttctgtagcatgggtggggtcctgtctagaaaaagtaatgttggtggtgctcaactcagttggctgagtctaattcttggcagtactattcttggcaatctccacattctttgagttagtttgtatcatcctgtatgcaatctacttcaccaaattgcccatagtgaaatattaccattcaaaagcagcattagagggataaaaaactgttgcagctaaccttgctgttgttggcattcaaacaaagactgatgatcaaggtggatatgatagcaaaaaagaagagcagttgagcaacaaacaattatttgttgagaaccatgattatgtagttggtttattttatatatttgtggtaacactgtcaatctttcctggatttttgtatgaaaatactggaacacatcagttaggcacatgattcttgctgatcccagcattctacttcacagcaaaatatggtgaccaaggatggatgattctgctagcctccttcttgggactcaccaatggctatctcactgtttgtgttctcactgtggcaccaagaggttacaagcttaagccttttggagaagctgaaagataaaaaaccctttggaagaccaaaattctgccatataaccataccattgagtaaggcttttgaaatgcaaggcaaac

SEQ ID NO: 94984 - DNA, 562 bp, Glycine max
  unsure (1)..(562): unsure at all n locations
  Clone ID: PAT_MRT3847_56782C.1
cccacgcgtccgggaaaaggaaaaaaaggcaaaatgggtaaggatctgagcgatgagcaagtgtcttcaatgaaggaagctttctctttattcgacttcccccgattcctcgatcttatggccaaacacatgaaacccgaacccttcgatcgccaactccgcgacgccttcaaggtcctcgacaaggactccaccggcttcgtcgccgtctccgagctccgccacatcctcaccaacatcggcgagaagctcgagccctccgagttcgacgagtggatccgtgaagtcgacgtcggttccgacggcaagatccgctacgaggatttcatctccagaatggtcgccaagtaacgccgattcgattctctctttccagtgttcttttctctttctccgctattattgctttctcgtgtttgccttttcagtggaccaaccaatagattggttaatcgtcctgtgttttaaatttatggtttgtggctaaccgagggaggttntaggaaacggtggctgctcaatttgccctatttgcttttgggtttatttgtattattatgag

SEQ ID NO: 94985 - DNA, 560 bp, Glycine max
  Clone ID: PAT_MRT3847_56783C.1
attaaccctctccatatgttatcttaaattgattattgtatggaaatcttgggggttgaataatttatttcagtattgcaagctaatggtccgaaaaatccaaggaatttgtttcaggaatacgagtgaatagagccaagtcaagaacgtgttgtaccagaacataacgagtatataatttaattctacctcttcaattcaattgggtatgtctaattttcaggtggctatggaattttaggcaagatgggctcatagagctctttggcatgcttccttgtggcacatgcatgaggtaccacttgatttcccaatgcatttgaagagcttcgccaggaattagccaaggtttatagtctccaagtttggctgccaagtgcaatgcactgtttcccttgttatccacttttccaaatatattacttttctttagatttttctttttgagcaagaaaatatataagtaagtttgtctgttctctactgccaatagcactatattttttttcttggcatccatatcatgaacaacgaatggaaacgagtcaatgattttctct

SEQ ID NO: 94986 - DNA, 404 bp, Glycine max
  unsure (1)..(404): unsure at all n locations
  Clone ID: PAT_MRT3847_56784C.1
gggagaggagagcattttcatttttcaacttgagagaagaagagaaggggaaaaggaaaagaaggcaagatccgctacgaggatttcatctccagaatggtcgccaagtaacgccgattcgattctctctttccagtgttcttttctctttctccgctattattgctttctcgtgtttgccttttcagtggaccaaccaatagattggttaatcgtcctgtgttttaaatttatggttcgtggctaaaccgaggagggtttaggaaacggtggctgctcaattgcccctattgctttttcgttttatttgtttaatatgagatctgattctgagctagtctatatttgcatgctgtaattcaaaccaagtatttgngtatctaatcctttatttcttggttgat

SEQ ID NO: 94987 - DNA, 460 bp, Glycine max
  Clone ID: PAT_MRT3847_56785C.1
attcggctcgagcatcagttgagttgagagaaggaaagggaaaatgggtaaggatctgagcgaggaacaagtgtcttccatgaaggaagccttctctctattcgacactgacggcaagatccgctacgaggatttcatcgccagaatggtcgccaagtaacgccgattccattctctctttccagtgttattttctctctttctttcgcttttggttgtttgcttttcagtggaccaattaatagattaatcaattgtcttgtgtttactttttattttatggtgtgtggctaaccgagggtggttttaggaaacggtggctagctactcaatttgccctatttgctttgggttttatttgtattattatgagatctgattctgagctagtctatatatgcatgctgtaattcagaccaaaaaaaaaaaaaaaaaagggcggcccgcgactagtgagctc

SEQ ID NO: 94988 - DNA, 932 bp, Glycine max
  Clone ID: PAT_MRT3847_56786C.1
ggctcgagaaggtaggacaggacgcaattttccctctgcaaggtcgtcaacgccagtgacattacggctgcgagaagaccggccgctcgagggaagaagagaagattttcatcagttgagtggagaggagagcattttcatttttcaacttgagagaagaagagaaggggaaaaggaaaaaaaggcaaaatgggtaaggatctgagcgatgagcaagtgtcttcaatgaaggaagctttctctttattcgacacagacggtgacggtcggatcgcgccgtcggagctggggatcctgatgaggtctctgggagggaacccgactcaggcccaactcaaagccatcgtggccgaagagaacctcacggctcccttcgacttcccccgattcctcgatcttatggccaaacacatgaaacccgaacccttcgatcgccaactccgcgacgccttcaaggtcctcgacaaggactccaccggcttcgtcgccgtctccgagctccgccacatcctcaccaacatcggcgagaagctcgagccctccgagttcgacgagtggatccgtgaagtcgacgtcggttccgacggcaagatccgctacgaggatttcatctccagaatggtcgccaagtaacgccgattcgattctctctttccagtgttcttttctctttctccgctattattgctttctcgtgtttgccttttcagtggaccaaccaatagattggttaatcgtcctgtgttttaattttatggtttgtggctaaccgagggaggttttaggaaacggtggctgctcaatttgccctatttgcttttgggttttatttgtattattatgagatctgattctgagctagtctatatttgcatgctgtaattcagaccaagtatttgtgtatctaatcctttatttcttgtttgatcaac

SEQ ID NO: 94989 - DNA, 406 bp, Glycine max
  Clone ID: PAT_MRT3847_56787C.1
gcaaggcctggcacttgactctcacattgaaagtatggcattctaactatcatgactcgcttttgtggctcaaggttcttattataatctctgaattttatttctggttagcattctgatatattctggtccttttggatggatctgatacggataacctgcatttatcccaacatgcactctgactagtgaccatcatcgtagtagtgacgatgactaatgatgaaaattgggcttatggagccttctacttatgctctaacacttgcgtattctatgcgctatagatacgacaggcacgtatagtcttgataatgcaaaaatatttcattttggaatatacacatacaataccaacgtgataacactgacattctgtacttatatccacatatatccggatcac

SEQ ID NO: 94990 - DNA, 1297 bp, Glycine max
  unsure (1)..(1297): unsure at all n locations
  Clone ID: PAT_MRT3847_56788C.1
atgctatgctggatctgactgctcccagtttttatctgattgtcctgccaacgctgatggtggtgatccatattttatggagccattttggatgcaacatgcagcaagtagtgccattctagtatcaggatggcatagaatgagttattcttatagcgatggatcagtcatctcacaactattggttgagtacataaaaaaagttcatggcatcgttgggaatgcaatcaccgaaggaaagtacatcgtatttggaagtggctcaactcaacttctcaatgctgctgtttatgccttgtctcccgacccatcaatgtctccagcaaaagtggtagccacagcaccatattacccgctctatagagaacaaacgcaattttttaattctagggattttagttatgaaggagacacatccttgtggaaaaacaacacaaatagcagcttcagatttattgagtttgtgacttcaccaaacaatccagatggaaagttgaacaagggaattcttgaaggttctgatgtgaaatccatttatgatcgagcctattattggccacatttcactgctattccttcaccagcagacgatgatcttatgatatttacaatttctaagctcacaggccatgctgggagtagatttggatgggcaattgtaaaagatgaggcagtatatgaaaagatgttgacatatatggatatgaacaccatgggagtttcccgtgaggctcagctgagagctttaaagcttttggacgtggctcttgaaggagatggaaaagaaatattccaatttgcatattcaaccatgagagatcgttggataaggttgaaagaaatcatatctaaaacaaaacggttttctctacagaaaatttcttcccaatactgcacctttttcaagagggacagagacgcttcaccagcttacgcttggttaaagtgtgagagacaacaagacaataattgctatgaaatccttgaagctgctggcatcaatggccgtgaaggaagtctctatagtgccgataatcgttacgtgcgtctcagtctcattaggagccaagatgattttgagatactcataaacaagctcaaaattcttgtttctaaggaatagaccaaataaagaaatatcaatattcaatgtcatattatcaaaatatttacgtgcataataaaacattctgaaatcagttgaatcattgtcgtttcttgtataaaaataatatgggttctttgtattaaatcaatgctaaatgtattgctcnnnntgtaaaaaacgtgatataga

SEQ ID NO: 94991 - DNA, 1153 bp, Glycine max
  unsure (1)..(1153): unsure at all n locations
  Clone ID: PAT_MRT3847_56789C.1
aattcaaaaaaatccatgagaggagagagggaagaagagaagattttcatcagttgagttgagagaaggaaagggaaaatgggtaaggatctgagcgaggaacaagtgtcttccatgaaggaagccttctctctattcgacactgacggagacggtcggatcgctccgtcggagctggggatcctgatgaggtctctgggaggtaacccgacgcaggcccaactcaaagccatcgtggctgaagagaacctcacggcccccttcgacttcccccgattcctcgatctaatggccaaacacattaaacccgaacccttcgatcgccaactccgcgacgccttcaaggtcctcgacaaggactccaccggcttcgtcgccgtctccgagctccgccacatcctcaccaacatcggcgagaagctcgagccctccgagttcgacgagtggatccgtgaagtcgacgtcggatccgacggcaagatccgctacgaggatttcatcgccagaatggtcgccaagtaacgccgattccattctctctttccagtgttattttctctctttctttcgcttttggttgtttgcttttcagtggaccaattaatagattaatcaattgtcttgtgtttactttttattttatggtgtgtggctaaccgagggtggttttaggaaacggtggctagctactcaatttgccctatttgctttgggttttatttgtattattatgagatctgattctgagctagtctatatatgcatgctgtaattcagaccaagtatttgcgtatctaatcctttatttcttgtttgatcaaacccgtgtttctgatttcgagcgaagtggaatgaggaagtagagactagagagagggcgctgctaggtacaaaattatcaaataataatcaaaccctactccgtgtaaaattcgtacactatataaatgtccgcatgcctgttggatttcttgttcgtttgaattatgtttgaaagtccggaaatgaattatttgaaaggcatttcctcccgtttgctgcatatttttctagttgcatctgacttttcttgnttaaggaagagtgaaatgcataccactttccttagaaaaataaattattatantaaatactttntttgaggaaatttatc

SEQ ID NO: 94992 - DNA, 738 bp, Glycine max
  Clone ID: PAT_MRT3847_5678C.1
gtgcaacatctaatttgatgacattcagagattacatgacatctccccaaggaaaaacgctttctctcccctataggacaatgtcaagatgaataaatcagtgcttgaaaagcaaaggtaaggatccatcagtctccattaaaatttgccatccccctttggtgatgttatcttccctccaattccggcctgtcgcatcatctctgaaacatactactgtcatgttctaaaaagatactcattttaaaattcatataactaacaaaaatataggggccaatatagagcaaaacaaaaacaataaagggataaattaaggatttaaattcagaaatagtttaaaattaatttaacccaggataaaatttaagataaaacctaatgtcagcaaactttaatgtacaaacacatgtgccttgcagattgcgtttcaaatagaatatctggatttgattttctagcaaatctaaggaaagaaaatcagcccagacgattcttttctagcattaaaaagaaggtacctgctttaacctttagactttttgtcaaattacctggctaaagttttaattttggcaatttacttgcgtcaacttttatcatttattcatccaaactctttcccaacttttggcaaattaccaagactcaaacaaggtactgaaggaagcatttggttagaagaaaaactaaacataatgacatgtttggtattaacgaagtaaaagctcgagccga

SEQ ID NO: 94993 - DNA, 245 bp, Glycine max
  Clone ID: PAT_MRT3847_56790C.1
ggcgtccggccagctctaccgtggctttacatattatgtcttgtaatcatcatatcgggactcgctactttggattcgacgatgctgcacttccattcatggcttcaagggcaatgcttgatagcattgggggccactctggcccttggattggtatcaccactggtgcttgatcctgcctcatagcctctattgactccaagtttaaggctgatcatggctagaatccatgctaaggttttaac

SEQ ID NO: 94994 - DNA, 924 bp, Glycine max
  Clone ID: PAT_MRT3847_56791C.1
gcacgagctcgtgccgaattcggcacgaggttttaacttctgatgcaccaaagcagtgtcacacagggatttgaccatctgtataaagacacttgacttcctggttgagttccttgtgattccttttaaggtgcaggtcaatttggtgaaagaattaactagacactcaactgaatattaaaaatgatcagagcttcacttcgtcacgcaaaggaatacacaataataaaaggaatggtggcgtaaaagtgctagctagtaaaagctgagacaaccaaattgatattcacatgaagaaacgctgttagttactcttacaagcatcgcgctaacgttcgaagagatcatgtattgtacctgttatagcactatgtcttcattctagttatgaaatttccattttccatgtacatcgtctactaactatatttgattctgactgtaactaggagaggtctatttacacagcttcacaattatttcactaccaaatatgaaaattctgggtagccaattatcatctatgtaccattgttcataccgcactactattccatcttcgcctcagctggtgctggttggggtcaaaagtctgccgctagaaaccttgcacatgagggtgccagggacttgatcgcaatttctcttcaatgaaactatcaactagagctggattgatgttgccatcaccttggaaatcgggacttggttttacaaaatccccatagttttttggttcctgatatgcaaagggacgagtctgcattgaatttagcttttgtgtgcaagaagccatctggagtgctggcagattcggtgttagtccactttgtaatgagcagagattaagtttgcctggatttataatctgctggagcattgattgactaacttcatgatcaaaccttttcagttcgtcatgat

SEQ ID NO: 94995 - DNA, 242 bp, Glycine max
  unsure (1)..(242): unsure at all n locations
  Clone ID: PAT_MRT3847_56792C.1
gtgaaggctaatgacttgccagcaaaggattttactgttttttatgacccttatactgaattctagcgtggtaactgcgaaggcggtattcatcactcctaaaataatnctaatccttcatggtatcaggtttttgcttactccaaagaccgtatttcaagccttcatactgttagtcactattaattacaatgatgtcttgaaagattactatattcatcacaactttcatgacctcaatt

SEQ ID NO: 94996 - DNA, 1680 bp, Glycine max
  Clone ID: PAT_MRT3847_56793C.1
aattcggctcgaggaaagatggcacaagttgttaagccacatgaacctaagacacagtcatttaaacttttgagtggtcataccataccggctgttggattgggcacatggaagtctggttcacaagctgccaattctgtgatcaccgccattgttgaggctggttacagacacatagacactgcttcgcagtatggagttcaagaggaagttggacatgcactccaatctgccatgcaagcaggagtggaaaggaaggatctatttgtcacctccaaactttggtgcacagacttgacccctgaaagagttagacctgctatcaacaatactcttcaagaactccaacttgactaccttgatctttacttgattcattggccatttagattgaaagatggtgccagcagaccccccaaagaaggagaagtgttggagcttgacatggaaggggtgtggagagaaatggagaagcttgtcaaggaaaaccttgtcagagacattggaatatgcaatttcactcttacaaagctagataagctgatgagcattgctcaaattatgccttctgtctgccagatggaaatgcatcctggatggagaaatgacaagatgcttcaggcttgcaagaagaatgccatccatgttactgcttactctccactgggctcatcagacggtggaagggatctgatcaatgatcaaaaggttgataggatagccaataagatgaacaagaatccagggcaggtgttggtgaagtgggccatccagagagggacaagtgtcatccccaaatcaaccaagccagataggatcatggagaatgtcagtgttttcaattgggaacttccagaaagagactttaagacccttagcaacatgcccgatcagaggcgagttctggatggtgaagacctctttgtgaacaagagcgctgggccattcagaagtgttgaagatatttgggaccatgaagattagtccacacttcacacatgcacctaaccacactttgtttatctctttttcaaggcactatgtaataacttgcatttctcgaatgttctgtatgtgatttgatacattagaaggttttttgagtctaaagttattatgtaagtggacaaaatttaagagaaatgtttttgaaaccaccacaattaaccaggatggacactagtgcacactgaccaagggcattagacacttcaagaaaaagcaatgaaatgaagccaaggtgtgttcctatgactcataggcgtaggcaaaaataccaaaaaagggtcacttttacattttatttaccaaataggggctattttgcaattatttacttgggggtttgttttttttattacaaagcgtctcccagacaggcgcttccatggagtacgcgaccggtggcgccctgcaccaagcgcctagggaacaagggcctgccccacccccacaccctagcctcttcccacaccccgtctctttcttgtcacaccccccggcctcttccccccaaaattgtatatttttttttaatttgtttatcaaaaatttaaattttgtttcatttttgttattaatattatttgttattttttatattcccacacccccaccccaaaatttcaataagattattttttatacactctaaaaaaaaaaaaaaaaaaaaaaaaaaaa

SEQ ID NO: 94997 - DNA, 185 bp, Glycine max
  Clone ID: PAT_MRT3847_56794C.1
cttaagtgtaaaaatactactaaacagacgagtcatgcacgacctatctctctcgaatcagtgtcagctacctgcggcttcttattatactcacttacccttatcttatccttcaagtacttgcatcaattcatgtgcaggacaaacccctcgtgtcactgacatcttcgccagagctactagac

SEQ ID NO: 94998 - DNA, 335 bp, Glycine max
  unsure (1)..(335): unsure at all n locations
  Clone ID: PAT_MRT3847_56795C.1
tcgagcgctatgcacgagaaaggtggagcancccggaagtacagtgctcgatatgaaactataacgtacagtgtcaccctgcgaaaattagggggaagatatgagtgattaccagcacgatgttgctgaagcaagggaaaaacatcttgcactttagcctctgtgcgatctagagccaacaatggccacatggtaatattaatacgcacaagggaagacacacacaaacatcctgtgaaactgagagaacagcaggaatgancctagagaaacccaacaatgaatatcaagtatagattcgactcagacaattgtaattcttgaaataaactagc

SEQ ID NO: 94999 - DNA, 297 bp, Glycine max
  Clone ID: PAT_MRT3847_56796C.1
aaaacaaaaagccccccttttattggcccccgaatttttatttttccaaaacttaaaagggggccccgggggggtaccccttttacttttggagcaaaacaaaaatttcacctggaaaattaggaaaaccccaatggggggggggaaacttcatttatgacaaaaaataattctttaccccctaaaaaaacgggttccaaaatttggcctaaggaataggggggggggccctttttttttttttaaatatcacaaattttttctaaaaaaaacaattttgttaaaaaaagatctggg

SEQ ID NO: 95000 - DNA, 281 bp, Glycine max
  Clone ID: PAT_MRT3847_56797C.1
ttggaacagaagagacgaagcatgcgaatgcggaaaatgaggttgaagtgcggcagacgcggaatctgtagaattccaggttggaaactattgggaacagggtaacacgagatccgttaccagtgagcaaacgatgaggctaacgcagtagctggacgatacgtggtgagagaaaatagacgtgccgaagcggaacaatcatggggatcctagacgagcttgatcggatacgagagacgctgataagagctgatgtagatacgatgagaggctcatatgta

SEQ ID NO: 95001 - DNA, 307 bp, Glycine max
  Clone ID: PAT_MRT3847_56798C.1
ctgactcgtactctgactccttttcgactctgctttctaagtagacgatacacacttgcaggcaggttgcattatctcatctttatgtgtatctcagacctatcattcatcttacctatccgatcctaatattcccaatgctcctcacggacaacctatatatacaactaccgtttgcctcaccacatgccactataattctacgatcccctgatccagtctcacgcattgcttaatacggattcagatgttacagatagcatgatcataaacgccatcgacactcaagctgctgacatgacttata

SEQ ID NO: 95002 - DNA, 330 bp, Glycine max
  Clone ID: PAT_MRT3847_56799C.1
ggcttcaggaaggcgagcaatatttaattcacccctttaattcattttattttgggggggccggggcgaactaaaagggccacacttgttaatagggaaaaaagctaaagggataaaaaagagacccctttatgaaaaaaaaagggggtttagataaactaaccccttgaggggggaaaagaaaagaagaagaaagacccccccccagggggtgggaaaggaaaaaggcttgcaaccttgaacaaacagagacattgcacattatttgtttttccaaatctctacccaattgaattgggggagactattttaattctttcccctataaaa

SEQ ID NO: 95003 - DNA, 449 bp, Glycine max
  Clone ID: PAT_MRT3847_5679C.1
ttccttagcctggattctttaaaacgggccgccttttttttttttttttggttaaaatggaccttacctttaaaatttatttcgggccttataaccctggaagaaggttggcttggttattggaattgggccggcttaaaataaaattattgctgattttggcaaaatcctaattatctgaatccaaggtattaggcggattctaatattctaaataaaggcagttgttacccaaaaggggtttgcaccttagaacacacaaccggcaggatcattcttgggtcccaaagtttggatcaccaaattcccccaatcctgggataacacgatcctcttcgttaatttcaaggtcaatctaaaacgtgacattcttaattgatggaaaccttttacacacgcaggggattccctcaggagcagaattgaaattcaagaatataaggtgactt

SEQ ID NO: 95004 - DNA, 465 bp, Glycine max
  unsure (1)..(465): unsure at all n locations
  Clone ID: PAT_MRT3847_567C.1
ctcatttagtttaaataaatttaattttcacaaaaaaatttactatgtctgttgcttagcaaaagttgtgtattggaaacctgaaattttgttactttgaagaatagatacaaaaacaatactgtatattattgattggggtaggtgatggtgttgagggccctaatcttaggtgataaggttaggtgagagatggatggatccagcagatccctcttgttggttgaggaaatgcccctttggttgtctggtagttgtcttgagaatgcccagcccatgttatcatcaggtttcattgtaaatgtctcaaaatcagaatcactgccaagacaggaaatatattaattaagtcactgccaaataaagcgtctttttaaatttttttaattcttctattctttatctgnaacaattaaacaccctttttattgattttattctgntacacaacctgcatgtctattt

SEQ ID NO: 95005 - DNA, 435 bp, Glycine max
  Clone ID: PAT_MRT3847_56800C.1
gagctcatttggatcgggcacggctacgagcaagttgaggatgccgaacggggctgtggacgccaaggacccgaacttctaggatccggcagggagatcgccactcgcgtgcatacgctggtggccttctcggtagggcagcacttgtctaatagtgacccaattcgtccgaaacgtgatttttgcgtgttcaatagtgtgaagcgaatcgacaaaaaatcgttgtctgtgatagattgctatagaactgatctatctgcggaattgggtactagcatggcactctgttgaacatataactccattgcagttggaagagcacttgaattcaatgctataataatttttttatatcttaggtacgatttttttcaaagtatattatagggccggtatctgattaatatctctatactacaaaaaaaaatgggtgtg

SEQ ID NO: 95006 - DNA, 367 bp, Glycine max
  Clone ID: PAT_MRT3847_56801C.1
caccaaaccctttagtcgtcatttttaaaaatatttgggccgttcaaacccaaaatcgaaacattacaaaaaacaaaagttcccaaacgagaccaaacccgaactccccaacaccctggaaaaaaaacaccacacgaacatgcaaccaaaaaaaaaaaagccaccaaaaaaactttcagaaaaaaacaaatccccaaaaattcccccaaaaacgattctacagaacaacacacaaaaacatcaaagaaaaaaaactcattccaccccaaaaaaacaaacacaaaaaccccctccaccaaacatcacaaaatccacaacaccccccagtaacccccataaaactcaaaggaaatatcaataacaccca

SEQ ID NO: 95007 - DNA, 418 bp, Glycine max
  Clone ID: PAT_MRT3847_56802C.1
acatgtgaatataggggttagtggcatgtgggaagcctctgggctcttagccatatttgaccgtcacattcactcagttcgtccagattccaattcgttcctaccttttcctaacaagttgaaaagaaaaaaaaaaactaatttcattggcatttaattctgcctgttgttatggctccacgtggtttggtacataaatattcacgagtaaattacacaaatcactaaaattttataaaattatataaatatctcttgttttttaacattgacctttgttataggaaggttaagggattagtgtaatgtacgagggattagtttactagtgtaatttactctatccattagtaaacactatgggtaaacatgaattaccttaaaaaaaaaaaaaaaaaaaaaaaaaaaaaaaaaaaaa

SEQ ID NO: 95008 - DNA, 913 bp, Glycine max
  Clone ID: PAT_MRT3847_56803C.1
aaaaagaggaggaaaaaaaaaaggaaaatgaggaaagaaatcttttacgaagaggtgcaagtcctcatgttatggataaggatggagccgctccacttcattatgcagttcaagttggtgccaagatgactgtgaaattattgatcaagtacaaggctgatgtcaatgttgaagataatgaaggttggccccccttgcacattgccattcaaagcagaaatagagatatagcaaaaatattgttagtcaatggtgctgataagactaggaaaaataaggacggaaaaacagccctggatttaagcttatgttatgggaaagatttcaagtcttatgaccttgccaaattactgaagacggttccagctgacagttatctatgatgttcgagatgcaatcggccagaaccagattgaagtttcagttgattgatagctgctgctaattagcaagtaaatcgtccccttggcattcagccatctttgaagatcttctgctgagctatttcaaaatgaggaaagttttgatggaacaattcattatcttctaccccaatgattaattggaatgtttttgcagcatagctcgaattgacaacactatcttgtcaaaacaacacactgtgcagattataagttgagaatactaggcatccaaagacacaaaatgctggcaaattgctgacttattttagattagctgttcaagccactgaattttctacatgtagaattatttcaactaataagctatcagtgataattaattgtattaagtagaggtagttcataaatttcttttctatgtaagtgttacagtttaaagttgtttataaagtttgaatgatagacaacagtgctaaaaaaaaaaaaaaaaaaaaaaaaaaaaaaaaaaaaaaaaaacaaagggcggc

SEQ ID NO: 95009 - DNA, 310 bp, Glycine max
  unsure (1)..(310): unsure at all n locations
  Clone ID: PAT_MRT3847_56804C.1
nanatgntnnacgngtangtaagctcgganttcggctcgagttgaaatantgncaagtntnntanatgtcntagnnttaagaggggggaaaanttgnaangnnaatnattcttganttcttacagtccantcngnnaactgagnncngatatataacttgactntggatttngtcnncatcantntggatanacaangngaaagntggaagggnttnntgganattgcttnagtgtggtnttnnngatggtgnnctnnatnaanttggnnatagnntntnntnatagtntnnnnantggggtnggagttt

SEQ ID NO: 95010 - DNA, 197 bp, Glycine max
  Clone ID: PAT_MRT3847_56805C.1
aaccccaaggggcaaaattttatttaaccggaccaattgggcaaacggggggcaacttggccaagccttttcatgaacgggcttaaaccccactatttgtgtcaccggggttgtaaacaaaaaacggcccaaggggggccccccaaaaggttaaatggacaaaaaccaaggttttttaaaaggggggggggctaaaa

SEQ ID NO: 95011 - DNA, 340 bp, Glycine max
  unsure (1)..(340): unsure at all n locations
  Clone ID: PAT_MRT3847_56806C.1
ggttgttangggagaggggggggggagaggaaaaatagtttttttttttttaagagagaggggaaaggaatatgggggtataggtgtgggtagaatagatgaaaggaaagagaaaattggtggtggagatgangttattgttggggatataagagatggtgaaaggattgttggtgaaattgaaggtatagatgggnttatagagattagaaggggaggttgaaagaaaaagggtggttttgattnaagnaaaaggaaaagagnagagttttagtttgaggatggggggatatgtgaaaaggttgantggattggggagaaaaatgaaataaatgtaggg

SEQ ID NO: 95012 - DNA, 406 bp, Glycine max
  unsure (1)..(406): unsure at all n locations
  Clone ID: PAT_MRT3847_56807C.1
aatggcannngcaatgctttgtgaattgggattatcnnngttgtttaagaagggggatggtnctcaaaagtgtcaatctcatttnaatggtagaatgtcatagcatctgctcaagtaatgtatttttctctgagtatgtccagaagtaagaaaaatggatnnntcgaagtcaatcttcnnaagtttacccagcagcacgtagtcaaggggaagttgaaatgggaaaatgaatgnnngtgttggaaagactcgtgtggattctctggtgggaaggaatcgtgtcagnntggggtcttcaagaatcactgtggcnttgcaatcannaaatgtcattattnnncaattctgaccaagtnnatggcggtcaagacctgggaagtnnattgcaagagaagggatgaatcaa

SEQ ID NO: 95013 - DNA, 387 bp, Glycine max
  Clone ID: PAT_MRT3847_56808C.1
ggttattgcttgtctctttgtttccttcttggtgagttgctatatagggaattggaaaggaggattggtgccatcccttgaagaatttgagtcaagaagcaaagggaaaaccaccttaagagctattggactaagaagcactccaaattgagtgaatcaccaaagagagaaaaaccaccaaaattgaggaccttgttgtaattttgtaattgacaatttacttactttcattgctttcaaattttgtaacaaaaaggcctttcattggaagtaagttgggagcctccaataggtcaccgtacttccatttgtgtgtcataattttaggcaatttacccttaggattgtgagtattttgttgggaaccttaaatttgcggacgcgtgg

SEQ ID NO: 95014 - DNA, 380 bp, Glycine max
  Clone ID: PAT_MRT3847_56809C.1
cggtctcgtggggaaattatgacaaaccgcgatcatgggtgggcgcaccttaaaaccggtaacaaacgcgcccgttacttgattcccacaatctgttaatatgactgtactttatggagtacgatttgttcagggaaagaaaactactctttgagctgaccacagacttcgggaaccatgagcttggacattctgaggcgatccgctgaacactgtgctattagatataggactgcgtggacgagtcaaacatcgcctgatgcttatgcagcactctgtttgatttcaagcccaagctggtgaaatctcggaacctagctcgcactctactaccaggaatctgacttggtggatagacttatgtataaacttactttctt

SEQ ID NO: 95015 - DNA, 635 bp, Glycine max
  unsure (1)..(635): unsure at all n locations
  Clone ID: PAT_MRT3847_5680C.1
ccacgcgtccgcggacgcgtgggcggacgcgtgggaatttttttaataaaaaagtatatatgtttgttgatagtggtgtactccactaacactaccaaatgcatgccttaatttatttacattaaaataggtttagtacctttcccctttaatctgacaatgctgcataaatttgcatcggagctcgagcctcgagcttagtaatagtttttcaagttatgaagtcttgcttacttacacgaatgaatgtaatgatatggcgatttgtcatttagttaaataagcatgtaaaattcagatttagcattatttagattatttatgattattgaatatgatttcctccttttgacattattcaagttattacaattaaatacgttttaaaccaagaaatattatgcaacagatgaaatcttttaaagaaccgcttctaagtgcttaatanttttttttccaatgacaacaacttcttttagggtactttaccacatctattgaaattttaataacacttaattatatatttggcaaagatgtaattntaatcttttataattttaaatctggaattttgattttcttatttttaaattacatgaatgtaatgctaatgagaattgaagacatggagc

SEQ ID NO: 95016 - DNA, 623 bp, Glycine max
  Clone ID: PAT_MRT3847_56810C.1
atttcgtgtgaaaacaagttccaaaactagaggtttcttgagtcttttttttagtcgctcttactctactctagagccattctaagtttctctttgagtcctagcttgcttttatgtgcttttcatcgctttaattgttgaataatacttgaaaatttgtcttgttaaaactatattgttttagctttcatttcatttttttggtcattggttattgcttgtctctttgtttccttgtttgtgagttgccatatagggaattggaaaagaggattggtgtcatcctttgaagaatttgagtcaagaagcaaggggaaaaccaccttaaggactattgaactaagaagcactccaaattgagtgaatcaccaaagagagaacaaccaccaaaattgagtacctttttgtaattttttaattggcaatttacttactttcattgctttcaaattttgtaacaaaaaggcctttcattggaagtaagttgggagcctccaataggtcaccctacttctatttgtgtgtaataattttaggcaatttccccttatgattgtgagtgttttgttgggaaccataaatgtggtcattcaaacactcttaggattcacctagtttacatt

SEQ ID NO: 95017 - DNA, 382 bp, Glycine max
  Clone ID: PAT_MRT3847_56811C.1
caatgagggttgccgaagggccgtgatgatacgacattcattagggaaaataggagttgggaaatattcggggcgagttggtgaggaagaattctaggtttacccagcttgctagaacatgtaaatcttgcacacacggctgttgatgcaacccaatatagtacactattctatggtgaaggagcaaatcatgaccggtgaacttgtagattatacttgcttataccattcactgggcacgttcgatcggatgagctttgatgcgctaccatgtttgagacggctggcttgactgcattgaacatgcaggtcttgagaccagcagacagggttgacccataataccatcagctttagcactgcaagcatcttatggattatg

SEQ ID NO: 95018 - DNA, 514 bp, Glycine max
  Clone ID: PAT_MRT3847_56812C.1
ctactctactctagagccattctaggtttctctttgagtcctagcttgcttttttgtgcttttcattgctttaattgttgaataatccttggaaatttgtcttgttaaaactctattggtttagctttcatttcatttttttttggtctttgattattgcttgtctctttgtttccttgcttgtgagttgccatatagggaattggaaaggaggattggtgccatatcttgaagaatttgagtcaagaagcaaggggccaaccaccataagagctattggactaagaagcactccaaattgagtgaaacaataaagagagaatagccaccacaattgaggactttttgtttttgtaattttgtaattggcaatttgttttgctttcaaattttgtaacaaaaaggcctttcattggaagtaagttgggagcctccaataggtcaccctacttccatttgtgtgtaataattttaggcaattttcccttatgatagtgagtgttttgttgggaac

SEQ ID NO: 95019 - DNA, 294 bp, Glycine max
  unsure (1)..(294): unsure at all n locations
  Clone ID: PAT_MRT3847_56813C.1
tacacctgcgagaacacgacagaaaggctccatgtaaatgaagatgggagccttttaaggacggggtctnatggggagggnnnnnaagttgattgggtccttatacataatacaaatggtagcagtagtaaaccattcaattgggaccacgtgaaactgccaaacattaaaatcaactatgcgttggctcttaccatgagggatccatcctcagaatgtttatgatgctctatctacttccacgcctgaatgggtagatgtcaacatcttgcatttgtgcatcacattgtatcc

SEQ ID NO: 95020 - DNA, 1368 bp, Glycine max
  Clone ID: PAT_MRT3847_56814C.1
ttttttttttttaaggtaaaaaaactaattggtaaaaggtaagctatctaggcggtttgacaatggaaggtcaaggaaataagctatgaaagtaagcaagaaatgtaaactaggtgaatccttagagtgtttggatgaccacatttaaggtttccgacaaaacactcataatcctaagggaaaattgcctaaaattattacacacaaatggaagtagggtgacctataagaggctcccaacttacttccaatgaaaggcctttttgttacaaaatttgaaagcaatgaaagtaagtaaattgtcaattacaaaattacaaaaaggtcctcaattttggtggttgttctctctttggtgattcactcaatttggagtgattcttagtccaatagctcttaaggtggttttccccttgcttcttgactcaaattcttcaagggatgacaccaatcctcctttctaattccctatatggaaacacccaaacaaggaaacaaagagacaagcaataaccaaagaccaaaagaatgaaatgaaagttaaaccaatagagttttaacaagacaaattttcaaggattattcaacaattaaagcaatgaaaagcacataaaagcaagctaggacttaaagagaaacttagaatggctctagagtagagtagaaaaactataaaaaaaaaacaaaaactcaagaaacctctagttttgacacttgttttcacactactttttaattgaaatttcataactaagattggtataaaatagacaccaattatagaacaaatttcaagccaaaaacaacaagcacacttccctttcactttttttctgccaaattgtgtgatttttaatattttttcctttcatccaaatcactttgttctttttttataaactttttaaagatgtctagaaaattaagtaaaactttcagctcaaaattcgcattgaccaattcccagtaatttttacaagtacatatgttcaagctgccagcaccaatgatttcaacctagaaatcaagagtagtgtttatgttgcttaaggcttggataattacaatttttggtttcttatgctcaaatttcttgaataaaaaaattcaagagagcttaagacttattttgattcacaaatccagccacaactcagcaccacaactcaacttcttcataggcatcatgtaggaaacttagaaaacaaaaaaaaagttcaacaacaagactacttctaggaattgatttagaacatgttatgaactaaataatatgcatgaattagactcaaaattcaaaatatagtctaagaatgacaagaatacattgactaatgtttctagaattcgtattctatagtgtcacct

SEQ ID NO: 95021 - DNA, 2290 bp, Glycine max
  Clone ID: PAT_MRT3847_56815C.1
tttattttttttttttttttttttttttggaaagtctgaaatagtgaactttgcattcaaatttaactgaacattttcttggaaatccagtacattatgatagtgctcagatgacataaatagaaaacgaagacaagatgtggatggaacaacacttaagacagctagatagagagccttatctatttatatatagccttgcctgaataaactacacagcaggccaaattttcatttatgatgattaatgagtgattgatgactagtataataatatattttggttctagggcaactactagtttttgctatggctcatactagctctatatggcaactcctagtggagaaacttccatctttggtatgatcttctctggttctacagctttgacctgatttccataagctgatgcatgcactccaagtgctgctctaccagatggatcaaggttgttagaccaagcagcatcccactcaacagctttggctgtgctacatgcaacacttggtcctccaggaacactcagcctggctgagttctgagggaagaacctctcaaatatcattctatagtagtatgcttctttggtggttggtgtgttgaaggggaaaatgttagcagcattgagcatcattctgtcagtcacatgtttctcagcatgagctttaaggccatcaatccaaccatagccaactccatcactgaattgttctttctgcctgtataaaatgtgctttggcagataaggatgttcttcatcatcaaaggccctcctcagtacccatttctcaattcgcccttcttcctttttaatcattttatactcaggatcaatgttcattgcaactctgataaaatctttgtccaaaaaatggcactctggcttctagaccccaggcaaaggtcgatttattggctcgcaagcaatcatatttgtggagtgctttaatcttgcggcatgtttcttgatgaaattcttctttgtttggtgccttgtggaaatatagataccctccaaagatctcatcagatccttctccagatataacccatttgactcccaatgacttgatcttacgagacataagaaacatgggaatgcttgctctaattgttgtcacatcatatgtttcaatgtgatagatcacatcctcaatggcatctatgccatcctgaacagtgtagtgaaattcatgatgtacagttcctatgtagtctgctacttcctttgctgcctttaggtcaggtgcaccctcaaggcctacacagaaagagtgtaatttggttccccattgcttggcagcatttgtgcctgccaggtagcgagccgtgacggctgcaaccaatgaagagtccaaacctccagagagcaaaacaccaaagggaacatcagtcatcaacctttttaccacagccttctcaaaggcatgcctcaaagcaagaggatcataaggtgctgagggaatagcctcagagaaccatggaggattgtaccatctgcgaaacgctctctctttgctagagtacaagtgaccaggtggaaaagactcaaaatgttcgcaatcatcattcaaccccttcaattctgatgaaatccagacagagccatctagaccccaaccaatgtacaaggaagtgaccccaattgcatctcgtgccactataaaactgttgtcacgagtatctagcagaacaaacgaaaatataccatcaagcatgtccacaaagttttctccgtgctcctcatacaggtgagcaataacatcacagtcacttcctgtacggaaggtgtgattaggcagctgtttcctgagttcttcatgattgtagatctctccattcaccgtaaccactacagttttgtcttcattgaagaggggttgatcaccagacgctggatcaactatggctaacctttgatgagccaaatagttatcaccatattggtggagcccactccagtcaggaccacggtgcttcaatctgcgagaaagctcaaggacgcgaacccttttggcttgagatgaatcagagcaaccaagcacagcaagtatgccacacattgtgatatgatataatatatcactatgatatgtgatgatataatatgtgaactatggttaataagagaaaagttgagagaaaaaaaaaaagagtgtaatgaggaaaatgagaagataaagaaagagagaaagaaggaaatgatttaagaaacgtagatggaggagtgagagagggaatggagaacacgtagaagggttccaagctcgagccgaattccgagct

SEQ ID NO: 95022 - DNA, 350 bp, Glycine max
  Clone ID: PAT_MRT3847_56816C.1
gtcagaatcttttttttttggttattgcttgtctctttgtttccttgcctgtgagttgccatatagggaattggaaaggaggattggtgtcataccttgaagaatttgagtcaagaagcaaggggccaaccaccttaagagatattggactaagaaacactcgaaattgagtgaaacaccaaagagagaatagccaccacaattgaggacttttttttgtgatttttgtaattggaaatttgctttgctttcaaattttgtaacaaaaaggtctttcattggatgtatgttcggagcctccaatagatcaccctacttccattcccttctgtcgtcttctcgcaaccgta

SEQ ID NO: 95023 - DNA, 1378 bp, Glycine max
  Clone ID: PAT_MRT3847_56817C.1
cctgacctaaaggcagcaaaggaagtagcagactacataggaactgtacatcatgaatttcactacactgttcaggtatatctaaatgagatagtgtttttactgctaaaatatttaggggttttgatgcctaaaataataatttgtaaatgttttatatatggtgtgtatgcaggatggcatagatgccattgaggatgtgatctatcacattgaaacatatgatgtgacaacaattagagcaagcattcccatgtttcttatgtctcgtaagatcaagtcattgggagtcaaaatggttatctctggagaaggatctgatgaaatctttggagggtatctatatttccacaaggcacccaacaaagaagagtttcaccaagaaacatgccgcaagattaaagcactccacaaatatgattgcttgcgagccaataaatcgacctttgcctggggtctagaagccagagtaccatttttggacaaagagtttatcagagttgcaatgaacattgatcctgagtgtaaaatggtatggatacagaatattgcaatgcaccatcacttaaaaaatgttacattttattaaagtggtttactacgtaatctgttcagataaaaaaggaagaagggcgaattgagaaatgggcactgaggagggcctttgatgatgaagaacatccttatctgccaaagcacattttatataggcagaaagaacaattcagtgatggagttggctatggttggattgatggccttaaagctcatgctgagaaacatgtaactgacagaatgatgctcaatgctgccaacattttccccttcaacactccaaccaccaaagaagcataccactatagaatgatatttgagaggttcttccctcagaactcagcaaggctcactgttcctggaggaccaagtgttgcatgtagcacagccaaagctgttgagtgggatgctgcttggtctaacaaccttgatccctctggtagagcagcacttggagtgcacatttcagcctatgaaaaccagaacaacaagggtgtagaaattgagaagataatacctatggatgctgctccccttggtgttgccatccagggctaatacaaagatgtgacaaagaataatttgggcgacaatgaagataactaagctaaaggtgaatgaaaaatttgcctgcagtgtaatttcatctgggcaaagcttttatagtttatagttataaggctttctaaaaagtgttgcgtattgtattatcttgaatgctgtgatttgaagtcttaataaaagtgtttcctttatcagttcataatgaatgcaaagtccattattttaggctgtattttatttcactttaatagctgagcaa

SEQ ID NO: 95024 - DNA, 939 bp, Glycine max
  Clone ID: PAT_MRT3847_56818C.1
cctttgccacaaaattaggagtttggaacattgctttccttggttctggaattttgctggtgaagtatattgtttctgttttggcagcaatttatatgcctcaggtgaatataaactttcaggcgttggttactcgtaccggctcatacaatttttgcaataagcttgatttaccagggttgttttgtatgtatcgtcattggctattgtgaaggaggagatatgccgaggcaattaaaaaggccaacgacgttcattttcttgaagaggttggtcgttcttttataaagtgaattgaccgaacaaaaagatagaggaagcaaaagaacatcacctagatgaagatgctcttgataccacttgatgtagctccattggagcttgtaggccttggatcttcttcatcagtggagtcctttgcttcttgaatatcaatggcagcggaatggagaaggagaaatatgattggagacgccacttcaaggagaagatgagtcaagaagaagttcaccaccataggaaaccatggacaagagcttgaaggtaggagaagaagaatagagggagaaggaaagagggaacacaaaattttgtgcctcaaaagagggaatttgaaaggaggattggtgccatcccttgaagaatttgagtcaagaagcaagggaaaactaccttaagagctattggactaagaggcactccaaattgagtgaaccatcaaagagagaacaaccaccaaaattgaggaccttgttgtaattttgtaattgacaatttacttactttcattgctttcaaattttgtaacaaaaaggcctttcattggaaaaaaaaaaaaaaaaaaaaaaaaaaaaaaaaagataaaagataaaaaatatataaaaataaaattataaatatttagaaaaaataaatagaaattaaaaaattggggggggc

SEQ ID NO: 95025 - DNA, 2082 bp, Glycine max
  Clone ID: PAT_MRT3847_56819C.1
ggctcgagcaatttcacccttcacacgtggtggtggtgttgttcttcttctcttcccctttctttttcttcttctgagcttgtttaagctctttctatttgattccattaacatatattatcacaatgtgtggtattcttgctgttcttggttgttctgatgactctcgagccaaaagggtccgcgtgcttgagctctctcgcagattgaagcaccgtggccctgactggagtgggctccatcaacatggtgactgctttttagcacatcaacggttagccatagttgatcctgcttctggggatcaacctctctttaacgaggacaaatccgtcattgtcacggtgaatggagagatttacaaccatgaagagctcaggaaacagctgcctaatcacaagttccgtactggatgtgattgtgatgttattgcacacctgtacgaggaacatggagaagactttgtggacatgctggatggtatcttctcatttgttctactggacacccgtgacaacagttttatagtggctcgggatgctattggggtcacttccttgtacattggatggggattagatggctctgtttggatttcatcagaaatgaaaggcctgaatgatgattgtgaacactttgagtgttttccacctggtcacttgtactctagcaaagaaagagggtttcgcagatggtacaatcctccttggttctctgaggctactccatccaccccttatgatcctctcgttttaagacacacctttgagcaggcagtcataaaaagattgatgactgatgtgccttttggtgttctactctctggaggtttggactcttcattggttgcatccgtcacttctcgctacttggccaacacaaaggctgctgagcagtggggatcaaagttacattcattctgtgtaggccttgagggctcaccagatttgaaggctgcaaaagaagttgctgactatctaggcactgtccaccatgagtttaccttcactgttcaggatggaatagatgccattgaagatgttatctaccatgttgaaacatatgatgtgactacaattagagctagcacacccatgtttctcatgtctcggaagattaaatcacttggtgtcaaatgggttatctccggagaaggatctgatgagatctttggagggtatctgtacttccacaaggcacccaacaaggaggagtttcacagagaaacatgccgcaagatcaaagcactccaccaatatgattgcttgcgagccaataaatcaacatttgcttggggtctagaagcccgtgtaccatttttggacaaggcatttatcaatactgcaatgagtattgaccctgagtcgaaaatgataaaaagagatgaaggacgaattgagaagtggattctgaggagagcctttgatgatgaagagcatccttatctgccaaagcacattttatacaggcagaaagagcaattcagtgatggagttggctatagctggattgatggccttaaggcccatgctgcaaaacatgtgactgacaaaatgatgcttaatgctggtaacatctaccctcacaacaccccaacaaccaaggaagcatattactacagaatgatctttgagaggttcttccctcagaactcagctaggctcaccgttcctggaggagcaagtgttgcatgtagcacagccaaagctgttgagtgggatgctgcttggtctaacaaccttgatccttctggtagagcagcacttggagtgcacatttcagcctatgaaaaccagaacaacaacaagggtgtagaaattgagaagattatacctatggatgctgctcctcttggtgttgcaatccagggataatataaagctgtgacaaagaataattgggggagaatgaactatgctaaacgtgtatgaaaaatttgcctgcagtgtacttttatcttggcaaagctttgtagtgtatagatatagatataaggctttctaaaagtgtagcgtattgtattatcttgaatgctgtgatttgaagtcttaataaaagtgtttctattatcagttcatgatg

SEQ ID NO: 95026 - DNA, 1120 bp, Glycine max
  Clone ID: PAT_MRT3847_5681C.1
gtaggtcccttctggtgatgcaagggaaatcaactgatttcgccaagcacgctcttccttctattcacaaacaacgcataatcataaccttcacaaagtcccaaccaaaatgttccctgccaaatgattctcagcgacttgctccaccggcagcgtcccattgggcaccaccacagagcagatctcccaatcacgtgcgtcatcaattaggccccaagcattatcccacggttccagcaactgtagtactgccagctccatccatacatgcacctccaaacagtatgcagccattgtttgtgccggtgccggtaccagttgcacctcccatgtcatttcctacacccgtaccaatcccacctggttccattggatggacctcagctcctccgaggcatcctcctcctcgaatccctgttcctggcacaggagttttcctccctccacctggctcaggtaccatacatgaagtgaacccaagtgtggaaacttggactgtgtcgggaaaggaaaatgggaaatctaatcacagcaagacaaattctgaagctgaagaagctggtgtagagaaagaacacgaaagcaacgacatgacggctgcaagccattgattgagctatggcagattagaaagagggaaagcttatcaaaggaaaggggtaggctacggatctaacgagtttgaagcaaatgtaaagagcggcaacatttgacacgacacgatacaatactgcaaaggagagaacaagggaagtaggcacaacttttttggttcacttcttgatcctcattccttttttcttgtcttattatatttaacttttacagcaagggaaaccccattcttaattcagattttgatttttcctaatgagagaacaatggaaggtggcagaactttttggttcactattgatcctttggttgctccattccttttttgatgccttattatatttaatcactacagcaaggataaccccattcttagctaaaaacttgaatgttcctatctatgaattattttacctgtctaacggtagcgttttggtgcggttatggattccactaccatttgttaaacaattattatgcctgcatggttagatagaaaatgatg

SEQ ID NO: 95027 - DNA, 5061 bp, Glycine max
  Clone ID: PAT_MRT3847_56820C.1
tatgttcagcttagcaataacataaatattgaaaaattacaatgttttgttacatttatgtggtgccactgcctagctacttgctaagaaacttctgtgttttaaccaacatgttattttgcagaaaagttggcatctaattttttagccattgaaatgccttccctggcttgctgtggaaaatgtcttaatttatggtttaagaaggatctgattaatatctgactagttgcacattttacataccttgttttctatggtattttagagtccaaagaaggtcaacttggttgctgctctggttcgtggtatgcttgttaaagatgcatcgatgcagttggaatcgacaataaaacgagcagcaaaaactgtatatcaggttaaagagttccatagaagagatggttttgaggtagcaagtgctgacaagatggctaagtcatgcatggtttattttgaaatgcatctatccctaaggaaaaaaataattacaaaagcttttaatggtagttatagtatctacaaggaaactttttgtaaccaggtctattgcctttttgtttgagtactggacatgcaggtacaataattgttgttgaagatgacaagggacctgaaagaggaatgccgagcttcaattctgagttacccaattccaattcatgggttgaggatgttacaagagtttgggatccttgctgaccagtgactagggttgaggattttaccaagagttgaagaccgttgctgctagaatgtcaagttttgtagaaggtactaagatgtaggcatgctagatccttattgcttgactgttgactatccaagcattctgggaattggaaaggaggattgatgtcataccttgaagaatttgagtcaagaagcaaggggtcaaccaccttaagagctattggactaagaagcactccaaattgagcgaaacaccaaagataaaatagccaccacaattgaggacttttttttttgtaattttgtaattgacaatttgttttgctttcaaattttgtaacaaaaaggcctttcattggaagtaagttgggagcctccaataggtcaccctacttccatttgtgtgtaataattttaggcaattttctcttaggatagtgagtgttttgttgggaactttaaataagatcatccaaacactcttaggatccgcctagtttgaatttcttgctcttaaatttcttgcttagtttcatagcttattttctttactcttcattgtcaaaccgcctagctagcttgtctttgcttattgtttgtctctttgtttccttgcttgtgatttgtcatatagggaattggaaaggaggattgatgtcataccttgaagaatttgagtcaagaagcaaggggtcaaccaccttaagagctattggactaagaagcactccaaattgagtgaaacatcaaagatagaatagccaccacaattgaggacttttttttttgtaattttgtaattgaaaatttgctttgctttcaaattttgtaacaaaaaggcctttcattggaagtaagttgggagcctccaataggtcaccctacttccatttgtgtgtaataattttaggcaattttcccttaggatagtaagtgttttgttgggaaccttaaataagatcatccaaacactcttaggatccgcctagtttgcatttcttgcactttaatttcttgcttactttcatagcttatttcctttactctccattatcaaaccacctaggtagcttgccttttaccaattagtttttaccttatctttcacacctctgttagtgtttattttggctagtttcaaccatagtttcttttaccttttttttcaaaccccctacaagaaagaaccataacttaggaaccaacatgagtcttcattcttcatctagtgttaatggtgagggttctactcctaaggaccccttgtataagatattagatgagttgagatcccttaagttgtggaaagaaaaacaagagagaaaagaaaaaggtaaaaaaaaagtggaagaaataagtcaagatgaaagagagaaaataagagaggaagaaagaagaaaaataatgaaagaaatgaaaagataaaaacatgcctccaatagtagttataactcttgcaagagcctaagtgaagaacttcgtgactattatgaaggaaggcataggtcacatcttggacctcactcccataggagagaaaaggaaagaaagcctcaagaggctaacattaacctctcatacttccatgggaaggacaatgtagaggctaacttagattggaaaataagggtagagcaacaacttaaaaagaagtctacttcaaaatcttatggctctcactcttatccaaagaaagaccaaggtcaaggcatctttggggtgacaccttctaagcccaaagatgataaggggaagacaatagaaaagcaagcccctaaggcactatgcaagagaaaactagctctataaagtgcttttaaatgtcttggaagaggacacattacttctcaatgccccaccacaaaaaccatgattatgaggggtcaagacatttatagtagccaagatgagcctactacttcaccttcctctagtgaaagtgaagaagcaaaaggggaagaatctagtgaagaaatctacccccaagaagatggacaaccattagtggttaaagagaagtgtaaggaggtaagtgtctcctccaagaggttagctaagaaggaaagacattttgaaataaagacaaatattaaagttatttcccttcttagacaacctccacattttctcctttgtaaaaagacacttgttagcattgccacacctcttaggcttgagtttattcctcaagtaaaggagttgttggatgagggtttggtttgcaagagcttaaatccttgtgctttgttggtgcccaaaataggtattattaggcatcaaatccctaaaataggtggtatgatgaatgttttgagtggtgcaaccctcttttgtaaaatcactcgtgcacctaacatcttcatgatttgtgtacatagggactcattgggtaggtttgttcttatttttagtttcaatacaaacttaggtactcatatgggacaccttaggtttttcatactttttggtaggaataatcaacatgaaaatacagaaaaaggtatgttttattgcattacttttcttaattttttaaatagtgatcaaggggttcccatgaaccctaaaagaataaaggtcattcctgagtggcccactccaccaagtataagaaaaatttggggcttccatgacttaacaaacttttacaaaaggtttgtcccatatttttttatacttgtagcaccactcattgagttggtgaggaaccatgttccttcatgggaagatgcccaggatatgggttttcaaaccttaccttacttcaacataccaaacaccactaatgcatatatttttgttctttttacaagtgttaaggaaaaatgccaagagtatgaagaacctcgggatttgaggtcaaatcctttccaaggtggagggaatgatgcaatcctatcccgcaagggcattgggtagaagactccgagtatattgggctagagatccaagggaaggccctagggttctcatgagccttagggtagatttcgagcccatgggctaagtatgagctcgcatatctttgtaaatattagaataggtttttccttcgtttgggccttgtattttggccattctagtagtatagggttttagccttgtatttcgggcattttgggtagtctttgtagtaaggactttttttttttgtattttcatgttttttgtcatggatgtgagctcagctattatagggggtgtgtagctgagttctagcttctcatctcaaggaggtgagcttagctattagagaggtatgtgtagctaagctctagcttctttaggagtcttcttaaggaagcttctcaaggaggtgagcttagttatgagaggggtgtgtgtagctaagctctagcttctcaaggaagttttctcaaagaagcttttcaaggaagttttctcaagaaagcttctcaaggaagctacctagtctataaatagaagcatgtgtaacacttgttgtaactttgatgaatgagagtcttgtgagacatacttcaaagttccacttctctccctcttttattccttcaatttcgtgctcccccctctctctttctctccctctttctttacctccattgaagcatccttccaagcttcttatccaaggctcatcttggtggtgaagctccttcttccatggcttattccctagtggatggcgcctcctctcacctcttctcctttgtcttccgctgcatctccatggtggaaaatcaccattaaaggacctcattgaagctcaaagatccagcctccatagaagccccacaagcaagcttccatcaagtggtaatcagagcacaagagcttcaagtaggtactccttaagcctccattaatttttttgctttaccttctcttccattgttgtttcttcatttttctccatgtatctcctcacatgtcttgttctaaatgttgttaacatgattctttagagtttccaccgattaaacttgctatagaagctagatttgattttctatggttcaaatttcttgtttttgttcttgaaccatgaattgtgttgagtttaggttcctttgagttttgtcttgttattttttgtggctgaaaccgaaaccataaaattcttacaaaaatattaaagtagaagaaaaactcaaaaatctagagtgacttgttcacctattgtagttttgtcatagaagtcatgtctagtcatgaaacttgtcacataagatttcttatgttgtgctgaattttatttttcttgtttctttgtctcactcatttgttcattagtgtatgaaattctcttagcctattatttgatttgagtcaaatctttcatgttaattattccttaacatgttcatgcaaaattcttaaagagtc

SEQ ID NO: 95028 - DNA, 2192 bp, Glycine max
  Clone ID: PAT_MRT3847_56821C.1
gatactcaaattgcttaaggtcttcaacttcacccattcatacgtggtgttgttactgctgctcttttctcttttcttttctctttagttctctcttcccctttctttttctttttcttcttcttctgagcttgtttaagcttttcttccattaacatattatcacaatgtgtggtattcttgctgttcttggttgttctgatgactctcgagccaaaagggtccgcgtgcttgagctctctcgcagattgaagcaccgtggccctgactggagtgggctccatcaacatggtgactgctttttggcacatcaacggttagccatagttgatcctgcttctggggatcaacctctctttaacgaggacaaatccgtcattgttacggtaaatggagagatttacaaccatgaagagctcaggaaacagctgcctaatcacaacttccgaactggaagtgattgtgatgttattgcacacctgtacgaggaacatggagaagactttgtggacatgctggatggtatcttctcatttgttctactggacacccgtgacaacagttttatagtggctcgggatgctattggggtcacttccttgtacattggatgggggttagatggctctgtttggatttcatcagaaatgaaaggcctgaatgatgattgtgaacactttgagtgttttccacctggtcacttgtactctagcaaagaaagagggttccgcagatggtacaatcctccttggttctctgaggctattccatctgccccttatgatcctcttgttttaagacacgcctttgagcaggcagtcataaaaaggttgatgactgatgtgccttttggtgttctactctctggaggtttggactcttctttggttgcatccatcacttctcgttacttggccaacacaaaggctgctgagcagtggggatcaaagttacattcattctgtgtaggccttgagggctcaccagatttgaaggctgcaaaagaggttgctgactatctaggcactgtccaccatgagtttaccttcactgttcaggatggaatagatgccattgaagatgttatctaccatattgaaacatatgatgtgactacaattagagcaagcacacctatgtttctcatgtctcggaagattaaatcacttggtgtcaaatgggttatctcaggagaaggatctgatgagatctttggagggtatttgtacttccacaaggcacccaacaaggaggagttccacagagaaacatgccgcaagatcaaagcacttcaccaatatgattgcttgcgagccaataaatcaacatttgcttggggtctagaagcccgtgtaccatttttggacaaggcgtttatcaatgctgcaatgagtattgaccctgagtggaagatgataaaaagagatgaaggacgaattgagaagtggattctgaggagagcctttgatgatgaagagcatccttatctgccaaagcacattttatacaggcagaaagaacaattcagtgatggagttggctatagttggattgatggccttaaggcccatgctgcaaaacatgtgactgaaaaaatgatgcttaatgctggtaacatttacccccacaacaccccaaaaaccaaggaagcatattactacagaatgatctttgagaggttcttccctcagaactcagctaggctcactgttcctggaggagcaagtgttgcatgtagcacagccaaagctgttgagtgggatgctgcttggtctaacaaccttgatccctctggtagagcagcacttggagtgcacatttcagcctatgaaaaccagaacaacaagggtgtagaaattgagaagataataaacctatggatgctgctccccttggtgttgccatccagggctaatacaaagatgtgacaaagaataatttgggcgacaatgaagataactaagctaaatgtgaatgaaaaatttgcctgcagtgtaacttcatctgggcaaagcttttatagtttatagttataaggctttctaaaaaatgttgcgtattgtattatcttgaatgctgtgatttgaagtcttaataaaagtgtttcctttatcagttcataatgaatgcaaagtccattattttaggctgtattttatttcacttttaattagctgaagcatattcgtcgt

SEQ ID NO: 95029 - DNA, 376 bp, Glycine max
  Clone ID: PAT_MRT3847_56822C.1
tccttatcagatattgttgttttatttcgtggggtttttttttttcctttttttattaaacgatcaaatttttaatctaccaataccaccttctttgttttcaaaaaaaccaagaaaaaaaaatggaccgaaccaaaaaaaaaaaacacgggaacaccgccaaaatacttcaagagaagacttctggaacctcgcacgtgcgccacgcccaaaaaacttctagggctcgttgtgcctgggatccgagacgagcaaggtacgagcgcacctcaccagagtgttcttgatctacttttactcccgggatcaacgtacttctggtaaaacgcgacgagcgcaatagagccggggggcgggcttacaaacacgtgcatgc

SEQ ID NO: 95030 - DNA, 266 bp, Glycine max
  Clone ID: PAT_MRT3847_56823C.1
acattactctcggcaacggatatctcggctcttgtatcgatgaagaacgtagcgaaatgcgatacttggtgtgaattgcagaatcccgtgaaccatcgagtctttgaacgcaagttgcgcccgaagccattaggccgagggcacgcctgcctgggtgtcacactgtaattatgggtattaaagtgcatggcggaagccaacaacattaccatatgtgaattattttatttccaatacgcaaaggaataatagaactgatgttgagt

SEQ ID NO: 95031 - DNA, 2483 bp, Glycine max
  Clone ID: PAT_MRT3847_56824C.1
tttttttttttttttaaatatatgttgcaaatataattaatgggaaaatttacgggcaatcccttaaatcaagagatttatttagagagctaattaagcaattatttcctttattaaggttgaatcaaaagagaccaaattcagttttatcattccattttcttcgcaagtggcagaccttacttagccagcaatagcatcactgtgagccttacttctgatggccaagcgatgaagccataagagaagttcaagaatacaatgttccactttctctctatctgcatggtagaatgtctcaatccacattacaccagtcttcttttttacttcataccctgagtatgcccactcccctagccaaccaaatcgttcttcgtgttctccattccctctctcactccttcatctacttcacatattatatcatcacatatcatagtgatatcatatcacaatgtgtggcatacttgctgtgcttggttgctctgattcatctcaagccaaaagggtccgcgtccttgagctttctcgcagattgaagcaccgtggtcctgactggagtgggctccaccaatatggtgataactatttggctcatcaacggttagccatagttgatccagcttctggtgatcaacccctcttcaatgaagacaaaactgttgttgttacggtgaatggagagatctacaatcatgaagaactcaggaaacaattgcctaatcacaccttccgtacaggaagtgattgtgatgttattgctcacctgtatgaggagcacggagaaaactttatggacatgcttgatggtatattttcatttgttctgctggatactcgtgacaacagttttatagtggcacgggatgcaattggggtcacttccttgtacattggttggggtttagatggctctgtctggatttcctctgaattgaaggggttgaatgatgattgcgaacattttgagtcttttccacctggtcacttgtattctagcaaagagagagcgttccgcagatggtacaatcctccatggttctctgaggctattccatctgccccttatgatcctcttgctttgaggcatgcctttgagaaggctgtggtaaaaaggttgatgactgatgtgccctttggtgttttgctctctggaggtttggactcttcattggttgcagccgtcacggctcgctacctggcaggcacaaaagctgcgaagcaatggggaactaaattacactctttctgtgtaggccttgagggtgcacccgacctaaaggctgcaaaggaagtagcagagtacataggaactgtccatcatgaatttcactacactgttcaggatggcatagatgccatcgaagatgtgatctatcacattgagacatatgatgtgacaacaattagagcaagcattcccatgtttcttatgtctcgtaagatcaagtcattgggagtcaaaatggttatctctggagaaggatctgatgaaatctttggagggtatctatatttccacaaggcacccaacaaagaagagtttcaccaagaaacatgccgcaagattaaagcactccacaaatatgattgcttgcgagccaataaatcgacctttgcctggggtctagaagccagagtaccatttttggacaaagagtttatcagagttgcaatgaacattgatcctgagtgtaaaatgataaaaaaggaagaagggcgaattgagaaatgggcactgaggagggcctttgatgatgaagaacatccttatctgccaaagcacattttatataggcagaaagaacaattcagtgatggagttggctatggttggattgatggccttaaagctcatgctgagaaacatgtaactgacagaatgatgctcaatgctgccaacattttccccttcaacactccaaccaccaaagaagcataccactatagaatgatatttgagaggttcttccctcagaactcagcaaggctcactgttcctggaggaccaagtgttgcatgtagcacagcaaaagctgttgagtgggatgctgcttggtctaacaaccttgatccatcaggtagagcagcacttggagtgcatgcatcagcttatggaaaccaggtcaaagctgtagaaccagagaagatcatacccaagatggaagtttctccactaggagttgccatatagagcttgtatgagccatagcaaggactagtagttgccctagaaccagcatataatattattatactagtcatcataaaatgaaaattttgcttgctttgtagtttatccagggaatggtatataaatagataaggctctctatctagctgtcttaagtgttgtgccatccacatcttgtctttattttctatttatgtcacctgaacactatcataatgtactggatttccaagaaaatgttatcagttaaatttgaatgcatggttcactatttcaaattttcgtt

SEQ ID NO: 95032 - DNA, 1013 bp, Glycine max
  Clone ID: PAT_MRT3847_56825C.1
tgttacaacaacacgttgaaaatcgaggattattccaagacccatttccccaggtcgattttctcacgtgccttcaaacctattcccctcaagatggattctcgttgcattgatgacaacaaagaagacaatgaaatgaagtctgccgaaggatttgaagatatatttggagatccagaagttctgcctcgtgttggagaggaataccaggctgaaattccttcactaattacaacaccttatctttctcagcttgtaaagaagacaagagattcagaaatcactgtcatcgagaaagagtctatgtcactaggattgcccattcctcttaagtgggcacactgcaaatttgaaggtagttgtggttgtgggacttcagaatctttcacaagtgaagcagggccaattatttctgaaatgaatgtccggcggttgaagtgacacttcagactgtttcacatgtaggagggttctcaaattttgaatcatcttctaaaagtaatgagaagaatcagccaagagggaagtatcatctccctggattgttggatgatcaatcttggacagatattgaatacaacagttttcttcttggcctctatgtatttgggaagaaccttaaatttttgaagagatttgttgggggtagaactatgggagacatattgtttttgtattatggaaagtgtttcaagtctaaagaatattgttgatggtcagagtgcagaaagttgagacgaaccggagattatatgagagaattgtattcacaggatggaggcagcaagaattgctgtcctgttaaggaaagtttttcaagtctaaagaatactgccgatggtcagagtgccgaaagttgagaactaagcggtgtatatatggccagaaaatattcacaggatggaggcagcaagaattgctgtcaagattatttccccgcgtgccaggggagtctcaaactacattggtggagatttcaaggaaatttgtggagggaaagatgccttttgaag

SEQ ID NO: 95033 - DNA, 227 bp, Glycine max
  Clone ID: PAT_MRT3847_56826C.1
ctactttgacgaaaaaatacaagtgcgttctaacacagaatcataaactgaggtcgatactttaattacaagctagctgaaatagacgatgcacgagcgcatgtacgaaaaagtacaaaactgtctatgggtgcctctacacccccaggtaactatcctatgaaccccgcatctgtgacacgagtctatgctgaacatacacgagtgctaatgctgctagctctagg

SEQ ID NO: 95034 - DNA, 438 bp, Glycine max
  Clone ID: PAT_MRT3847_56827C.1
gaataaaataaacagtactataaataaaatacactggtgagattttccacagaatgtgtacatttttgtatcaacaatcatgactcaaggaacaaagacttgtacaagcactgccaaaaaaacttaaaccagattcaaatattggcagcaccaaaacttggtttgcacaaaacaagggtctatatttacagcatgctatctgtgagagcaggcaacctgcggaagaaattgatcggtgctcctggcgtcttaccccgaagcatagggtgcctcattaggtaaaatccagatagaataaacaacatctgtggtggtgtcacatacaaaactattgcagtcacaaggcaaaacaccatgaatatcgaagtggcacgtggatccctccaattataagagcatggattctctctccttgagttgctatctggtcaacaacac

SEQ ID NO: 95035 - DNA, 412 bp, Glycine max
  Clone ID: PAT_MRT3847_56828C.1
cgctagcctcatcaacttcagggtccggctcatgaacttcctgacctgactcctgtacatcctgagcctgctggtctgagtgcggatgctcaagcacggcgccacccagagcaagcagggcctcaccaagcccgagctcgcactcgagaagtcgctgatgctactctgactctccctcatgctcggctcactctgccgcctgtcgaggctgctctggctctacctgcgggtcatgtgcctccacatcgttcttatgttcgccctcaccatctttgtcttcgccgtcaccaacaagggctctggcgacaccaacactaacacagggtataatgagtctaagctaggggattacgcgaactggctggaggataactctaacaacactcagacgagggacaagatcacgaatacc

SEQ ID NO: 95036 - DNA, 239 bp, Glycine max
  Clone ID: PAT_MRT3847_56829C.1
acggctgcgagaagacgacagaaggggacggtaaagtcaaatattatttatagacacccctgtggacggtgatgaggctcatggcaaaggcttatccattgatacgccgactctgattctgataaaaacagcacttattcaaatattcagcttagcaattttcagttcattcagttgtgatttcctcaagacaagttgcaaatacatagttacatacatacatgcatgtagacaaaaat

SEQ ID NO: 95037 - DNA, 687 bp, Glycine max
  Clone ID: PAT_MRT3847_5682C.1
cccgcgtccgagccaagcgtccgaatgaatgaccggtgtgggactcgtggcgacttttagattcaaacaaaaataaaaatcgcacgcatactacagtaataggaaaggaaagaggaaggttgtggtaaataaataacctaacctaacccttgcgacttgcgacttgcgagtgagactgaggttgggtttggaaggcaagggcttgtgttgtcacaatccaagagagaagtaatggcgaacatagacatcgaagggatcttgaagcagcagcagccttatgatgggcgcgttccgaagacgaagatagtgtgtactttgggccctgcttctcgatccgtagaaatgaccgagaagcttctgagggcagggatgaacgttgctcgtttcaatttctctcatggcacccacgactatcaccaggaaaccctcaacaatctcaagactgccatgcacaacactggcatactctgtgccgtcatgcttgacactaagggacctgagattcggactggttttctgaaagatggaaaacctattcaacttaaagaagggcaagaagtcaccataactactgattatgacattaagggggatccggagatgatatccatgagttacaagaagctgcctgtccacttgaagcctgcaaataccatactgtgctctgacgggacgattactctcact

SEQ ID NO: 95038 - DNA, 356 bp, Glycine max
  Clone ID: PAT_MRT3847_56830C.1
aaatatataataaaaaaaaatatataaaaaaaaaaaaaaaaaaaaaacaaaaaaaaaaaactaaaaacaaaaaaaaaaaaaaataaaaaaaaaagaaagaataatgagacactaagtatgttgatcaatatggctgtggaatcttcttggaggttaactgggaatccgtctattgattgaattgggttgtttgtttagatgctgatcatcttactgaaggcagtgatggcagctgtcacactgcattcaacacaggatgatctagcccgatagctttactagactgcaggtgagcgggcattaccaattgcccttgttatctgttgctgtcggtgacatggagcacggcgtaggaa

SEQ ID NO: 95039 - DNA, 513 bp, Glycine max
  Clone ID: PAT_MRT3847_56831C.1
ttttatatgggatgactctcgcgggggtgcaggggggcctgccggagaatgagcgagaatgccagaacacaggacatccagaatccagaggtagatgacaggtaatacgatgccaagcagggccatccactactggatccgtatgacgtccgacaaccccattaggtgcagcacctagcgccgtcactggggtggcaccaagctagaactatgaggtgggtgctatggctcgagctagctatataacaactccatgtagcagtggttattgcacctgggccaagcacagtgctctgtggtgcaaaatatcaagcattaactgccgagagtgtttgggtggaagaatctattgcaggacgatggtcgtgggactatgtgcagacccacggattcggcagaagctgtctggttcgtcagagcagaatgcatgtacattctctcctacggtaagcactatctaaagttgacctctcttgtgatgccaagtgtgctcataacctggactctgggaaa

SEQ ID NO: 95040 - DNA, 235 bp, Glycine max
  Clone ID: PAT_MRT3847_56832C.1
tcgccgtgagccaagagccatactaattcagctacaaactgcaataacaggggcatggtggttatcgaaatgcgatcgcatcgtcgagaataatgggaattttgggagcgattcttatacatccagatgactcttaccctctgctgaaactcaaaatggcagctatgaacgcctagaagctgatcctgtctgagccgtactgggcgttctgctacacaatgctctacaaggtttc

SEQ ID NO: 95041 - DNA, 381 bp, Glycine max
  unsure (1)..(381): unsure at all n locations
  Clone ID: PAT_MRT3847_56833C.1
ggnnnnaaaaaaaanannaaagggnagtttgagttggnnnaaccaaaaaaaaccccataagcataaatcctaaaatctttttaaatgaaatagacgagaaaattttcccctaaaataaaaaaaaaatttgcttcataaaaaatcaaaaggggatcaaaactatataattcttaaccctaaattgagcatatccaacaaaaggtataaaattctaatgcccagtttcttaactcaaaaaaattcatttgttaaaccatactcaaacttcacaaacaatatccatagatgctgccgtttcacccaaaatctaccctcactttattgacaaccttttgccttgctataaaaaagcatagactgttccatgataaataacctttt

SEQ ID NO: 95042 - DNA, 310 bp, Glycine max
  Clone ID: PAT_MRT3847_56834C.1
ggagactgttgcaactcccccagctgctgacactaaggctgctgttgctgaggatgacgatgatgatgatgttgatttgtttggtgaagagactgaggaagagaagaagggagttgaggaacgggcagttgcagtgaaggtatctgcaaaaaaaaaagactctgggaaatcatctgctctgctggatgtaaaaccatgggatgatgaaactgtttttattacacccgcacaatgagggagatgtggtccaacgcaagggttgctttggggtaaataaaaatatgatcaagatggatgaggcgtgaaaaaa

SEQ ID NO: 95043 - DNA, 1134 bp, Glycine max
  Clone ID: PAT_MRT3847_56835C.1
cgacccacgcgtccggtggatctgtacgcttatcttattcaacttgtcgtgcaaaatctgttggcgacaattacgtgtgcgcccatgtcagcaagggcatctcctcgcacgccctagaagagaaacacattgcgccaccaaccaccaatccaatcttctccaacgcatcattcacactctaatcctcccaaccaatcctcctacgtcgtagaccccaaaacagagcaaaagaaagactccaattaacaaatccccaaaaccaaaaccattaatttcgctttgttccatttctttggtccaaaacaatcaggatcaacaatgggtctgttggatctggagaagcacttcgcgttctacggcgcgtaccacaacaacgccttcaacgtggccatccacatgctcttcgtgtggcccatcctcttcacgggccaaatgatcctctatttcaccccacccctcttaacctccgtagggttccttccctcagtattgcttctcaactggggcttcttctccaccctcttctatgccctcttctacgtcgccttggattacaaggccggttccctcgccgccttcctcaccttcttctgctgggtcgcttccagcttcgtcgccagttccctcggcttgtcactcgcctggaaggttgtgttggctgctcagttgttttgttggactggacagtttattggtcatggcgtgtttgagaaacgtgcaccagctctattggacaaccttgcccaagcttttctgatggctcctttcttcgtgttgctagaggtcctccaatttgttggatatgaaccatatccaggattcaagacaagggttaaggcaaggatagatgctgatatcaaacaatggcaggccaagaaacaaaagaaacattcttagcttgaacatgttagttaaaaatgtggtgttatatatagatcacttcaaaagaaacaaaaggaaaaacgacttgtattatacagatacactcttaaaactattggttatagtcaaagggtctgatgtgaatgaatctcattgatgtgttatagagaaatattgcttggagttaaataagatctcagccctcttttatattattggttatagtcaaagggactgatgtgaatgaatctc

SEQ ID NO: 95044 - DNA, 1027 bp, Glycine max
  Clone ID: PAT_MRT3847_56836C.1
ccacgcgtccggtgtgcccattacggctgcgagaagacgacagaaggtggtgaagaaacacattgcgccaccaaccaccaatccaatcttctccaacgcatcatttcacactccaatcatctaagttgttgatcccataacagaacaaaagaaaaacaccagttaataaatcccaaaacccaaaaccatttattttgccttgttccatttcgtctggtccaaaaaaatcaggaacaacaatgggtttgttggatctggagaagcacttcgcgttctacggcgcgtaccacagcaaccccatgaacgtggcgatccacacgctcttcgtgtggcctatcctcttcacgggccaaatgatcctatacttcaccccacccctcttgaccaccgtagggttccttcccacggtgttggtcctcaactggggcttcttctccaccctcttctacgccctcttctacgtcgccttggattacaaggccggctccctcgccgccttcctcaccttcttctgctggctcacttccagcttcatcgctaattccctcgcctggacgctcagctggaaggttgtgttggctgctcagttgttttgttggactggacagtttattggtcatggcgtgtttgagaaacgtgcaccagctctgttggacaaccttgcccaagcttttctgatggctcctttcttcgtgttgctagaggtcctccaatttgttggatatgaaccatatccaggattcaatacaagggtgaaggcaaggatagatgctgatatcaaacaatggcaggccaagaaacaaaagaaacattcttaacctgaacatgttagttacaaatgtaatgctagagatcacttcaacagacacaaaatgaaaaaccatacgtattctacagacacactctttagttattgttccaactctaatggccaagatcctcatctcctttaaatttgttaacataaatatgatctcagtcatgactttagtctcaaaatacatcatttctaccttcatctactgtc

SEQ ID NO: 95045 - DNA, 418 bp, Glycine max
  Clone ID: PAT_MRT3847_56837C.1
tgttgctgctcccattgacctgtcagaaatgcttggaaaccacatcacctatagtgatgccacactgccacctctatctgcttatagtcctgccttcttcaccactgacgttctatcttacaaaaagaatgcttccccagcacctccaaaaatagctgctgatgttgctcctgcctatgatgaactctccatgtggtatggtcctgacttaacgatcgttcttgcctgagggtctcttgaccgatccgaaatcccagagtacttgaccggaaaagtctctggagactatggttatgacccatttgtccttatcatgaagactgaccactttccctaatatatggcattggagtagattcatgccatatgggcaatgcttggtgctgctgcattcatcattcctgatgccttaacaaat

SEQ ID NO: 95046 - DNA, 290 bp, Glycine max
  Clone ID: PAT_MRT3847_56838C.1
gacccacgcgtcgtcttttggctgtgcccaatctaatctctaactctttacgactgcttgtaagcccttagcattttacacccattaagaatatggcagcagcagggaaagctccgtgatggaaggagggcaccttcacagaagaattggagggttgcaagaaagaagcaggagctaaaggggggagtagagatgcaggaatgagggctgagaggttattggtaataaagtgatagtaaatggacaaaggctgagaaactgtgggtggtcacagagggggataacatcat

SEQ ID NO: 95047 - DNA, 423 bp, Glycine max
  Clone ID: PAT_MRT3847_56839C.1
acctgctgaaaatataatagctgcatttcaaagaagccaaaagattgtgtttgccatctctaataatacatctggaagctcaggtgttcttgagctttaactctgttctttcagttgcaacccttggatgttgtaggcacttcagcttggttggcatggttatgaaagttgaagatgttgagcctgttctcgagctaaaggaatatttcgacagaagaatggaagaaagcaatctactgagcttgacccaaagccactgtaacacatattcaagcggctggaatgggtgatcgcgtttgtgtagatctctgcagtctcatgagaccgggtgggggacttcttgttggatcttttgccagaggattatttcttgttcactcggaatgcttggagtcaaattacattgcaagcaggccgtttcgg

SEQ ID NO: 95048 - DNA, 292 bp, Glycine max
  unsure (1)..(292): unsure at all n locations
  Clone ID: PAT_MRT3847_5683C.1
gtngcatgcacgcgtacgtaagctcggaattcggctcgaggttctagatcgcgagcggccgccnnttagtganctcgtcganncgggaattaattncggaccggtatctnnanncgtaananntttccctatagtaantcntattaaaanntggcgtaatcatggncatanatgtttccnntnnccaattgntatccggtcnaaattgccacanaaaatacgantnaacanaaaaaangggaaaaaaggaaacnagaatgggnggcgnaaaaattntnggtgcntcnangng

SEQ ID NO: 95049 - DNA, 269 bp, Glycine max
  Clone ID: PAT_MRT3847_56840C.1
acggctgcgaaaagacgacagaagggtttttacctcatgatataaagcacaagtttttgtagacaacaaaatggaggttggcaagtaatgggaaataacatccaatgggatatcctgagagctccaccagtagatacccctccatggaatctacacgtgtctgattgggtacaagacttaaaaccagaggatcatattgagatcccgtaagccgataatagaaagtacaccatatggtatggttcttgccatattgccttcttgttgtc

SEQ ID NO: 95050 - DNA, 1642 bp, Glycine max
  Clone ID: PAT_MRT3847_56841C.1
cccacgcgtccgcccacgcgtccgcccacgcgtccgcccacgcgtccgcccacgcgtccgcccacgcgtccgaaatatttcattgttatatatcgtgggaaagactttgttccaacaagtgtcgctgcagttttagctgaaagagaggaattaacaaaacaggtacaggacgttgaagacaaggtgcgttgcagagcagttgatgcaattccatcagggcaaggtgaagcaacggcacaggctgggactttagcagagttctatgaggcccaagctcgatggggaagggaaatatctcctgatgaacgtgagaagatgatggaagaagctgccaaagccaagactgctaagcttgtcagacaaattgaacataaaatatttatagcccagactaaaaagcttagagcagaaaagctcttagccaaaatagaagcatctatggttccagctggtcctgattatgatcaggaaacaatcacagatgaagaacgtgttatgttccgtaaagttggtttaagaatgaagccatacttaccacttggtatacgtggtgtttttgatggtgttgttgagaatatgcatttgcattggaaacaccgagaacttgtaaaattgatgacgaaacaaaagactcttgcttttgttgaagacacagcaagattacttgaatatgagagtggtggaatactggtggcaatagagaaagtttccaaagaatttgctcttatttactatcgtggaaagaattataagcggccaattactcttaggcctaggaaccttctaacgaagggaaaggcattaaagcgtcatgtagccatgcaacccacgcgtccgctgagtcagcatattactgaattggaaaaaactatagaacaaatgaaaaaagaacttggtatgactcaagattcagatgttgaagatggggggagcatcgaggaagatgaccataaccaaatagacatctcagaattggccctaagtgaggatgaagattctgatggttatgatgatgaggaagacagtgattgggacgatggcgaggcctccgagttttcagaattcataaatgatgagcacccttgaaggcaggttgacatatttgcattgatgtttccttgatcacatattccattgcctgcggctagaaggacaatcaagaaggggcaggctaaaatcaacttgtgtggttcttcctctatttgcacattctttagagctgaaaatatggagttccatttattcaaacttgtacaaagatgtgcctagatatcatttgtgttcctgcagtagcaaaaatccaccatccattatctacttgcctctggttttttcatcatcttttaggatgctggctgacttttgagcagcatgaacaaaatttctgctgtatactggatggcccctctcactgtagttgacctgattattgtaaatccttcatcacattgtaataggctatatggtaaaggataatgcctttcttgtatttactatattgatgtcatgccttcctgagattttattttattttctttgatgttcaatgccatggagtagacaataaatgtatcatcctgatgtaatgggttaaaaggcacaattttggttatagcttccaaactggctctgttgtccataa

SEQ ID NO: 95051 - DNA, 343 bp, Glycine max
  Clone ID: PAT_MRT3847_56842C.1
tacgcgaccgcttacgcgcacggccacgcggcgggttacgaagagcgaacgaaaggagctgaaaaaagaagcgagagagacggcgaagcggaagccgcggatgagagaagccctaaaaaaagggaggatggaaacgggacgaaaggacgcgcatttgaccatagacaggggaatgatagctatacaggggcacgcactgcacactgaaattcaccgacatcaacagaacggaggaggggcaacacatccaaagagaacgcatacacatcggcaaagggttggacgaccgtatcgacggcggggcgcaaggcacacaaccattagaaaatgggatgagaggact

SEQ ID NO: 95052 - DNA, 1636 bp, Glycine max
  Clone ID: PAT_MRT3847_56843C.1
cccttccgcgcggtcgcagttgttggaaaaggccaaaaactatgttgcggagaaagtcaccaacatgcccaagccagaggcgagtgtcaccgacgtggacttcaagcgcgtgagccgcgacagcgtcgagtacttggccaaggtctccgttcagaacccttattccacttccattcccatttgtgagatcaagtactccctcaaaagtgctggcaggttcctatcactattcgctaccccccctttttaattattggattaattggttttcttttgtctttgtgatcgagttaatcacccaccatgaaccaatcatggatcgggttgatttgttttatggttgttggattttttgcagtatctgcttcttcttaaatgatttaatacaaagatcaatcttcggtttgagcttaatcaaacttaaactttctcgtccttccccagaaatctactgtgtgaaaattgaatacagttctctcccataaatttagtgtgtttacattaattggaattcggtgcagtgttttaatttgtttattgttattttatttatttatttatcttctatatgtttctttaaaactatttttcatttttaatataatccatagtattataaaaatcatctatccacaaaccacgtgtcaacatattatcaattttatatgggatataaatatttatttgattgttgtgctgattttaaggactctttttttcaatttgggtgggcatcaattattttttatttgccttgtgctctctttttatctttttgtatgttacttttctgttttcattgaaatgatttcaattgcttcttttggtcacgcaaagtatatatatgagtgattgttgttctattttttttaagttaataattacactctttataatatgaaatgtatataacaaagatatataaggaatgattgtggctagaaggaaaataccataaaatttattctttccacaatttggaagctcttaaaggataaagaaagagctaaaaaaattacctggttgtcggttgcacatacttcttccagatttggacagaaaagagagagagagaggaagttgcacatagtttgcattctttaacttttttttttttcttaaaacgaacattgcataaaggaagaatccactcccttatatccattgaaaaatctgcattttttcgtgtgatcgtttaatttttggtttacattatttttgtgtccttgattatttgttactttagataagaattgatattgtgttagttatattaattatttatatttatttttgtgttgagtggtgaagggagatagcagcaggaccaatacctgacccagggtcattgaaggcaagtgacacaccaatgttggatgtgccagtgaaggtgcctcatagcatattactgagcttggcaaaggacattggtgcagattgggacattgattaccaattggatattggacttgttattgaccttcctgtcattggcaacttcaccattcctctttctcagaagggagagatcaagctccctaccctcactgacatgtttgcctaattccaactaaaggcttagaacaaagaaaataaatcaataaatacatcctccatcatattttcctgttgtatc

SEQ ID NO: 95053 - DNA, 865 bp, Glycine max
  Clone ID: PAT_MRT3847_56844C.1
ctcgagccgttcctccttaatttgaggttaatattcccaaaagaagagagagagagagtatcgttcatccttattacaaggactgggcacgttaagcttcacaattcattcacattcacattgtagctccgttaacaagattcactttcatctatccactcactaacgtgatcacacactcatcatcatcaataatgtcgcagttgttggaaaaggccaaaaactatgttgcggagaaagtcaccaacatgcccaagccagaggcgagtgtcaccgacgtggacttcaagcgcgtgagccgcgacagcgtcgagtacttggctaaggtctccgtttagaacccttattccacttccattcccatttgtgagatcaagtactccctcaaaagtgctggcagggagatagcagcaggaacaatacctgacccagggtcattgaaggcaagtgacacaacaatgttggatgtgccagtgaaggtgcctcatagcatattactgagcttggcaaaggacattggtgcagattgggacattgattaccaattggatattggacttgttattgaccttcctgtcattggcaacttcaccattcctctttctcagaagggagagatcaagctccctaccctcactgacatgtttgcctaattccaactaaaggcttagaacaaagaaaataaatcaataaatacatcctccatcatattttcctgttgtatcaatttggattttagtttttgttttcacacttcattatgcctttttttctttctttcctttgtggatgctttaaagtataaactacacatcataatatttcatataacacatatggttttggtactccaaaaaaatatgaa

SEQ ID NO: 95054 - DNA, 385 bp, Glycine max
  unsure (1)..(385): unsure at all n locations
  Clone ID: PAT_MRT3847_56845C.1
ctttgcgtccgtatagtaagaagcagaagaaaatgccgatttctagaattgccattggaaattcttcggagttgaaccaatctgatgcacttaaggagcaagcatgcatcgacaganccgggtaactgatcaatcaagtacaagatgctccggaggaggtgaatgtgcccaccaacaaaggcaccgaaagagagagcatggaatacatgaccgctggaaatgttggggagaacggagatgagagctcaaagtgctcaggcatggtactatgatggctgccactcaccttgttgatactgaagtagccgcgccagacatgatactgtttacgatgccgttgaatccatgacaaagaacagtgcccgacttaagagtcttgtaaaaa

SEQ ID NO: 95055 - DNA, 682 bp, Glycine max
  Clone ID: PAT_MRT3847_56846C.1
ccacgcgtccgatcagcctcaaatgctaagaagtaaggacatggggagttgttattgtccctaattccatttgttattggctcctacaaatgtgaaaaaagaccttcttatcccacactctttcccttcaccttcttctcaccccacccaacccctcacctcctcatcaatgtcgtgagccacaccacctctgtccagatccaaactgccacacatcacaacaatcacgtcaaccacctctgcctcgcacaaccccctcaccgtaccaccaactcaccaaccaaatctgaacgcaactcaaccaacaccctgcgtcctcgccaacctgtccaaacaccaccgcgcctcaacaactccttcccaacttcatatttcatcgtatatattttttcacctccacttaatccaaccaaaacacgattccattgataaatgcacgaaaaaatcgtgttttcattgtatatattttttcattgcaaagttgtacaacatgatcatatttccatgaaaagggcattttcaaaagaaaaaaaaaaggtgctaatcccttggtgggggccattagtaatgacagtgagaccaatagcaaccccaactacgtgttgtagtgtagatcttccaagcaaaccctgaatccttaacccaactaaatgaataaggacaccatagatatttggcccaa

SEQ ID NO: 95056 - DNA, 598 bp, Glycine max
  unsure (1)..(598): unsure at all n locations
  Clone ID: PAT_MRT3847_56847C.1
ggctcgagcaatgccgaaattcaagcgaaaacttgtgatgggtgcaaatggtcgcaccaaccccttggtgtggctagtggcgattatctgcaccatcatagcagtagcagtggtagttgtaggcattgtagtgttcattggttacatagtgatacaccctagagtgcctgtgatcagtgtcaccaatgcacatttagatcttctcagaaatgactatgctggtttgctccaaacccaactcaccatcgtcgtgactgcgaagaatgggaatgccaaggctcatgcatccttctccgcgatcaccttcaacatcagctaccagggccaagacattgctgtgcttgttgctgacccttttgaggtgccaaagaacagctcaaaggacctcagctatgttgtccaatcttcttctatacccttgactcctgatcaaatggaggaagtgaatgatgcttggaagaggaatgaaattgagtntgacttcaaaggggctgcaaggacacagtggagggtagggcctttagggtctgtgaaagttctgtgccatttttgattgtgacctcaagtttcgccccgtgaatgggacttacattccctc

SEQ ID NO: 95057 - DNA, 1606 bp, Glycine max
  Clone ID: PAT_MRT3847_56848C.1
aaaggaatgagatcctgacccacgcgtccgtcttgttatagattgagatgaaatctggaacattggtgttgcgttgggtcaattcacagcttggaagaattttaggttgggtagagcgggttattcagcaagagcattgggacccgatatctcctcaacaacgacatgctggttctattgtggaagtttacaggattgttgaggagacggttgatcaattttttggtcttaaagttccaatgaggtttacagaattgaacagcttgtttcgtggcattgacaatgctctccaagtgtatgcaaataatgtagttaatgagttggcaagcaaggaggaactgataccacctgtgcctattcttacacgatacaaaaaggaagctggaataaaggcttttgtaaagaaggaactgtttgatgctcgtgtgcctgaacctgatgaaacaaggcccagccaaattagtgtccttgcaactccaacactttgtgttcaattaaatacattatactatgcaattagtcatctgaataaattggaagacaacatctgggagcgatggacaagtaaaaggtcccaagaaaaactcataaagaaatcctttgatgacaagtccaaaagtttttcccaaaaggatacctttgagggaagtagaaaagttataaatgctgctatggaccgcatttgtgagtacacaggaactaaaattgtcttctgtgatttgagagttccatttatggacaacttatataaaccccagtgtctctggatgtaggttggatgcacttatagaaccacttgatatggaacttagccaactttgtgatattgttgtggagcctctcagggatcgcatagtgacaagtcttcttcaggcatcattggatggcttactccgtgttatcttagatgggggtccatcgagagttttcttcaccggtgatgcaaaattattagaggaagatctggaggtgttaaaggaattctttatatctggaggtgacggcctccctcggggtgtagtcgaaaatcaggttgcacgtgttcggcatgtgatcaagttgcacggctatgagacgcgagagttgattgaagacttgaaatctgctagtggcatggaaatgcaaggtagcaaaagcaaattgggaactgattccaaaactctattaagaatattatgccacaggagtgactcagaagcctctcaatttctgaagaaacaatacaaaatacctagttcttctgcttagaggaatgtgtacaacagaagggaaccagcaaaatttttcattttggtgttagctttctgtgaatatacattgctgccaatgtgtcattttttgtcagaattattaaaattacccattcggtgtataattagcggccataactgatatttttcctttccttttttttcgtttttaatcgaactacactgttgttgatcttcttttgtaaaatttcctccatgtgaatactgtaactgtaagatttcaattaatgaagctgctattctttcttataagggtagttgtttcatattaagaaaacttcaactgaatgtgcaatttattccctaatttcctaataaagcagttttatttctac

SEQ ID NO: 95058 - DNA, 1187 bp, Glycine max
  Clone ID: PAT_MRT3847_56849C.1
ccacgcgtccgcggacgcgtgggccaaattagtgtccttgcaactccacactttgtgttcaattaaatacattatactatgcgattaatcatctgaataaattggaagataacatctgggagcgatggacaagtaaaaggtcccaagaaaaactcataaagaaatccttagatgacaagtccaaaagtttttcccaaaaagatacctttgagggaagtagaaaagttataaatgctgccatggaccgcatttgtgagtacacaggaactaaaattgtcttctgtgatctgagagttccatttatggacaacttatataaacccagtgtcagtggctgtaggttggatgcacttatagaaccacttgatatgggtttaaacagcctccccaggcctggttgggcagactaaaatccaccttctagcttcattgtgctggtgtcctaaataaagctctctctcccactttgttgctctgagcaagctgtgtgattcttctgcatcacatccctcaagcttggggggtataagtgttactcatgaacttagccaactttgtgatattgttgtggagcctctcagggatcgcatagtgacaagtcttcttcaggcatcattggatggcttactccgtgttatcttagatgggggtccatcaagagttttctttcccggtgatgtaaaattattagaggaagatctggaggtcttaaaggaattctttatatctggaggtgacggcctccctcggggtgttgtcgaaaatcaggttgcacgtgttcggaatgtgatcaacttgcatggctatgagacccgagagttgattgaagacttgaaatctgctagtggcatggaaatgcaaggtggcaaaagcaaactgggaactgattccaaaactctattaagaatattatgccacaggagcgactcagaagcctctcaatttctgaagaaacaatacaaaatacccagttcttctgcttagaggaatgtttacaataaaagggaaccagcaaaattttcattttggtgttagctttctgtgaatattcattgcttagaggagtttttgcctttcctttgttttggttttaatctaactacaatgttgttgatcttcattgtaaaatttcgtccatgtgaatactgtaattgtaagttcaattaatgaagctgctattctttttt

SEQ ID NO: 95059 - DNA, 720 bp, Glycine max
  unsure (1)..(720): unsure at all n locations
  Clone ID: PAT_MRT3847_5684C.1
ggggcatacccagaacttgctgtgaaaatcatggctcgtatctgcatgaagcagaatcatcccttgactatggtgccatcttcaaagagatgataaggtctacaccantgccaatgagtccattgcagagccttgcatcaacggctgtccgcacagcaaacaaggccaaagcaaaactcattgttgtactgacacgtggcgggtctacagctaagttggttgctaagtataggccagcggttccaatattatcggtggtggttccagtgttgagcacagactcatttgattggacatgcagtgatgagacgccagcaaggcacagcttgatatataggggcttgattccaatattgggggagggatccgccaaggctactgatgcagaatctacagaggtcattctcgaagctgctcttaagtccgcaacacaaaggggcctttgtaagcctggtgatgcagttgttgccctgcatcgtattggcactgcctctgtcataaagatctgcatagtcaaataatatttcatgctcaactcatgcagggttattatgttttgacctttttctttctttctttctgctgtttatccatattatcataaaatggaggatttacttactacctgtagaacgactgggtttttgtatactctgtttaaattacggagtacttctaaatgagtttatcatggaaataattactatttttttcctttta

SEQ ID NO: 95060 - DNA, 809 bp, Glycine max
  Clone ID: PAT_MRT3847_56850C.1
cgacaccataaatatcaatggacttgctaggcagtccctgattaatgcagatggcattatagagaaatcatttttgcccggaaagtactccattgagatgtcttcatccgtctacaagaattgggttttcactgaccaagcattaccagctgattctcgtcaagagaggattggcaattgaagatccctctgcaccccatggccttcgccttgtgatagaggactacccttatgctgttgatggacttgaaatatgggatgctattaagacatgggttcatgaatatgtctccttgtattacccaacagatgcagcagttcaacaagatactgaactacaagcatggtggaaggaagctgtggagaagggtcatggtgacttaaaagaaaagccttggtggcctaaaatgcagacaactgaagatctcattcaatcatgctctattatcgtttggacagcttcggctctccatgctgctgttaattttggacaatatccttatgggggcttaatccctgaaccgtccaactctagcccagaaggtttattccagctgaaagaaccccagagtatgatgagatggtgaagaatcctcaaaaggcttatctgagaacaatcacacccaagtttgagacccttattgatctatctaattaaaaagagtttgtggtttccttatctatgttgtacttctgaataacatagactttatgcatgtctatgcgtaattattgcctgaacttctgcactattgtatttggatgctctcggttttcatataataaagtgtgttctcactttcactttg

SEQ ID NO: 95061 - DNA, 1276 bp, Glycine max
  Clone ID: PAT_MRT3847_56851C.1
gtggatgactgatgaggaatttgctagagaggtgattgccggtgtaaacccaaatgtgatccgtcgtcttcaagaattcccaccaaagagcacacttgatcccacactctatggtgatcaaaccagtaccataacaaaagaacaattggagattaacatgggaggggtcacagtagaagaggcacttagtactcagagattattcatattagattaccaagatgctattaagacatgggttcatgaatatgtctccttgtattacccaacagatgcagcagttcaacaagatactgaactacaagcatggtggaaggaagctgtggagaagggtcatggtgacttaaaagaaaagccttggtggcctaaaatgcagacaactgaagatctcattcaatcatgctctattatcgtttggacagcttcggctctccatgctgctgttaattttggacaatatccttatgggggcttaatcctgaaccgtccaactctagccagaaggtttatcccagctgaaggaaccccagagtatgatgagatggtgaagaatcctcaaaaggcttatctgagaacaatcacacccaagtttgagacccttattgatctttcagtgatagagatattgtcaaggcatgcttctgatgagatataccttggagagagggagactccaaattggactactgataagaaggcattagaagctttcaaaaggtttggaagcaaactgactggaattgaaggaaaaatcaatgcaaggaacagtgatccaagtctgagaaaccggactgggccagttcagctgccatacactttgctccatcgttcaagtgaggaagggttgactttcaaaggaattcccaacagtatctctatctaattaaaaagagtttgtggtttccttatctatgttgtacttctgaataacatagactttatgcatgtctatgcgtaattattgcctgaacttctgcactattgtatttggatgctctcggttttcatataataaagtgtgttctcactttcactttgtaaaaaaaaaaaaaaaaaaaaaaaaaactcgcacaaaactcgcatggggttgttcttggctatttttttaaatctttttttggattttagttataattgaatctttgcacttaaattagttttaaatgggaactcatgtttaataatgtacgtgtcttatcttggtcaagtatcaaatctgttgcaaaaagttgccaaagcttaaaaaaaaaaaaaaaaaaaaaaaaaaaaaaaaaaa

SEQ ID NO: 95062 - DNA, 447 bp, Glycine max
  Clone ID: PAT_MRT3847_56852C.1
attattatttaaatgggtctcacattttttgtttgttgtgttattactttctaaaatgagagaaatcaaacctgaaggaataattttaccaagtttcaaaaattaaacattaataactgcgaaatttgagtttaattgatagtcaattttgattaagaataattaaaattcttttattttactattgtttttaatgaaataaatgagaattttaatatcattttaattcttaaccagcaagattcaaaagaagaaagattataagtactttgaagaaaaattgatacaaaaatttgaagattgagatagctcgtttaacgtataagatagacctaacatgtcaacttgctcaacggctagcacaaatttagcgcaaaaaagatccacgaagaaacctcaaggcgcacttaacgcaaattctgagctgaagacgtgatcatacgcata

SEQ ID NO: 95063 - DNA, 491 bp, Glycine max
  Clone ID: PAT_MRT3847_56853C.1
cccttatgctgttgatggacttgaaatatgggatgctattaagacatgggttcatgaatatgtctccttgtattacccaacagatgcagcagttcaacaagatactgaactacaagcatggtggaaggaagctgtggagaagggtcatggtgacttaaaagaaaagccttggtggcctaaaatgcagacaactgaagatctcattcaatcatgctctattatcgtttggacagcttcggctctccatgctgctgttaattttggacaatatccttatgggggcttaatcctgaaccgtccaactctagccagaaggtttatcccagctgaaggaaccccagagtatgatgagatggtgaagaatcctcaaaaggcttatctgagaacaatcacacccaagtttgagacccttattgatctttcaaaaggtttggaagcaaactgactggaattgaaggaaaaatcaatgcaaggaacagtgatccaagtct

SEQ ID NO: 95064 - DNA, 657 bp, Glycine max
  unsure (1)..(657): unsure at all n locations
  Clone ID: PAT_MRT3847_56854C.1
gtcaatttgggctaatatcttatgcggggtttaattttgacctgtccacttctagctagaaggttaatcctagctgaagcactttagagtatgatgagatggtgaagaatttaccaaggcttatttgagaataatcataattaagtctgagatctttattgattttttagtgatagagatattgttaaggtatgtttctgatgagatatactttggagagagggagattctaaattggantactgataagaaggcattagaagctttcaaaaggtttggaagcaaactgactggaattgaaggaaaaatcaatgcaaggaacagtgatccaagtctgagaaaccggactgggccagttcagctgccatacactttgctccatcgttcaagtgaggaagggttgactttcaaaggaattcccaacagtatctctatctaattaaaaagagtttgtggtttccttatctatgttgtacttctgaataacatagactttatgcatgtctatgcgtaattattgcctgaacttctgcactattgtatttggatgctctcggttttcatataataaagtgtgttctcactttcactttgtatttagttcatcttatgtttaccagtaataatacagaagcgatcgcgtttattactaaaaaa

SEQ ID NO: 95065 - DNA, 125 bp, Glycine max
  Clone ID: PAT_MRT3847_56855C.1
gccttcattggtttccgttgggccttcctttgcaattccagttgttgccatttttaccccgggttccggccaaaaaaatggtccaggaggtggtttcttaatgggaaggaattgtagggtgaaaa

SEQ ID NO: 95066 - DNA, 535 bp, Glycine max
  Clone ID: PAT_MRT3847_56856C.1
aaaaaaggatgacccccattcaatggaaaatggggattcaatacatactgttacaaaaaattcgggttttggaatctttgaaatggtccaactgtaaaggggcagaaaacggtcggtccacaagtggtaccacctagaagcataaggaaaggggctaaaaaaaaatatcatcatgggcctaaaaaaagcacctaaatggttttttcatccaagttaaataaggcttttttaaaccacctcagtatcataacacctaaattcggcgtttttttgggagtctgcacccattagggggttttctaggggtatcttaaatgtatacaatgggatttttatcccctttaaaaccagcagaaaagccctccttccagctaattatggcattcctttttctcctaaaaggggaaaatccattcactttcatgacaacagatttaaatcccaagcccctagcctttgggccaaaaacttccggggttgcctgggcagcatacctaaaaagcttttgccctgatttcaggtctttaaagggacc

SEQ ID NO: 95067 - DNA, 3101 bp, Glycine max
  Clone ID: PAT_MRT3847_56857C.1
ttaaccggtggagctcatattaaaaaaatgatgtttatactttctcccttctcaagtcctctataaataccaaaatattcttggcttcctcacaccacaagcttctccttcttttgggaaaagattaacaataaaagtgtggagtactgttgatagcaaagatgtttgggatcttcgacaaggggcaaaagataaaggggacagtggtgttgatgccaaagaatgtgttggacttcaacgccataacctccatcggtaaaggtggtgttattgacacagccaccggcatcttaggccaaggcgtcagcttagttggtggagtaattgatactgccacttccttcttaggccgtaatatctccatgcaattgatcagtgctactcagactgatggcagtggaaatgggaaagttggaaaagaagtctatttggaaaaacatcttccgaccttgccaacgttgggagcaaggcaggatgcgttcagtattttctttgaatgggatgctagttttggaattccaggagcattttacatcaaaaactttatgactgatgagtttttcctcgtcagtgttaaactcgaggacattccaaaccatggaaccattgaatttgtttgcaactcatgggtttacaacttcaggagttacaaaaagaatcgcattttctttgtcaatgatacatatcttccaagtgccacaccagctccactacttaagtacagaaaagaagaattggaggttttaagaggagatggaacagggaagagaaaggactttgacagaatctatgattatgatgtctataatgatttgggcaatccagatggtggtgatcctcgcccaatccttggtgggtctagcatctatccctaccctcgcagggttagaacaggaagagaaaggaccaggacagatcccaacagtgagaaaccgggcgaggtttatgttccaagagatgaaaattttggtcacttgaagtcatcggatttccttacatacggaatcaaatccttatctcacgatgtgatacctttgttcaaatctgcaatttttcaattaagggtcacatcgagtgagtttgaaagcttcgaagatgtgcgtagtctctatgagggtggaattaaattgccaacagatatactgagccaaattagccccttaccagccctcaaggaaatcttccgcactgatggtgaaaatgttcttcaatttccaccacctcatgtagccaaagttagtaagtctgggtggatgactgatgaggaatttgctagagaggtgattgccggtgtaaacccaaatgtgatccgtcgtcttcaagaattcccaccaaagagcacacttgatcccacactctatggtgatcaaaccagtaccataacaaaagaacaattggagattaacatgggaggggtcacagtagaagaggcacttagtactcagagattattcatattagattaccaagatgcattcatcccatatttgacgaggataaacagcctacctactgcaaaagcttatgccacaaggacaatcctgttcttgaaagatgatggtactttgaagccacttgctattgaattaagcaaaccacatccagatggagataatttgggtcctgagagtatagtggtgttgcctgcaactgaaggtgttgatagtacaatttggctattggccaaggctcatgttattgtgaatgactctggttatcatcagctcgtgagccattggttaaatactcatgcagtgatggaaccatttgccatagcaaccaataggcatctcagtgtgctccaccctatttataaacttctttatcctcactaccgcgacaccataaatatcaatggacttgctaggcagtccctgattaatgcagatggcattatagagaaatcatttttgcccggaaagtactccattgagatgtcttcatccgtctacaagaattgggttttcactgaccaagcattaccagctgatctcgtcaagagaggattggcaattgaagatccctctgcaccccatggccttcgccttgtgatagaggactacccttatgctgttgatggacttgaaatatgggatgctattaagacatgggttcatgaatatgtctccttgtattacccaacagatgcagcagttcaacaagatactgaactacaagcatggtggaaggaagctgtggagaagggtcatggtgacttaaaagaaaagccttggtggcctaaaatgcagacaactgaagatctcattcaatcatgctctattatcgtttggacagcttcggctctccatgctgctgttaattttggacaatatccttatgggggcctaatcctgaaccgtccaactctagccagaaggtttatcccagctgaaggaaccccagagtatgatgagatggtgaagaatcctcaaaaggcttatctgagaacaatcacacccaagtttgagacccttattgatctttcagtgatagagatattgtcaaggcatgcttctgatgagatataccttggagagagggagactccaaattggactactgataagaaggcattagaagctttcaaaaggtttggaagcaaactgactggaattgaaggaaaaatcaatgcaaggaacagtgatccaagtctgagaaaccggactgggccagttcagctgccatacactttgctccatcgttcaagtgaggaagggttgactttcaaaggaattcccaacagtatctctatctaattaaaaagagtttgtggtttccttatctatgttgtacttctgaataacatagactttatgcatgtctatgcgtaattattgcctgaacttctgcactattgtatttggatgctctcggttttcatataataaagtgtgttctcactttcactttgtatttagttcatcttatgtttaccagtaataatacagaagcgatcgcgtttattactaccaaaaaaaaaaaaaaaaaaaaaaaaaaaaaaaaaaaaaaaaaaaaaaaaaaaaaaaaaaaaaaaaaaaaaaaaaaaaaaaaaaaaaaaaaaaaaaaaaaaaaaaaaaaaaaaaaaaaaaaaaaaaaaaaaa

SEQ ID NO: 95068 - DNA, 264 bp, Glycine max
  unsure (1)..(264): unsure at all n locations
  Clone ID: PAT_MRT3847_56858C.1
tttttactttcctcacttatactatcagttttctatcaaccctccaacccttctcatcttcctctccacagagaatggttctccgtcgtatcaaagtatcaactatagatcaaggaacaaggaatcataaaattttataatattatttttattttattttccccatttctcttaaaacaaactatatcacatacaacttttttnttctcttttttaaattattatttttcctctatctatcatanagtacttttttcctcnaaa

SEQ ID NO: 95069 - DNA, 903 bp, Glycine max
  unsure (1)..(903): unsure at all n locations
  Clone ID: PAT_MRT3847_56859C.1
ccccatatgaagaaagatgtccataagcattgcactaggtgtgtggcttgtttacaagccaagtttagggtgatgcgtcatgggctatacacacccttacccatcccatgtgcacgttgggtagacattagtatggactttgtccttgggcttcctagaacccaaagaggtgtagactctatctttgtggtggtggataggtttagcaagatggcacactttataccatgccacaaggtggatgatgcttcccacatctcaaaagtgtttttcaaggaagttgtgagactccatggtttgcctaggaccattgtgtcagatagagatgctaagttccttagccacttctggaaaaccttatgggctaagttaggaactaaacttcttttctctaccacttgtcatccacaaactaatgggcaaacagaggtagtgaataggtctttatccacccttttaagggctcttctgaaaggcaaccataagtcttgggatgagtatcttcctcatgtagaatttgcctacaacaggggggttcatagaaccaccaagcagtccccttttgaggttgtctatgggttcaatcccctaacaccgttagacctcattcccctcccactggacacttcttttatacataaagaaggggaatctaggtcagaatttgtaaagaagatgcatgagagggttaagaaccaaatagagaaccaaacaaaggtgtattcaactaaaggcaatagaggaagaaaagagctagttcttaatgagggtgactgggtttggctccatcttaggaaggatagattccctactaanaggaaatccaagcttagccctagaggggatggaccttttcaggttttggagaggatcaataacaatgcctataggttggacctccca

SEQ ID NO: 95070 - DNA, 214 bp, Glycine max
  unsure (1)..(214): unsure at all n locations
  Clone ID: PAT_MRT3847_5685C.1
cccacaaaaaccannagagcaaaggggggaggaaggggaaaccgcccggacccccacggcacagcccgaagagacaaaagaaagccgcccccgaaagggggaggagccggggcaaagaacgccacccagaagaggacggcaaaggccgaacaggcaacgaggagagacaacggaggagagcgcggcgaagaagccagcaagaggagggccgacc

SEQ ID NO: 95071 - DNA, 422 bp, Glycine max
  Clone ID: PAT_MRT3847_56860C.1
ccggcgacaaaaactttcaattatccttgctacctaggaaaaaaaaaatccctcccatttttcaaattcggaaacagggcaaaaccaagcgatccgcttagtcctcctcctcctaaccctcctaaccaacaaggttgaaaaacttgggggtgtcctcgcccttgtggggggcgacgacccggagccagtcacggagctgctgttttttgaggaacttcttggtcaggtccttgatgtaccgaccggagaactcctggggggcaacgacctcgatgcggccgtcgccgaggttggtgactttgatcttttccccgaggttgccggtgaggccctcaaccttgatgccctgctggaggaaggtggtgaaggcaaaggcgtcaaaaatgcggtcgttcacgggctggggggcgttgatgataaac

SEQ ID NO: 95072 - DNA, 275 bp, Glycine max
  unsure (1)..(275): unsure at all n locations
  Clone ID: PAT_MRT3847_56861C.1
gggtggtgttgctgttgcaaattgcaacactcagncngcactgcacctatttatnnnannnnccagcnnagcnacancnacaagcccacgncgctttcataaaaccacacccaccngccatcaggggggggccccaaaacgcaccancancaaaaccnaaacccagngaancagagagagagagagagagaaangagngaagaagccaaaaagaaccncgccggagcncnaacggcgaggcccaacnccgnngagccgaaaccggcaccggngcc

SEQ ID NO: 95073 - DNA, 181 bp, Glycine max
  Clone ID: PAT_MRT3847_56862C.1
aaaaaattagaacctcaactcatccatttctaaaattttatcaaaattaaaaaaaaattaattaatttgtatttaacagcccactcatttctctactattttgggcctttgatatttttcggcggcatcatcatccggatgtatgggaatcaaacttgggaatagcgattcttttgcaact

SEQ ID NO: 95074 - DNA, 340 bp, Glycine max
  Clone ID: PAT_MRT3847_56863C.1
tttcttttttttatgggaacttctaacacagattcatatagatccataatgtctcacgaggatcctggcaatagcctgtgatactgattctcttagacacatagcttgacaccttattacgtaggcatcttttcactcaacgtcattttaacactaatcatactaataatagtgcaacaggactcgaaatatgagactgcaccattcacatgagtatataccggacgtgtagaaccatatcgagaatcatgaacttgcgaaataagattagataggcagtactatcttgcgcgacatattaggctagttatggtaccgactgagatctaccccttaagcc

SEQ ID NO: 95075 - DNA, 366 bp, Glycine max
  Clone ID: PAT_MRT3847_56864C.1
taccggatcgacgcacgcgtgcgtccactcgtctgtacggatacgacaaactacacaatgtttgtgcctgcgacaccttattcaggtttcgcggccatcatctgtggatgggaatattctctccccccaccttcatctctgaagaatgacatttatattattgttcatcatatggtcaccaatatacagcgtcctattccgaatacagcagggccctcacttacgaccctataaattcgcttatatgttgtgtcgcctttatacagttccgggctcatttatacactttattgttttgtgtacaatctagacaccttaactattacccattggatgacaagtctattaacagcacactcataaatt

SEQ ID NO: 95076 - DNA, 346 bp, Glycine max
  Clone ID: PAT_MRT3847_56865C.1
ctgaagaataggaaaggcagttttgttagaattatgtattagacaaaaagaaatgagaaaaagaaaaggtataatattgagtaaagataaatggtgatttgctttggttagaaaaagaaaagggtttttttgaaggaactaaaattaaatttaatggatgttttttttataaagttcgagaatgaaaaaatcatgtcattaccgaattgaaagggacttggacaaaattactatttgttgcggttggtgtatttggaaggaggcgcttactgaaggggcttattaagaaagcgcgttttgtagggaaaatgaaattcaccttgaagctggctattaacctaggggg

SEQ ID NO: 95077 - DNA, 226 bp, Glycine max
  unsure (1)..(226): unsure at all n locations
  Clone ID: PAT_MRT3847_56866C.1
ggcttcctcaatgatctcttccccagctgntaccactgtcaaccgtgccggtgccggcatggttgctccattcactggcctcaagtccatggcttgcttccccacccagaagaccaccatgacattaccttcattgctagcaaccgtggaagaatgcaattgattgcaagtgttgcaaccaatttgcaagaaaaattttgaaactttttcttacttccaaaccttg

SEQ ID NO: 95078 - DNA, 476 bp, Glycine max
  unsure (1)..(476): unsure at all n locations
  Clone ID: PAT_MRT3847_56867C.1
ggctcgagattcatttgtttgcagcaaaacttccagccattaattattatgtatataggactcagctctggagagatcttatcatgaacagtttatttaatttatgtacaaaaatttaagaaatgggatatgttgtctcatttcaatattgtgggaggacaagccacccccggccgaaagatttagagtacgaagccaaattcaaattaaaccaaagattctttgccaaggctttcgtgagcaggtttttttaataaagcttatgtttatttttataaacttttagacttaaatatgaatttagttatgtaaattcatgcttttttagtttaaattcgtgtatgtgttttttcaattttgagttatgatgttttttgtttattattaatccctaggtatgcatcttttcaatttgagtgatttaagatntttttttttcattattagttctagtaaagtcacactttaaggaaccc

SEQ ID NO: 95079 - DNA, 1467 bp, Glycine max
  Clone ID: PAT_MRT3847_56868C.1
cccacgcgtccgcccacgcgtcatccgaaacctattacaacttctgcgagaagacgaccgaagggggctacatgaagtacggagcaacgggaaagaaaaatggtgctagaacaagcagtatcatcatcaagcaccttgaggaacgttttcaccaatcccaaaaccctaatttcaaaaccccaattccaagtcgccgcttccccttcatggaaaccacagcagccgcgctgggaagggtggctggggataaacttgaagtgctccatgacaacaacaacaacgccatcatcataccctaagccctcggagattccgtggcagaaggaactctgcaactccgtcaacctcatcggcaacgtcgccgcccccgtcgaaatcaaatacctcccctccggcaaggtcgtcgcctggacccgcctctacgtcaagaaaagcgccacacaatcatcgcccataaacctcactttctgggacgacctcgcgcatgtcgcttcccagcatctccagaaaggtcaccagattcatgtctctggtcgcctcattaccgacactgttgaaacggaggaaggaaaaagccaaacttactacaggtttgttgttcaacagctgaatttccttgagagtaattactcttcggtgtcatcatcgcagggtcaagagtttgattttgcgatggctggtagtggtaggaaagtgagcaatgctgcaaacagtactggttctgtggtggaaacatggaatgcgttctttgctaacccaggggagtggtgggacaataggaccgtggaacgcgttctttgctaatccaggggagtggtgggacaacaggaacaacaagaggaatccaaaagctcctgatttcaaacacaaagatacaggggaagctctgtggatagaaggcagatacagtccgccatgggtcaagtctcaactggaaatactagactcaagaatggggtcttttgctggccaaaatgctaggatgcctgtaggtatggtagctgcagatgaaatcgtgtctttctaatcacttatgccaaatctcgcccatgtaatattcaatttcaactgtgaaacttctttgtacagtttgcattttgcccgtaattttaaattctatacatggcagtactgataatggttaagtttgctcttgagctatagttagttagtgatcaaaaaaaaaaaaaaaaatttttaaaaaaaaaaaaagaaataaaaataaaggggggcccctctaaaggacccaagcttacgaacccgtgaatgccacatcatagctcttctatagggccacctaaattcaattaactggccgcctttttacaacgaccggactggaaaaaccctggcgttccccaacttaatccccttttaggacatccccctttcccccgttggggtaaaaacgaaaaggcccgcaccgatcggccttcccaaacaatgcccagcctaaatgcccaatgg

SEQ ID NO: 95080 - DNA, 1581 bp, Glycine max
  Clone ID: PAT_MRT3847_56869C.1
ccacgcgtccggttccctctttcaaaccttttttttttttcccaaatcggcgatggcaacgacgtcggtggtgccggcgaaccggcgtcgcgcggcgaaccccgcggaggagatggacttcgagacgacggagggcgtgaaggccatcgcaagcttcgaggagatggggatcaaggacgatctgctccgcggaatctaccagtacggcttcgagaagccctccgccattcagcagcgggccgtcacgcccatcattcagggccgtgacgtcatcgctcaggcccaatccggaacggggaaaacgtccatgattgctctcaccgtttgccaggtcgtcgatacctccgtcagagaggttcaggcattgatattgtcaccaacgagggaactggcctcacagactgagaaagttatattggctattggggatttcatcaatatacaagctcatgcatgcgttggtggtaaaagtgtgggagaagacataaggaaacttgagtatggagttcatgtggtgtctggaactcctggccgagtttgtgacatgatcaaaaggagaacattgcgcacgagggctatcaagatgctagttcttgatgaatctgatgaaatgttgagcagagggtttaaagatcaaatttatgatgtgtatagatatctcccacccgaccttcaggtttgcttgatttctgctacccttcctcatgaaatactggagatgacaaacaaattcatgacagatccagtaaggatccttgtaaaacgtgatgaattgacattggagggcatcaaacaattttttgttgccgttgaaagggaggaatggaagtttgataccctgtgtgatctttatgataccctcactatcactcaagctgttatattctgtaatactaagcgaaaggtggactggttaactgaaaaaatgcgtaacaacaatttcactgtctcatcaatgcacggtgacatgcctcagaaagaaagagatgctattatgggagaatttcgtgctggaacaacccgtgtgctaataacaactgacgtttgggcccgtggtcttgatgtacagcaggtttctctagttatcaattatgaccttcccaataatcgtgagctttacattcatcgaattggtcgctctggacgttttggacgaaagggtgttgcaataaattttgtgaagagtgatgacatcaagatcttgagagacattgaacaatactacagtactcagattgatgaaatgccaatgaatgttgctgatcttatataatttgtcacgtggtgtgctggatggagtggatttgtcatatcttgtggtagggagtagtgtttgaatgtggtttcttgctatggaatacatttgtgatgctcttgtaaacttttgacttttggtcaaattagaatttttaccttagtgttgactgtaccagaggtagtgtttttctttgctgatgaggttgaaaattgagattaatgtgtaaattttgttgagttgttttatctattgtatcactcttgatattgaatttgtaattttatgcttcaaatggcaggtgatatcttgacttggtttttgat

SEQ ID NO: 95081 - DNA, 1215 bp, Glycine max
  Clone ID: PAT_MRT3847_56870C.1
ctaattagaaatagatgtacattgtggccgctgaaaaaaccagttatgacttgttttgttatttgaatgttgccccgtacggctgcgagaagacgggcggtggaaagaacgagcacacagagaaggaaacatggcgttggagcaagcagtatcatcgtcatcaagcacattgaggaacgttctcaccttccccaaaaccctaatttcaaaaccccaattccaagtcgctgcttctccctcatggaaaacacagcggcgttgggggaacttgaagtgctccatgacgacaacgccatcataccctaagccctcggagattccgtggcagaaggagctctgcaactccgtcaacctcatcggcaatgtcgcggcccccgtcgaaatcaaacacctcccctccggcaaggtcgtcgcctggacccgcctctgcgtcaagaaaagcgccacgcaatcatcgtccataagcctcacattctgggacgacctcgctcatgtcgcgtcccagcatctccagaaaggttaccaaattcatgtctccggtcgcctcataatcgacacggtcgaaaccgaggaaggcaaaacccaaacttactacaaggttgttgctcaacagctgaatttcattgagaggaatttctcttcggcgtcatcatcgcagggtcaagagttcgattttgcgatggctggtggtggtaagtgatgtgttctgtggaatgttgtgttcaactttgctgaatatttttgctttttgtttcaggtaggaaagtgagcaatgctgtgaatagtaccggttctgtggtggaatcgtggaacgcgttctttgctaacccaggggagtggtgggacaacaggaacaacaagaggaatccaaaagctcctgatttcaaacacaaagatacaggggaagctctgtggatcgaaggcagatacaatccgccatgggtcaagtctcaactggaaatactagactcaagaatggggtcgtttgctggccaaaatgctaggatgcctgtaggtatggtagctgcagatgaaatcgtgtctttctaatcactcatgccaaatctcgcccatgtaatattcaatttcaactgtgaaacttctttgtacagtttgcattttgcccgtaattttaaattctatatatgtcagtactgataatggttaagtttgcccttgagctatatttagttagtgatcaagtgattgtgttgc

SEQ ID NO: 95082 - DNA, 844 bp, Glycine max
  Clone ID: PAT_MRT3847_56871C.1
aacaaaaaaaaatttttttttttttaacaaaaaaaaaaaaaaaacatacaaaaagaaaaggttttaaattattaactataatactgtaatatggtcggccgctttggagtgtctcccgcctgctttccccgggccttccgtcttgaattttctttttctttagtagcccctttttattgtgatttctccttgtgcccccctttttttccctcccggtcgtttccctggtgaatatacccctgagctttttatccaccccttttttatcccccttgtgctttttaccctgccccttttttgttccccactgtttgtgccggttatttttggcccgaatccttgtgccccctctatccccgtctccaccccggtttttctcattcttttttggcctgctctccctttgttttggttccccacctctttaccctgccccctcttttttttctgcctcccaattttttccccctggctggattccttcccttcttttcccctcccctttttttccccgttttcccttttttcttgtctcctttatccttcccggttcctttttgggttttttttccctttccttttttgccgccctttttctcgggtttttcccctttaattttttctacacggttgtgctccctttttggtgttcccttttttgtgcttttggcggcccctcttttccccccttatatttctgttttttttgcgtattgtttctccccttcctttgggacttatttcccctttttttaacctctttttttttcctctcttttctccctcttttggcgtctcctcatcattttcctttttttgtttgcgcccttattttttttcccct

SEQ ID NO: 95083 - DNA, 466 bp, Glycine max
  Clone ID: PAT_MRT3847_56872C.1
ttttcttttttatttttttttttcctaatcgacgcaatacgagggtttatgttattcaagtgactttacagctcaaattcttaaacaatgcttttaggccttacctgcaaaaaaagcttaattgtttttccctggcaaacccgggatcttgttgaagaaaaattcatcctcaagtaatgaaaatctgacaccggcaagaaaatgtaaaaactggtgaccataacggcccaatgaaacccacctttcttgcatttaacttacaaaaccttatggcctcgtttgccatgtggtccgagagccagtctagaccctttatagagccctccaccagatgtggcacatgtgctatggatataccagtgaccctgcctgggggtacgagaacctaacctatctgttgtctcagcggtcttcatggcatttggacgatcttgcttggtgggcaaaactacaatcgcagaatttt

SEQ ID NO: 95084 - DNA, 394 bp, Glycine max
  Clone ID: PAT_MRT3847_56873C.1
tgaaggttggaaattttaatccaattaaactttataggattccaattctctccctttgagggatagaaagaatgcaacattaaactttagtaatacttttgatctttctcttagcatctagttctacttgctcttctttcattcaagctttgtgagtgattcttagaagactctacaatgaacgattgggctcctcctttcatagctgcggctttgttttggctcttgagcccgggaatgatctttcagttgccggggaagaatgcaccctttgagtttatgaacatgaagaccactgtggcatccatgtttgtgcacactgttatttatggtttgtttcttatgctgttctttgttgttcttagtatccatctttatatttaagcagcaacat

SEQ ID NO: 95085 - DNA, 339 bp, Glycine max
  Clone ID: PAT_MRT3847_56874C.1
aatcttaacctttttaaaatcaatagtaaatacattattactttggtattgggtacagggaccaaccgggaaagattttaagccctacgatgaaagtttaccacccgatgacagtggcgggaaaaagaagagaaatgaaacctgtgtaaaataacaaccctgcaattgctattctgtgcaaaggggaaaacaaaaattacagggggtttttcttctttggaaagaggataatagaatccttaaaaattttatacattggcttgggaagaaaaaagaacatggttttcgtaagtttgggcttcctggacaggggtggaggtttttcatataatccggcat

SEQ ID NO: 95086 - DNA, 440 bp, Glycine max
  unsure (1)..(440): unsure at all n locations
  Clone ID: PAT_MRT3847_56875C.1
aaaccaaaaaggacagggggggaaaacccnaaaggaccccaaccccaaaacccccggaaaacaaggcccctggagagccacacaaaggacaccccaaaaaaaccaaaaaaaagcccaaaacggcagaagccacaaaaaaaaaaaaccccacaaaggcccaaaacaggggggatgcccggcgggggaatccaccaccaacaccacgaccccaaagcggggagcctaattcacaaaaaaagggaaaagaaggggcccaaaaaacccccgccaaggaaggcaggccggcaaagccccaaagggccaaagggggcccagcaccaccccgagaggcaactccacggagcaaaaaccccaaggcagaaaaagcccaggccccaacaagaaaagaaggggccccaaaaaactccaacggggaaccaagggctgcaagccccccaaaa

SEQ ID NO: 95087 - DNA, 839 bp, Glycine max
  unsure (1)..(839): unsure at all n locations
  Clone ID: PAT_MRT3847_56876C.1
aattcggctcgagcagcgcagagagaaacagacacacatggataaaccacaccccaccaaccgtttccctctccattcatttcctggccacaacaaaaaaacaacaaacacagcaatatagcatcgcataaacgttctcacttctcacttttttttttccctcttctccgttttcatgaatgtggagcgctacacgctaccggcaccacccaatattattcccgaggaagaagaaaacattgccattgccatgggtgcccctcttatcccttcctttaaatccatgcttcaacaacaccctcaacaacttgactcttactttaactcttcaattagttctactactatcccttttgttcctaacatggactcttttctctctcttgaccctttctcaccttctttcttcaacaacagcagcagcagcagcaacatggccctcgacccgggttttgatttgggcctggacactgggcttcactcttctgctcctgctccccatcttttttcccaggcccagatgatgggcttcgagttctcggagctcgaagccctggctggacctgggaatgtaaatgtcccgtttgcggacggggcaaaggcggctgctctgctgcggtctcctcatttcgagccgccgcagcagcagccgacgctgtaccggaagcggagggggacagccgcggagattccggggctggagatggtgagaaggaaggggaggaagtggcaagaagagagaagggagggtgaagaaagnancattgctgacgtgggccggtccgggtttgactatgagtctgatgagcagaatgagagcaatgggttgaagctgagtg

SEQ ID NO: 95088 - DNA, 422 bp, Glycine max
  Clone ID: PAT_MRT3847_56877C.1
accagctcaaaccctcctagtctcccctatctaccctgagaattccttaaaacatggctggatgttctcaacaaaggctggttgttatgtttttatgtctcattgggatagtttcagctacagatttaacttcttcagctgtgagtttagctgattatgagttaagcaccactttttatcttttaaagtgtcccctgggcctctttaccattaataacctagtaaccgctgctgtgcggaatgagtctcgcatgggtgcatccttgctccgtcttcatttccatgattgctttgtccaaggatgtgatgcatcggttttgttaaagaacactgcaactttcacgggcgaacaaggtgccttccccagcgctaattctcttaagggtgttcgaatcatagacaacgatagaagcaaaatagaa

SEQ ID NO: 95089 - DNA, 368 bp, Glycine max
  Clone ID: PAT_MRT3847_56878C.1
cgttttgtgtgcgctctaaaaacattgtacttcaaccttcaacatgagtgaatatgggggcgggtggccaaactggtgttcctcctgccgacaggaaaccatggggcgaccctttgaagggggtgccattttataaaccttcatgtagactcagccgggtggagaaggtcattccacctcactgcctccagcgggctgaacaacgctcattctcctatgttgcttacgacctaaccatatccttgggactgtattatgaagccacccattacttacacctccctcccagtcctttctctttattggactggccaatctactgcgctgatcagggttgcattcttactggagtttgggctcttgcccat

SEQ ID NO: 95090 - DNA, 415 bp, Glycine max
  Clone ID: PAT_MRT3847_56879C.1
cccacgcgtccgtacggctgcgagaagacgacagaatgagacacacaactatttctgagtacgggttgctctacgcctctgcctctctctcaaaaatcgtactcttatattctaggagtttcttatgctgatgcctccgttccccccttctcataaacaacgcgttttctcttctgcttcgaatctattcttagcttttggttaaggttgattcaaggccttcacagcattcgttgcggcattttaatagatttatccaaacaggactgaatgaactaatggagtctaaaggtgggaaaaagaagtctagtactagtagtattaaatcattggactacgaagcttcccctctgatacagtattgaagactttacaccaaacggtggaatcaagaaagtcagatctgttgcttact

SEQ ID NO: 95091 - DNA, 889 bp, Glycine max
  unsure (1)..(889): unsure at all n locations
  Clone ID: PAT_MRT3847_5687C.1
gccgtccgtgggaatgaaagaccggtgtgggactcgtggcgactttgtggtaaataaaaatcgcacgcgtgcttggtgctgtttggaagaggaaaatacattacagcagcaaaggaaggttgtggtaagtaaatagtagtaacctaacccttgcgtttgcgagtgaggctgaggttgggtttggaaggcaaaggctggtgttgtcccaatccaagagagaagtaaagtaaagcaaaggaatggcgaacatagacatcgaagggatcttgaagcagcagcctgatgatgggcgcgttccgaagacgaaaatagtgtgtactttgggccccgcttctcgatccgtggaaatgactgagaagcttcttagggctgggatgaacgttgctcgtttcaatttctctcatggcacccacgactatcatcaggaaaccctcaacaatctcaagactgctatgcacaacactggtatactctgtgccgtcatgcttgacactaagggacctgagattcggactggttttctgaaagatggaaaacctattcaacttaaggaaggacaagaaatcaccataactactgattatgacattaagggggatcaggagatgatatccatgagttacaagaagctgcctgtccacttgaagcctggaaacaccatattgtgctctgatgggacgattactctcactgtcttatcttgtgatcctgatgctggtactgttagatgtcggggtgaaaacactgctacgttgggtgagagaaaaaatgttaaccttcctggnntgttgttgttgatctccccacacttactgagaaggataaggaagatattcttcaatgggggtgtacccaacaagattgacatgattgctcttttatttgttcg

SEQ ID NO: 95092 - DNA, 2078 bp, Glycine max
  Clone ID: PAT_MRT3847_56880C.1
cgaccgacgcgtccgccgtacacgcgtgatgttggggtaggtggtggtggcgccgaaccgcaccgcaatggagaagccatcgtcgtcgttgtcgtcgtcgcgaagaaaatcgagcacgaaggtgaaagcttcaaccgatgcgaacacgaacctgagcatgctcaacgaggaccttcttcagaacattctagcgaggcttccttctctgcatttcgcttccgcagcttgcgtcagcaaatcatggaactctctctgcaatcgcatcctcactcgccccaaactctcttccgcgatttctctcaacccttcgctccccgatgctgtcaacgaggttgttcacaaggttctctcggagccaattcgaccccattttgctattgccaatatcggaactggattcaacactgccaagactttgtgccttatgagaaagtcgttaggattgcatattcctgttatttttactgttgcgaatatgattatggcttgggatgctgtgactggtgaatttgaaggagcaagccccattagttgttgtctgcatgtgtacagcactgtctacttagcaatgtcgtatactcccccctctgtggaagattagctgctggtcatatatatatttttttttcaaggtgtaaatttcttatttcactaggatgcctttttattctctgccgtggacatggatctgactatcttttggcgtatcagatagtttatagtatttaatggttatgaaatttatgctatgcggagaagcaagctgtgacatgaaattggttctggagaaattggatcatgccatgcctatggacatggtcattgtgggtgatgagagaggctcttttgactttgtacacaaaagtgggaatgattctagaatcatttgtagtaaaaaaggaaacatagaagctgttgctcttgtatttgctcaggacagggacaggtctttgggaactattaggtttcatgttgcattgtcaaatggtgtttccactgtgggtcccagatacaaggcagcctcagttaaatcaaacagtgctgattgttcaacatggctaactgctaggagggaagggcaacaggaaaatcttgacggtcagagtattctacttgatatcaacaatttgctggacaatcatattgagtctcctgatttgtacattggggtaattaaacataggaaattatccactggagcagagaagccaatgccaagaacttgtattgcatatcatggagttgtgggaggtgatgaagagtatctatatgttgatggcattggcataaaaacaggagatatctttcagttctactattcagatcctaatactgccttagcttcattaaccaaggtccatgatgccctcaagagtattcatctggaaaaaaattccaagagttccaagggtgatggagacaacgctaccaatgtttttgggggtattgtttttgcttgttacggccgtggtgaatccttctttggacgtcacaatgttgacagctctcctttcttagagaattttccaggagtgccagtgtctggaatattttgtggtggagaaatggtgcgtccttgtaccactgtgattggtcaatgtgaaggagcaagccccattagttgctgtctgcatgtttacagcactgtctacttagcaatgtcatatactcctccctctgtggaagattagatgccgttcatattttttttcttttcaaaatgtaaatttcttattaagtcggatgcctttttttaccctctgccgtgcacatggatctgagtatcttttggtgtacgagatattttatagtatttgatgattatggaatttttgttgtgctatatgcagtttttgtttattattgtaaaactgacttcacaccttctgaagctgaagttctggtaataagaagcttaacaggatgtaatttaggttactgtttcttatgggagccttgttactagggattgctgagtgctttgtaaacggtttggtcttaactgtcaaacaggtttaatgtattgaagcactcggaattatgaatatgaacatactcctccaagttggttttcaacc

SEQ ID NO: 95093 - DNA, 773 bp, Glycine max
  unsure (1)..(773): unsure at all n locations
  Clone ID: PAT_MRT3847_56881C.1
tccggnattcccgggtcgacccacgcgtccgcattggggtaattaaacatagtgaaattatccactggagcagagaagccaatgccaagaacttgtatttcatatcatggagttgtgggaggtgatgaagagtatctatatgttgacggcattggcataaaaacaggagatttctttcagttctactattcagatccaaatattgccttagcttcattaaccaaggtccagtttaatactcttgagggcatcatggaccttggttaatgaagccctcaagagtattaaactggaaaaaaaatccaagagttccaagggtgatggagacaacgctaccaatgtttttgggggtattatttttgcttgttacagccgtggtgaatccttctttggacgtcagaatgttgatagctcccctttcttggagaattttccaggagtgccagtgtctggaatattttgtggtggagaaatggtgcgtccttgtaccactgtgattggtcaatgtgaaggagcaagccccattagttgctgtctgcatgtgtacagcactgtctacttagcaatgtcgtatactcccccctctgtggaagattagctgctggtcatatatatatttttttttcaaggtgtaaatttcttatttcactaggatgcctttttattctctgccgtggacatggatctgactatcttttggcgtatcagatagtttatagtatttaatggttatgaaatttatgctatgctatatgcagnttttgtttattatt

SEQ ID NO: 95094 - DNA, 755 bp, Glycine max
  unsure (1)..(755): unsure at all n locations
  Clone ID: PAT_MRT3847_56882C.1
ccacgcgtccggcaatggagaagccatcgtcgtcgtcgtcgtcgcgaagaaaatcgagcacgaaggtgaaagcttcaaccgatgcgaacacgaacctgagcatgctcaacgaggaccttctccagaacattctagcgaggcttcctgctctgcatttcgcttccgcagcttgcgtcagcaaatcatggaactctctctgcaatcgcatcctcactcgccccaaactctcttccgcgatttctctcaacccttcgctccccgatgctgtcaacgaggttgttcacaaggttctttcggagccaattcgaccccatttcgctattgccaatatcggaactggattcagcactgccaagactttgtgccttattagacagtcgttgggatccaatattcctgttattgttaccgttgcgagtggtattatgggaagggatgctgtaaccgatgagtttaaagaggtcaaatggggtgccctttttagtggctttggcgaggaatcgtatacgaggtttataaacgaaggcttagttttgactgttgggtacttgcctggattgaaagttgaagcagtgcccttgcgacggccgacaaagacgcaagcaatatgggttgacaatttcataaaggatattaaggaatattcagcctctgtctccagtagcccattccctgttgggattatattgtttggagaagcaagcagtgacatgaaaatgggntctggagaaattggatcatgccatgcctatgga

SEQ ID NO: 95095 - DNA, 186 bp, Glycine max
  Clone ID: PAT_MRT3847_56883C.1
cacaaaaaataataatattggacagggggacaaaactgagcgcgcgtgaacaaataacgctttcaggtgagggcacatcaaaatggatcttaaggaaatttaagcgagtatcaaaaaagatcctaacaagagcgcactaataaaaacacataaactgggaaaaaagatcaggcttccccattaatg

SEQ ID NO: 95096 - DNA, 255 bp, Glycine max
  Clone ID: PAT_MRT3847_56884C.1
taaattatcttatcaattgctaccacaaactcaacattgctctattcatcatcttctatacggggtaggtgaaaccttgcattttcgaatctactcggaaatacgccgtggttcgcaattgttcgaactcaacagcatacacaatattcactagttgtagcctacacagcttgcattccaagaaagcccttcagattaccaaatacccatatgcgcattaactggacctaaaactccaaaccctctatttatttt

SEQ ID NO: 95097 - DNA, 232 bp, Glycine max
  Clone ID: PAT_MRT3847_56885C.1
tcaggttttctaagttatccggtcctaattggtggataatgctagggagtttatcctgcaacttatttgctagtggtgacccactgacaacctaagtattatcagcactcgatgctcgaactttgtgatttagaaactggatatctatcgtattcttactgatattgacctccttaatagtctggatggcattcacccctattctatacagggtgctctgaagccttttgtc

SEQ ID NO: 95098 - DNA, 1059 bp, Glycine max
  Clone ID: PAT_MRT3847_56886C.1
ttttgatgccaccattcctttgtaaagtaaagaatgaggatatgagtgaggtcactgcttgcccaaccaagattgtttttctgcaaattctgttgcaggagaatgaaaaagattttaaaaattctgcaatgcttttactgaattgtgaagtttgaccaaaataaaaatttctaatttttatccctatttggattttattttatactgttatgttatccatggcttctgcatatgttgagtaccgttgctttgttggtgggctcgcttgggccacagacgatcatgccttggagaaagccttctctcactacggcaacatcgttgaatcgaaggtccgtttgttgcagccatcgcacacgatcccgttctgatctctgatctttttccgttacttgatctatgatacttcttcttcttcttcttatataattctcttttattactcacgccaataggtacgttcatcttcatctctttaccaaaggcgaagatcgatcggtttctattcggttctggatttggttttcgtgctgttttgctttcgatttcaatttgatgaaccgttcgtgtttttacgtgcagattatcaacgatcgtgagaccggaaggtccaggggatttggatttgttaccttcgcctcggagaattcaatgaaggatgcgatcgaagggatgaacggtcagaaccttgacggacgtaacataactgtgaacgaagctcagtcccgcggcagccgcggtggatacggtggtcgtcgtgaaggtggatataaccgtcgtggtggaggctatggaggggggtggttatggggtggtgacagagattgtggttacggtgacggtggttcacgctactctcgtggtggcgatgtcaatggaagccggagaaactagagctggatgaacaagattagggtttatgattaagttcagtaattttaggtgtcgtgtggtttgggtgtctgtctttctatctctttgtgtacaatcgattgaatgaaatgataatcggagaagtattaaaccgaaaaaaaaaaatattgcctataaaatatactt

SEQ ID NO: 95099 - DNA, 703 bp, Glycine max
  unsure (1)..(703): unsure at all n locations
  Clone ID: PAT_MRT3847_56887C.1
cgagaaatcatctttgtcccaacaccgcaacaaggttttgtttcagagccacagtgccaccaacatggctcaagtgaagatcttagagcaaagtgaagttggtccaccaccatgctcacttccctcaaccacccttcccctcactttcttcgatattccatggttctactgccaccccatccaacgcatcttcttctatgactttccccaccccacacaccactttctccaaacagcacttcccattctcaaacactctctttccctaaccctccaacacttcttccccttctcctccaatctcatcgttcctccacagcaaccccatctctctcacatacgctaccttgatggagactctctctccttcaccgttgcagagtccaccgcagacttcaccctcctcacatcagattcaccacaagacgttccaaattggcaccctcttgttcccgcgtttcctaccccacgtgttgaccaagatggcgcacgtgtgttccctcttatggccattcaggttacaattttcccaaagtctggcttcaccatatgtctcaccttcaaccaccttgccagcgacggcaagtcacttcaccatttcatcaagttctgggcctctctttgcanagcanaaggaaacatggcttnnctttcaacctctntgtctctttcttctcatgagagggacaaagttaaagatcca

SEQ ID NO: 95100 - DNA, 664 bp, Glycine max
  Clone ID: PAT_MRT3847_56888C.1
agataaaatgaacttaattatcatatgttatttcaatcaatataaaacaccatatacctacctaagaaattgcaaaacgaaatatttaatacattaatgcattccaaacaaacaaccacgttaattaatatgaaataataaaacaaaacacaatagttgaaacttaattataaggggattaccacattcaatcttctagtagttaaggtcttcccaaacttttccacttgtgtgccaacttgcatattgtccttgttgacgacccatctttcatcacagcacattcagcaaacttttgcagttccttcattctcctacgaatttcttcacccaccaacccctccatgaggctctttatgagcttaacaatttcctccttcaccaccacactattgccactagtgtcaacgtttggtctcacagcaactttcaatccatcggttaccaaagccgcattggttctttgttcagcaaacaaaggccaagccatcattggcactccatgcaccacactctccaaaaccgaattccaaccacaatgagtcaaaaatgcaccaattgacttgtgacctaggacctcaacttgtggggcccagccacacataaccaaaccctgccctttggttctctctatgaaccctaatggtagaaaatgcaaggatca

SEQ ID NO: 95101 - DNA, 1167 bp, Glycine max
  Clone ID: PAT_MRT3847_56889C.1
catggatcgtgattacagaactgcaaccaataaccaacaagcctttacgtacaagtccacaacacatgtttcagaaatgtagcaagaccaacactcaaacgcgagttcagaatagggaagagaacaaatatcagctcaccagctcattgaagggaagagaagtggataacagtgatcaaagtttgaaatggaagagatgaggtcaagaaagggaatagctacctttggagtgtttcgagtttaaaggagagggaatacagcacataatgcattttcttacatgaacttgagcacagaggcgcgagaaaaatacgacttgtaaggttctccgtgcaatagataattaagctaattcctgtgcagtattaattctagctatttcctgagggagaagtgttggtaaatatttgtgttttaatttaaaatttataaatatatattaattctatcttataaaataaaatatttattttagattttcttaagattttgttttaatgagtcaaactagtttgttagatttgttttgacaactataggttagtttccaacggtcatattttgtttgttgcttaaggtgatttgtgactatatattatctttccttatttctaaaaagatgacagaacaacagtctcatctttttctcccaaaattttttatttcttctcttataaaataatttatttcttgagagtaagagcattggtgttcataaggttcggacggcacatgtttccgaaggcgccctggccggcgcggtgggtaccaccgccggggactcgcgggatacgcgagacggcgcggccggtgccccaggactcggcggaggtttggtggccggcgcgcttgctgacggcgtagggttggcggctgttgcgagaaatgttggagtggacgaaattgacgatgtcaggccgaatggaggctttcatgacgtcgggaagaggaacggtgggggttgcatcgccctctagggtttggacggagacgatagggcgagctgctgctactgccatggtgaagtgtgctactgacaaaactagggtttggggtttggcagaacagcagcaaaggttttttacgttgaatttaattatttttaaggggtccttttagggggcttttttttttggcttccgacttgtctaggccccgtccacgttt

SEQ ID NO: 95102 - DNA, 695 bp, Glycine max
  Clone ID: PAT_MRT3847_5688C.1
ctgagggcaaggtcctggagcaaggaacctatgctcaacttaggcacaagagaggtgccttcttcaaccttgccagccattaaaatccaaacttaggtaatgtaaattattattttcatgtacaaatttgagttcatggaggaatgtagcattgtgagcttgcttgggacaattgcttcctgcacctctggactttcttcctgaaccctactttggaacgtaaaacttacattccagattagtcattctggaaagactaatcctgtaaaattacattttggactaagcttttcaaaaggttataaaggtgcatgaagcaattccgaacgtgcaggaaacaattgcctttggttggtcattgcttaagcccatctaagttaaattgggtttgtggccaacttttttggtccaactatattaagctctatatttatacacataaaaatcacaacattaaagtgctgggagttgtcattagccccatttcaaatgggggcaaaatagacttttctcctctatgtcagggtaaggagtagtcaatagcagcaccataaagtgttgtgtctggacacgaataataaaataaatttcttaatgtagaatgttgtagttcacgaaacttgaaggaactaaggattatcacaattatcttgccttatttagatattttcccacgagaaaacaagtataggccc

SEQ ID NO: 95103 - DNA, 412 bp, Glycine max
  Clone ID: PAT_MRT3847_56890C.1
ccacgcgtccgaccggtgccagagacaccacagagggaaccacgagagggctgttactggtgccgccgatggaagagacagtgtttgtcagattcacgctaagccaagacatatgggctatcctgctcgatacctgtatattcaagttttatagtagatgtctcttgcctcaagatttgcccgagtgacaactctaccactttgaggagaaaaccatagtaatggatatactaccatagacaggaggacccatatgcagactaaccttgatcaccctaagaagagcttcaatgttgaggaatatacctctgatgacagtcctgtagccttggattgttacgaatgtgataacttatcactagtatggggaaaaccagtgcagctccgtataggttctggagagtggattacc

SEQ ID NO: 95104 - DNA, 709 bp, Glycine max
  unsure (1)..(709): unsure at all n locations
  Clone ID: PAT_MRT3847_56891C.1
cggtccggaattcccgggtacgacccacgcgtccggtgagtttagactatactagaagagcatcatatacccttttgcacacaaactaaaagaaaagaataatcatcattcatcaccaccaccaagtaaaagctttcactgaactgaaccatggcggatccaacctcatctaaccctgataaggatcaatcctctacggaaccgaaaagtgaaaagaaggattattccacagcaatattagaacgcaagaagtctcctaaccgacttgttgttgatgaagcaattaatgatgaaaattctgtggttactttgcaccctgaaacaatggagaagcttcagtttttccggggtgacactgttctgataaagggaaagaagcgaagggacacaatttgtgttgttcttgctgatgaacaatgtgatgaaccaaaaataagaatgaataaggttgttcgggctaatcttagagtgagacttggagatgttgtctctgtccatcaatgtcccgatgtaaagtacgggaaacgagttcacatccttccaattgatgacaccattgagggtgtaactggcaacttgtttgatgcatatctgaagccttactttatggagtcataccggccagtgaggaaaggtgacttgttcccttgtcggngtgggatgcgcagcattgaattcaagctaatagagactgaccctggtgaatact

SEQ ID NO: 95105 - DNA, 443 bp, Glycine max
  Clone ID: PAT_MRT3847_56892C.1
atttttcagtgatctatgtagtcctgctccttttgtttcctccactggttatagctactatgttacttttgtagatgcttttactagatacacttggatttttcttctcagacacaaatctgaaaagaaaactctgatggcactgtcaacaagtacaaagccaagttggtggccaagggttttcatcagcagtatggcactgattatatagaaaccttttcactagtaattaagcctattactatgagactacttcttactctggctgtcacctgacctatcactggcccattcagcagctggatgtgaataatgcctttcttaatggtattctacaagaggaagtctatatgcagcagcctccaggttttgactctaccaccaaatctctggtctgtaaacttcacaaggccatctatgctcttaaacaagctcctagagct

SEQ ID NO: 95106 - DNA, 1186 bp, Glycine max
  unsure (1)..(1186): unsure at all n locations
  Clone ID: PAT_MRT3847_56893C.1
cggcaaggcaaggcaaaggttgtggacgaaaaaggtgttcagtgtccaagcgttgagaagggaagaggtacacatggcaagtggcaactgacctcattgttgatagttgatacttggcctcgaagatgcacttgctactatccaagtccccactattactgatacataattcttctatgctcctccaccgcttctctcctcttctcctccctccttttctctttcgccaaccccccttcccctcttcgaatttcaaacctctcacactcaaggtcctctccatggcatcgtctcattcctcccaccacatacacactaatcgactcgcttccgaacagagcccctatcttctccaacacgctcacaaccctgttgattggtatccctggggcgaagaagccttcgccgaagcgcgccggcgagacgcgcctatcttcttgtcaattggttacagcacttgtcactggtgtcatgttatggaggtcgagtctttcgaggatgaagcggttgccaagttgctgaacgattggttcgttagcattaaggtggatcgagaggagcgaccagatgttgataaggtgtacatgtcgtatgtgcaggctttgtatggtggaggaggttggcccctgagtgtgtttctttcacctgacttgaaacctttaatgggtggaacttacttcccccctgatgataagtatggacgaccaggatttaagactatacttagaaaggtaaaagaagcttgggatagtaagagggatatgctgattaagagtggatcatatgcaattgaacagctttctgaggcaatgtctgctagttcagattctgataaactgcctgatggggttccagctgatgcgttacgcctatgctcggagcagctctctgggagctacgattcaaagtttggtgggtttggatctgcaccaaagtttcccagaccagttgagataaacttgatggctatatcactccaaaaagttggaggatacggggaagttgggtggagctaatggaagccagcaaatggttttctttagcttgcaatgcatggcaaaaggcgggangcatgatcatattggagggggatttcacagatacagtgtggntgagtgctggcatgttccacacaacatacgacgngnnntnatactgtntntgtnaaancnccctacaatattat

SEQ ID NO: 95107 - DNA, 376 bp, Glycine max
  Clone ID: PAT_MRT3847_56894C.1
acgaggaaaaccctcatatcaaccgtgctccaccaccaccactacttctgtctagggttactcgtgacaaggttgaaaaccctcctccttctcctcctaatcaatctggatgagtacgtagtttctgtaatgaagattgaacaaggtgatgacaagaagaacgaacacttctaattttgttggatgcatgttgtgatgaggtaattttgcaactatacatgatctggtcaaataaggggacttccccttctatatatctgctttaaatagtatatcactactgtattgagcttctgcaatgttgtatattataagggttttaagagtagtagctcttaattttctgcgataaaaaaaaaaaaaaaaaaaaaaaaaa

SEQ ID NO: 95108 - DNA, 228 bp, Glycine max
  Clone ID: PAT_MRT3847_56895C.1
gctactgctacttcttctgctgctactgccacccacccattcactctccgtcatagcactcgccctactctcactctcctgcttgtatataaaatctcctatctgcatatacccgctcaaccatctccggtatctagccggtcaattcgccgccacaactcgccgaccacatcagcgtcatctcacacgctcttcggacccgcacacgcacacgacacctacccgtac

SEQ ID NO: 95109 - DNA, 449 bp, Glycine max
  Clone ID: PAT_MRT3847_56896C.1
caaacccccttgtaatttcccttgaaattttgaagaaaaacaaaatgttctgctccttaagatccggccttttaaacagggtttgacaaaaacgggggtagtggaccttaattcatgatcagcggggcccagagtagcataaacggcagaaacatgaaggaacccctgatccttgtgcaaacagagattgttcgtctccttccatgggagggctcataacaaaattcccaacaatggctttcatctatgatctatctatccttaccgctttaacagattctttgggctaacatccaacatttactaaatttccttttcatcactctctcccccaaatttggaagcctttttcatggttagctttgcagccatatcccttttttgaaaatcgggctttaattttaagcctgcccgcttattcccaatctcaaacattaactgttccaaat

SEQ ID NO: 95110 - DNA, 1522 bp, Glycine max
  Clone ID: PAT_MRT3847_56897C.1
aatgcaaccccaaaactagaaaacttcctctgccgtaaaaaaaacattttctgccagcgaacgtttttaaaaaataattgcgcaatgtcggctgaaaaatatcggtcgggtctatttcacgaccgttgtcagcaattgagttttctattcaatccctgaatgaaatatgcatgaagtcgattaacaaatatttttttgccgaggtgggctaatgttttcctggccgaataaatgggaacatgccagttttggccgaaacaaaacgtcggttgagcttgcacgaaaaaacttagctgacgtacattgtaaatgggaacgtgctagtttcggccgaaacaaaacgtcggttgagctcgcacaaaaaaaccttgccgacctacattgtacattttttatgcaacaccaaaacacgaaaacaaacttccactgccgtaataaaaacattatctgccagcgagggtttttttaataaaaattgcgcaatgtcagctgaaaaatatcagtcgcggtgaataatatttttttgccgtgttgggctaatgttttcctggccgaataaatgggaacatgccagtttcggccgtaacaaaacgtcggttgagctcgcacaaaaaaacctagccgacctacattgttcattttttatgcatcaccaaaacaagaaaacttcctctgccgtaaaaaaaacattatctgccggcgagcgtttttaaataaaaattgcgcaacgtcggctgagaaatatcagtcgcggctatttcacgaccgatgtcggctattgagttttcaattcaatccgtgaacgaaatttgcatgatgtcggttaggaaatgttcgatcggcgtcatgcggtgatgcttcttttttagaccctgatcgttcatctttcttggcggacgtcgactggcatttttttttaatcaatatcggtgaaaaatatttttttgccgagatgggctaatgttttcgtggccgaataaatggaaacattccagttttcaccgaaacaaaacgtttgtttcgctcgcacaaaaaaacctagccgacctacattgtacattttttatgcaacaccaaaacaagaaaacttcctctaccgtaacaaaaaaacattatcggccagtgagcgtttttaaaaagaaattgcgcaatgtcggctgacaaatatcaatcggggctacttcacgaccgatgtcggctattgagttttctattcaatcccttaatgaaatatgcatgatgtcggtaacgaaatgttcgatcggcgtcatgcggtgatgcttcttttttagacctcgatcggtcatctttcttgacggacgtcgactggcatttttttcaatcaatatcggtgaaaaatattttttttccgagatgggctaatgttttcgtggccgaataaatgggaccatgccagtttcggccgaaacaaaacgtcggttgagctcactcaaaaaaacctagccgacctacattgtacattttttatgcaacaccaaaacaagaaaacttcctctaccgt

SEQ ID NO: 95111 - DNA, 305 bp, Glycine max
  Clone ID: PAT_MRT3847_56898C.1
ccacgcgtccgaccggttgcaaaagaccaccgaagggggggggatgggatatcattaacttgaacctctccgatgccatggtcagggccaaggcgtttgatatccacctgcacaaacagctgaggacttacatggaatctatcgttccactctgcggaatctatgacccctatttcatcgctgctaactaaggcgaccgctccaacaacttgatcaaaggcacatggtatgaacacgagcaacaaatgatcaacgacattaaggagtttaaggaaagcactcgggtcgacatggtggaacccatg

SEQ ID NO: 95112 - DNA, 270 bp, Glycine max
  Clone ID: PAT_MRT3847_56899C.1
aattcggctggagcggttctagattttccattcgtagacgccaagaaccctatacagttttagtagcgatgtatggatataatggcctgaacatacggaatcggggggggggatgaacccgccacgtcgttcaagagccacccggggctgcaactgatgtcattcatgccgttaaaacctctaattgtagggctcaatgttgctgtttttgctggttctaaatgggcatttcaccatagggacattgtcggaatgccccatgctacatac

SEQ ID NO: 95113 - DNA, 135 bp, Glycine max
  Clone ID: PAT_MRT3847_5689C.1
aacaaccaactgcagaagaaaacctgcaaaatttggcagctgacacaactgacacagatctgaaagaagaacaagatattaattttattaatggaaagagcgaatctgaacttagacaacccaaatacaccaacc

SEQ ID NO: 95114 - DNA, 335 bp, Glycine max
  unsure (1)..(335): unsure at all n locations
  Clone ID: PAT_MRT3847_568C.1
atgctaatataggctcctcagagngaccttcgaagggggatcgatcgttatcaccaacgaattgaacgtcaacgaaacagaaacacgccttctttaaatccccacatcttaagcactgtcccttctttcactgccactccgatcatcgccggttacgcggcgcaaatattcctctctcagacaaagatcacgacggcgacgccgaccgagaaacaccgacgaccaaatgcttttcggctcggagggtcgctgcttcgctgctcgcaccgatgaggccgaccaagggtgtccgactacagcaacggcgccagaaccagaccggtgatttggaggaa

SEQ ID NO: 95115 - DNA, 113 bp, Glycine max
  Clone ID: PAT_MRT3847_56900C.1
cgagcttctgcaacaaggcacaaaagttatacacaacgtcaaaggaattatgggttaaagtgcaagttaatggagggcattcttgtagcggactgcatggagagtcgcagtgc

SEQ ID NO: 95116 - DNA, 495 bp, Glycine max
  Clone ID: PAT_MRT3847_56901C.1
ttttttagaattaaatgattgcctctatttcagccacttacaatatatcatgctgctcgacttgttggaattacagccttgaatcctgaaatcagtgataagttgtacattcattaccttggtatatcacctataaattttctctaagcattctaatttcaaatttgaagtgtttttcgttagctctcttttgtgctatttgttaggaatggcttgaattgtgtaattagtctctaaaactaaaacacttaaatcatttcatacatatacatatacaaacgcatctcaggttgaagggatatttatattctgttaaactttcaaaaaagctaattgaagaaaaagaccctactgtggtgtttgttacttcaaaagaagctactcaaagaaaaagatgcgacaatggagtttgttgctcatttgtagtttttacattgctttattttatttccaaaaaaagcaaaaaacgttgctttactttaagaaaattgctca

SEQ ID NO: 95117 - DNA, 344 bp, Glycine max
  Clone ID: PAT_MRT3847_56903C.1
gtcttcccacgcgtccgctgaaatgaaaaggggtttgatagaagatgatgatggtggtggtgatgaagatgaagtcatcaagggccaattgaagagcctaagaaggttgatacctggtggagaagagatgtgtagtgaacaaatggtgactgagctacaaagctatgtaagctgtttgcaaatgcaggtgaacattcttcagtgcctcgctgagacacattgaatattgattcatatatgatgctttaatttgccttttccataaacccgttattactattatgtatgtgttccacatataatatatattgtcaattatcaaagcaactatatatttaaaaaaa

SEQ ID NO: 95118 - DNA, 782 bp, Glycine max
  unsure (1)..(782): unsure at all n locations
  Clone ID: PAT_MRT3847_56904C.1
ccacgcgtccggaaaataaaaacccatttacctcggcaccttttgtttgcatttttatttctcgcagcactccccgcgtattccccacttgtatcgcctgcacccaatgatcctccacaaggtacatgtgtgctgaagttcaatacgtcccaatatgtgccatttgatgagtgcggtgatgtgaatgaggagatagacaagtggggtgacgatgggttcccgacaaccttgtgttgtcgaaatgctctgacggttttgtcgaatgcgttggcctcgcaggccctgaactcaggaggacaagtgttcatttcccaagatcagttgcagagttgtgcccagtcatttaacccacagcaaggggtatcgcttaattcatgcggctttcaaagcttgtacctaggcagttccaaatgctccaacctcgttttacaggatgttaggaaactgcaacagtaccaggatgcattggacaagtgttcccacttcgaccacccatttggtgaatcttgtgcagattgcaccggtgcaatattgagcttgagagatggtttacataatcaagtggccaacaacaacaacaaccacactgagctagccatatgtgaggtagcagctattgttgctgttgcagctgggaaaccaaacgatcctgtcgttgacaaagtcttacgctgcttgccaccttcagcttcaggatcagacaagagtagtcatctncaccatttttattttttattttttttcaagttctaaacatatggagccaaataaaactgacaaaa

SEQ ID NO: 95119 - DNA, 283 bp, Glycine max
  Clone ID: PAT_MRT3847_56905C.1
gctcgcgtacggctgcgagaagacgacataaggggacaacacatcgcaacacaacgcgcactctctctattctctcttgactcagaaaccctatcgttctacgcggaatcgccgattctcgccatgctgaaagccaattccgacgccaaatccgccgatagcacggtgaagcgcaagggcgctggtgccaatggaagcaatcgaagtcagctgtctaggatcctaacaagccatagtgatctccaagcgctttctacgtttccatgtccgagttcatagagca

SEQ ID NO: 95120 - DNA, 228 bp, Glycine max
  Clone ID: PAT_MRT3847_56906C.1
ggaagcatacagtcttagaggatcttcatgatcctaaatcattttcaatattatcatccttctgtgaacttatggtacctattggtggggcctccttaactaaaaatcaaacttccacattcctccacattaaatatgccaagcattaccactcaaatgcactttatgctgcagcactacactccattattctaccttttcgaatggatccatttggacctacttcac

SEQ ID NO: 95121 - DNA, 1977 bp, Glycine max
  unsure (1)..(1977): unsure at all n locations
  Clone ID: PAT_MRT3847_56907C.1
ctcgagccctcgattcgatacaaaaaaaaaagcaacgaaaacaaaatctctctttctctctcctccccagaaacaaatttgtcaagcttttctctctgtcaaaaccgaaacgcagaaaacaaaacaaacacacacaacacagcacaacccaaacgactaaccaacagcaaaacgcaaacactctcctcaaaacgacaaccgccacaaaacaacacaaccaccgcccctcaccgccttcatcttctctctctctctttagggtcgatggctgaattcggaaacaacaacaacaacggcgccaacacgacgtcgtcgaggttctccttcttcaaccgttccctcacgacgctccgcaacgaaaaaccgccgcagctggaccgttctgtcacgaagctcgtcgaatcttcgcgcggcggcggcggcggcggcagcgtcgtcaagcgcctttgcagcttcttcgaatccgcaaaatcttcctcttctgaacatcaaaaactcaaaccctcgaaatcgatcgaaaactcggatccctcggtaaaatcgctcgattcgccggcgaaatcaatcgattcctcgccggcgattcgattaccgggaaccgaggatcggatcgtgttgtatttcactagcttgcgtggaattcgaagaacctacgaagattgctacgcggttcggatgatatttcggggatttagggtttgggttgacgagcgcgacatttcgatggacgcaaattaccgtaaggagttgatgagcgtgttgtttggagagaataacaataacaacaacaaaaagaagggacacgtggcgcttccgcaggtttttataagggggcggcacgtggggggtgctgacgtcatcaagcacatgtgggaggtgggggagctggagaaggttctggaagggttgccccgaacgaaaggtgggtttgtttgtgagagttgtggggatgtgaggtttgcgccgtgtgggaactgcagtgggagtaggaaggtgtttgatgaggatgaagaggtgttgaagaggtgtttggagtgcaatgagaatggcttgattcggtgtcctaattgttgctcttcttgaagtttgcaaaaaataaaaataaaacagaaaaaaaagaaataaaaaagaagaaaaatttgttgatgttttgcatgaaacttagatgcgattccttttggttctggtgttgttgtccagtcagaattggagtttaacgtgtggggtgaaggtttgcaactttgcattgaagatcaacatggattacatagtgaagctccaatttcgtgtgtttttggtgttgttatctaatcagaattggagtttcacgtgtggggtgaaggtttgcattgaagatcaacatggattattgttgtgaagcttcggtcttgtgtgtattcggttctgttatctaatcagaattggttccagtatgtaatagaggtttgcattgaagatcaacgcaggttgtcagagtgaaacttcaattttgattggagaatgacattgaaagcatgtgaggaactgtgtgtaggtttttgtggtagttgtttttgcatatataggatgtgcacaagtttaggtgtggttatttgatttgaagaaggtgaaggtgtttggatggaatgagtttggttaaaggttatgtggtgattcaaaacactctttgaattttttttattgggtgttttttcttcttttattttgtgttatgagctgatggcttgttttttcagctccttgaactgcattttgttcaagagtgtgattattatcttctacacaaaaaaaataccagatggatttgagtatgatgatggctgttgaagttcattcacaataccgaggagtgtttcttctcgaaacaatgtaaatatttagtattattatcaaagggatttgcaaatattgtccattacagtttaaaaaaaaaaaaaaaaaaaaaaaaaaaaaaaaaaaaaaaaaaaaaancctcnc

SEQ ID NO: 95122 - DNA, 1053 bp, Glycine max
  Clone ID: PAT_MRT3847_56908C.1
ggggggagctggagaaggttctggaagggttgcccagaacgaagggtgggttcgtttgtgagagttgtggtgatgtgaggtttgtgccgtgtgggaactgcagtgggagtaggaaggtgtttgatgaggatgaaggggtgttgaagaggtgtttggagtgcaatgagaatggcttgattcggtgtcctaattgttgttcttgaagttcgcaaacaaaataataaaaagaagaaaaatttgaaaccttggtgtgtgtagttgtttttttgttgttgcatgaaacatagatgcggttccttacatgattctggtgttgttgtccggtcagtgttggagtttcaagtgcggatagtttatattactgatgtgaaacactccaattttactttctttttttttggtactgttggacaatcagagtcggattttcacgtgtggtgtgaatgcttgcattgaagatcaacttggattaccgtagtgaagctcagaattggggtttcatgtgtgtaatagaggtttgcattgaagatcaaagtgggttatcggaattaaactccaattttgattggaggacgacatgaaagcatgtgaagaacggtgtgtacgtttttttggtagttgtttttacatatataggatgcacaagtttaggtgtggttatttgatttgaaggaaggtgaaggtgcttggatggaatgagtttggttaaaggttatgtggtgattcaaaacactctttgaattttttgtttattgggtgttttttcttcttttattttgtgttatgagctgatggcttgttttttcagctccttgaactgcattttgttcaagagtgtgattattatcttctacacaaaaaaaataccagatggatttgagtatgatgatggctgttgaagttcattcacaataccgaggagtgtttcttctcgaaacaatgtaaatatttagtattattatcaaagggatttgcaaatattgaccattacagtttatattgagagtttctatttgtcatcaaaaaaaaaaaaaaaaaaaaaaaaaaaaaaag

SEQ ID NO: 95123 - DNA, 492 bp, Glycine max
  unsure (1)..(492): unsure at all n locations
  Clone ID: PAT_MRT3847_56909C.1
acgcccacgcgtccggcaaaacgcaaacactctcctcaaaacgacaaccgccacaaaacaacacaaccaccgcccctcaccgccttcatcttctctctctctctttaggtatcatcatatccatcacaacattcatcatcaaaaaatgtttcttgttatttttcttgttattaattattaattataatcatttacctgttttaaattcccatgatgaagcttgaaaagacgaaaacttaaacctttttgttacgaaaaaaacagggtcgatggctgaattcggaaacaacaacaacaacggcgccaacacgacgtcgtcgaggttctccttcttcaaccgttccctcacgacgctccgcaacgaaaaaccgccgcagctggaccgttctgtcacgaagctcgtcgaatcttcncgcggcggcggcggcggcggcagcgtcgtcaagcgcctttgcagcttcttcgaatccgcaaaatcttcctcttctgaca

SEQ ID NO: 95124 - DNA, 1265 bp, Glycine max
  Clone ID: PAT_MRT3847_5690C.1
ccgctacataaagtctttcctctgcctcattattttactcttggcgtccgagcattcatattaatatcatgccctccttctgcatccaaaccttcattttgtagtgggtgggggtttctcatttctctgccgttccatggatcgggaaggaggatccaacggcggatcttgctactactccgttctcgggattcgtagggacgcctccttctctgatattcgcactgcctaccgcaaactcgctatggtaaagtagtatacgccaccgtttcattcttttcctcttttttatttatttatttatactaattaattcctgatttttcgaaaaaaaaaaataaaattgggccgggctgagaagaggtggcacccggacaagtgggctcagaatcctgcaaccgctggcgaagccaagcggcggtttcagcaaatccaagaagcctactcaggttaccttgcaaattgcatcatcattttaattagtattgtttaaattgctgcaaaatttgattaattagtagtaatgttttggattgggtagcagttctctccgatcagtctaaaaggtcaatgtacgatgcggggctctacgatcctttggaggaagaagaccaagtccgtaaagttttttcatttcagttttttaattactatttttattgtaatttaggcaaaaaaaaatgttttttttttttttaaatgagcaggacttttgtgacttcatgcaagagatgatctcaatgatgaacaatgtgaaagacgagggggacagtttggaggacctacagaggatgttcgtggagatggtgggggaagatcatggccatgggatcggctttgacttgaaccaggatcagacggctgggaagcgaggacgcgtaaatggatcaaagggcaacgcgcccaagcgcagcaactcccgcagttagtgtgccgtactgaatccgtcttgtaattttcttacttgacattggatgatgattgaaatgaaaatccttttggtgggattaaattaaatttgctgaacaactactagtacattagtaatgctcttccttagttatggaacaatacaatacaccaagtgcaactgtgcaaattgtgctttgcattcacaatagatcaagtgcaactgtgcaaattgtgctttgcattctaatactgccctttggggcttcttttttttcctgccaaaaatatagtgattcttgtcagaaaaaaaaaaaaaaataaaaaaaaaaaaaaaaaaaaaacccacgcgtccg

SEQ ID NO: 95125 - DNA, 447 bp, Glycine max
  Clone ID: PAT_MRT3847_56910C.1
taaaaagcaccattatcccccttttgagaaattatgtgctgctgcattaattgtacgaattgtgttggctgtaacccttagcattacattttatgcttagaagatgattattggattgaaccctcaattatttgagtcagtgaatgatgcattggagaagtgttaatgatgttgagaatgtctgatgaaactgtaaattaaaattagattgtggtagtgtaagtgatgaaactgtaaattaaaattagattgtggtagtgtaagtgatgaaactgtaaattaaaattagattgtggtagtgtaagtgatgaaactataaattaaattagattgtggtagtgtaactatcaggtcagttttaagaataagaaacagccttcatatagaaaacccctatgtagtttgctgtttgttgtgcaatatggactcatgatgctgaatgacagt

SEQ ID NO: 95126 - DNA, 441 bp, Glycine max
  Clone ID: PAT_MRT3847_56911C.1
gaaaaaaaaaaactttgtagatactaatttattacttaattatttgtaatataatttattaaaattgaaaataattcaaattaactacaatattacaaaactatatatatgtatttaaccttatacatattttcacctaaaaatacattttctattatttatattggtcaaagaacattggttgaacttttactgtcaataaaggacattttggtcattttacataagaaattcaaataattccaaaaaaaatctcaaaattacatttaataatttaaatatcattttaagttaattgattttttccactttttcttacttttatgaatgttggcctaatatagtattttaaagataatttgatcattttttttcctcggtccagatttttttgtttgaataaatcacaattaagaattattctaaactaattttgttcct

SEQ ID NO: 95127 - DNA, 457 bp, Glycine max
  Clone ID: PAT_MRT3847_56912C.1
ggctcgagggcaagtgcgcgtccgggggactcacttagatggaaggttgtaacccgcatacgaagacgtcgctgacacaaatgcctctggtgacgaccaaggcgggtccacgagacggagcaggatggacgcaaaggctgaaggacgagtacatggcttggagagcgtgcacgcgaatgcacaagtgcaacgaccacgagaggttacgtatctgccgcggcaatccaagaagcactcgctgaaccgcatactgctggcacgtacacaacctcctcaagtacgaataacacctgcaaatcgatggccgcgacacttaccggttcaccggcccagaactcgaactccctcaactggatggcccaaccccgaagaagaaaagggggggaaagatctgcttgacctggcacttcacgcctgtgtgggccaaacattagcccaaaattggtgttggacatgc

SEQ ID NO: 95128 - DNA, 166 bp, Glycine max
  Clone ID: PAT_MRT3847_56913C.1
ttttatttttttttaaactgaacattttccttaaagatagcttcatatatgtttcttatcctctctcttaactaaaattttaaatcgctccatattaatgaactccttctggtatgactctttataataaaatacctactatttacattttttattcacttttacc

SEQ ID NO: 95129 - DNA, 225 bp, Glycine max
  Clone ID: PAT_MRT3847_56914C.1
ctgactcaagaatttggaatttcttgttatgatgcttactaaatgttttaactgttggattttcattgcaggaccaaacagttcaacttcaagctctgaaatggatttttttatgatggtggattgctgcacttatttgggctatttagcttgaaaacttagcacggctaaatcatgaaacaacactttgatcttgaagtggtggcctcagaagactatgaatct

SEQ ID NO: 95130 - DNA, 317 bp, Glycine max
  Clone ID: PAT_MRT3847_56915C.1
acgcacacgcgtgccgtgttaagctatggaacctgtgcaactgtcccacttactcatgcccgatcagggcagccttgaacacttagcagcagcaaagcttatcctttatgaccttgcaagcaaaggagctgatcacatccaacacacttacactgcatcaagatgtttgtacctggactcggagaagcatcaccagaagcaaaggctactcaaaacctgcacagaaggttaaacttgtgtgcaatgaagattgtggctggtcaactagagagctacaaccatcaatcgtataatgcgctaccgatatacttagaggg

SEQ ID NO: 95131 - DNA, 137 bp, Glycine max
  Clone ID: PAT_MRT3847_56916C.1
aaaaatatatggatcaagcgtgtgcgggggacatgcatcaactgaacacgatcacctggccgagcaagataaaaacctccttcactaaaccttgaaagggccaacgggatttaaaggttacccctttcccttctgga

SEQ ID NO: 95132 - DNA, 491 bp, Glycine max
  unsure (1)..(491): unsure at all n locations
  Clone ID: PAT_MRT3847_56917C.1
tcgagtgcccaacnnataactgagtatttcacaggtgtggcgtgttgtaccttgtttcttttatnaatactctaactcttgattctaattgtgttaagaagtggaggacttgttcgagttattcaaatttatnggattgtcanctgaaattttgtgagtctttgtgttgtggaatnagttgatcccgttgcatcantgcacatnggttttatgcattttttatggacttgtacatgtcacttagaactggaaaaaaatgtgtttgttgagcctgacttatgcatgtctgtgcaaactattttctaaagccaacctttcttgccctttacatgtgaaatgtcttggtgaactttttttatgccagtttcagttaagttcgtaaatatgtattgctcagcctgtctttcacgattaccatgttaataactttgttgatgcgtctgcttatagccagcaagggttgctctaagttcaggatgtgagggagtttc

SEQ ID NO: 95133 - DNA, 855 bp, Glycine max
  Clone ID: PAT_MRT3847_56918C.1
cgccaaccaaaaccttctccgttaagaataactctctctctctctctctgaaatgggcgaggaatctcaagggattaagctgtttggtgcgctgattacattgaagggtggggaagtaaagaaaggagaaaaaggaagcgaatatgagagggtggagaagagagcagagaagataataccctgcccgagatgcaagagcatggaaactaaattctgttacttcaacaactacaacgttaatcagccgaggcatttttgcaagagctgccagaggtactggacggctggtggggccctccgaaacgtcgcggtcggcgccgggcgccggaaggctaagtcaccgtgccatggagccggtgacttcatggatgggcgtgcctatgaaacttctgaagatgaaaacaggtttgagatgaatcagggacacgttgccatgcccaacactcatttccgccagatttttcaggccaagcgccagagaatcacctcaggagctcagcatcaaggtcaatgaaatcatgtacgaaaacacaacttggaattattatgaacaagaaattaaggacttcagcagcgagggaccaaagcgtgtcttgagaattaagatgtgaacacacctaaaaaaatgatgatgttcaactatgaggagacgtgagatgctgagattggttttttttcctcgaagctcatgtccattgtccataagcaggttaattttaaggcatgaatatagactgcggataattggttaagtgggttacacattatagctgtgacataagattgcgatccacgaaattgatgtatgcagatatagatgaaatattagtcaatggacaaagagatagaggattg

SEQ ID NO: 95134 - DNA, 167 bp, Glycine max
  Clone ID: PAT_MRT3847_56919C.1
cccacgcgtccgcccacgcgtccgcccacgcgtccgcttctcttttttacttgatttattgaatacctttttgtggactttccttttgttaaaagaccgtgtggctctaacaatagaagccagatgcaaaatggacgcttcgcaactgggggggggcctcgggtaac

SEQ ID NO: 95135 - DNA, 979 bp, Glycine max
  Clone ID: PAT_MRT3847_5691C.1
catacaacatggtctttggaaattttaacataagaggttttgttaccatcttaatttatttcatttctataaatgggtgctattatttttcagtgaaagcccttacattttgctacttgttataatccttagagaccatttactattttttcaccaagaaaaatggtgagatttttgcatgatcttatcctgatttcaggtatcttgatcgccgcaagaggctgataattgccatggatgctgctttcggaatggaatatttacactcaaaaaatattgtgcattttgacttgaaatgtgacaatttgctcgtgaacttgaaggatcctatacggccaatatgcaaggttggcgattttggcctatcaaagattaagcgaaataccttggtgtctggtggtgttcgtggaactctaccttggatggcaccagagctgctaaatggtagtagcaataaggtctcagaaaaggttgatgtgttctcctttggcatagtattatgggagattctaactggtgaggagccatatgccaatatgcactatggtgcaatcataggtggcattgtgaataacacattaaggccaacaatcccagatcattgtgattctgaatggagaacactgatggagcagtttgggcacctaatcctgctgctaggccatccttcactgaaatagccagtcgattgcgcctaatgtctgcagcagctagccaaaccaaaacactgaagccaactaaatgattgaaacagatcctgaccctcttacactaatgttggtattcatgctttttcttgataaaattgaatactgttaaatttattcattgaatggtactccaaagttgtattttattaccaggggcagtgttgtctggtacactgttatttctttttttatgattcaatgcttgcctgattaactttttgttgtaccttcaaatgctttaatagaaattcaaatgtcattttattttt

SEQ ID NO: 95136 - DNA, 204 bp, Glycine max
  Clone ID: PAT_MRT3847_56920C.1
acaaaatgtgggatgctcagctatgatcaccatttctgagcggacatggtagtgggatgacgcttttgatagagcacagatagactgtgactcagaccaagtggtccccaacaagttttgtgactaaaatcaaagcgatgaagacaatgctggggaagagtggaatgctcaacaaaggacatgacagtagcagtggacgtagtg

SEQ ID NO: 95137 - DNA, 433 bp, Glycine max
  Clone ID: PAT_MRT3847_56921C.1
gaatatatgatgaaaatacaatgttaaggttcaatattaaataaaataaatgtgtttttacttgtttacccttatatttaggttaggaaagtggtccatactccacaggggtgataatatggtaactataaacgtaatatatttctgttcctcactacttccagtcaatcattccagagggatgagcatgattttcagtgatctgattttccttctttgatgcacacctgcatttgaaaatttaatttcctttactttctacttctatcaagtcacccttattctttttgagctcagtgctacatgcacctctgttcagaggttggttttagtagaaattcatgaaaataccagatataactggtctcaattgatatatgaatctgtcagctttgaaggttttggtggttccattcctttttcaagcacaaaa

SEQ ID NO: 95138 - DNA, 669 bp, Glycine max
  unsure (1)..(669): unsure at all n locations
  Clone ID: PAT_MRT3847_56922C.1
ccacgcgtccgctctttagggtttccgctctgctttcagcgccgcccatacatagcagctcccattcacttctttacaactttgctttgtccagagccgataccaagtatgcagatggctcaactggagccccttatgaacaaggttgattcatcagggagacaggtggaaatggggctcttgggtcctgtatccagtgatgttattgtgtcacagtcgcagggaacctcgaatgagcatgttggattgttgagagctgtacctggtgaagcaagtaatccaggaatgcatcaaattctgtccgctaacaaacactccatgctaatggatatacttccaaacagctcagggccacagcagcagccaacaactcccaagcgcaaggcaccgatggaattattgtccagtagctcctttaacaagcgggttgcacagatgggaagtagaccttggttgcagcaagtacctaatgtatcaaataaaggttctctgcagatgcaatccccatcacatgcctctaggacacaacatttggcagcttctagtaagagaaaaacgcagttggataacacttcccagtaaatctggggaacctncgtccatgagttctaaaagtcaaaatacacagatgaagcagtccttcaaggttcaaactgaatcatctgatag

SEQ ID NO: 95139 - DNA, 3888 bp, Glycine max
  Clone ID: PAT_MRT3847_56923C.1
ccacgcgtccgggtttacactctgctttcggcgccgctcatacatagcagctccctttcacttcttcgcaacatttcttcgtcaaggtgtgtttgtatatatgtttaatgatactggtctggaatgtccaacaatctggtttcagagccgataccaagtatgcagatggctcaattggagccccttatgaacaaggttgattcgtcagggagacagattgaaatggggctcttgggacccgtgtccagtgatatcgtggcacagtcgcagggaacctcgaatgaacatgttggattattgagagctgtgcctggtgaacctatgtctcagggattgccccttttgagcatgcacagtgagcgggtagaagtacaagcaagtaatccaggaatgcatcaaattctttccgctaacaaacagtccatgcaaatgggtatgcttctgaaaagctcagggccacagcagcagacaacaactcccaagcgcaaggcaccaatggaattatcgtccagtatctcctttaacaagcgggttgcagcaatgggaaatagaccttggttgcagcaagtacctaatgcatcaaataaaggttctctgcagatgcaatccccatcaaatgcctctaggacacaacatttggcagcttctagcaagagaaaaacacagttggataacactcccagtaaatctgggacacctcgggccatgagttctaaaagtcaaaatacgcagatgaagcagtcctccaaggttcaaactgaatcatctgatagtgttaggtccaagatgagagagtctttagctgctgctctggccttggtttctcagcaaggtaaacctcagcccccaaacaataatacaccgaatgatgctgccaatactcgggttaaattagagaacagctctcaatgtgctggatcagcacctgcatccatcgatgcttcactggagcaaaggcaggatatttctcaatcagttaattcctcttttgctgtggctgattcagttggccatgcggcaggagagcacatgcaaagtacaacatatgaagattttccagaaaaatacaaggacttcgaagcaggatccacaaacgcatcggacaatgaaaacatactgagttctatgcatgtcttgaactgtgataagcaagatttccagtcaagttatactttgactactgatgatgttcctttcagtgacggtttctttatgaaagatgatcttctgcagggaaatggtctttcgtgggtattatctgatatggtggatgtcggaaatcaaagggaaagtcaacctaatatagagcagagatcagaacctgaggaaacgggtggaggttgtagggaggaggtccctttgcctgaacttttggcatcaagaatagaggcagaactcttcaagctgtttcaaggtgtgaataagaagtacaaagaaaaagggaggtctctcttattcaatttaaaagatcgcaataatcctgaacttagagaaagggtcatgtttggtaaaattcctccagaacaattatgttctatgacagctgaagaacttgcttcaaaggagctctctcaatggcggatagccaaggctgaggagcttgctcaaatggtggttttacctgattcagatggtgattttagacgtttggtcaagaagacacataaaggtgaatttcaagtggaagttgaacacgaagacaatgtccctgtggaggaggtttcaggtggtacaacctctgttgctcgaagccaaactataaaaaaggatgtggaagatgcttctccttccaaacctgatgtgaaaactgatgccgagaaaggcaatttgcagaaggatgatacattttccatcaccatttcttccaacgacggggctgatcccatgcaagggcttattactgatgatgcattaaaggactctgactttcttgaaccaattgtttctcttgatgatttcatgtattctcttacatatgcgcctccatttgaaaatttaccagtagaatctgggaaagtggtacctacctcagacaaggatgattccggggttggaacaaaatcaaaacctgctgatttaacaccaaatgagcaagcggatatcactggtgataataagtctgagaagtttcaaagcacacatgtaaattcagattctttaaaggagaaaaaggttaatgctgaatctggggccatttcttctgatgtgggatacagtgggagtcaagctgacatgaagtcaactgatggtcgtaccaaggaaaggtcaactgatgatgtgaagtctgcttccagcgatgctgagttgagaggcaatctctttcgtgcggaagagagatatgataatgacaataggtactcgaaggatgcaatccccactaagggtgaatgcctctgggagggaatgcttcaaccaaatatctctagcactcattcagtcataagcatctttaagagtggtgagaaaactgctgctaaagactggcctgggtttctcgagatcaagggaagggttcgacttgatgcatttgagaaatttctgcaagaccttcgacagtccagaagtcgtgcaatcatggtttcgcatttcgtttccaaagagtcggatgatcaatcaactctacgtgaggtggctgactcgtacattttggacgagagagtaggatttgctgagcctgtccctggagttgaactttacttttgcccacctcataagaaaacagttgaaatgctcagcaacatacttccaaaggaacaaattgagccagttaattctattgataatggcctaattggtattattgtatggagaaaaactaatttaacttcgtctatatcacccaccactgcatcacatcacaaacatagctctaaaagacaatacttcagtaggagacagcaagatataaatgtgaatgccaattctacccataaagcagtgccctctatgggcgttaagacaactgagaatgatgatgatgatgtgcctcccggatttgggccaccagcggcccgagtggaggatgacctgccagagtttaatttttccggcagttcaaatccgtcacatttgggccaaaaatcaatgggaccaccaaatatggtcccattacactcggctaacccagccccaccacgccctgcagaacaaatgagggaacttgtgcacaaatatgggcaaaacaaaccaaatgtaccttcggtaaactggcaggataaatttgggggaacaattcaaccctggaatgatgatgatgatgacatacctgaatggcagccccaaaactcccagaatcagtttcctccccaacagacaatgcacaactttcatcttaggcctcacattttgaatcaatcatttccgggttcacagcaacagccaataatgacaccacaatatcttcaacccccaatgaatgtgacccatggtcaaagaaattttgaccctcagtgggttccttctccccagggtagcaacctacagccaggaggtggaccaccctatgcgcaaggcactacctggcctcaagatgcgtctagaagtagaggatattagtttcctctttttatttttattttcatgtctttcatatactgtagtatgtaagcttattgtaaggtgtcgagctattttttttttctgtagcatcaatacctcgtagaacaaacaaatgaccatttttctcttgttttagtttgacagcagtaggtgctcagttgaataaatacgaggacaacaattttgcatgctttagtttttaccgtagttttaaatttccatagtgctttcgttactttgtctgttttatataacattgcaacatgcatactatatgtttgggaagcagttgaatttaatgccaataaactttcaaatgaaagttccaat

SEQ ID NO: 95140 - DNA, 786 bp, Glycine max
  unsure (1)..(786): unsure at all n locations
  Clone ID: PAT_MRT3847_56924C.1
gctcggaattcggctcgagataaaattataaggaaggaaaagcttcaccctgccccatcaagagctgtggaatagaattgcatagctgaaaatgaggagtacttgtgatgaatggaaaccttttatagtaatgatagcaattgatttttcttttgcggcagtgaatattcttctcaagaaagtccttgaagagggaatgaaccatttggtttttatcacataccggctgtcaattgctaccattttcatagccccaatctgctactttagggaaagaaacgacagaccaaggctcacatttcgaattttatgttacctattctgcagtgccattgttggggcatcagtgactcaatactttttccttatggggatccaatatacttctgctaccttttcttgtgctttcatcaacatggtgcctgtggtcacattcatgatggcattaccatttgggttagagaccgtgaaaatcaaatgcaaaagtgggagagctaagattcttggttcattggtgtgcataggcggcgcattgatgttgacactttacaaaggcaagccactgtttaatttttctcactatgaatctgtatctcctgtggccaacagttctgcagtgaatctagcttctacaaggacaaagggaaaatggactattggtgtaatagcgttggttttgggaaccatcttttggtcttcttggtttattntacagtcaaaaataagcaagagatatccatgccagtattctagcacagccatcatgtccttcctttggggccattc

SEQ ID NO: 95141 - DNA, 211 bp, Glycine max
  Clone ID: PAT_MRT3847_56925C.1
ctcactctagcgataaattgaggaataaagattggtatctagcactgactactcaacacagggtctgggctcaaattgctccatgtcaaccccatcaaagactcaactcagttttttacaccaaaagcaggtaatttttctgtaggaacagcacgaagggcatttgcactatcataagatgttatgtgataacatgtgcatgaagtgactc

SEQ ID NO: 95142 - DNA, 235 bp, Glycine max
  Clone ID: PAT_MRT3847_56926C.1
tgtcgttctttttttttttttttttttatcttttttttttttttttttttttttttacatcttttggaaaacgggggattgaaactggggcgacaacctccctataggtcttgatgaaaaagaaacctccaatactcaggccacctctcaattactccgtggaaaagagaatcacgtttgattccaccctcaaaacgtgaaacaaaggaacctttactactatcacaacatgcta

SEQ ID NO: 95143 - DNA, 504 bp, Glycine max
  unsure (1)..(504): unsure at all n locations
  Clone ID: PAT_MRT3847_56927C.1
tttcttagcagagaaagcagttggttaaggacaactttgattgctttgtctcttgcaaaacaacaattgatgatattgagtcaaagttaagacaaattgaggatgaccctgaagggtctgggacttcccatttgtttaatattattcaggatgttagtttgcaggctaatcgtgccttgaagcctttatttgagagacaggctcaagcagaaaaaattaggactgtccaaggtatgctacagaggtttcgaacacttttcaacctaccaagtactatccgaggcagcattagcaagggtgaatatgatttggcagtcagggagtacaagaaggccaaatcgattgttctgccctcccatattcaggtaggtatcctaaacgtgttcttgaagaggttgagaaagtgatgaatgacttcaagactatgctnttcaagtctatggaagatccacaaatagatccaacaaaccttgagaatactgtgagggtactgttggatttgga

SEQ ID NO: 95144 - DNA, 549 bp, Glycine max
  unsure (1)..(549): unsure at all n locations
  Clone ID: PAT_MRT3847_56928C.1
cacgcgtccgaaaaaaggttgatccttacactcatattccttctttcattctcttgtgcaaaccccacaaatagagaaaagaattaagccacaaacagtagtgccaccccaggatgatatggatattcattttctgattcattgaaccttcagtcttgcttctttctctcagcccctgcagagaaaaaaaaaaggagttcggatttttctcctcaaaatcttggctttttctctttcaaatcgaagatccccacttttcatgccaaaaggtgacgtgggtgtattctatttttggctaaagttttgttagcttcttcatgtttcttctcaattttccttcacaaggagttgctgatcccaagtggtggacctgctgcttttgttatcatctactttttgatgagtgatggtggtctttgaatgaaaggttttgatattaagatggctgnggatatcaaggaggggagagcagggtggtctgttatttttctgctattgactttacttctttgtagcactgaggggttaaacactgaggggcaaatcctc

SEQ ID NO: 95145 - DNA, 393 bp, Glycine max
  Clone ID: PAT_MRT3847_56929C.1
gttgaagagggtttggactatatcaaacgaattgctgttgccacatttgagggttttccttatgtgctttcacgcataaatggtgaaaagggcaaaaggtgatttgtttctggggatggtgatgagatgtcattgattccaggaaccagtgatgaagaggctttcaacaagcttattgttgcacttgagaaatgcgagcctgcattggctggcattgaatgacccaaggatgataaacttccttggggcagaattcttgacaaacctaaaacgcgctgcttaactatacttcctatggagtttaatcttgaggtccgtcagaagtcattaaatttccagaggtgcattatgaagaaaaggtacaagctcagttgtcaagttggaatcaaccca

SEQ ID NO: 95146 - DNA, 940 bp, Glycine max
  unsure (1)..(940): unsure at all n locations
  Clone ID: PAT_MRT3847_5692C.1
ccacgcgtccgatttattcagcgagaagacgacagaaggggggactagatatttttttctctctcctcttcgccgctaattaacccttttctccccagcattcaatttctattagtatccaaaccttgattgcgttcttggattttcttgtgggtagggggtttctcctctctttctctgcagtttgatggatcgggaaggaggatccaacgccggatcttgctactactccgttctcgggattcgtagggatgcctccttctctgatattcgcactgcctaccgcaaactcgctatgaggtggcacccggacaagtgggctctgaatcccgcaaccgccggcgaagccaagcgccggtttcagcaaatccaagaagcctactcagttctctccgatcagtctaaaaggtcaatgtacgatgcggggctctacgatcctttggaggaagaagaccaagatttttgtgacttcatgcaagagatgatctcgatgatgaacaatgtgaaggacgagggggacagtttggaggacctacagaggatgttcgtggatatggtggggggagatcatggccatggaatcggcgttgacttgaaccaagatcgaacggctggaaagcgaggacgagtatatggatcgaagggcaacgcgcccaagcgcagcaactctcgcagttagtgcgccgtactgaatccatcttgtaattttctttacacattggatgattgaaatgaaaatccttttactagattggtaatgctctttagttattagttatggaacaatagatcaagtgcaactgtgcaaattgtgctttgcattctaatactgccctttggggcttcttttttttcctgccaaaaatatagtgattcagttcagaggaccaaaaaaaaaaaaaaaaaaaaaannnnnnnagcggccgctctagaggatcca

SEQ ID NO: 95147 - DNA, 208 bp, Glycine max
  Clone ID: PAT_MRT3847_56930C.1
atcaatcaataacataaataacacttcttcttgccttttaatatatttctctctcttcccgtcgtggttcacctttcaacacttaattagagaccacccaatttccttgccgatctttttccaggggaaagtttggatggtttgtggtaagaagtaaaattttggtgaataaccggaaaggtgaaggtggacctggattatatggata

SEQ ID NO: 95148 - DNA, 328 bp, Glycine max
  Clone ID: PAT_MRT3847_56931C.1
cccacgcgtacgaccacgcgtacgatgtttatactatacgtcttgaccaatacctactgtgcgagcctaaaagcatgcatgggcactactgaactgcatggtgactatatttatgtacctgatcaacagcttaaccattactccatgatagtaccgcatcagggtaaactttaacaagggcaagcagattggtaacgggacgtggtcaagcatcaaggctttcgtcagagtagaaactccagcatgctcgttaacagcgacatgtaacacatcaatttgatcaagtcgaggattcaactggggaaaggatcagttgacaaggacactt

SEQ ID NO: 95149 - DNA, 228 bp, Glycine max
  Clone ID: PAT_MRT3847_56932C.1
gggccaatcaaaaggatcctaaatccttattatgttaaatcaacatccaaaactcaagatatttattacatgctgcaataatctaaatggaatggaatagtcactggtggcaataagcgtccccttgccaactcttttttttatccgggagggaaggtctgactgggtcctaacagaaattaaggtattaaagctgtgtctccggcggacttggaaaactcgaccacc

SEQ ID NO: 95150 - DNA, 783 bp, Glycine max
  unsure (1)..(783): unsure at all n locations
  Clone ID: PAT_MRT3847_56933C.1
cgatagccttggcgctgagaagcgtagatttttggatcttgttcgtgtcgtttttgtgtggggttgggacgggtttggcagtgatgaacaatatgggtcaaatcgggttggcgctcggatacccagatatctcgctctttctgtctttgacaagtattttcgggtttttcggacggataatctcgggtaccgtttcggagttcattatcaagtaagtccttttttctttttcgaacaagccatcaaatcatcaatcaagtcttatcgttactttctttattttttattataagattttttttcattaattcatattccttcaagaccgaattaattttattaattatattaaatttctcaattatttacattattattttttatttctttatctatttaattatttttcattaatattttaaagaatgaataattgaataaaaaaataattaatatatttaaaaatcagaaaaaatcttataaaaaaaaagaaaaaaaacaaatttgtttatgaaaaaagatgttgtaatcaggaatgaaagaaatactactgtattaagtactagtatcaaccaacttgcatttttctttttaaaatttttgactggaccaacttgcatttttatgagactaatttatgcaccttttacttaactntttccccctcctctttctctttctcttgaaggaaattatcaatataatacttttgcccaaccacgtgttccgcgagtggtttttagatcaattttatgagtacagtttattcaaataagttagaga

SEQ ID NO: 95151 - DNA, 1446 bp, Glycine max
  Clone ID: PAT_MRT3847_56934C.1
ggtagtttgtaaaattcaataataatttgtgaagccttcctccttctcaagtcttcaactagggtttcatatcaggctctgagtgtgcccttcattcctatcaattatcaaacagcttcggtgatcatcgtaactacctctacatttgtttgtttatcatttctttgctcgtatcaatgtctaacaccagcaacaatgtcgctggggtcgacaacacgttcagaagaaaatttgatcgagaagagtatctagaacgagcacgggagcgcgagagacaggaggaggagggtcgagcgaaacctaaagccaaaggtcctcccgtgcagaggaagcccttgaaacatagagattatgaagtggaccttgaatcccgcttgggcaagactcaggttgttacgccggttgcaccactaagtcagcaggctggatactactgctcagtttgtgagtgtgtggtgaaggactctgcaaactacttggatcatattaatggaaagaaacatcaaagagccttgggcatgtccatgcgagtagaacgtgcttctctccaacaggttcaggaacgatttgaagttcttaagaagcgtaaagatgttggcagcttcacagagcaagatcttgacgagcggattttaaaacagcagcaagaggaggaagaaagaaagcgactgcgtcgagaaaagaaaaaagaaaagaaggagaaggcagttgaagaacctgaaattgatcctgatgttgctgccatgatggggtttggaggtttccggtcatccaacaagaaatgatagcattctgcatgcggaatgaactgcgtatgaaattttggaacaattattctgcaatgataagctgaaagattattctgtggagaatcgttaaatagttgggctgcggtatcttccagcctgattttgggtgtggcttaaagatttttctgtggagaatagttaaatagttgggctgctcaaacagtagtatgggtgctggtgcattgcgttatattcaatcatttgattcggttgattcatgtacatttcttctgatagctaacctgatgtattattatacaagcttgatatttgtagtctctactatgtttcaagtaggaagtgacaacttgccgtacctaatggaaaccaattatgcacattcgatacaaaaaaaaaaaaaaaaagacccaagttttctcaaagtgaatctaaatctgcgtgaaaatcaccagaacaaaagcttgaggaatgacattatctttacttttattctgtctctcatttcttggcttgttgcttttaaaagagccaatagcccaaaaggctagctagcaccacctctgctactaaagtgttgctaaagacttcagtgtttcttttcaactccaattgtatatgtccattttttttaaattattattattacttaattgatcatgtttttactttttagaat

SEQ ID NO: 95152 - DNA, 408 bp, Glycine max
  Clone ID: PAT_MRT3847_56935C.1
tctttttttttttttttttttttttttttttttttttttaaaaaccccgccaacttgattcaattttttaaaaggaaaaaaaaaaatgcgtggaaaaaacattaaataccttaacaatccctttttaaatttcccccacccaattatttttgccttaaaaaggcaacttcctaacaaaatggggtgcttatcaaaaaaaagttttaactaaaggcctttcacattataccccaccttaaaaagcaccccatgtttcccccgggggaataatggtcccagcctccacaaccccctttttcatttgcttgaaaggtctaataaaaccccccggggtgcccctgaaatgcaaaccacccttttttatttccccggggaaattttttgcccttttccaatccaaagccctca

SEQ ID NO: 95153 - DNA, 1149 bp, Glycine max
  Clone ID: PAT_MRT3847_56936C.1
actctgcatttttcgccgttagccgcagatggccgatcgcttctttccgaacgagctgccacgcttcgtggcagagaccacagaccaaactccatcaccagactctctcactgcccttctctctctcccttaccaaaccctctccacaaagttccaagcatctgcatttcacctcaaacaatcggtggtgagggacacatgggggtcacgtgggaagcgtgtgaaggactatagcctttacacgggggctcttgggacagcatacctacttttcaaggcctaccaagtaaccaaggacgggaatgaacttaacttgtgctcagagattgttaaagcttgtgattctgcttcagcagattctggcaaagtgacatttatctgtgggcgtgctggtgtttgtgctcttggtgctgtgatagctaagcatactggtgatgaaagattacttgactattacctgaggcaattcaaagagattgcgatacctcgcgagtctccctatgagctattgtatggcagagcaggttacttatgggcttgttcattcttaaacaagcatattggtaacaacacaatacctactacccacatgagatcaattgtggatgaagttattatggctggcagacacttaggtcgcaagggaagatgtcctctgatgtatgaatggcatgggaagaaatactggggtgctgctcatggacttgcaggaattatgcatgctttgatggacatggaactcaagccagatgaggtggaggatgtcaagggtatgctacgatacgtgattaacaatcgtttcccttggggcaattatccctccagtgaaggaagtgaaaatgaccgtcttgtgcattgttgtcatggtgctcctggactcactcttacccttgttaaggcaactgaaaagttatattataggcaattcagttggtacttgagtaattcgtttttgaaacaactttatttcccgcagaagtcatatattccttttacgcctgggcacaaacatgaaactaagttttacttctggttttcttgtgttttaaattccagaaattatgcaataattttttagcctaattatgaaacacatgttcacatctcatgaccatattcttttgccataaccattaggtttttggggag

SEQ ID NO: 95154 - DNA, 641 bp, Glycine max
  unsure (1)..(641): unsure at all n locations
  Clone ID: PAT_MRT3847_56937C.1
gaagacgttagcgcgctaacgacacaacaatcctccacgcaaccgcctccacaagcgcgggtgctgcatttctctgtgcaaaatccatggcgaaatcatcaaaacgcagcgtcggaaccagcagcaccgactcgaagaagaagaagaagaacaaaaggagcaagaagttcggtccagaaggcgtggccatgaaagtgaaagccaacaacaacaacaatggcactgcctccaatcccttcgagtcgatttggtcgcggaggaaattcgaggtgctagggcagaagcggaagggcgaggcacggcgcatggggctggcgcgctccctggcgatccagaagcgcaacgacacgctcctcaaggagtaccaccagagcgccaagtcctccctcttcgtcgacaagcgaatcggggagaaagatgaggcgctcgatgacttcgggaaagccatcttgcgatcccaacgcgaacgccagctgaacatgaagctgagcaagaaaagcaagtttcacttgtctgatggagaggaagatgactttgagggaattgattctcttggaagagatgattttgaggatgagatgctncctgacgatgttgatgctgagactgatgagaaantaaatttggttcagcggaacatg

SEQ ID NO: 95155 - DNA, 375 bp, Glycine max
  Clone ID: PAT_MRT3847_56938C.1
acggatggatcaaaatactgctgaagacaagatggatgttactaaggacactaagggaggaaccattatgaaccttgatcaatgggcggatgttgagcttaaactcattactgaagcaagggtggatgaggttaaccctattcctgttaatggcatgaatgcaggggagaacactgttgttttaactcccaatacagcgctcgaagcaactcggtcttctaatacatgtgatttgagaagtgccatgacgagtaaaaagaccatgtgttatgctaattgtatgcgttagggagctatttgaacaaaagatgttagtattgcatgtcttcaaagcaccagatctggtgcattgctttgggaatttacttatcatac

SEQ ID NO: 95156 - DNA, 424 bp, Glycine max
  Clone ID: PAT_MRT3847_56939C.1
tgacgtgaagacagtgggtaaatacttgcttgaccttcccgcgtcaatctacatgcgcaactccccctcctccgcccctgacagtgggtatagggcggcatctgcagcaagtcctctataccatggcatgggaatatatgacatgcgtgcatcaccaccatgatttgaagatctctgctccaacttgcatgagataccccgccacatgtgaataataaaggaatatggacaggcaattcatgacttggcctcccatgtatcccaaaaaatggatgagtctttgggtataccccataatgatttcaaggactgggcattcattttgacgactattaaatttactcttaccccagacgttatatgctccatggcagcacaattgcactcacatacaggaattatcactctacttcgagatgatgaa

SEQ ID NO: 95157 - DNA, 438 bp, Glycine max
  Clone ID: PAT_MRT3847_5693C.1
actgctatagcagttgtggtttatgaatgcgcattctgcacgggcttaggcgttatgcccaacatcatgtgtgctgaaatgttgcaaacacgagcgcgtggagcctgcgtttgtatgactactctaacatatgggggtcgcacccagattgcaacttgggtattaccctacttgctccagctactcagtctcactggaggctcaggatgataagttgctggctgcataattatatgcatagtcgaatacttgaaagtttctgtaccaaaaagcttgccttaagaagatattaatgcatctgaagctataagcgcatagcctgtcactgagcctgccgcattgagaatcaatgggtgatgccttagtgcatactgatcaccttatacatacaattcgatctgatctcttctaggcagacctgagaagtatggaactttg

SEQ ID NO: 95158 - DNA, 446 bp, Glycine max
  Clone ID: PAT_MRT3847_56940C.1
ccacgcgtccggcaacgtcctctcttgctacaaacaatatgtttggcactacaaggaggtatgcactacatctttttgacctaatttagcccccctctcagttactactgcacgaaacatgcggcagacctgcatgcccgactcttcatactgtggactacatctatgtgagctaattgccagctgcttaaatatgcgaaactgaaagagctgaagcctgctactcagaaatgtaccatggagctacactcatccgaagcttcacataagagtgctgacagactacccaggcagatagtattgtgaactcgacaatgactaagaactcttttggaagaaactctgcagatgataataagaggaactttctgagagaccgatgaccataatgttgtcctctataaatgtgaggatactcttctgatcacatgacatctgaaaccata

SEQ ID NO: 95159 - DNA, 377 bp, Glycine max
  Clone ID: PAT_MRT3847_56941C.1
ggaaggaaatatgaccttgaactaaccttgttactggaaatagtttcataaaaaacacaaaaaacacttcctatgaaaacaactttttatggaggttttttttttttcaaaaacaagggggggagttataacaattgggcccttaaccctttaaagaaaaaagggcacatcagaggatctttccatcccacatagctaatatgcttccatctagttcataaaggaattaaacagggaggatctctttgggcatgatttatccagcaagatcttcaaatcaacattttttattttttgaaggagcttattttccaaaaacttaggaacttgcacttttaaccacagtttgtaactagcagaatatacagcttgggctt

SEQ ID NO: 95160 - DNA, 250 bp, Glycine max
  Clone ID: PAT_MRT3847_56942C.1
tcaccctattactactctatctcttatcatacttgtatattacacatcactcttcatattatatataatactactatcatatatacactattactatatatatatatttattctatacttcatatcctcttatactatacaactctcacacatactactctctaagaatatagattattcatactctagctcactcttacttagtaaacgtcatcttcaaaacatacttattactcattaatatatatat

SEQ ID NO: 95161 - DNA, 656 bp, Glycine max
  unsure (1)..(656): unsure at all n locations
  Clone ID: PAT_MRT3847_56943C.1
tatgacgtacgcatggcacgaccngtacgtaagnctatggaattccttctagaagacggcacgaccctatttatttatttattttatttatttttattattttattttatttttattttttttttttttttttttttttttttttttttttttttttaaattattttttttttttaaaaaattaaatttattaaaaaaaaaaaaattaaggaaagaaaaaaaaaaaaaaaaaaaaaaaaaaaagaaaaaaaaaaattgcgtggtttaggaaaaaaaaagaaaaaaggaaaaaaaaaaaaaaggggaaaaaaagaaaaaaaacccaaagaggaaaaaaaaaagagaggggaaaagaaaaaaagggggaatgaaaaaaaaagacaaaatgaaaaaaaacgcctggagcaaaaaaaaaacaaggaactgtaaaaaaaaaagggaaggggggaaaaaaaaaaaaaaagcccgccgggccgctaaagcgggaagagggaaaaatttggaaaaaggggaaaattaaaaaaaaagggaaaggaaaaaaaaatcgggaaggggaaaccaagcgggatgaggggcccggataaaaaaaggtgccttgacctgaaagtatcccaaacgctgaagaaagacaaatcccggccaaatgagagcaaacg

SEQ ID NO: 95162 - DNA, 1169 bp, Glycine max
  Clone ID: PAT_MRT3847_56944C.1
ccgggaaaagaaagataatattcatcatcttacctgactcacaaattccgatgaacattaatcaattatcattattcagcaaaaaaatctccacttttttgtttttgttcaatctcgaataccacaaactcaaaatcccaaaccccgtgtgtgccatccacacattgcgcgaaaaataaaaaatatcacgcgctgggacgaccatacggtatcgcaagtccacctttccccaaaccgtcaattccaattcccacaaccttaaaccttcaaactcttcacccttccttcactagagagagcgagagatatacagaaaacaaaacagaatgggcgtggtggtgaccgacggcagccccgtgagcgacttcattccccacaatttgcacattgttcagcctttaaattctgcgtcccctttcttcatttcacttcagagagagagaacaaaacagaatgggcgtcgtggtgatcgacggcagcaccgtgcgcgacttcgtgaacgacgaaaccgccttcaccaagagcgtggacgagcagttctcggcgctggacctcaacaacgacggcgtcctctcgcgctcggagctccgcacggccttcgagtccatgcgcctcatcgagacgcacttcggcatcgacgtttccacgccgccggagcagctcgcgaagctctacgactccatcttcgacaagttcgacggcgaccggagcggcgccgtcgaccgccgcgagttccgcgacgagatgaggaagatcatgctcgccatcgccgacggcctcggatcgttccccataaggatggtcctcgaggacgatcccaatagtcttcttcagaaagccgcggatcttgaagcctccaagacctgaaatccaaacggcgacgttttgagttcggttcggtaatagtaattgattgtgctttcgtgcgttcactttgtttttcttttcttaaataaaagggtttatgtagagaccgtgtttcgaaactgaggttccgttctgtgtataatgtaagggacactgttattaacttatcatgttgagtgttgagttaattatactttttttccctaatataatttctaagtttaatttagccaagtttatataaaaaaaaaagggccgaccggttcccctttccaaaattctcacttcttaaggggatatgg

SEQ ID NO: 95163 - DNA, 372 bp, Glycine max
  Clone ID: PAT_MRT3847_56945C.1
ctctaaccacttatcaccatggtgccgctcgtacgctaccttcgttcactgctctatatcgggtggtaacctgtgccagagcaggccagagctttgagtgccacatgcatcagctgaatgccatgataccttcataaccgataaagtcggaaggcggtctcacagagacgtgatacccttacaacaaaccatcatagtgggccggaagttgaatatctgaatcgtactttaaaggtaatgaccttggaagaccttcctacacagacggttctcagatgttctacgtacacaccgggaatggtatgatgagcttgatattactgatgggaactagcacttatcaagagccgacagaatgtctgctaccacgac

SEQ ID NO: 95164 - DNA, 960 bp, Glycine max
  unsure (1)..(960): unsure at all n locations
  Clone ID: PAT_MRT3847_56946C.1
ggctcgagggcagatgccaagagcaaccccaatgcacaactccttgaagaactggaggctttgagcgaatccctttacaaacaacacacctccaccacaaccagaagaacagcttcccttgtgttgccacgaacttcggctccacctattgaagatgccaaagatgatgatggaagcagcaacaaagctcggcggcgcatgtccatgtccccgtggcgatctagaccaaagaatgatgatgccactgccaaggcagaaaccaaaaagcttgatggcacatcaacaatttcttcaggtgacagtgacaggaaagggatttggaagtggaagcctattcgggctttgtctcacattggaatgcagaaactaagctgtttgttttctgttgaagtggtcgcagctcaaggccttccttcttccatgaatggacttagactatccgtttgcgttagaaagaaggaaacaaaggatggtgcggttaagacaatgccatcaagggtttcacaaggagctgcagattttgaagagacccttttcatcaggtgtcatgtttatcataccttcaaccaaggcactgcaaagcagatcaagtttgagccacgccccttttggatatacctttttgctgttgatgctaaggagcttgattttggaagaagctccgtggatttgactgagctaataagagaatccattgagaaaaaccaacaaggcacgcgggtgaggcaatgggacacaagctttggcctgtctggaaaggcaaaaggaggagaacttgtttctcaaactgggtttccagatcatggagaaagatggaggagttgatatatataataatcaagtggagaattcaaagtccagctctggcaagcttagtagtttctcttcttcttntgctcgtaaacaatccaagacatcattcagcatgtctagtcctagaatgacaagtagaaatgatgc

SEQ ID NO: 95165 - DNA, 278 bp, Glycine max
  Clone ID: PAT_MRT3847_56947C.1
ggcaaaaagaaggcagggggggggaaatgggaaagcctattaagacacttaaagccaatatgcaatgtataaaagtgtcgaactttgctaaaagcaaccttaactacttgagattttattgggatcacaatagcgaactactataaaatttactaccagaaactggcgtcctaggtatagctcacaggccaactttcacagctttaacaaacacttcacaccgttccattggttgaatataaatttgtttttatatgccaaaacagcctgataaacct

SEQ ID NO: 95166 - DNA, 506 bp, Glycine max
  Clone ID: PAT_MRT3847_56948C.1
ggctcgagggcatggaagagccccttgaaatacccataataaatgaccttactatgattttgggctctatatctcagtccaaggcagcaggagttgtagttgatttcactgacccttcctctgtatatgacaacgtaaaacagggcgtcttggttgcaccaaccctttccataggatcaatattattgcaacaagctgcgatttcagcttcttttcattacagcaacgtcgaaatcgtggaatctagggctaatgcaaatgatcttccatcagcagatgcaaaccaaattgccaacaatctctccaacctgggccaaatctataacagagaagacccttcaacagatgtcttggcaaggggtcaagtcctaggagatggaattcgtgtacacagcatggtccttccaggcattccttctagtacaacagttcacttctctggtccaggagaggtatactctatcaagcatgatatcacagatgtgaaagtgtctcatgcctggctt

SEQ ID NO: 95167 - DNA, 509 bp, Glycine max
  Clone ID: PAT_MRT3847_56949C.1
gcttgtaatcaagacaatagaagctccatgactggaggttgagcatgtcattcttcagcgtgctttatgtattttcctcatgttggcagccaagatatgaaagatggtttttatgaaaagttggaatctgagcttcaaggttcaaggaatacttattatgtaggcggacttatggcatttgagctcacagagagaaattcatcttatgccatggctttgatctgcaagaactttgcatataggaatgattttccaatatttccttacaccaagaatttgtttcccttgcaagctttgtgccagaaaaagaatcgtagagaattaggtgaattgccagaagtgcaatttcctaatttgcctactttgaatagctacttaacgcactggggaactcatccaatcactcaaaacagggctctttatacttggattaatgaagaagggactccagtatgccaaaggacctatggagaactatattttaattcttcttgcattgctcataagct

SEQ ID NO: 95168 - DNA, 237 bp, Glycine max
  Clone ID: PAT_MRT3847_5694C.1
cggaattcccgggtcgaccacgcgtccgacggagtgtgtgtcccttcatcctggaaatagagcccacacatacacattccgctttgactttgcaggctggtttttgcgctttgtctggtttccaatcaccgtgatatcatggaatccacacaatcatgttgtgccaccattcaatacgcatgtcttgggtgatgccgagaagtatcggtctgaccttctgtctaacgccattgaagc

SEQ ID NO: 95169 - DNA, 1491 bp, Glycine max
  Clone ID: PAT_MRT3847_56950C.1
tatactcttatcttcttttgggcagagaggcttcactcttgagtagccatggcctccttaagctgccagtttcattccaccaacttgttgaattctaagaatgtcaacagaaggaggaaacgtttcattttttgctcagcacagcctacacaaaacaatattaaggttgtgattaatggagcaaccaaggaaataggaagggcagcagtagtggcagtgactaaggccagaggaatggaggttgcaggagcggtggatacttgtcatgttggggaagatattggaaagatatgtggcatggaagagccccttgaaatacccataataaatgaccttactatgattttgggctctatatctcaggtgatgtgaatcaataacaaacttggtattttttttctctccttaatctgttttcttgaatgacgttttggatggcaatttgcagtccaaggcagcaggagttgtagttgatttcactgacccttcctctgtatatgacaacgtaaaacaggcaacagcatttggcatgaaaagcgtagtttacgtgcctcaaatcaaattagacacggtagctgcattatctgcattctgcgacaaggccagcatggtgagcatggggtcgtcttggttgcaccaaccctttccataggatcaatattatcgcaactcgctatgattttaactgtttttcatgccagtaacctctcatccgcggaagctacattatttgcatacattgagacggcctgcgagggcgtcttggttgcacaaattgcaacaagctgcgatttcagcttctttccattacagcaacgtcgaaattgtggaatctagggctaatgcaaatgatcttccatcagcagatgcaaaccaaattgccaacaatctctccaacctgggtcaaatctataacagagaagacccttcaacagatgtcttggcaaggggtcaagtcctaggagatggaattcgtgtacacagcatggtccttccaggacttccttctagtacaacagttcacttctctggtccaggagaggtatactctatcaagcatgatatcacagatgtgaagtgtctcatgcctggcttgctattagccattagaaaagtagtgcgcctcaagaatttggtatatggcttggagaagtttatatgaaaatagtccacctcttttatctccttgccaagaactttaacttggttgagctcaagggaccttctacttcagcatcttgacaaaattcatatagaaaggtttgcaagaacaaaagagaaacagatgctccccaaattgctttttagtggcccaattattcaatcacatcatgcagcaccagaactgtgatttgatgattttttttttaaaataaataaatttgtatatccaattagaattcagatcacatgacgacattttatgtgtagacagtgtagtcaatttagttttcaagacatacaactcgttcaaaggatgtagtttaaggt

SEQ ID NO: 95170 - DNA, 268 bp, Glycine max
  Clone ID: PAT_MRT3847_56951C.1
gtccgtgatttaagggctgcggtttcaaacctgtatactagctgcaagggaatgttggatttggatgctgattggatcgattcagactcattttgactgacatatgttagagaggtggaagaattgggacagaggaaagtggatgagctctgccctggtggaaaaaaccttgtagttaatagtgagaacagggacaagaatgttgatccttttatacaggagcgttttataacattcatatttgagtaggtatcacaatatgtcaaag

SEQ ID NO: 95171 - DNA, 413 bp, Glycine max
  unsure (1)..(413): unsure at all n locations
  Clone ID: PAT_MRT3847_56952C.1
acggctgcgagaagacgacagaaggggacttgtctctgtctcaacttttcttcattgggtctgtgcctctcaccgagtcacgcactcgcctcgactcgtacggactccgatcccccccgagtcacactcagccagcaccaccgcccgatccgacgatgtctcgcgcctcttccgccgcctccggcgagatcatgctgttcggggtcagagtcgtcgtcgattcgatgaggaagagcgtcagcatgaacaacctctcacagtacgaacatcctttagacgccaccaccaccaacaacaacaaagacgccgtcgccgccggctacgcctncgccgacgacgccgctcctcagaactccgggcgccaccgcgagcgcgagcgaaagcgaggagttccgtggacgtaggaagaacac

SEQ ID NO: 95172 - DNA, 656 bp, Glycine max
  Clone ID: PAT_MRT3847_56953C.1
cccacgcgtaccaggagagggaagaaaggtacaggctaaaaatggataaaaaaagaaaaacaaaagaaaaactatttgaaagaatgaagtatggttacaagcagaaatcacttggacgataagacttgaaatttagtcaaacactttgtgaacccatttttgcttcagtcgggaaaattgtctcgcaaattggagaggctttgattctaacattggcacagatcatagagacagtattgtttctttcttcattaactgaatacgtatactctcaatcctcagtctcagcaaaggagtttcccatcttctgctgttcattaatttcacggccttttttcatggtcaattattgcagcacagaagacacaggttgttccacttcgaagtgtactcatagtctatagaaatgcatcctccaattacatttgatttagcttaaatttttattctttcattattgtatagtatttggtaaaacactagtggcaattttgagtagaataatggctggttttcacgtgaatcgtatctgtattattattgttgctgcgctactgctgttattttttcagtagaaagcaaatagctagtaaaataaaaacattccgctggttaaaaaaaaaaaaaagatcaaaaaaaagataaagccaaagcca

SEQ ID NO: 95173 - DNA, 189 bp, Glycine max
  unsure (1)..(189): unsure at all n locations
  Clone ID: PAT_MRT3847_56954C.1
atgacttttgggcggacgcgngggaaaaaaaggaggntttttacagtgaaagccgctctgcgctgcgcgganggaatgctacaaaccctttcagacgcacagctagataactctttaaacaaggacacgtgaccaagagtgcatactattgggcgtgaagccgacagaaacgatcccaaaactaaaccc

SEQ ID NO: 95174 - DNA, 422 bp, Glycine max
  Clone ID: PAT_MRT3847_56955C.1
aagaaaaccggctgggcttttttggattaaatattatgaatactatggggacaagaggggtttatattttccacactgttactgggatttgggaagaatatgaacccaaattttcactttcactgcaaaaaaaaaaaagaagaaccccatttttaaggacactaaaatcatttatttccccattctttggactaaaaacttttggggggttgggggctccaaacttttttcccccaggatggggcaacttttttattgaaacaggggggaatataaacttcccatgctgttcctggggggggggtcttttcttgcttaaaaaggggaggaaaactttttttttgaaggaactttctggttccctctcaattctaaggggagagggacttgaataaaaatttggggatacttttcctaaaggg

SEQ ID NO: 95175 - DNA, 600 bp, Glycine max
  Clone ID: PAT_MRT3847_56956C.1
agatctgtcgctagcgaatgtaccagatgccgtacatgtgcacttcaagtcctgtcaccacacccggtttgggttacgcatacctaagactgctaactaatgtaagtgtacactggaactaagcctcctcaacaactagcatcttccacatattaaaaacacaaactcatgtaagatgcaaatgtatcaactgtttaacctggtcaactgtcggcttgtaaacaactataaattacatgttcggctgaaacataataacaataacaacatcctgttgtggattccttcacaatcgtcgtggtaggttaaccaatgactacagctgacaaaaaacaacacaaactcatagggtatgtggcactaacactggctatcgtgagcccaaaacagcacatcgtagcacaggctgaaacaccatacactgaactgacgcatgcaactgggctaaaacagcaaccccaacaggttacacaggctccctgtgtatagtgtagtgtccaggtggtacatagcgcgtaactaggcggtatagctgccaacacagctagcgaggcaacactggtacttataggggtgcatgtgactagagacgctagagct

SEQ ID NO: 95176 - DNA, 370 bp, Glycine max
  unsure (1)..(370): unsure at all n locations
  Clone ID: PAT_MRT3847_56957C.1
cgcgtccgattagagaaaaatggttgatttagttgatagtaataaatnngttttaaatnnataatnnntgaaaaattatcgttgtcattagtactcatgtggcttctaatggtttgtcaatacattctctttctttttttaatgaaaaatatttctaatataaaaataattaatataaaaaatattataaaaaaataaacgtcatttcaaactaggatctcattaatatgaatatggatggatggagtgattgttaaaagaaaaattatcttcaatcatctttctttcttgaagagacgtctccaatcatcttacttccttctccattacactgccattgattttcataaagaacatgacttcattcatt

SEQ ID NO: 95177 - DNA, 447 bp, Glycine max
  Clone ID: PAT_MRT3847_56958C.1
cccacgcgtccgtacggctgcgagaagacgacagaaggggaccgtatcatccaaactattggccatgcaattgagacccaggataacaatgatgtcttggcttattggttatccaatgcctctacacttctcttgttactccagcgcacactcaaggctagtggtgctgctggaatggctccacaacgccatcgttcttcagcaaccctgtttgggaggatgactcaaagtttccgtggagcaccagctggagtcaatgtttccctaatcaatggtaacacaagcagaggagtagatacattaagacaagttgaggccaagtacccagctctgctgttcaaacaacagcttacagcatatgtggaaaagatatatggaatgattcgtgataatttgaagaaagaaatttctcccttgcttggattatgcatccaggcaccgagaaca

SEQ ID NO: 95178 - DNA, 440 bp, Glycine max
  Clone ID: PAT_MRT3847_56959C.1
cccacgcgtccgatatatatatatatatatatatatatatatatattatttaatttcacacggaaaagcgattatttaattttgttggaattttgaatttataagtatgcagtagtatttaatatattaagtttttttcttcttctcagaaacgccccttcatattattacagaatcccctaaatgtgggttcgacgccaggcaagggtttcaaaaacttctatttatattacgggggattattattttcttataggttatgcttttctcttgtcataagccaagtaaaagtgctttttcttctttttttgaaagattgattctgaagttcccacaacaaaaacacaaactttactcgttccagaaaaggcattggtgcagatcgggggattattatcaatatatgattagagacaaatctacaatataataatgacatt

SEQ ID NO: 95179 - DNA, 376 bp, Glycine max
  Clone ID: PAT_MRT3847_5695C.1
cgaaaacactcgcttattatatatatcatccccacctaggttcttccgtttttgaagctggggtttataccctttgaggtttgaaaggaaatccaagcaaaggtagaaagaatgaggaagcctagttgtgatatcaaaaaattgaacaaaggagcttggtccaaacaagaagaccagaaactcgtcgattatatcaagaaacatggggaagtttgttggcgtacactcccccaggctgtaagaatatatgaatttttttttatcaataaatattaatttgttaggttttgctaagaatatcaattaaaatatttgaatctttgacatttgaaatctccttttatttttttctaaatattatataaagcttatatct

SEQ ID NO: 95180 - DNA, 481 bp, Glycine max
  Clone ID: PAT_MRT3847_56960C.1
gctactgtcgcgccgccctttttttttttttttttttaagaataacaaaaaaatggtttagggtgaaaaaaaaagggaggaaaggtcatcactattattacccactaacaatcattggctcattgctaatggtcaccaaatttctttattcagggagaacaaaatacttttactgaacaccgtgctcgtctctaagtcatacctaattgtccatgggtttccagcaagatggcctcagttttttatttaacacacgcatttgcattaaaatgtttggctacagaggcttcatgctccagcaacattacccctttgtggatcaatgatcccacaacatcaaatttatatttccagtgcagcttatatccattcttggattggactggacaataccttttactgtcacactaccattgcaccaccttcttggaattaattcaagggtactaataccctttccaattcagttcaacttttttta

SEQ ID NO: 95181 - DNA, 378 bp, Glycine max
  Clone ID: PAT_MRT3847_56961C.1
gtactgtgcataacggctgagttatgtacttatgttaagaataaaataaagtgctgttgttgcaaaaaaaaaaaaaaaaaaaaaaaaaaaaaaaaaaaaaaaaaaaaaaaaaaaccaaaaaaaaaaaaaaaaaaaaaaaaaaaaaaaaaaaaaaaaaaaaaaaaaaaaaaaaaaaaaaaaaaaaaagggccgcccttttaaaagaaccaaagttaactaacccttccttccaacttaaaacctttttaaaagggcccccaaatttaaattaattgcccgtattttaaaaactttgaaactggaaaaacctgggcttaaccaaattaaatcccttggaaaaaaatccccttttcgcaagtttgcataataccaaaaagc

SEQ ID NO: 95182 - DNA, 274 bp, Glycine max
  unsure (1)..(274): unsure at all n locations
  Clone ID: PAT_MRT3847_56962C.1
ctacgcacgccaaacccggttctccaccttccgaatcccactcagacncagttacaccatgctccatgcatcgtcaatgcaagcagcaactggctacatggcacgtcaacaggggcaacaagtctttcttgagggctangattccgacatggtacaccccccctacagaggaggctacaaccaagaacccattcaagctgttggggatggttggacctatgggatgggctttgttcttctcgggatggttcgcgtggacatgtgacgggtacgt

SEQ ID NO: 95183 - DNA, 227 bp, Glycine max
  Clone ID: PAT_MRT3847_56963C.1
gaaaaaaaaaaataaaagagagaaaagaaaaaaattagggaagggactaaataactaatagaaaactaaaaaaaaaaaattattataaaatataaaaggatctaagatataaaaaatagggggcgccccatgttaggtgcctgagagacacggtattaaatactggaccggggcctgcggggtttacgttttaccttatagaggaggagtttaaggttggggacatt

SEQ ID NO: 95184 - DNA, 422 bp, Glycine max
  Clone ID: PAT_MRT3847_56964C.1
taaaaaaaaagaagaagaaagaagtgcctctgtctctttctctctgtacaacccttcttcttcttgttcacttggattctccgtcttcaatgcggaccgatccatgatcctgtacacgtaatcccaccttacctaagctaaaacccttttgatctctctgtttcacaccatgtcccaaggatctgcctctgatgacaccaccgaaccctcgccggaatccgattctcgtaaggagcaaacaaccgtctcaaccaccaccaccgtcgtgtaccgctgtcgtagatgctggtgctcctaccgcccccactcagagtcgcccctaccgcgcctgcgctattcgcgcggtggcgcgcctactctcggcgtcgcagccggcgaggccgaaggccgacatgatggagccccgacgcgaggggtcgtcg

SEQ ID NO: 95185 - DNA, 218 bp, Glycine max
  Clone ID: PAT_MRT3847_56965C.1
acacgcgttcgtacgggtggagagacacagaagggggtaaggaaaggtaatgaattgtggataaatcatagacctagtggatagagaatggtaacggataggatatgtagaatcatactgaaaacagaatatgccggtcgggtacatactttatttggacgaagtgtaaaaaaagcgatctttggtgtgtaatggaacaaacacgaattccttaattg

SEQ ID NO: 95186 - DNA, 317 bp, Glycine max
  Clone ID: PAT_MRT3847_56966C.1
accacttcatggtttttgaccaattggtcttgtttttgtgtagtagtaatttcaagttgttcttgagtttgtgagttttgaaagtttggattgtatttctgtttgacgagtggtgttggaacaagttaggtttggtacggcctggttgggccatccaatatctcattcattggatttcatcgacggcataagtcataatcaagagtcgcgaacgcacgttgtatttaccatctcagaagtccgttctcagaacttacgagctgatccctgagtaccagaaatctgtcggccatacgagcgcatcatagctgccatct

SEQ ID NO: 95187 - DNA, 371 bp, Glycine max
  Clone ID: PAT_MRT3847_56967C.1
ataacaatcccttaagttttatatataccagaagatatgcaccaaacaattgccaggggaaaataagaattaccaaaccaaataggcataccttaatggcccacgaagaaggtctattgtgcctatataaattaggaattattccttaacaccattaaaccactttaagtgttaagggtgggggatagggtaaacttctatgacaatatcccatgatagaaaagataggtgtcaaggatactggcatcctttggaaaaaccgttgcataccttgacgcacgcgaggacataatatgatgaatagctgtagctcagttagctgaaaaatatcacatatacgtatgaaaagagattgatatatgctttaaagg

SEQ ID NO: 95188 - DNA, 748 bp, Glycine max
  Clone ID: PAT_MRT3847_56968C.1
ccacgcgtccgcaggctcacagtttgttgtcttgctcacggaatgtgtctttctttgccacttttgcttagccagtcatcaagtcatggcttctcattcctttcttaatttgcaatgcctgtattagtagttgccgcttccttcctaccttcatccaacttttatcacgcttttcttgtgtgtatagacaggatccccatattatattatgctcaaattttgtatctatcttttttcttaaatatactcaaattttaatatgactctacacttatctagtttctatttctaataagagagatatacccaaattttctgacactataagaatgtagcttccataaattctcatcatggcccaaaaaatagtgtctttagagaagttggaacaaggcacgggtttgaagctttatggatcatgaaaagctagttagtccatgaaaatttttgagaaagaaaagaaaggagaaacatttttctttttttttttaaatgaaatggaggcattgaatgaaagatctcttgcgagaatggtttcgcatagagtccttcaaatgggaatctcattcccatgtcagatttgtgttgtggggtttctttgtgaagtctgtcttgcctctttcatcttggctgctctcacttcctttggcactttacagcttgatcgattttcattctcaaccatgtcaatgcttaatttgtcttggaactctgatctcaatacaacatcaactggcattttaaaccc

SEQ ID NO: 95189 - DNA, 343 bp, Glycine max
  unsure (1)..(343): unsure at all n locations
  Clone ID: PAT_MRT3847_56969C.1
agggctcgtacatttggtaaagggctaagaaacccttaatccatatcagtccgagcgctccctactatcaccgacggcactggctggatgaatgaccatgctgcaggcgagcctagacatgaaagctatcgtgctgggaaaatatcactatggtgtctactagctcgggncggggaggcaccgcaggatgcngctcactcggggtgagagctngaagcctctggcggggcctggnncagctgggcaggccggnaacagngtcggacaaagaaggtggccgaaaaacaacgcggggtgtgagacnaacgcagccgggggcgcccggccggccggggaccagggc

SEQ ID NO: 95190 - DNA, 345 bp, Glycine max
  Clone ID: PAT_MRT3847_5696C.1
agggcccaaagagcactttcattctccctggacaatggtttttaaccaaattttaatcccacaagagataccgcagcccatctttctaaatgtttcaacgtacgggaaaaatcattgaaaaggtttctaaaatttggggaacccgcattggttttaaaaaccatggccattccattttttagagaaatattatgggggccaagcctttttaacaatctcctaaacgtggcttaggcattagcaaacccaagctcggaaagatttaggggaacctcaactaaattagtaaaaaagggcttttcgtccgtggtgtttttatcaacgagggggctgtatataaggcct

SEQ ID NO: 95191 - DNA, 321 bp, Glycine max
  Clone ID: PAT_MRT3847_56970C.1
ggtaccaatccccaattcgggggacgcgccacgccaccgtaccgttgcgataagacgacaaaacgggatcacttaaccaaaacaatgataccttgtgttagtggcagtagcactactcccttaatgactcttattctttatttcttcacttactttttactcaactgcacccatgccttctcccacgcacctcctgcaattgtgcatggactttcatgggatttatataagacgagctctcccatgcttgaaatgatattgaacaatcatcttcacaacgtgttcaagaaggacaatgggcaagctcctggcttactcatg

SEQ ID NO: 95192 - DNA, 1842 bp, Glycine max
  Clone ID: PAT_MRT3847_56971C.1
aaaaacagatcaaaattggatgagtgttcttatgctgaaacatctgatagaccaggaacttccagtgtactgactgaaagaccatttctgcttaattcttttggaaccagtaccttgggttctttaggcttgaattgctcaggcagcattgatgcgcatcaaaaggaggatgaccaaggaagctccaagcgtggaaagttgcccgtactacttgatggatcatccaatgatgtgcgtcataatcccattaatgtaggaaatggtgagtctactagctctggattgttatctaaccccactagacctgatcttttgcactcaaaaggagaggaagtgggtggaagcagtactttgaaagacaagcttccccactggttacgagaagctgtgagctccccagccaaacttcctgatcctgaacttccacccacagtatcagccattgctcaatcagttcgcctgttatacggggaagataagcctacaattcccccgtttgtgattcctggaccacctccctccctaccaaaggaccccaggtcttgtgtcaaaaagaaaaagaagagaagatcccaaaggatcagtcggagggaaattccaagcgtggaaagttgcctgtactttttgatcgatcaccatgttgatagcgtgataattggctcactgtaattaatggtgagtctactagcactggattatagtctagccccagtagccctgaagtttggcactcaaaaggagaggaagtgggtggaagcagtacttcaaaagacaagcttccccattggttacgagaagctgtgagctccccagccaaacttcctgatcctgaactgccacccacagtatcagccattgctcaatcagttcgcctgttatacggggaagataagcctacaattcccccgtttgtgattcctggaccacctccctccctaccaaaggacccgaggtgtagtgtcaaaaagaaaaagaagagaagatcacacaagttcagtcggggtcttccagattttgctggaaacagcagggatttgcacagaagccaccatgttgataacggtgcttcaagctcactcccattgggcccatcattgcctctactttctcatacaggagctctaggaactcagcagattgaatctgaccttaacttgcctcctctaaatttgaaagtggcaagctcgtcacactcttcaaaaaaagcaagttcgggactgtctccatctcctgaagtgctccagttggttgcatcatgtgttgctcctggcccccatcttccatcgatcgccggtgcttcaaactttctcgacagcaagcttccattgccaaggcctgttggcagagccaaattcaaagactcagaaggtgccttcagaaataagaatcctagacagctctcacaaaaaaattggtgttcacctcaagaacaagaagtacatgaccttgatagtggagattccagcaagactcagtcagatccctctcgggttgaacggccctatgaagtggaagtgtcatctgagggaactgtctcagaccatgctgtgagagatcaggaaacataactttagtgttttggataaaaaaaaatgaaaccatattctttcttgatgctgaagccttttcaccaatgcgctagaatttttgtaggtatgacgagtgaactagcaaaaatataggattgttgagaacatgtaaagttttttttttctccaagtgaaatgaaatatagtgttgcttgttggatattgtatgttgtcctctttgtctggcattttttgaaattggaaccagatataataattcattattatatgcatggtacgtgtattagtatgg

SEQ ID NO: 95193 - DNA, 343 bp, Glycine max
  unsure (1)..(343): unsure at all n locations
  Clone ID: PAT_MRT3847_56972C.1
tcgtaaaaacccggacaacgccaaaacgccgggggaattttttgacaccanatcggcgacctaaaccattaagatgactagatacggcaccacaattagggcacactggtgcggcctacgcgctctcatactctagctcgtatggatgctgaattaacgcgagggcattgaatatgattctgaaaatccactccggggaaacaaggggcacccttttatgatgatctttggattcatgcaccttataggggaagcaaaactgtcataccaaaccgagccagggccacacgaaacaaagaagaacattcacttgacacttcattgcattgcaataattcttggg

SEQ ID NO: 95194 - DNA, 152 bp, Glycine max
  Clone ID: PAT_MRT3847_56973C.1
ggagggtcacttgtccaaaatgaattgctagtcccgcatatttattaacatatgaaattcatgaaaataactcaattgtattggctgataatatatatgatactatgcaacatggatatcacggtactaatatataaaaattgagaaaaaga

SEQ ID NO: 95195 - DNA, 429 bp, Glycine max
  Clone ID: PAT_MRT3847_56974C.1
gaggaagccaagagagaattcgggggttttttttttaaaaaaccctgtccaaaaaacagcccgggttggccaataggagagaaaaaattaagcgcgggattatttttcatcgcttaaaatttttggcaaaaccccaccaaaaaatctggcccaaaaaaaaacaattcgaaatgaaaaaagggaattatttagccccccggaaaagaatttggtatcccaattttaatatctagggcggggagggacaaaggggttcaaaccccccgggctttttatttggcaatttttgggacacgggggagatgcccccccccccctgaagaaattgcccgggcaaaagggggggggggaggaaaaaaaagaaaagagaggtctctcttgttgggagacacgtcttttccacaaaaactggcccaaaaaaggccccca

SEQ ID NO: 95196 - DNA, 356 bp, Glycine max
  Clone ID: PAT_MRT3847_56975C.1
ggaaatcatttacccgccaacagcctaaattgaaaattgaaatattgattcagggggggccggcctccttttggggaataatgcccacctcccgggggtcggttttgattaggggggccaccaaaatcacaaccaaaatccccgggggggagggaattattgggtttttgttggatactacctcaaccttaaatttcaatctaaccctggggtcgtcaacaagaccggggaaggcccccccgatttattatgtttggaatttttaatgaaagggcatccctctatccaaaaaaaaaaccaagcgtttggttctggccttaacaagataggtcccaaggttaaaaagacggaaagca

SEQ ID NO: 95197 - DNA, 714 bp, Glycine max
  Clone ID: PAT_MRT3847_56976C.1
cgagctatggaacgatatttgtatctccttgcgcctctcaatgtttaaacctaatcttggaggaattctccaaggttgattggattagtagatgtattttacaagcacaaaccatatcaaagttaatatacaataatgcttcattgctcgatcttacgaagaagtacactggaggccaagaacttatcaggactggaatcacaaagtctgtatccaccttcctgtctttacagtctatgttgaaattgagaacaagattgaagaatatgttccacagccatgaatatgcctcaaacacctcctatgcaaataaaccacagagtctttcctgtattacaattgctgaagatggtgatttctggaggacagtggaagagtgtgtggccatctctgagccttttttgaaagtattgagagaaatatcagaagggaaaccaactgtaggttccatatatgagctaatgaccagggccaaagaatcaatcaggacatactacataatggatgagaataagtgtaagaaattcttagatatagtcgataaaaagtggagagaccaactccattcacctctacatgcagctgctgccttcttgaaccccagtatccaatacaatcctgaaataaaatttatttcttctataaaagaagacttctttaatgttctggagaaattgcttcctgtaccagatatgaggcgtgacatcaccaatc

SEQ ID NO: 95198 - DNA, 2247 bp, Glycine max
  Clone ID: PAT_MRT3847_56977C.1
acggctgcgagaggacgatacaaggcgatatgtaaacagtaaaccaaactggactgaggcgagaaggagtagagcatagtatggagcacacagtctcaaactcaagcagtgtcgagcagattctgaatcttctctacgcagccggctacgtcgacgccacaaatcccgatgcgccgccgtctcagaaaatcgccgccggcctctcctggtgcatcgccgccataacaaggcgacgacaacacacgtgacatcgaggaatcgtttggattagttggatgcccgcaccctctgcgatcctctcacattcaggatcttgataccgatgctctttttcctgtaattcagtggcttgcgtcacacattcggcaaaatcaagaacactgtgtcaatgaggttcatcatgctgaaaataccattgaagtggatgagtgtagaacttcgattcaggcattaagtggcaacttggatgaactggttggaatcagcggaagatgaatgttgtgaagcaattatatattctacaagagagaatcaataaggagggtgctgattctgcagtacagaagttgctttctttactgacatctttgaagaatcttgaaaagcaggaatgctacttgaagtccaatcgtgatgctaaacactcagaacttcaagatgatattagtgaattagagaggaaaataacaaatgacagtgataatgagaaccttcctgatgaactacatcattcatttggtgaattagttgaaaaagtcaatttgatgaaaaagcaacttgctgctagactgagggatattgtggtattaagacgacagattgatgacctaccgtgccaatcagaagtcatccagtacgaacgccggctctcagaactgtatgcacaaacccagggaaaacatcgacaaactcgtaaatactatgctacctacaatgctctcttggaaataaaagaattgatgctaaaggaaacatctttattgaattcgatcatttcccagtttcaagaggcctttagtagcactgatggacgtataaaacttgttcattccatggaaggaattgtcaagggaagtcaacagaagctagaaagggttcatgtaggacttcaagaagaagagagaattcgtaatgatctgaaggataggtatgctgcagcaaccggtgagcacaagcactgctattctctgttgaaagcttttcaggcccaatgtgcgaagaattagaggtttcgatgacaagacaactttgaggttgagttgcacaaagtactgtatcgcgtcaaagcgtagaggttgcgttcatgctcataaaatctgtattttaaagctgatgccatgagttgtatgtagttatgatgattcacattctttcattgctatttacagttttattttacagtaatataaaacattctttatggttcgaatttttgtacaggtttctctgtaactgtagacgatcccagtaagggtggagaattctccaattgaaatttactttaacgttaacaggtaagctttttctgttcatcggatgacatgtaggtggtgccatggtgcagagttaagcattttgatgatcctttgtgggtgctaattatgtgtctatctgataaagcatcagttaatttaataatggtattgttgaattggtagttttgcatagcatctagtttgtttaaaaaatcatatggacaaatgactttggtaaataaacgtaactatcatgcaatgttttttctataatgtttaaaataaacttaactatcctttcattgtacatataaataggttgctaatttgctatcatatcattcttttggtcgtttcttttgggaactcattaagtaggttttttaatggtcaggcccaatgtgcgaagaattagaagtttcggtgtcgaagttcctagtcaaaaattgaaaattcccgacaacattacacaactgaggttgagtgacacaaatttttgtatcgcgtcgaagcagagagcttgccttcatgctcaaaaaagctgcattttaaaagctgatgccatgagttgtagttatgatgattcacattcatccattgctatttacagtaatataaaacattcttcatggttcgaatttttgtataggtttctctgtaactgtagacgatcccagtaagggtagagaattctccaatcgatattcaactcttttctaatgattgaatttttttattgctgtaattttgaaaattgataaataataatttt

SEQ ID NO: 95199 - DNA, 1613 bp, Glycine max
  Clone ID: PAT_MRT3847_56978C.1
cacgcgtccgactagttctagatcgcgatctagaactaggtgtttttattttattatatatatatatatatatatatatatatatatatatattattttcactttctgggttgagtgagcaagttaagttctggagggaactgaaaagaaatcttaatacaagattacaccttcagaagagtcttgctgaagtgtgtgcatggacaggtcatgatctttgtattctgaacagtattcagagtttgatgttgattgtgtagacttaggagtgaatagtttgatatatgcatggaaggaagagaagggataagttctggggttacagtgataggagcagaagctccatcagcctatcacatggcaccaaggagtgaagctccaagccaggttcctccacctgttcctgaagcaacagctggagctattggtgtctcaccagcgagtgtgggattggatggaacagcagctaagaagaaaaggggtagaccaaggaaatatgggccagatgggttgaactctatggcattgtcacccattccaatctcatcttcagctccatttgctaatgaattctcgtccgggaagcagcgggggaaaccgcgagcgatggagtacaagctgccgaagaaagttggagtggatctttttggtgattctgttggtacaaactttatgccccatatcattattcttataaccgatccaaactttcgtaccagaagtggccaacagggccaacaaatcctaacccaaacaagctggtcgtagacacccgtctccagttgatcttgaattctttagtgtcatccgcatcaaaagtgacacgtttcttggcagtgtagtgggtaactgcctgagcagctatgtcaccagcaccccaaatcaagccagagctgatgacctgtgtcttaacagggtgaaccgccaagcaattctggtaccatttccacaacctcagcatatccaacaacaacaacaacaacaacaacaacaacaacaaccgctatttattgatcatggaaaaatgtaaaacccctttttctatatttggggatttattcaaatgggtctcgcattagaggataaaggatgaatcttttggcggtggaacaagaatggcactttcttcggtttctatggggtactgtgttcgggtgtcttctgcaccaccccctactaatggtgaaaaggaggatgtcattggtggacacctactacacaacaactcaggaacaacccttaactcaaacatgaagttggttactgacattaacatatctcttcctgatagttaagttgatgatcaacctggagtctcgctgacaacattcatgactgaactctttgtttattgtttccagtgttgttgttctatatcgccaactttccactcttttcaaaccttattatgatcttttgtcgatgaccccgtaggaccaagtagctagtggtgtaagttgcagctaggtttctacaattttctttgcctaccaaagcatctgattccttggctgattaggtagatgctgcaatgtgcagtgttatgattaggctaattcggatgtaatcacaactgaatttgttcgagcttttgtctcaacctagcccttttt

SEQ ID NO: 95200 - DNA, 509 bp, Glycine max
  Clone ID: PAT_MRT3847_56979C.1
gaaccctaggaatagaaagttgacgtttaatagaccggggctgcacaacgcaccaaagtcctgaaactcgctgcgcttaacaaaaatgcaatcaggggtttcgaccatcacaacactttacaacacagctaaataagagcactttagccaccgtctatcaagaaccctgttctgggaacaacagttgctagatgatggcggagacttcaaactttgttcgataaacatgctacctggataagaaaacacaagagtcctgaaaagaaaccaacttttattgtacccaacatcccctgatgaaccaccaccgacgattcactttttattatgggcagcctgggggacctgggatccggcaggatccttcttctgaacgatcttgatgacttccacagtgacatttggacgcatgtacgtaacagtaaacctaccaagtggaggatcctgggagaaagaccaaactaccatgggtttgggtggaatcatcttaactgaaccggcctctcggt

SEQ ID NO: 95201 - DNA, 600 bp, Glycine max
  unsure (1)..(600): unsure at all n locations
  Clone ID: PAT_MRT3847_5697C.1
cggacgcttgggcggacgcgtgggcggacgcgtgggctgtttacaagcttttcagttatggcatcgaaacgcatcgtcaaggagctcaaggatttgcagaaggaccctcctacttcctgcagcgcaggtcccgtggcggaggacatgtttcactggcaggcaacaatcatgggacctcctgatagcccatataccgngtggtgactcaagtttcaattcattttcctcctgattatccattcaaaccaccaaaggcaataagctatcctagttagagacttatattaatttcttctattatctgttcttctactgttgtaaactatgctgagacttgtttcgatgtatattgatattgcatggaaataagtttgcactgtcccatctttatttattattctgtattatggaaaatgtattttgtgtaatgagattgtgcagagtgcaaaccaaatggtagtttggctgtatgactcctcctgtcctcaataccagtgcaagatcaagctaaattcttgataagtgataactttagcatgncatattgccaggttgactttncanaacagtttattgtgtgcccatgattggtttctgacg

SEQ ID NO: 95202 - DNA, 1755 bp, Glycine max
  unsure (1)..(1755): unsure at all n locations
  Clone ID: PAT_MRT3847_56980C.1
aagctcggttttctgttcgagctcgagccgatttggctcgagttttttataagcagctttggaaaacccaaccaggcgacagtttagttctggagggaactgaaattaaatctttatacaagattacaccttcagaagagtcttgccgaagtgtgtggaatctttgtgacagatgttggtttgattgtgtggacttaggagtgaatagtttgatatatgcgcatggaaggaagagaaggcttcagttctggggttacagtgataggggcagaagcttcatcagcctatcatatggcaccaaggagtgaagctcaagcatgcagtctagtttccttccatgttggattcaccccttttcttttttcctggtgcttaacctctgtttcttttacatatttgtttggcattttggttatatgtctgcagtatagaatgatgagcatatgattattgtatatgattccatcagtaccaatctttgagtctcacctatgaagtcactgcaaatttagctatagttattcataaaaaatagtttgaataaaagtgaaaacaattaagtgtttgtgctatattctccattcaagaaaaaacctttattacgatattctcttaacttgctttatatattgtagtgctaattcttcttgcagaagagacaattaaatactgttatttttttttgcactgttgttttttcaggacattacaatgaaggttatatctttttcccaacaaggaccccgtgctatatgcatcctatctgctagtggtgtaatttcaaatgttacacttcgtcagcctgattcttctgggggaaccttgacctatgagggccgttttgagatactttcattatctggatcattcatgcctactgacaaccaaggaacaagaagcagatcaggtgggatgagtgtttcattgtcaagtccagatggtcgcattgtaggtggtggagttgctggtctccttgtagctgctggtcctgtgcaggtaaacattcctttctcaactcagttgcttatgtgatcatgactgtcgattggtgcaggtggtgctacgaagctttttgccaattaaccagcaagatcagaaaccaaagaagccaaagtctgactatgcaccagctaatgtcactccttccattacagtgtcttctgcaccacccccctactaatggtgaaaaggaggatgtcattggtggacacctactacacaacaactcaggcacaacccttaactcgaaccttactcctccctcggcctttcgtcgcgaaaactgggttaacatgcactccttgacagactcgatgaagtcggctactgacattaacatatctcttcctgatagttgatgatcaacctgcagtctccctgtcaacattcatgattgaactctttgtttaatggttccagtgttgttctatatggcgtagtttccactctttttcaaacctattatgatctttttttgcctatgactgtagggcgaagtagctgactagtggtgtaagttgcagctaggtttctataattttctttgcctaccagagcatctgattcctcggctgattaggtagatgctgcaatgtgcagtgttattatgagtaggctaatttggatgtaatcacaactgaatttgttggatcttttgtctcaacctagccatttattattatgtcacgagtatagacttgttattttctctataaaaaaaaaaaaaaacccccaacccccatataaatanaaagg

SEQ ID NO: 95203 - DNA, 376 bp, Glycine max
  Clone ID: PAT_MRT3847_56981C.1
ccggaccggccgggtcggcccgccccacttgtttttggacgcgagggactcgagatgatggtgaaactcctacaggggtcgtggtgcctcttaaccggtatcaaacgcaaacggcacttgccaacaagactgttgcaggaaccatctacgcgttgggagccaatggctaaagggaaggcagatggctctttgtgcgggcgagatgctttgcggatcactcattgtatcaatggaatgatataagcggagcactctgctggtatatctgagactacaggtctataataggcctgtgctgtgaatagctcagttagggggcgaagccagatgtgatagctacaccatctgctgtcaagagtgtgcactatggtatcct

SEQ ID NO: 95204 - DNA, 493 bp, Glycine max
  Clone ID: PAT_MRT3847_56982C.1
attttttattttttttttttttttttttttttttttttttttttttttttttttttttttttttttttttttttttttttttttttttttttttttgggggcataaaaaaattcataaaaacgatgagttttttgcgacaagtttttgaaaaacaaaatatagggtagtcaaaccaaaaggtttggaccttacaccttgatccggtaacaaccaaaaaaattttttagagggggccaaattcctagtttattccataattattcattcagccatcaaaatctgagcttcactggctttcatttgattttggggcagtacctgcagggcagtccttttattttctacatccttgacatcattagtcttggattttgatttgttatttagcgtcaactggattagcattctttttagctccccgatacttttagtacttaaatcatcagggggcacgttttccttcatcattttactttggggcacatttccctt

SEQ ID NO: 95205 - DNA, 866 bp, Glycine max
  Clone ID: PAT_MRT3847_56983C.1
ggttcctaaatgcaaggaaggagaaactatgcaatacccaacagatttggattttgaagaaagaaaatcaaaagttgaagcatggtatggagcttaaagttttttagctgctagagtcctaggaatagggggggcttttctggatttaaaatttgtgggatttggaactggtagaaattagtggggcaatataaaagctgcacattgcgaaggcaatattaccaaaaactggatcgaggtttcaactatgactctggtcgtgctgggaatctgctcataagaggggcgaggtcaagcaatttactatgacgctcacattgtagagatcaaaaagaggatgcatgatattagagggttcagatgtctcctcttaattcgttatgatcatgacaacagtgaggaaagagttcgcttgaggagactttgccgcagaccaagatcttaggcacatgtgggatctcaattctctttgacattcaaggtgagctttcatacagtcagcaaacctcccggcggctcccggttcctgcgtgctttgccagtgggtatcgtgctcgttcccgcttcccgcatagtggtcgcttgtggagcccttgccacggccccttctgtggcggttgggggtgctgtagaagttgaattatgaaacttttggaaatggttataattgtaagtcggtaagggaagtatacggtaaaaaggagtcagcttcagctatggaattgttaatacactcgggggtaaagacctcattgttgaaaatgtatgttttcggaattgaatgatataaggaaaagattaaagttgtatggttaaaaaaaaaaaaaaaaaaaaaaaaaaaaaaaaaaaaaaaaaaaaaaaaaaga

SEQ ID NO: 95206 - DNA, 332 bp, Glycine max
  unsure (1)..(332): unsure at all n locations
  Clone ID: PAT_MRT3847_56984C.1
nangcacgcgtacgnnagcncggnattnggctcgagctcgagccgaattcggctcgaggggccatngcaagcanncnnagtanggttnaaccanctgtagtganccngnnncgcatggccgtgatcacgacancnangcanaagctaggnggaccaaggcanatcggnncaaagcnacaatggcggtctgnngtntgagccatgggaagtaactagtgagagcggacgtgcntaccgcgcnntcaangcgnnntggaagnaatgcntgcccangcaaatggagantgnnncagntgttccnncatggcaagnaattccagctgaaggaaaaa

SEQ ID NO: 95207 - DNA, 385 bp, Glycine max
  unsure (1)..(385): unsure at all n locations
  Clone ID: PAT_MRT3847_56985C.1
atcctgtcatcctgtgccaatttttccggcaaatccgcaagaataaattggaacctaaggtaattataacatgaaattacaaaattattaaataaaaggttatcattattaagtataaactactcagtcatctttaacaatctgtactagtaagaagttaaaacagatgaagcaaatatcncatgggtggtgcatacgtctagccttaccacatttatacatatccttatacttggttcaacaaatcaggggaagaaatgcatagtgatgattggatttccttctaaatactcatttgccggtactatttgttgcacattccttttatgcaaagctcaaggggaaacagcataaacaaccattccaaatgatgaaactcattcca

SEQ ID NO: 95208 - DNA, 830 bp, Glycine max
  unsure (1)..(830): unsure at all n locations
  Clone ID: PAT_MRT3847_56986C.1
gatactaatatttcctccctcaacgccaaccaaaaccttctcagttaagaataactctctctccctctctctgaaatggccgaggagtctcaagggattaagctgtttggtgcaatgattacattgaaccgtggggaagtaaacaaaggagaaaagggaagcgaatatgagagggtggagaagagagcagagaagataataccctgtccgagatgcaagagcatggaaactaagttctgttacttcaataactacaacgttaatcagccaaggcatttctgcaagagctgccagaggtactggacggctggtggggccctccgaaacgtcgcggtgggcgccggtcgccggaaggttaagtcaccgtgccatggagccggtgtctatgaaagtacttctgaagatgaaaacaagtttgagatgggtcagggacacgttgccatgcccaacactggtttccggcagatttttcaggccaagcggcagaggatcacctcagctcagcatcaaggtcaataaaatcatctacgaaaacacaacttggaattatcatgaaacaagaagaaaagacctgagcaacgacggaccaaagcgtgccttgagaaattatgatgtgaacacctaaaaaaatgccgcggctaatcaatatcgatgatgttcgactatgagaagacgtgagatatatatgccgagattagttttttcctggaaactcaagtccattggtcataagcagggttattttaaggcatgataattggnntagtgggttacacattagctgtgacatgattgcgatccacgaaaatgatgtatatatatatgcagat

SEQ ID NO: 95209 - DNA, 436 bp, Glycine max
  Clone ID: PAT_MRT3847_56987C.1
gtttgttgtgacaactgtaggttggttttccaacggtcatatttctaacggtcatattttgttgttgcaaaatgcctatatatatctctttcctcttttctagaaatgacagactgagagctctagtttctttctgccaaaaatttatctctttctttttcctatacaaaacttaatttttgtgagagtaagagcattggtgttcataaggttcggggatcctttcgctgcacacgatcggaaccaacgggttgtcgtatctggggagaggagcgcaatcaaattttcttacccgtgcagtgggggcgttttctctctaaggatagcgtttacgtgcttcaacccaggctatttaattctttcccttaatttaattttcccttgtgcttattgtatgctataatgtattattcatgtgttgtcaattgaatttaat

SEQ ID NO: 95210 - DNA, 1527 bp, Glycine max
  Clone ID: PAT_MRT3847_56988C.1
ggagagatgtgtgtaaaatttgatgcatctccagtcatatgttttgagcatccgctatctatgtaccacttctttctcaaagatacctacataatcaagtttttgacttaggtacccaaactttattgggtccttgcatgttagtataaactgaggatccttttggaacccatatcattttaatgttactgtaatttttcttgaagtagcaagttgatatgccatgtcctcttcttccacagtaaaaacaagtgatagaattagaattacatttttgtgtggaagtggaaaagtttttatgaaacttttgttgtttttcagatttatatcctagtccatttttattagacacatatctttgtttacttaatataacatctaaattatttttactatatgaaaattttgcaagtgaatttttcaactctttaatttcttttacatatttatcacaacaactacaagaatctgatattttcttgtcagaaatagtggagatattaactttttcatttgttttagagattgagacttcatttctaagaagatctaattctttgtttaattttgaaatttcattttctaaatttgaaattgttttctttgatgatgaaactaattttgcaagtttaattgattctttatgcaaatcagcaaatgcatcttgcaattcatcaaaagaaatagataagttgtttgaagatgttacctcttcatcactttcgtaactttttgccataaggcaaagatttatctcttcattttcagaatcatcagaggattccaaatcattttcatcccatgtgatgtatgctttctttagtttcttctcactatgatttttcttttcagatttttccatctttttcttgaagatgggacaatcaaccctcagatgtccaggttgattgcattcaaagcattttagagtagaggatgaattttttgttcttctctttgatttaaaatttggtcgcctctgatttcctcttactttaagaaatttgttgaatctttttacaaagaaacttagatcatcatcatcatctgcatcattatcctgatcactttcttcttgaattgaggatgatgctttaagagcaattcctttctttttcttgtcattttcttcattttggtgcaatctcaatagttccatctcgtgttcaagaaggctggagaaggaaccgatagcaatgacgaggaatcgacccaagtaagaatctgagagaaaggccccaaataaggataagacgtcggatgcggcagtccaagtgtaaattacgcttgtgcccttcgcaataggcatgaggtaatcgtccctcagatacaatatcatgttgggcatgattccgtaactcgcaactttctccagacattcgttcactatgatgaagggcatggttcgcaagccaccttttttgatttgagaagaagaagtgccattttctaagagcttctcgttcgcggcatcagaggacttcatcatcgttttttctttttctgggatacgatgttgatgaattg

SEQ ID NO: 95211 - DNA, 1248 bp, Glycine max
  unsure (1)..(1248): unsure at all n locations
  Clone ID: PAT_MRT3847_56989C.1
nctngcttcacggtatgttgatataaagctttgccaaaatgagaggcataaatgtgatgggagaagtggatgtccctgggcatgcanaatcatggcgtccgggatatcctgatctttggccatcaccttactgtagggagccactagatgtttcaaagaactttacttttgatgtcatttctggtattttggcagatatgagaaagcttttcccatttgagctatttcacttgggtggtgatgaagttaatacagattgctggagtagtacttctcatgtaaaggaatggcttcagagtcacaacatgaccactagagatgcttatcaatattttgtactgaaggcccaagagatggctgtttcgaaaaattggagtccagtgaactgggaggaaaccttcaatacgtttccatcaaagctccatccaaaaaccatagtgcacaactggttgggccctggtgtttgtccaaaggttgtcgcaaaaggtttcaggtgcatttacagtaaccagggtgtctggtatcttgaccatctggatgtaccttgggatgaggtatatacagctgagccactacagggaatacatacagcttccgaacaagagcttgtaattggaggagaagtttgcatgtggggtgagacagctgatacatccaatgttcagcaaacaatatggcctcgagctgctgcagctgcagaacgcttatggagtcagagagattctacctcacaaaatattaccttaattgcattgccccggttgcaaaacttcagatgtctattgaatagacgaggggttccagctgctcctgtcacaaattattatgctagaagggcacctgttggtccagggtcatgttatgaccaataatccttgtaatgattcacatgttcatgtgtaacctggtatgcaagtaactgatgtttcatctactttacctggttgatgagctagaatcattatttgagctcaactccatggcagatatggttgttgatgtcagaactctttaatgaactggcaacagccatgttgcaatgtaatttattgttgagttaaataaatcatatccagtttacattttttacgtggttgatgagctagaatcattatttgagctcaactccatggcagatatggttgttgatgtcagaactctttaatgaactggcaacagccatgttgcaatgtaatttattgttgagttaaataaatcatatccagtttacattaaaaaaaaaaaaaa

SEQ ID NO: 95212 - DNA, 213 bp, Glycine max
  Clone ID: PAT_MRT3847_5698C.1
gctgcgagaagacgacagaagggggagtcataatataagagaattcaagggcaatgaagtcaaaaaacctgcaatgtagatagattaagcacgataaacaaatctccatgataactacatactaagaaaagagagcagcttacttaggtggaatctgtcctactaactagttaaattaccgaagagaaccttctttaaaggagaactgaaccg

SEQ ID NO: 95213 - DNA, 387 bp, Glycine max
  Clone ID: PAT_MRT3847_56990C.1
tttctatgtataacattgaaatggtttgcactttgcacacaatattatgtagtgcgagcaacaactatgatctgcacatggttggctccacccactcaaattaataacctaatagataacataaaaatcaaaaataataaacatctttctcaaagtaaaataagaacccaaaaaacaacctaataaccctatcagggcggcccattaataggatccaattttccccccactgacatccacagcaaaagctttaattttccgtctcctaaattaatataactggccggacttaaacaatttttgaattgaaaaaaccctgagataccccaatttatttctttaaaaaaacaaccctctttctccagttgcaattaaacctaagaggcc

SEQ ID NO: 95214 - DNA, 290 bp, Glycine max
  Clone ID: PAT_MRT3847_56991C.1
cccacgcgtccgaagacgacaacagggggtggttcgagtttctaattgattggagtaatggggggtggggctcaaattattgttctgaaactgtgtttgcaccatctcccacacacaaaatgtattgctgcggaggcaactgttattacccaagctcctacaatgtgaattattttttattccagctgcaacatatacacactcatggcgggtcacttgcttattctgtctctctttctttttttttaatttattggacggaattggaattgggattcatttggctggat

SEQ ID NO: 95215 - DNA, 1048 bp, Glycine max
  unsure (1)..(1048): unsure at all n locations
  Clone ID: PAT_MRT3847_56992C.1
gccaacaatttatctggccagttaagcgagcaactaagtaagctctctaacctaaaaactttggtggtttctgggaacaggttttctggggaattcccaaatgtgtttgggaaccttttgcagctagaagaattagaagcacatgccaattcattttttggacccttgccttccaccttggctttatgctctaagcttagggtgcttaatcttagaaataattccctgtcagggcaaattggtcttaatttcactggcttgtctaatcttcaaacacttgaccttgctactaatcatttctttggaccccttccaacttccctgtccaattgccgcaaattgaaagttttaagccttgctaggaatggtttaaatggttctgtccctgaaagctatgccaacctcacttcacttttgtttgtatctttctcaaaggctcgagttcagaacttatctgtggcagtgtctgttctgcagcagtgcaaaaatctcaccacccttgtacttactaagaatttccgtggtgaggtaatttcagaaagtgtgacagtagaatttgagagccttatgattttagcacttgggaattgtggtcttaaaggccatattccttcttggttatccaattgcaggaagttggcagttcttgacttgtcttggaaccatttgaatggtagtgttccttcttggattggtcagatggacagcttgttctatttggatttctcaaataattctctcacaggagaaataccaaaaggtctggcagagttgaagggcctcatgtgcgctaactgtaatagagaaaaccttgctgcttttgcattcattcctctctttgttaagagaaacacaagtgtaagtggactgcaatataaccaggcatcaagtttccctccttcaattctcttgagcaataacatattgagtgggaatatatggcctgaaattggtcaattgaaagcactgcatgtcttggatttaagcagaaacaacatcgcttggtaccattcctagcacaatttcagagatggagaactnggaatca

SEQ ID NO: 95216 - DNA, 368 bp, Glycine max
  Clone ID: PAT_MRT3847_56993C.1
caaaagctgaaatggagtccttactttggtgcattgacacttagccataagacatggcagcgctatgaagcatcaagggaacatgcgctcttaagataccacataaggctagtccacgaatagtaacatctaagagaggctactgtctgcattggaccaatgatatgatcgagaatgacggactaatgcaatatagaacccatgcaactggcaagacatgctatacaaggatcatattcaatcatgcaaattggagtgccgcacaccactgaatgcatgtatgttattgattcctgtataaaaacattccattttaagtgaagacatctgacagactagctatcaacgctgagcatgctagatcaaaa

SEQ ID NO: 95217 - DNA, 465 bp, Glycine max
  unsure (1)..(465): unsure at all n locations
  Clone ID: PAT_MRT3847_56994C.1
gtttgagtttatggcattatgccacatgctccgctcgaccactgctcctccgtgtcgatggaacccttggtgctccaggcgctgatcactgccttcctggaccgggtgaacgccgatcgcacccaacgcgttgtgctggtcacgagtggcggcacccgtgtgaagctggaaaagaatgcggtccgtgccatcgaaaacttttccatgggcacccgaggggccgtcagtgcagaatattttctgcgtcaaggatacaacgtcatttttttttaccgcgatgagtcgttgaagccattttctcgcaaatattcacacatctttgaacatttggagacaaccgacgacggacacgtcaaagttgttggctttcccggccttgtcgacgatttggctgacttcaagcgctacgccgaccgtttgctgtttgtgccgttcactgacgtcngccagtacttgcacgacttg

SEQ ID NO: 95218 - DNA, 294 bp, Glycine max
  unsure (1)..(294): unsure at all n locations
  Clone ID: PAT_MRT3847_56995C.1
gggccaaggaaccaatataacccaagcccnacacaaccaaacccnaacacacacccacnnganncagcnnccaaggctagccccaaggnngcatcnnnggctgcagtgctctgcatggttgtggtgagtgcacccatggcacatgcaactatcacgtgcgggcaggtgacgagtagcctggccaattgcatccgttacctccaaaagggaggaacgccgtcttctggatgctgcaacggagtgaaaagcctcaatgccgccgccaaaaccaccgccgaccgccagacggcgtgc

SEQ ID NO: 95219 - DNA, 627 bp, Glycine max
  Clone ID: PAT_MRT3847_56996C.1
aggctgtccactatatcaaaagatcaaaaaccctgagaaagtgcgtttgcttggtcgagttgattgaataccatggcaggttacagctatgatcatcaacaacgacccttttgctgtatgattgattccacacgcttgaagtcaattccgctcagagggagacatcacatcacaataatcatcgctggccaatacgttcgtgaataagcccaaagcaacctactatgataaagcaagcctcctactctggacccagagactcatactcgccctgtatcaacaaaagctggaagctgttattgaagcagaaaaccaggctgcacgagactcgattcatgcaaagaagaaggacaggcccttgttagcactaacagaagaactagacaccagaagacttgttgaagcaagttgatgctaggattataaacgctgaccaccagttagcagatcttgaactggctagcaagcagaaggctgcgttcgacagcttgaaggctggcaatgatgctatgaatgccatacaaagtgagatgaacattgaatatgttcacacacttatggatgacactgctgaagctacagcttatcaacatgaacctaacgagataatggcggagaagctatcag

SEQ ID NO: 95220 - DNA, 371 bp, Glycine max
  Clone ID: PAT_MRT3847_56997C.1
atgaaaggggggccaccccccccctaaccaattttttccaccccttttttcctggccacccaagccaatctaaaaaaaaaaaaactcactcaaacagaccgggggccatcccaagaaaatacgcaccagccccttggggcaacccatctttccctaagggggcagcaataaaaccagactcaaaaaaaggaaccgcaacagcccggagagaaaatgtactcggatccaaaagacaccccctaaccatgcctgactcaaaaaaagaaaaacctggggcacccaaaacaggaccaaccccccagtaggcggtgaccaccacgtgccgggtttcaacaagggaaacctgtgagacccctaataaaaatgaaccc

SEQ ID NO: 95221 - DNA, 350 bp, Glycine max
  Clone ID: PAT_MRT3847_56998C.1
ccccggtataggtttttcgtcctcccagccggcgccaagggcatcggtgccgctgtcctgcttgggccaattgcccgagagtaccaatcgctcataacacgaccgacactgatccgacccatacaggcatgcttggctgcttggagactccaccagctggttcaggacccgtcacagttactccattaccacagcggtcctcttatatacaggaacatctgcgcgaaccttatgtggatttgccctctccatacgggccagagagggacttacgcccggctttgctagctcaatgctctccacgacggcaccaaaaaagcatggctgtatcgccgcatggggaaacagcg

SEQ ID NO: 95222 - DNA, 138 bp, Glycine max
  Clone ID: PAT_MRT3847_56999C.1
ttggtatggggggatggaagaccaattttggacgctgtatgggagggttgtagaggaactgaagagacttgactcaaggctgtgtcccaatggggttaggttgacaaggaagaggtgcggcaagaacagcactgagag

SEQ ID NO: 95223 - DNA, 562 bp, Glycine max
  Clone ID: PAT_MRT3847_5699C.1
aaaaggaatggcctccattttcctgttgggaatggaaaagttattgatgttgacctccctatccaaatcaagcttgctgtagttgattggatcccaggccttaagggtgccccacccccaagggcacgagaaaccagccacactcgacaccggcgctgttgtcaatgtcccactctttgtaaatgtcggtgatgaaatattggttgattcaagaactgggcagtacatgagccgtgcttaagatttcacctcaaattttgtagttgaagtcctgagaattctcgtttatttttttattttgtaggatataatttaccaattgagatggattaagttcattaagcttagcaatttggctgtgttttataacacagttaaaattgtttgtagtttatttgcgaaactgaagctcttgcggtgcataaagtttttataaaaaaaagccagccattattaaaacataacccattgtttcgggcgatgaacaagaaagaataaactgatacagttcatagtgttttctttatcaaaaaaaaaaaaaaaaaaaaaaaaaaaaaaaaaa

SEQ ID NO: 95224 - DNA, 457 bp, Glycine max
  Clone ID: PAT_MRT3847_569C.1
tttcgttctttttttttttttcgttttcagaacagtataaaatttatattcacaaataaagagacatataccctggataccggagatgactacggagtcaataaggtggcctactgcctcctaatgcagctgcggaaaacgtacaatttatcggcaccatcaaagggggcggccgggatctgcccagccaaaactatagatttatttccatcagggggtataactggcttaatgtgatccccggggccaaatggtgactgaatgacatgtggttaaacaaccaaatgcggtactgtgatgtatctatgtagataaacggttgcttccagactgtccattttattgtcaacagccgttcacggcacaccgtctgtatgagcctgccttcacacagaacctgatagatgctccacaccatcaactctgccaaacgagcatattgctccatgctacaccc

SEQ ID NO: 95225 - DNA, 252 bp, Glycine max
  Clone ID: PAT_MRT3847_56C.1
ttataaaaaaaaaaaaaaaaaaaaaaaaaaaaaaaaaaaaaaaaaaaaaaggcaaaaacaatggaaacccaaagaagccctcctacccagctatcgtgggggggcccctcatgtggaccctttttgatctctacttcccgggatgccaccacgccttttcgagcagccccatcatgaccgtccccgctttggttttggaaaatcgcttcctcgaccacccgctgggctggatgaagagactaaacccggcca

SEQ ID NO: 95226 - DNA, 261 bp, Glycine max
  Clone ID: PAT_MRT3847_57000C.1
aaacaaagagccgagtccttcagcaggtttataataattccaaaacctccttcccctacacaaaaaagacaacaaaaaaaagcttatggctcttaacagggaaccaacaccggttcccgaacccgatttattcatactttcaatttttgcccgagcaaaaaaacattaaatcgcagttaaaccccagcacatatggtttaaccaagctacttttttttcagaacaacctaaaaaaaactttttggcaccgaatccaagcag

SEQ ID NO: 95227 - DNA, 537 bp, Glycine max
  Clone ID: PAT_MRT3847_57001C.1
ggccgccaccaggggcatcagcatcttctcagagcacatacactactcagcacaacagagcataagcatcttctctgagcttcttagttctcagttctcaccttttttttttccttcaccaatcagggaaaaactcagaaatttaagatatggcaggtgcaagagccagtggcatgatcaatggtggaagaagcttcccaaggagattctctgggcgtccaattccaaagcgtggacaagtgaaagttggaatagttgtggggcttgcaaactctgttgcttccattttctctcgcagcagagccaccagagggtgcgctacacctactcaccttgctcactaggttccaattctatgagaccaaagcaacgagtcacaaaagttttgatcttttttttgtttttgtttttgtacaaattggggctttttgattcccttctatgatctctgttcatatgtaaatctcttgctttcttattaatgaatccaatcgcttcttgtttgatgaatgtaaatttcaaaaggcaaaaaacaaa

SEQ ID NO: 95228 - DNA, 827 bp, Glycine max
  unsure (1)..(827): unsure at all n locations
  Clone ID: PAT_MRT3847_57002C.1
aattcggcaccagagctgagctgcatttagatcccaaagattcattgtttctaataggaggctttgatggaaattcatggttagcaactatggatttgtattgtacttctcagaatgtaatcaaatctcttaagcctatgagctcagttcgttcatatgcttccgttgtgtggttgaatggtgaaatttatgtttttggtggtggaaatggttatgtttggtntgacacantcnaatcatacaatccagttcatgacaactggaccttgtgcccctctttgaaccagaagaagggaagcttgcctggagctgctttgaatgacaaaatatttgctgttggtggtggcaatggagttgattgcttttcagatgttgagatgcttgatttagatattgggcggtggatccctacacgctcaatgctagaaaagagatttgctctttctgcagtggaactcaatggtgcaatctatgccattggcggatttgatggaaatgattacttaaggtctgctgaaagatttgatccaagggaacattcttggaccaaaataccaaacatgaatgtaaagcgaggctgccattcattagttgttctaaatgaaaaattgtatgctcttggtggcttcgatggtgacaaaatggttccaagtattgaagtgtttgatcctcgtcttgtggcatggacaatgggggaaccaatgaatcattgtagggggtattctgctgctgtagttgtcaatgaatccatttatatgattggaggagttaaagttggcgagaacattgtagatacagttgagaattataatgaatgtcagggatgg

SEQ ID NO: 95229 - DNA, 701 bp, Glycine max
  Clone ID: PAT_MRT3847_57003C.1
ctagtttatattggtgtctctgttctttgacactgctgcagcttatcatcaccatcgcgcccaagagagagagagagagagaggcgcgaaaatgagcggagcgaaggggaagaagaagggagcgagctttgtgatcgattgcgcgaagccggtggaggataaaattatggacattgcttctctggagaagttccttcaggagaggattaaggttggcggcaaggccggtgcactcggcgattccattactgtcactagggacaagagcaagatcaccgtcacctccgacagcaacttctctaaacggtatctgaaatatttgaccaagaagtacttgaaaaagcacaatgtgagggattggcttcgcgtgattgcatccaacaaggagcggagtgtctatgaattgagatacttcaacatcgctgagaacgagggtgaagaggaagactgaagatctaattctgtgtcttgaggcattttctgtttaggtttagttattgtggagtctcttttatctgttttatttatttaacttgttactggtttaaatattcctgtgttttatttggaccgacgttatgtcttcatatgaaatttcatagaggttattggagatgttgtcattaaaagtcagatgcaatacatgctactttatgttggcatgtatctttaatttggcttccatttacagttactgtggg

SEQ ID NO: 95230 - DNA, 1362 bp, Glycine max
  unsure (1)..(1362): unsure at all n locations
  Clone ID: PAT_MRT3847_57004C.1
cccgctccgcgccaagttgtttttggtctgatctttcaagttcaatggctggtgacgtaggaagagccttgcctcctcctgattcagaagaattctcaaccttgttcagccaactcctccacaattctcccccccgagcactccaccccgatcatccgcctcctcattctctctctctccactttgtttttggtttgatctttcaagttcaatggctggtgacgtaggaagagccttgcctcctcctgattaagaggagtgcggagcgctgnnnnaggcggctnctncggagagggtcccccactaggaatggaccccaatcattcacctcctgatttcaccccacatctaacaacactcatcaacatcaacagcaacaacaacaacaacgctgttccttcctctccctcaaatttcaatttctctgacccccatcattacatccctgcctctgatgccaccaccttcaagcaacacaacatcaaccacaacaacaatcacacccctgatttcacttcttctcatgttgagaagagtgtggaggcatcgaaacctgtcccaccaccacgttcttcgtcaaagaggagtagagctgcagagttccataatttgtctgaaaagagaaggaggagtaggattaacgagaaaatgaaagccttacagaatttaattccaaattccaacaagacagacaaagcttcaatgctagatgaggccatagaatatttaaagcagctccagcttcaagtgcaaatgttaatgatgagaaatggtttgagcttgcatccaatgtctttgccaggaggactaagacctatgataatgcctcagactggattgaatcttgatgggagtaatggatttcagaattctacctgtgcaattgcctcatcttcaaatgatgaaagcttggtgcggcatgcctttagttttccaaagcaatgcagcatctcaaataagtctattggtgtaccctccgtgaaaaacatagcaacttcggatacctcatccacttttcatccctctattaaggatgcactctacggcaacatgccacaaccgtttatggatacaacaaagattggaaaaccctctccagacgtgtcttaaacagctcgatttcattgagggagaaaagaattttttagatggcaagtcgcctcgtaaaagggtagctttgttcaggcattataatctacatttaaatctgctgactatatgacactccattgggttgttcctggtgcagtttaatttgtagcagtttgacagagtctttgtgccattgttgacacttgcataaaaatgtacaagtattttataacttcatcaattgcaaaatgcagataatgaacattctgc

SEQ ID NO: 95231 - DNA, 694 bp, Glycine max
  unsure (1)..(694): unsure at all n locations
  Clone ID: PAT_MRT3847_57005C.1
acgtgattcccttgttaaaaggattttatattccgtccgaagggagtgttactgtgtgagcaaagttgcttcctctatcgtgttctttgcgttagggtttgcagatcgaaaaatactgacagcattgtgttgtgcggttacagaagatgagtgaagacgaggagatgaaagatcaggcaacgccttcacacttgctttcttcagttcctccatctacattgcaccatttgaagggaatagcatcaattattgaaaccggttcgtactcaaaggaagttcgtcgaattgctcgtgccctgcgccttacatttgcatttaggcgtaaattgacaacaccagttctctcatcttttcttgattatgttcttactcccgcttctgaacctcacactaggttatcctcttatctccctaatcctaaggagggtgatcgagagatggaagtggacagtgcaacatctactattcaaaccctggcggcgaagcacttggtgcctgagctagaaatctactgttacctccttgtcctactttttctgattgacccagaaagatacgatgcggccaaagcttgttcctcagcaagcattgttcggctgaagagcctngatagaagaactgtncatgntattgcatccagactgtacttttattactcatatagctatgagctcactggaaatcttgctgaaat

SEQ ID NO: 95232 - DNA, 1688 bp, Glycine max
  unsure (1)..(1688): unsure at all n locations
  Clone ID: PAT_MRT3847_57006C.1
cgacgatgctgcattgctttggtaattgcatttgctggtgagaggtgaccccatctctcttttatctctctcttccaaaaagcaccgatttttgcgcacgccaacgcgaatcgcgaagagggtctcaccgagaacaaaaaatgggtgtttgtgggtcgaggcccaaagtgaacgaagaagacctctcatcaaagaagaagaacaacaacaacaacaatcatcgaagaagaagaaggagaatcctcagaagacgcgtatcttctagaaagatcgaagccaacaacgtttctcactctaattcagctcttcaagcttctaatcgcgcttctgatgctgcttggtttgattctacttcggcgttggattctgagtgtgatgacgaattttacagtgtctatgatggagaagtgtctacaggtcatgcagatgaaattggagaggacagaaagctgtcccttgaccattgtgggattctgccaaataactgtttgccttgcctcacttccaatgcaattgctgttgaaaaaagaaggccaatgagtcctgatacaccaagttcacggagaaagtcactttctaaactctccttcaaatggagagaagggtcttcagatatgactttactttcccccaaggcatttaaacaaaaacatttggcaggttcatctgttccattctgtcctctagagaagcaaacccctggttcttggtcacaaattgagccaagttccttcagagtcagaggcaaaaactaccttagggataagaagaaagagtttgcttcaagcagtgctgctttttatcctcttggtgctgacctctttttgtcttctcgaaaaattgatcatattgctcgctttatacaaattccttcaataaacatacctggggacgccccttctattcttattgtaaatattcagataccattgtatcctgccgctatcttccaaagtgaaaatgatggtgaaggaatgaatgtggttttgtactttaaactatctgaaaaatactctaaagaccttccagaccaattccgggaaagcattagtaaattgatcaatgacgaagtggagagagttaaaggcttccctctagacacaattgcaccctttagggagagattaaaaattttaggcagagtggcaaatttggagaatctgtctttaagcacaactgaaaagaagcttatgaatgcttacaacgaaaaaccagttctctcacgtcctcagcacgaatttttcttgggagaaaactatctcgagatagatttggatgtacacagatttagctatattgcaagaaagggatttgaaggcttcattgaaagactgaagctatgtaacctagatttcggtctgacaattcagggaaacaaggccgaagacttgccagagcatttattatgtgcaatacggttgaataaacttgactacagcaacttcaaccagtttggcttttaagtctaagctttaacataaagcgttttacccgtattatatctcataatgattacaagtgttgaaatgagattcggtagctaaccgcaatgtatctttgaatttcttgattcattgatataaaatttgttcaatgtacagtaatgagaataatcaaattagaaattatgtatgttataatttatatttataccctataaactttntgaccctcaaatactttcaatt

SEQ ID NO: 95233 - DNA, 362 bp, Glycine max
  Clone ID: PAT_MRT3847_57007C.1
tacggctgcgagaagacgacagaagggtccctatgacacagatgttatcaaccaattcttagaagagggacaacgatgcgaatacattgagagaaaaatccaatttgcaggttttgatggagagaccataggtaagctactttgctcccctggacatgattttgtacgaagcgtagcagggaagcgggtgcaaatcatgcacaatagcatgactactttgactcaaatctggatgactcttctacttagtaacatccttccgaatgaccacaactctgatctcgaactaccaaaatttcagttggtctacaacattatgatgcatattagtgttcatgtggcacaactcatctcggatgcca

SEQ ID NO: 95234 - DNA, 313 bp, Glycine max
  Clone ID: PAT_MRT3847_57008C.1
ttctgagctcgacgcgtctctgattataccttgattccagatgagcgtcagtaggacaattggattggatacttttgctctctctctcgggtggagcaactaatataacacgtgctgctaaattgctatggacccatatatcatgaagcttctatatttttatgagggggggtgtgtgcattcacggctggatgtggaaaaaaaaacaggctcccctaaatcgagatataggtggaactgggtctacttcacagttatttggattaaatgcagtgaaatccgcaggaaccaataatctatcaagtcaaatttt

SEQ ID NO: 95235 - DNA, 1097 bp, Glycine max
  Clone ID: PAT_MRT3847_57009C.1
atgtcctggcaacaagtattcttatcaaaaaaaagaaaaaacaaaaagacccagaaatctcatcatcaagttcttcccattgcagaagttgaaaagaaagttatggcagatagttcagtatcctttttattggacaagctgagttcgttacttgaagcagaagtgaaactacagagaggggtccgtgaagatgttcagcacatcaaatatgagctggaaggctacaagggcatcttgagggtggctgatgctctggaagacaaaaaccctgaactcaaagcatgggttaaacgagtaagagatgttgctcatgacatggaagatgctatagatgaattcagccttggccttgttgatcaacatggacaaggcaacaattcttcgtttcatatgaactttttcacccggcataagattgcttcaaatatacaaggtatcaaatccagattggacattatatcccagaaacgtccagacataccttggataggctcaggctcaagtcaacgattgtcatcaaggcttgatagccaaggtgatgggctcgagctagaagaagctgatcttgttggtattgacaaacccaaaaagcagcttagtgacttgcttttcaatgaagaagcaggtagggctgtgattcccgtttatgggatgggggggttggggaaaaccaccttggctaaacaagtctatgatgatccaaaagtgaagaagcgtttcaggattcatgcttggatcaatgtttctcagtcttttaaactagatgagctcctgaaagacctggttcaacagctccacactgtcataggcaaaccagctccggaagcagttggacaaatgaagagtgaccagctcaaagaggtgatcaagaacctgcttcagcgaagccggtacctggttgtgctggatgatgtgtggcaagtcaaggtatgggattctgtcaaacttgctttgcctaataacaaccgtggcagtagagtgatgcttaccacacgcaagaaagatatagctttgcattcctgtgctggattgggtaagggattttgacctcgaattcttacccgaggaagaagctggtatcttttctgcaagaaaac

SEQ ID NO: 95236 - DNA, 270 bp, Glycine max
  unsure (1)..(270): unsure at all n locations
  Clone ID: PAT_MRT3847_5700C.1
ctagtatgcaaaatgttaagacaatcaaatcgatcctnagggcttttgaaatggcatcggggcttaaaataaattatgcgaagagctgtttcggggcaatgggccaatcagaacagtggaaaatgcaggctgctagctacttgaattgcagaattctgcctttgcctttcacttatttgggaattccaatcggggctaatccaaggcatagtgagttgtgggatccaatccttagaaagagtgacagaaaattagctagatggaagcaga

SEQ ID NO: 95237 - DNA, 807 bp, Glycine max
  Clone ID: PAT_MRT3847_57010C.1
gcgaggctcgagaacgaacgatgctgctgctgctttggtaattgcatttgctggtgaggtgactcatctctctctctctctcatctctccctctctctcatctctcccttccaaaaaaaagcaccaattttttcgaacgccaacgcgaatcacgaagagggtcaccgagaaaatgggtgtttgtgggtcgaggcccaaagtgaacgaggacctctcagcgaagaagaagaacaaccaccaccgaagaagaagaaggagaatcctcagaagacgcgtctcttctagaaagatcgaagctaacaacgtttctcactgtaattcagctcttcaagcttctaatcgcgcttctgatgctgcttggtttgattctacttcggcattggattctgagtgtgatgacgaattttacagtgtctatgatgatgggatgtctttgaatgagtatgaaattgggtcaaggccaaacgattcatctcctaaaggagttgattctgtgtttgttgatcaccaacaacagaaacaaagagtgcacccttataattattttcgtagcaattcttctttgaaggttgccaagaatcaaggcaaaccaaaagattctacattgaaatcagatggctctagagttgagttagactctgtttcgacaggagaagtgtctacaggtcaagcagatgaaattggagagtacagaaagctgtccctggaccattgtgggattctgccaaatacctgtttgccttgcctcacttccaatgcacttgctgttgaaaaaagaaggccaatgagtcctgatacacctagttc

SEQ ID NO: 95238 - DNA, 328 bp, Glycine max
  Clone ID: PAT_MRT3847_57011C.1
cagctgcctacaatcaatccttgttttgcggatcgttggctattgggctataccagtttcgattgggtcgctccttgctttagctatactttctgctttaactcttcggtttcatacttgcaagccttgttacccaggtagcggttggggacgtcaactctggccagcgcgttacccgggactcggcgactgttgggtgcttgtagaggcgggcgaaagcctatatattgaagcggtgctccggtactgcgcctttacctgcgcttgacgcctgaagtcctgctcacttccatgagcgggcgccaattcggggtctgtggattgatgg

SEQ ID NO: 95239 - DNA, 614 bp, Glycine max
  Clone ID: PAT_MRT3847_57012C.1
atcagcaaaaatattatatttataaaagtaccagaggtactgaaaaaatcagagatagttccatgctcatggttccaataaaaactacaccagtttgaagaggaaccatagaatggctacaaaaactaaactaaagatctgctgcagctcctactgggagccactgaagcctagcccaaaaaaccttctctgatgtgagatgaccaaagattaaaagggagcttaaaatccttatccaaatttgagagccatgaccacactaaaaaaactctagataccatctaaaatagattgagagaaaagtttgttgtaacagagagagaatctcatattattgaatatcacaaaagttagttacagagttagttacagagagatatttataggactatgaactaagatagtacaactgttaatagcaaagagggaggtgttgttagcaaaatctaacaactattttgataagagtgattcgaaccaagaacgcgtgacagaaccgattttgaaagagtagattggagccaaacaaggagtgtagtcttgaacctcccacgcttcatactcagtattgacatgatcagcgacagacacaatcttctttggtgggataacat

SEQ ID NO: 95240 - DNA, 613 bp, Glycine max
  unsure (1)..(613): unsure at all n locations
  Clone ID: PAT_MRT3847_57013C.1
ccggtccggattcccggggcgacccacgcgtccggtaaagagtcaacctcaaacaaagccttatagcctttctcttctatgaggaaaatgacattcactccctttagcccaaaatctcatcaccaatctcgctcaaagagccttccctgcggacaacaccctcttattctacaatgcgatcaacactggggaagtgtagaggggtcgccttctgagaattcaacttcctcttcgtggtgattgggcaggcgcaaactaactgggttgcggactttgcgtgagtgcgtcgaaaaggtgggtcgactgcgtcttactcaagaggggctaggccaagagcgtgaagagaagtgggtagatgagcttttggacggagcggtaaggcgcctagatgtgtgtgctgtggcaaaggagtctctacttcacatgagggagtgcgcacgtgaacttcaatcaattatnagaagaaagaggggaggggaaatggaggtggcanctnaggtcanaaaatttttgggctctaggaaagtaataaagaaggcgatcctaaaagcattggagaatttgcaggcaactgtgaagaaagcaaaattccctccaagcaacaaggacaacc

SEQ ID NO: 95241 - DNA, 782 bp, Glycine max
  Clone ID: PAT_MRT3847_57014C.1
gcgtggttggcgctctagatcgcgaagggcacgtggttatcatgtcagcttcgtttagcaacgctgcgtatgagaggcttcctttggaagatgaagacccttcgatggcgcttcagggaggtggttcgattgggtcaccggaaggtgccgcgggcgggtggggtggcgttggtcaacagcagccatctcagcagcttatgggggattccactgcgcctcttttccatggtttgaatcccaatcttctgaattcggttcagatgccgtccgagactttctgggcaacgggtcgctctccatactgatgtaaaagtaacactgtgactgtggatcatttcattggtgtaagtgaaatgctatctatatctatctatcaatcgctgttgcctggttaatttccttttgtttttagctttttggggtggctcgggtacgtactactacatagcaagggattcaccaaactctcgtgttgcgaaaaggctagcttgtagggaatgaatagtagtgttccatgttaagttgaaccaaccaacgtgctgccattcagctattctattcgcttctttaattaggagtatcggtatttctttctttgtcgttttggtttcattattaggtgagtcagttggcatatgtttacgtgtatttcagactgtaattaaattcatggatgaatccttgccgagttttattctattcatgagtcaatcaatgcagtagtagactagtaatacgaggacgaatgcaaaggaaaatgaggaggaagatttaagagatcc

SEQ ID NO: 95242 - DNA, 303 bp, Glycine max
  unsure (1)..(303): unsure at all n locations
  Clone ID: PAT_MRT3847_57015C.1
tcgnttaacatgacccgccaagccccacgaaggaacacgctgagcttagagaaacggcaccaaggacccagccgaaggcagaagaaaaaaagcagagacaagcccaccccggcaacgaaaaaccgaaggaggccaaagacggcgccgaaggacaccagaacacccaacagacgaaacaacccgagccagccaaaaccagcacagaccagggcgccnccaccccggaaaaaggacacaacacacgggagccgccaccgcagcccccaacaaacaggagaagcaagcgcacagacagagagccag

SEQ ID NO: 95243 - DNA, 360 bp, Glycine max
  Clone ID: PAT_MRT3847_57016C.1
gctctgtttttcttccttttttcaaggaacgttactaccatcccaaagattcaccgcctgctacggatgatcccgcgcaagacttggagactcaactgcgcaagattgcggacgggttactatcgggtcgctactccaagcctgacagtgatgtgatcgcgtcggaagatacccccgaagttcctcaccaaaagggccttgctcctgctatgctgaagcatcttatcggcagaggccacccggaattctctaccatgaggcagcaggactcgttcgaactgcttcttcaccttctcaagctcgtcactcgcacaccttatcctgcacctttcaaggaccctgtcgatgctttccggttcg

SEQ ID NO: 95244 - DNA, 480 bp, Glycine max
  Clone ID: PAT_MRT3847_57017C.1
ggcgattcacgagagtcacgctcttccgcttcatcactaccctcatcgcctggcaccccacgatctgtgccagcgagaactacaaatgaccccattgagctcgaagctgtcatctcttgcgcttctgacggtctggtcgtttgcctccgaaaggcccgaccaatgatcccacaccccactcatcgcccatctcaacccactcaccccaatggtgtgttcgccgcaccatgggctacgcaacccgtactaccaccactcgaagcccgaccacgtgccggcttcgcatctggattcgcaccttcgctgggcccaatggcggcaagacacgactctgcatcacctccacgcgcccatggtcccgacagccaggacttcatgtctgtcatccgcgaacaagcagtctttgcttgggcgcttactggcatcaacggctcgcttgcagatcatgcaaagggcaagccatctggctattccgtgccg

SEQ ID NO: 95245 - DNA, 300 bp, Glycine max
  unsure (1)..(300): unsure at all n locations
  Clone ID: PAT_MRT3847_57018C.1
gagatcacaggtgctactacattgctaccatactgggcgggactcaagagtggctacggcactgactatgcttaagaaacacctggtaaattataaagggcatgtctcagctgctttagttcgttggaatagaacaggagatttggcatgagcctcttgttgagtatgctctgcctatctgaaaatttccacacctcttttaattgtcgtaatgatgtgtgaagtgtgtgttattttaaaaaaaaaggcctaaaanncatcacacacaatctaaacattaaaaaaaaaaaaatgggcggg

SEQ ID NO: 95246 - DNA, 546 bp, Glycine max
  Clone ID: PAT_MRT3847_57019C.1
gagatagactctcaaatttgagagattaaaaataaatttaagcttagtttagtgaatggtgtgttaataaactgaaacctggtaattttcattgatatgaaacactgaataactatatgatcctctctaccatttttccatggttattgaggacaaaatatcaaaacagaatcacaaataaaaaaaggagaaaatatataagaatttggatcaattacaatttaaattcgaatcatatataatccctataattaatggattataacatcccctctcaagttggtgtacgatgtcacacattcccaacttgtcaagagaattactaaggacctttaaatcttcatgtaaaaaaacattttttatatcgaattgaagaagtggccaattttgatttgttgttattgataataacatcctcagtgtattgagctttgcaactggtgcaaaggtttcttggtgtaaccctaacgcctacgacctctgatcttactatctgcatttagagttcattcagtataatttgtaccatcaagacgcttaagttta

SEQ ID NO: 95247 - DNA, 174 bp, Glycine max
  Clone ID: PAT_MRT3847_5701C.1
attgaaagtagttactgctacaatttaggcgcgtaccatggccctttaaataattaccaaaaatccacccaaaaagtgaggttgaagagctgaggatctgctgcgcctaaagccccccgctgtgatatgtcaatgatgaggtggtcggattcaacgatttaaatggaatagatg

SEQ ID NO: 95248 - DNA, 367 bp, Glycine max
  Clone ID: PAT_MRT3847_57020C.1
ggaaccaaaaacgggtcaacgtgttcccaatttcacatttacgggaaggaggggggaaaaacaaaccttggtgcccataatcatccaccaaatacccagggaacaaaaattcacttttcagggtccaagactggtcatttctttttacaaattcgatgaggctttgccccccagcagaaaacttttgacaaccctgctggaattttaccatttacccgcaaaaatttgtcaaattggccataaaatgtataaaaactagaccccttcacttaaacacaaacattcttttaactaaacatccactggccatttaatggtatttcggtggctatcacgcgatttttgtattcaagtgactttagaatgg

SEQ ID NO: 95249 - DNA, 506 bp, Glycine max
  Clone ID: PAT_MRT3847_57021C.1
gcaagcaaatactgtagctcaattgcttgcaaaagctgctctatgttatgctagtcccaaaattttccatattacaccatcatgtatctacaactctatttttaatgaatgaaattccatgattctcctttgacaaaaaaaaaggactacgcataatttactagagagcagttggaggagacaatgggctatagcgggaccacaaaatcccgtaaacaagaccaagactgatatttctcctaaggttgggctggtgattggaaaatgatgaagggtgaagggaggggaaaggaagagaagtgttggatttgaatcctctaaactgacatttctaacaaaatcaatgaactaacatttgtcgatttaaaaaaaaaaactgaattctccaatatagcaattttaccttccgaagactcgttcattaggaccctgcatggcgaaataccatgaccaaggttgaagtggagtacaggaatacccattgatgaaccctaccctcaatactc

SEQ ID NO: 95250 - DNA, 221 bp, Glycine max
  Clone ID: PAT_MRT3847_57022C.1
caaaaagaggggaagaggtgggtttgtgtagccatctacgcagtttgagtacatctgcactcactgttcttgctgtcctgcatgctgcgcttgtagattcgcgtcaggactctgcagacttcgcgttcccgctctgcactattagttgtcggagaatttgttggcgtcatgagaataacgtcagttcgatcgttgttgaagaccgccattcggccataggt

SEQ ID NO: 95251 - DNA, 108 bp, Glycine max
  Clone ID: PAT_MRT3847_57023C.1
atacaatgataagaaaagtgcccatgaccttgacgactagcgtgcgtcagctatcgcgactcggaaatatgcatccactggttcaactgctatgatgctgctcgatga

SEQ ID NO: 95252 - DNA, 262 bp, Glycine max
  Clone ID: PAT_MRT3847_57024C.1
gtacaatagccacgtaatccaaaccatgcagctacgaaccctgcaattcctcaactaccaaaccctttcgaaacttccgtgttctcctagaaaagcccaacaacggcaccttcttccggcgataaacggtgcggattcccgggcgccgttccaagcccggaagggccactcaatgcctccagaagagatagctgatttcaagtcctaggagggatgggcctcggagtgggtcctaccgctgctgaagctcgttgagcaatgc

SEQ ID NO: 95253 - DNA, 304 bp, Glycine max
  Clone ID: PAT_MRT3847_57025C.1
gttgttcttttttttttttttggctacaaaaccacttttttaattggtgggcttaacccttttcccggctcttcaaaaatcaaaaggaacaagaagagggatggatgcaaggaacttccaattaccacttttaatgtgttctaaatattctttctaaataaaaagctaccaaaccttccccccttttccttttgtgggggtgaaaatgtaaggaaggggtctaaaaacttaaactccaagtataaataataattttttatggagggataaatttggggaggggggtgatagtgagaggaagtgt

SEQ ID NO: 95254 - DNA, 328 bp, Glycine max
  Clone ID: PAT_MRT3847_57026C.1
gcaaaagaaatatcttttcccgttttcatcgttgtcaatggttgtgcatctgttgaggctgatggagaaggtcagatgccatcaatcctcttccggaaaccacatattcccattctgggcattgatcctttcgagtttaacgttagaggattttcatgcttatgcgatatgctgatgtgggttgggtaatatggagggtgattaatggttaatggttgttcctctacaatcgatatttgaaaggaattgctggaagtcgatggatgtcaaggtcacagtattcgcttcggagatcgaaatataatagagatactgtcaaagatttgag

SEQ ID NO: 95255 - DNA, 474 bp, Glycine max
  unsure (1)..(474): unsure at all n locations
  Clone ID: PAT_MRT3847_57027C.1
aaacnanatnnnnatcatnaacnacagcacacgaaaaganactcaagancagtttncnagcanancancnacngtacacactgncnnacacacacaccccncgcngagagcagtgacngacacnancnnannacacgtngaacnacncagccaatcnanncgananncacatgcnncaagtngtnntcncacanancnactacnacnnaannnngctacgaaacnccntnaagatagancnnacgatcacnnanancanannacacgacngacgcnnancaagnnananccatnannnaacacannaancannacgacanacnagcnacaanatnacanaaacannacnaancangcaccatcnagncacgnnaanacgcaagacnataaancaagcnatgngcaatnnngacagccnagcagnnnagcngacagncgcannnanccganntgacagancagncagcananntc

SEQ ID NO: 95256 - DNA, 556 bp, Glycine max
  Clone ID: PAT_MRT3847_57028C.1
gtcacaccgcccaccgtcacctgctacctctctcctacatgatgtctttcatttcactcacctctctcactctctaattcattctctttcttttctcccattttcatcaattctccaacaaaaatgagaaaatgcactgtgcaggcgttgggactcgctattgccttcttccttttactcatcctcctaaccccatccattcctcagcctcagcgataccatgacttcgctgacaagcgcgaattctttggcattcccaatgcacttaacgtgatatcaaatttcctattcatggttattggtctcattggccttgtgctttgccaccgtatgaactattttaacatcagtttgcaaggtgaactatggggttggacatgcttctatgttgctgtgacttcagttgcttttgggtcttcatactatcattttggcccaaatgatgcaggacttgtgtgggacaggttgccgatgtctgttgctttcgcgtctctgttggcaatccttgtcattgaaaggattgatgcaaagaagggaacaatttcaattgtctctc

SEQ ID NO: 95257 - DNA, 255 bp, Glycine max
  Clone ID: PAT_MRT3847_57029C.1
ctgctcgaggttaacatcgcttctattctattcctctccaattttcacttttctttcatttctcttatttatttataaattccctcaaaattaagtgatcacaccaccacctatacccagattccggcaacaatcttcattctcctcctctttaatttcaacctcatacctccattatctccctttcttttttaatttttactttttgccctctcactctcaacaatttccccatacacccatttttctattata

SEQ ID NO: 95258 - DNA, 1390 bp, Glycine max
  Clone ID: PAT_MRT3847_5702C.1
gttccaatcattggaaaaaagataccaagcgtcttgaatggcttgaatccaaggaaccaaggtctgttgtttatgtgaattttggtagcatgaaagttatgtctccagagcaattcttggagtttgcttggggtttggccaatagcaagaaaccctttctgtggatcattaggcctgaccttgtctttggtggctctgagattttgtcatctgagtttgtgaatgaaacttcaaatagaggcctaatagcaagagactttagcagaaaagtgagtgatcggcactgggaggatccatcgagagagatgtgggtgttttacctgatctctttgcccctcacagtgggtatggtactattcacgctcagatactacgctgccccacacgtccctcgctacgtgcttctcaccgttggatacacctggctctcttccctctccatcatcatcctcgtccccgccgacatttggacggatttggaatttgagtttgatgctctgttacatctagtgaattactatactgtatgctacaacggggttgggtctagcaaaacgggctggtcccccgatctccagcgagcagtggaatttgcaaacctgcacaaacactccgatgcatgtttcaagtctgtattcgtagcagggctgtggtgccccttattcagggttttgaagatgctggggacttcactgtttcagaaagattgaagactagtgtacatgttaacttgatcttctatctaattgtgggatccattggcctttttggactcattcttctcattttgacgcacaagcgctggaggggaagtcttttgggatttgccatggcctgctcaaatacttttggacttgttactggtgcatttcttcttggctttggtttaagcgaaattcccaaaagcatttggagaaatgctgactggactacccgccagaaagttctttcccacaaaattgcccaaatggctgtcaggctggatgatgctcaccaagaactttcaaatgctattgtggtagctcaagcaacatccaagcaaatgtccaaacgtgattctttgagaccttatatgaatgtcattgatgatatgctaactcaaatgtttagggaagatccttccttcaaaccacaaggtggccgattaggggaaaatgatatggattatgatacagatgagaagtcaatggcaacactaaggcgtcatcttcggggagctcgtgaggagtattatagatataaaagtgaatatatgacttatgtattggaggcacttgaattggaagatacaataaagaattatgaacgccgcaactcaactggatggtttgcttctaatttcattttcttttctcttccacttcaacatccttctacaatacattactag

SEQ ID NO: 95259 - DNA, 775 bp, Glycine max
  Clone ID: PAT_MRT3847_57030C.1
atatactgagcgatctagaaatgatatattagaagactgtaaaaaactcgtgagtgagatactgagggaacacccggaggggtataatattggtgctttcggaagactatttgttgcgaggtatggctatcatcttgatatacagaagctgggttatcaaaagttggcagccttgctacagataatgcctggggtcaaattagagtccacttatatttttccttctgttcctgctgtctgtgattctgacttggaaacttctatcctcaaaactcaagcaaccactgatattcatgcagcttccaactcagatagtgaatcatctgagtcagcccccaaagatgataacatggaatccccatggtgtgaggtaggtcctgtttctatcaacaattccgacaagagtggtttagaattaaagccaagtcagaaaactatagaactggatacatcaaaatcaaagcatcctgattatgaacctgtcgcatcagatgatgagttttctgcatctgaaggagatgactcttgtttaactcaatcagcacagcaaagaaagccaaaatgtaatgaacacgacagttctttttggcaagctatggatttgcggcacagcagcaaggaagaagagaatagtggcaagaaatcaaacactgttgacagcttggacatttctctggctgaaattttagattcatccaccgagtcaaccagggacaccctttcccagattccttcatcgaaatacagagagaataatggcaagaagtcagacaat

SEQ ID NO: 95260 - DNA, 425 bp, Glycine max
  Clone ID: PAT_MRT3847_57031C.1
ctccctgatcttagtaattcctctcgagcataactatccttccagggagactggagcaataatatatatatgggaggtatatctgcctgagattaatcatggctgtgcagagcgagctctatggattagctgctttgcagtgctcactgtagcacgactccctcagtaagtgcaaggaagctcaaggtatgtaatcacaaggctcatatctcatcgaaatcctatagtaggcttgaaagcaggactgctcatgtacagcttccaggctatggatatgatgatgaagacaacaggatctcactcttatttactgaactgagactaccacaatcctcattgattgcatttcgttgaaaataaatctatctatcccggatgacatggcccggcccaagaaagagcaccgaatcagggtttgccgtata

SEQ ID NO: 95261 - DNA, 428 bp, Glycine max
  Clone ID: PAT_MRT3847_57032C.1
agctttttattcggctcgagaaaggaaccaaccactcttttctttcaccgatcatacatacaatgtcgacttacagagacgaggatccccgtcttcatgacatcaaaactaagattcgtgttgtccctaatttccccaaacctggaattgaagctcggggtttcatttttggttctcccattgctctggcaataggagcaaagtttgtaccattgaggaaaccaaaaaaaattgcctggcaaagttatttctcaagagtatattctggaatatggaagagactgtcttgagatgcatgttggagccgtggacctggtgagcgtgctttagtggttgatgatttgaattgccactggtggaactctctgtgcagccatggacttactagagcgagtgggagcagaggtagtggggtgcggtgtgtaatt

SEQ ID NO: 95262 - DNA, 133 bp, Glycine max
  Clone ID: PAT_MRT3847_57033C.1
ttccaaacggcacttttgaacacaagcagccaaagcttcaaaacatggaacgttttgtgcgcctaactgtggtattagccatggctatggtgcatggctgcaccagcctacgctcagatcagcagcacgcctt

SEQ ID NO: 95263 - DNA, 1612 bp, Glycine max
  Clone ID: PAT_MRT3847_57034C.1
ccctcgcgtccgctcttacacacactctataaatacccctgtggataaacttcccttgttcttatttgttactactaccgctttgccttcatacttaactcaattctagttttgtagagagaagaaaaaaaccaaccactctttttctttcatttgcaatttctgtgtcaccaatcatacacacaatgtcggcttacagagacgaggatccccgtcttcatggcatcaaaactaagattcgtgttgtccctaatttccccaaacctggtattatgttccaagacattactactctgttgcttgatcccagggtctttaaggacacgatagatttgttcgttgagcgatacaaaggcaaaaacatttctgttgttgcaggaattgaagctcggggtttcatttttggttctcccattgcactggcaataggagcaaagtttgtaccattgaggaaaccgaaaaaattgcctggcaaagttatttctcaagagtatattctggaatatggaagagactgtcttgagatgcatgttggagctgttgaacctggtgagcgtgctttagttgttgatgatttgattgcaactggaggaacactctgtgcagctatggacttactagagcgagtgggagcagaggtagtggagtgcggatgtgtccttgaatttttttttttaattggtactttgtgcaactttctgtagcccactgcttgatgtagtggaaacacttcacttgttacctacttttcacttgttattactttaacacttttcttcttgtaatgtatctgcgttatctttcactgtgtttttctcccaggtctggtaggccatccctgcatgattcctgggctatggaatttgcttggcatttggggaatctcttttcaactgcttcattgagaaaacatctgaatggggccactgctgttgtaagttttcccttctcttgttatattgcctggtaaaaatttagttgcaagtttccctttagtttgttaaatgcccggttaatattttgcagctaagagaaagcccaaagccaagttggttttactttcttctttttttattctgtttcttttgcagttacaagatgttgctttagattttaaagaacttgtttggtgagggtccattcttttatcagttttctgtggcaatatatctcacaattttatgtcccatcttggggtcagctagttaaaggtggttggagcctagcctctatcactggtgaatttatagaatgttgatgagaatgattatttagtttggttttatagtcttgatgctaacagattgaaagggaaaaaggaagtgagtgtttgtgatactgtgagataatttgggttgaaagtattatagatttttagcaagcatgctgcatgcatggcactaactaacctaatgtgtctgaattttgtcgcttaggatacagaattttatatgtaaatatttgttcccttgtgatgatatgcctgtggtgctaacttgtgtttcttttataagatctcatttatgggtggttttggcttccacatcaaagctattagagcagcttcagatcaggggtaattgagaattcacatttcatacatattcttttg

SEQ ID NO: 95264 - DNA, 709 bp, Glycine max
  unsure (1)..(709): unsure at all n locations
  Clone ID: PAT_MRT3847_57035C.1
accggtccgnattccgggtcgacccagcgtccgttctttgctctgtctttctttcctctcgccctcgtaacctctgctcttcaattgtcgctgctcttcaagcaactcgaagaagatctcaaacgcggtgatttgtcagacgatgatggtgaggatgagataagtgaagaagacatggcattgcttgaacgtgagttggaaaatgctttgggggactttgatggtgaattgttaaactcggatgtaatcgacatcgaaactggcggtgatccagaaaatgatgatgatattgaggatggtggagatgaaaggtcactgaaccttaggaattggcagatgaagaaattggctagagccttaaaagctggccgccgcaaaacaagtataaaaaatcttgctgccgatctttgtcttgatagggctcttgttcttcaattgcttcgtgaccctcctccaaatcttttaatgatgagtctatcaatacctgatgaacccacaacgactgtagtatcacttgaaactaagcccagtgagattgttcataaagaaacaagtattgatcatgcagaaatagaatctgaacctaaggctaaagtacctgttcataccttgncacgtaattggcatgctcaaaagcgactgaaaaggcccatgttgacactttgnagagagtttatagagatcaaacgacccactatgcatgatcagt

SEQ ID NO: 95265 - DNA, 1606 bp, Glycine max
  Clone ID: PAT_MRT3847_57036C.1
acgagagacaagatgagtagcaacatgcctgcaaaattgttgctcacaactttgtacatccttttggtgtttctttctatccacatgtcaccacatgatgttaaaatagacacacacagtttcaaaagtagtagtagtactagtggccacaggagcaaaattggtggtggtggctcagccaaaggttgcaacaacaacaacagcaacagcaaccaattggacacaaacacaacaccatgtcaaaaatcaacaaccattcaagcagttcctgcagcttcttcacctccccttgtatttgcagaccaaagacttgaagtagtgtatccaacagtccaaaaattcaagtccaccatcacctcagatccactaggagtgaccaaaacttgggtaggatcagatatatgcagctacaaaggcttctactgtgacaccccacctgacaatagttctgccactgctttggcctctattgacttaaatggtttccaactatctgcttccacccttgatggcttcattgataatcttcctgatattgctcttttccatgcaaattccaacaattttggtggcacaatctcaccccaaatagccaaactcccttacctatatgagcttgatgttagcaacaaccaattatctggtccatttcccactgctgttctaggcatgaactctttaacattcttggacttaaggttcaattctttttctggggaagttccaccacaaattttcacacaaaacctccaagttcttttcataaacaacaacattttaactcaagggttgcctgataacttagcctccactcatattctcttactcaccttagcaaacaacaagttcatgggtccaattccaagaagtcttcctaaggctttgtccactctaagtgaagtgcttttactaaacaaccagttaactggttgtttgccttatgagattggttttcttgaagaggcaacagtgtttgatgctggcaacaatcagttaactggtcctttgcctttatctttgagttgtcttgagaaggtggaagtgctcaattttggtggtaatctattgtacggcatggtgcctgaagtggtgtgtgtaggattagtgaatttggtcaacttttcactatcagataactatttcacacatgtgggaccattttgtaggatgctgattcagagaggggttcttgatgttaggaacaattgtattcctgatcttccgtttcagagatcagtgatggagtgtgctgagttctttgcaacaccaaggatgtgtcccttcatgtggtttcatggtctcatcccttgtaagcttccttttcaacattccattcacaattagatgcccaaggcatttgggttgcaattctttgtttttcttttctttaacttcctgtgtaatgtataattggaactgagctttgtgatgatccgtctatccatgttctgagataatttctatatttcaagtcaatgtgtgcagctgataaattatttcatcatagccattgtatggcagattaaaacttccatccagtcattgaaatttgtacaatgagtcattttggtcacatcaggcaaagttaaatttagtgatttattaa

SEQ ID NO: 95266 - DNA, 308 bp, Glycine max
  Clone ID: PAT_MRT3847_57037C.1
aaatatctttatttgcatttactaggcctaattttatatagtggttccatatttcaaacattttggaagaaaattatccactcctgtttacgtttttttccaacaaaacaatagcttgttggcttctacctacacaacacgctaaaacgccaacaaaataccggcgggggggccctagacagatttatccccgttattgtcatctatggtgtcatgccttggaaccttccaacactatttgtagatctttgatccggtgacacgctgcaatgttatatccttttcatccgtgctcaacaggaaaacca

SEQ ID NO: 95267 - DNA, 774 bp, Glycine max
  unsure (1)..(774): unsure at all n locations
  Clone ID: PAT_MRT3847_57038C.1
ttcgctgggcttagttcaaagtgatactacagtcgttgcgggttcatcaggtattgttagactcatcattaaaagatttgnagnagggtcacgaagcatttgaagaacaagagccctgtcaagacaaagatcagcagcaagattttttatacttgttntgcggcggccagcttttaaagctctagccaatttcttcatctgccaactcttaaggttcagcgacctttcatctccaccaccatcatcattctcaacgtcatcaccatcaccatcatcatcatcatcatcatcatcatcattttctgaatcagtgccagtttccatgtcgattacatccgagttcaacaattcagcatcaaagtcccccaatgcattttccaactcacgttcaagcaatgccatgtcttcttcggttatctcatcatcatcttctggcaaatcaccgcgtttgagatcttcctcgagttgcttgaagagcagctcaaacgcgtccacgccatcgtcatcgtccttcgtaacatgatcatgagacttttttttcttgtttttctttttggaagaagcggcgacaattgaagaagagagattgcgagcgcgagaggaaagagggacagagcaaaaaagtggtttgcgttggaaaggaagagtgagggattggcttgcggtgaggaaggggtcactccgagcacatgataaacactgaaaagccacagccatccttctcttctcttctcttcttcgggctgggaccggacgcgtggtgcggacgcgtgg

SEQ ID NO: 95268 - DNA, 2115 bp, Glycine max
  Clone ID: PAT_MRT3847_57039C.1
ctcgagccgtttttttcctggttcgcgttgcgcaccggcctctatagcgagcttgaaccatcttcagcttcagctactttgcactaacaaagcgccccacgttctgagacaaacccagtatgctatctgccatgggggatcagaaagtttcgatttttcattgattgtgtataactgcacaaagagggtagtgaagcaatgcatagagcgatcgtgtttctcattcacccacgattcctcctcctcttccttgtcctctcaattttcctcattttcacattttctggttctactactaccagtggttttgctacacctcaacaggttgttgagatcattgaggagaaaccagaagaggagcctgaaattacacacagagtattcttggatattgatattgataaacagcgtttaggtaggatagtgattggattatatggcaaagttgtaccgaaaactgtggaaattttagagctttgtgtacaggggagaagagtgaaaatgtaaagcttcaccaccattggataatatctggttgtgatttggagagttcatcatgtttttcaaactagtgagtatattggggtagatgtcatcatgccctttggcaacatggcttaatgcataagactactctatgacaaagaactagagaaccccttctttgacgacttatttagtatttgagataagaagcaaaggaccaaaaatgcacatgtatccaggaaccgaagtcccattttcaatagccagtgtaataaccaattatcacttttgtcacttctacctcctcgcataacaaaccctcaaaacatgactagggttggtgaaagtgaaacgtaacttactatacaattgtgtaacatttttcacatagcctacaatataaaagcagatcaaagaagttaaaatcttcatgcagtttcaggaacagagcgctggtaaggaacacggcgatctggaactccctcctcagcacgtttgtcttcaaaccacttaacaactttttttcgaggaatgtttgttacatgtacgatactactgatcattgcattagtgggtcgttttgatctcctataaactctctccaaagtgtcaacatgggcctttttcagtcgcttttgagcatgccaattacgttgcaaggtatgaacaggtactttagccttaggttcagattctatttctgcatgatcaatacttgtttctttatgaacaatctcactgggcttagtttcaagtgatactacagtcgttgtgggttcatcaggtattgatagactcatcattaaaagatttggaggagggtcacgaagcaattgaagaaaccccaaaaaaaagagccctatcaagacaaagatcggcagcaagattttttatccttgttttgcggcggccagcttttaaggctctagccaatttcttcatctgccaattcctaaggttcagtgacctttcatctccaccatcctcaatatcatcatcattttctggatcaccgccagtttcgatgtcgattacatccgagtttaacaattcaccatcaaagtcccccaaagcattttccaactcacgttcaagcaatgccatgtcttcttcacttatctcatcctcaccatcatcgtctgacaaatcaccgcgtttgagatcttcttcgagttgcttgaagagcagctcaaaagcgtccacgccatcttcatcgtccttagtaacatgatcacgagactttttttgcttgtttttgtttttggaagcagcagcgacaattgaagagcagaggttacgagggcgagaggaaagaaagacagagcaaagaagtggtttgcgttggaaaggaagagtgaggaaggggtcactccgagcacaccataaacactgaaaaaccacagccatcccggacgcgtggaacatatgtttggattatggtttggatagcagacacgcctggtttgtctttgatcttaattcaaagtcttaaaccatgctttacatgccaacttgacttaaaaaagaattggtagatcctagattgttattaaaaatatactgaagcccggtttcttttaatgtaaacaatatatttggtaagtccattttaaaaaaaaacaaacaaaa

SEQ ID NO: 95269 - DNA, 437 bp, Glycine max
  Clone ID: PAT_MRT3847_5703C.1
aatgaaggaaaagcttttgctcattttctttcacacagagattctgtcatcacgtgaactctactctgtgtaccttggacagcctgtgatcttaccgatgccatcctgctcccagctgctgttaactgagccaatagttccagtggtagcatagcaacgcttgacatttccaccgcttctaagacctgtgacaagtattggaaaggtatcacacacctctgtctccatggactaaacatgcggaagattcgcagactctgaacacctgtgttgggggaaaacccgccatgctgcgttttggatacacatatgcggctaatcagagatcctgaaaactgtcattcacacgctcatcaaagactgatggcgacaatttgggaagggaacctacagcatccgatataggtggtgccgatccctgctgcctggggcaacta

SEQ ID NO: 95270 - DNA, 397 bp, Glycine max
  unsure (1)..(397): unsure at all n locations
  Clone ID: PAT_MRT3847_57040C.1
ctcttagcatgatcaaagcgcnntgcatcctaacagcacacgtacgtggaaaggtgaaggttctggtcttgcacaacatacacaacacaccataatttattgtatatacaaccttacggcgcccaaccatgnnatgcatggacataactaatcaanntggatactctgatacgacgtgttcataaataaactggctacccataacatggccttgcttccaatggannggaaaacaggtgtacttcctggatcaactcacctgattagtgatttgagagatctctacataatccatgctnnnnctatggacgaggctggcaatagccaggcctgtactcctctatgggcctttgaaattgaggaaggcattccgcacgattcactctncaannttgtc

SEQ ID NO: 95271 - DNA, 246 bp, Glycine max
  Clone ID: PAT_MRT3847_57041C.1
atagccaggttatggacccggaaaggccccgggtttataccctaccaattttatatattggggccattcttccataaccaggttaatcacatttaccataccaaaggaggggctataaaccaaaaattccacttcggcttataatcccaagggaggggatttctgaaaatcaaaggggccagataatccggaagatttcccccataccttggcaggggcattgactatgggggaactgggggggct

SEQ ID NO: 95272 - DNA, 420 bp, Glycine max
  Clone ID: PAT_MRT3847_57042C.1
ctagacgagaatgtcgctcaagtgcaattgcttatcgttttagaagtaacgaggcgaaacaggggatatgggaattggaatgatgagaaatcttattaagcctctcctgaagccaaaggagatgcgatcgagcctactcaggcaactgcaactgcacattttcaagaccagcagaggccacaatggacatgtacgaaccggcattatcagttgaatcattaggcctatcctgtatccagaggacgtgagctcagacttacgtacagaatgccaattacacacttgctagaaatggtgctgcttagatgtgaccatatgaattccaattatgcaggtcacgtattaagactatcctgaagacaaaggacatgagatcactataccattaagataccgagctcgaatgacctataatgagtc

SEQ ID NO: 95273 - DNA, 644 bp, Glycine max
  Clone ID: PAT_MRT3847_57043C.1
gttgtgcattattagtaaggtgctggttggcattttcaattaatgatattttgaagaaaaaaaatttattttttatggattttaatctaagattattaaatagttattataaaaataagtaaacttttaaataattattacaaagttaataaaaatttatcatgtatattaatttgtaatttgatgacaatataaaaggtattaatatgattaaattcttatttttatggtgccaatttttcgtggaaaaaaatcattttttccctcttgtttattttaatcatttccatttttattatgcatgtgtttcaaatgttacagaaaatgaaacacactttagttttaaagaaagactacaataatcaacaacgcatgtcacaccctcacgggtttcacctattttaatataggaaaagaaaaacgtatgttcattcaaacatgtgattacttacacatataaatatcgttaattaaatgaacatgactgtatagaataattaataattgataattaattattgatgtgtggttaatagtatcttgagattatttatatgtctaatggtggttaactttgtctcaagtgattaatagtaccatcacattattaactactacatatgcaagtatgattaactttatct

SEQ ID NO: 95274 - DNA, 340 bp, Glycine max
  Clone ID: PAT_MRT3847_57044C.1
ataattctcgttaattaaaatttaaattgacggcatggggattgaagcatgggctcacaatggattttccaacaaatgtcccatcccaaatgacatagtttgcaccaagggacgtacaaccaattattgttgaaagtagtttaaaagctattagcgtttgcattataccttgctgtcaatgtagcccatttaaataggctgtcaacacattgggttatacacttttttcgacccatggcttctaatgctcgaaattttttagagttggcaaaaacactatggcgcccatattttatttctatgatcccgtgataatttattatttgcaacacatggggga

SEQ ID NO: 95275 - DNA, 566 bp, Glycine max
  Clone ID: PAT_MRT3847_57045C.1
gccacgcttacgaccgactttttcgcatcagcgtacagatgctaacaagcgctcagaagacaccatgactacaaaggcagagccaaatatacaagggagtgtaaattcaacttatcaagggacaactgcaaactcgatgtctaagatggatccagagtcaagtcaggcaacagctgatcatctatcaggaacaagtgaaagcgaggaagtaggcgatcatgaaaccgaagtggatgagaaaaatgatgagcctgaccccaagacgagagctgttataattctgcacaaaagcagaagtctcgcacacagatccagcttgttcacataggactgtcactgagcctagaatcattgcgcatacaacaagtgaagatgatctcttggatgatgggtatagacggcgcaaatctgggcagacagttgtcaaaggcaacccttatactaggagctattacaagcgttcagccaagggttgcaaggagcggaagcacgtggagagggctcctacagactctagagctgtcataacaacatacgatggaaaacacactgatgaagcgctagca

SEQ ID NO: 95276 - DNA, 573 bp, Glycine max
  Clone ID: PAT_MRT3847_57046C.1
atgtcaggacgacacagaccaactgatacttttgcagggggacattggcattacggtcgctggggcagaatgttgctaagtagcaatgacatctatatctgtagccgtgtgatagcctccctctctggttgtgcttgcacagttggccctcctccaatatcagggggtggcccaggaaccgtgtggatgtggagcacactgaaaatgaggacacgtagccctctaaaggtgagggcgtggagccctctcaaggcgaggatgtgtagtcctttggaggtgagggcgtgcagccctctgttggcgaggacgtgtagtcctctcaaggtgagggcgtgcagccctctgttggcgaggacgtgtagtcctctaaaggcgaggacgtgtagtcctctcaaggtgaggacgtgcagccctctgaaggcgaggatgtgtagtcctctaaaggcgataggtacaagtacccaagggtccacccttatgagaaagcaagaaatcgactcatcgagagggccggtcatcccaaatccacaagatttggacattagatgtaggaaatctatgcagttaacatga

SEQ ID NO: 95277 - DNA, 331 bp, Glycine max
  Clone ID: PAT_MRT3847_57047C.1
caaaaaaaaaaaaggaacttggtttttaagggccctttggccccctgtaaagggaaggaaggaatttcggggccccggctttaaataaaaatcttttaccttcttttaaaaaaagggcaaaacctaaaataaatacccttttttttttggcggggaaaaaaaaaaaacccctgtttaaggagagcttcaaccctggggggtccaatacaatttgggccccggaaaaaccttttttaactaaatcctgaaattttgaaaaaaaacacaaaaaaagttcttttttttagaatttacccaaatccaacccgacctttgaaattaattttttccc

SEQ ID NO: 95278 - DNA, 360 bp, Glycine max
  Clone ID: PAT_MRT3847_57048C.1
gacggtgacggctctcgacagggacgacactctgggtcagcggtctaacttactgggcacatgccaaatccctctgatttcgactggatcgattaaggttgtcacagcggtcaaatgtgcactacacaaccacactgactttttctgctaaactaaactaaaatggtatcctccggtagaaattgctgcttcaaatatcccggcacctactttccgaaggggtatgcctcacatcctactaatgctatactctgcacaactcatttttgcccaaattagctgaccccaattaccctgttggaaaagatgcactgagtgctcattcttttcaccatgcccacaaacttgacctccttttat

SEQ ID NO: 95279 - DNA, 403 bp, Glycine max
  Clone ID: PAT_MRT3847_57049C.1
tacggctgcgagaagacgacagaagggctttgtttcaattctatatactgtgtatgtgtatgcatgtgtgtgcattagtatgttaatatgaatgcatttaaccgacaaacattactttatttacactgttcattttgcaggctcaagataatattatgaaccttccattagcaaatggatggggtgaaaaacatcgtctttttgtgaaatggaagtatattgaagcaaaggtttgagtttttactcaccagtcatttgcatcttgctatttaattattatgtattagtatatggtaatacaattagagtggaatttgctgaatactggctgccctttgactattaaatgcagatgaagtataaaatgaatcaaattaatagatggtccacaagataaaatatg

SEQ ID NO: 95280 - DNA, 176 bp, Glycine max
  Clone ID: PAT_MRT3847_5704C.1
ctccccccggacatcctatagggtcgactctatgagaagatcttagacgtcatgtgcgcgcacgcatactctgaaaattgcgctagcagcgcatctgagttatggctcggtatttttcttgtgccgtggagcagaagctaggggctcagaaggaggccgagaggttcttttttgtg

SEQ ID NO: 95281 - DNA, 1139 bp, Glycine max
  unsure (1)..(1139): unsure at all n locations
  Clone ID: PAT_MRT3847_57050C.1
ttgctatcttcttcaatctcatgagccaaaaccttttccttgaagctactttgccttgaggaagttctcattctggttgatgtttatgttttgagaattgcagaattttgacctgacaagtgaactgccagagcaaacgacaaggtatagtactcaggacatgggctgcttcgtgtccactccaaaggattctggtggaaatagaaggaggccagggagtattggggaggtttctgtgtatgttcctggtctaagaattcctaaacctgttgattttgcacagtcacttggtgattacttgtccaaaaatatagtggaacgcctgtctgctctaagaactcgtatagttgtaatggctggccaagaaggtcctacaattacaagaacaaaaaggaaaagtgccacccaacatgtccgttcaacactggctgatcttcagcaggctcttgaagattacttgccagtacttttgggattagtcgaaaatggaagccatttacaatacaaagtacaatttgattgggtgaatcaagaggatgacacagaggctaatttattacttcttcccagaacatccactgatagtcatcagccaaaagtatcagaagaaagcagacgagcttctgttgatatcttcttaaaggcagctgggtatcttgactgtgctgtaaggcatgttcttccacagttgcctggcgaactgaggagaaacttaccagtggatctcacagaaggagttcttcgagcactctgtctacaagcattgggacagggtgtagatattcaacttggaatggcaattgatagtaccaaagccactcttgcagtgaagcgtagacttgcatgtgagatggtgaaatattggcaacaggctcaagataatattatgaaccttccattagcaaatggatggggtgaaaaacatcgtctttttgtgaaatggaagtatattgaagcaaaggctgcagcatattattatcacggattgattcttgatgagggaaacacggagaaatctcatgggatggctgtagcttctttacaagcagctgatgagtatttcaagaaagtagaagttgtgtgaagcattcatgcagtacctncattgtcaagaatccaccactttgggggactatgaa

SEQ ID NO: 95282 - DNA, 720 bp, Glycine max
  Clone ID: PAT_MRT3847_57051C.1
gtttggctgcttgtgttacaacttacaactttgttggctgtgtcgtacacacacacatatcttattcttatgatgtatgaataaaaacaagcaatatcccaatgttccacaataataattaaaaatggctcctttggttctgaattggattggattgcaattgggtgcctcaccctgttttgctcaattgctgccactctacctgttcatagaattgcagaattttgacctgacaagtgaactgccagagcaaacgacaaggtatagtactcaggacatgggctgcttcgtgtccactccaaaggattctggtggaaatagaaggaggccagggagtattggggaggtttctgtgtatgttcctggtctaagaattcctaaacctgttgattttgcacagtcacttggtgattacttgtccaaaaatatagtggaacgcctgtctgctctaagaactcgtatagttgtaatggctggccaagaaggtcctacaattacaagaacaaaaaggaaaagtgccacccaacatggaggttcaacactggctgatcttcagcaggctcttgaagactacttgcttgtacttttgggattagttgaaaatggaagccatttacaatacaaagtacaatttgcttgggtgaatcaagagatgaagcagaggaaacaaccatgtctaatgcttggtatgaagtgttggccggttttgcacttgatggc

SEQ ID NO: 95283 - DNA, 278 bp, Glycine max
  Clone ID: PAT_MRT3847_57052C.1
gggataatttatagaaaaaggaagaaatatagcggtaatgcgattctacggggacgtactaaatagcatagaaaatagaaattgtttcttccacattacaagaataacgagtaatttactgttacacgaacactaaataaaaatccttttgttgcaaaacattcattaagaataatacataaacgtaacacatattcggactaagatataaccataacttggtccaaaacttctaccattatacctacacataatcgcccataccatgtctatccaca

SEQ ID NO: 95284 - DNA, 854 bp, Glycine max
  Clone ID: PAT_MRT3847_57053C.1
gcctttagcagaagcaagtgatgtgaaggtattgatatgcttattgtaatgattttctaggctgcagcatattattatcacggattgattcttgatgagggaaacacggagaaatctcatgggatggctgtagcttctttacaagcagctgatgagtatttcaaagaaagtaagaagttgtgtgaagcattcaatgcagtacctccattgtcaagaaatccaccactttgggggactatgaaatatctttacgagaaaattcctaaggatacttcaagcaaggtgcgaataaaccgcgatctgtactcctatgaaaggatcatggagacagcaccaacattgcctgatttttcattggccttgaaaccagatgaatatcaacttcctcaagtggactcatcttggagaacagagaacataaaagtgggacaaactgatcctaaccatcttaagggtgacaagtgataaaatacaatgaatttgcacacctcaaagaaatttagatctacctgaaaaatgtcagccaaagggtgtttttccaatgttgttaatagaaaaaacaaattagtttattggatttttttctaccttctgcatttacttttttttacttcatatattaatttcctcctttccctataatatttgaaagacgcccagcaaatagaggttcaaggtaaattgtcctctgggggaaaagaaagggtctccttgccaatacctgaataatatcaatataaaattgctatttcatttcattgtaaaggcagcccatcatccatttttaaactaactttgtgtaaggatcgtgtgtaaatgaattgtgcattggagagtgaatttttatttccttt

SEQ ID NO: 95285 - DNA, 318 bp, Glycine max
  Clone ID: PAT_MRT3847_57054C.1
cccacgcgtccggttgttatcattcctctgacttatggagtcgtagcacttgtttggattagaatgattcctgatgagcagggacattagccaaactatcaggacctcatttgcagaatccagtcctcaacaatcaaaagtatttccaaagacattagcgcatgacttaaacctgagggatacaaaatctcaacctctaactataagttacatcaccaaagtcaaagacgatacccacttcactcgatactcctcttaagtccagacactatgcgtgaaccatgcttaccgaaattcttccaacgggactttaggtca

SEQ ID NO: 95286 - DNA, 3309 bp, Glycine max
  Clone ID: PAT_MRT3847_57055C.1
cttcggatcaattctatatactgtgtatgggtatccatgaatgtgcatgagtatgttaatatgaatgcatttaaccaacatacattactttatatacactgttcattttggtggtgggcggacgcttggttacaacttcaatctttgttggctgtgtcgtacacacacacatattttattcttatgatgtatgaataaaaacaagcaatatcccaatgttccacaataataattaaaaatgtaattgtaattttgttctcaaagaaagaagactctgtctctgtctctgtatctgtctttgtctctgttcgtctcgctgaaggaatcgcttaggatcacattctttttcaagtttagtttctgcttctggccacctctcaagttctctgcttttgtttttagggctcctttggttctgaattggattggattgcaattgggtgcctcaccctgttttgctcaattgctgccactctacctgttcatagaattgcagaattttgacctgacaagtgaactgccagagcaaacgacaaggtatagtactcaggacatgggctgcttcgtgtccactccaaaggattctggtggaaatagaaagaagcgagggagtattgttgaggtttctatgtatgttcctggtgtaagaattcgtaaaactgttgattttgcacagtcatttggtgattacttgttcaaaaatatagtggaacgcctgtctgctctaagaactcgtatagttgtaatggctggctaagaaggtcctacaattacaagaacaaaaaggaaaagtgccacccaacatggaggttcaacactggctgatcttcagcaggctcttgaagactacttgcttgtacttttgggattagttgaaaatggaagccatttacaatacaaagtacaatttgcttgggtgaatcaagaggatgaagcagaggaaacaaccatgtctaatgcttggtatgaagtgttgtcggttttgcacttgatggcaatgctattgctgtcacagtctgatttattacttcttcctagaacatccactgatggtcatcagccaaaagtatcagaagaaagcagacgggcttctgttgatatcttcttaaaggcagctgggtatcttgactgtgctgtaaggcatgttctccacagttgcctggcgaactcaggagaaatttaccagtagatcttgcagaaggagttcttcgagcactctgtctacaagcattgggacagggtgtagatattcaacttggaatggcaattgatagtaccaaagccactcttgcagtgaagcgtagacttgcatgtgagatggtgaaatattggcaacaggctcaagataatattatgaaccttccattagcaaatggatggggtgaaaagcattgtctttttgtgaaatggaagtatattgaagcgaaggctgcagcatattattatcatggattgattcttgatgagggaaacacggagaaatctcaagggatggctgtagctgctttacaagcagcggatgagtatttcaaagaaagtaagaagttgtgtgaagcattcaatgcagcacctccattgtcaagaaatccaccactttgggggactatgaaatatctttacgagaaaattcctaaggatacctcaagcaaggtgcgaataaaccgtgatctgtactcctatgagagaatcatggagacagcaccaacattgcctgattttgccttggctttgaaaccagatgaatatcagcttcctcaggtggatccctcttggagaacagaaaatgtgaaagggggacaaagtggtgccaccaaccatgtcaatggatgacaaacgaaaaaaccttgtaaatttgcagacctcaaagatgtcagcttatcagaaagaaggatttcagtcaacttcaagctcagaagggtgattttgcaatgcttgtcaatggtagaaaattaactacttctgactttgtgtctccttttccctttttttcttcataaattgattccctcccatcctcctcaatatttgaaaaacggccagcaagtggaaatagagcttaaagttgtgttcaatgtgaattgtctacttgggaaaagaaaaaggcttccttgcctatgcccaaataatatatatgattattactgctttgttttcgcgtaaagccagtcaaatcctccatttgtcaaaccaagttgtacaagtgattgtgtgtataattgacttgtgcattgcagagaaaagatggtttcctttaggttgtgctaaaattcaaaagaattttaaatgcaagggaatttatgacgtgttaacagcatctactcgacattttatcaaacaatggtgtaccatgataatcaaacccgtctatgtagaacttgtatttagttctgattaatataatgtaatacaattagagtggaatttgctgaatactggctgccctttgactattaaatgcagatgaagtataaaatgaatcaaattaatagatggtccacaagataaaatatgaagttggtgttgaaagttgagaagttgaggagattagatctttatgtttcttagggtacaaagattagttggaagtggctatatggacaatcggttgattgttcataactgacctgtttttgagaagaggctgaaatctgaaatacttgttcaagctgatggtgatatctttgaagaataaaagagtataattaaatattttctaaatttttatgataagtgatgcaaaatgccctgatatccctggaccataatattataattgcaaacctttattacacacattctaataacctaattacatctggtaaatgaattaagagtgccctagaattgttgcttatgttgtgctcctcaattatatttgttaagatatcccactttgattatgaatatgaccaaaatattctttacaaaaacttaggcaatcctctcctcttacctagttattgagagttaggcctagtctacttattaaaatgttataagagtaagcttatccaatcttgatgttgagtcacctgcagctgccagtgttgcaaatttcatgctctaaatgtccaattttgggcgtgagggacatgtgttaagatggctcacattgattaggaatatggctagaatactccttgtaagaattgggcaatcctcccctcttgaactacctattgagagtgaggttggctcacattgattattggttttcttgttctgtctactgtatattatttactgtttacccttacatgttatttgcatattttgtgtgtgcatgtgtgtgtttggggggtctcccat

SEQ ID NO: 95287 - DNA, 270 bp, Glycine max
  Clone ID: PAT_MRT3847_57056C.1
cacaaccactaaaagaaaaagtatctccttaaaaagatcctccttgctcgtcaaactgacataacccgtacatctccccaccatcacatagagcttatatctaaagttccaaatccatttattgtcgaatataaaaattcctgcgtacaaaacgtttgttctgtatctatcatcatttcctattgttaaccatgtaatatcgccctaactattaaaaacgcctcatggtgctaactcttcctaatagaaactttctaactctctcgttca

SEQ ID NO: 95288 - DNA, 398 bp, Glycine max
  Clone ID: PAT_MRT3847_57057C.1
gactctaggtgggtggaggtactttatgatctatggtaaatctctaatagtagctgcgcatttctggaattgcatacttgcggactgtggaggatgacaaatctcgattatgttgtagcttgccgcacagatagagacagattcaaaatctgtcttgcacaggtgtggaagatgtgcttatagatggaccctttctctgtcccatttactacagttactcctaatgttggaatgagttagacagaagtaacatgcagatttgtattcttctggcaaaatggatactccgcttttgcttcatgttctctgattagttggggttgatcttctggactacagtgtgaatctgatatgcgagaaccctattactaccaggattggcgttatcgacgatgcaa

SEQ ID NO: 95289 - DNA, 183 bp, Glycine max
  Clone ID: PAT_MRT3847_57058C.1
ctcactcccactcccaatcccaataacagtaaccggttttccttcttgactcgctcactctcttcaccacgctcatggcactgctcacaagtcctggtccatcgcgacggaccagcccaggagctgtataccatgactctcgacctcgcgcgactacgtgctcgctcacacctgcgtcagttc

SEQ ID NO: 95290 - DNA, 438 bp, Glycine max
  Clone ID: PAT_MRT3847_57059C.1
tacggctgcgagaagacgacagaaggggacgtatatacaacacaagaaacagacatagggaaagggacacataaaaatcatcacttcaaattaacctatatctctaaagattcataggtcgctatagagagagaaacagatgtcatggatgggtcgcaaagatctgaagtgtctttcatgagacatggttcatcacgacttgtttgggactacaggttattgtcaggggaattgaacatagtgaacaacaacgaacaccaaaagggtggtggttctggtggtgaccttaaccttaaagttataactacaccacccaacaccaccatccagagaagcccttccaacggctgataccgcacctgaaaaatctcagcagctatacgaccttcctttcccaagctctctgatatgcggcttctgcagcgctttctggaaaac

SEQ ID NO: 95291 - DNA, 551 bp, Glycine max
  Clone ID: PAT_MRT3847_5705C.1
aacacaaattcgggaattggattctttttggattacactatgagagcctgctttaatcttgaatttaccacaaaatctattgtttgtatgagggtgggaaagggaaacttaaaggcctggtaaattcaaaccaagacggaaggaaattttgggggcgggtggggtccatggcccaggaccaaaaaggggcgccggttttttttgacgtaacggaaaaccaaacccgcttctaaaattttcaggaatgaagtttcctttctaaaagtaaatttaaaaactggtaatgaacccttgttgggccccggccttttcctgcccaaaatatttcaggggatagctgctccccaggcaaaatatttactcgacacccatatcctcattatttttccaagcctgggtgagtttaaaatcacgggcggccttattaaaaggggtcctaaaaggggggcacaaaagcattaaattttggcctgccttttttaacacccccggggaaggatcccctgtaaccgggactttgattttaacaccattttttgaaggaggaggaa

SEQ ID NO: 95292 - DNA, 347 bp, Glycine max
  Clone ID: PAT_MRT3847_57060C.1
tgactgcgggcggcctgtcctttttttttttttaaagcacatatcctcgctagctagtcccaggtagaggattacctatctctagatgccaacttatacaccagactgaattattcgtaaatgtcgacccggagctcaaccatacgggccaacggacccattggcaactgcccctgggatgcacctgacctggcgaatgcccaagtcatacactatgttatacagccgacctgaatcatccatttttcccccgggttgacatgacctgagaagggtcgtacctccaggtttgacggatgaaatgacggccgaccgcatgactcctgataagtcccagaatgccccac

SEQ ID NO: 95293 - DNA, 249 bp, Glycine max
  Clone ID: PAT_MRT3847_57061C.1
gagaaattaccatccattattacttcctaaacctcaaaattttaaccttaagaaaccagggtggcattaaaaggttaccaaaccaacctaacccggaatttggattaaaacccgggccaaaaattaccattcattattacttagttaacctccaaattttaaccctaagaaaccagggtggcctttaaaggatagggaggccggctgatcagcattcccgccggcctgctgttgagcaccattcttaag

SEQ ID NO: 95294 - DNA, 106 bp, Glycine max
  Clone ID: PAT_MRT3847_57062C.1
ggtgttgaataaccaatgagccaagcattgctatatgagtgttgatcaacaaacacccgggacaaaagtaggcatcgataccagaccatattcaagagcgccacta

SEQ ID NO: 95295 - DNA, 271 bp, Glycine max
  Clone ID: PAT_MRT3847_57063C.1
ctatgaatgctctgttataatttatcttactgactagtaaaaaaaaaaacaaaaaataatggcagggtaaaaaagaacaatgggcgggaacaaaaaatatgtgaaatactctgtggccgtccaaaaagaaacgaatcgaaaccatcgcgtacttgcaactaaaaaagatttaaaattgattaactaaaaataataataattggccgacatgggggggcgccttttcaggagaaaacactgtccacccccaacttaataacccatgcttttt

SEQ ID NO: 95296 - DNA, 261 bp, Glycine max
  unsure (1)..(261): unsure at all n locations
  Clone ID: PAT_MRT3847_57064C.1
ggagaacacacattctcagcagggttgttctcattcaaaccattacaaaagcccaacgtttgtaaccaaaatcaaaatgaattttctccaaatacatacccatcgaaacctaccccagataagactacagtgttcaaaccaatccaacaaccaaaagttcagacaactctaaatcagctaacaaaaatttagctgaagatttcttttttccaccaaacccagcttccacggcancattggtccccaacccatttcagcctc

SEQ ID NO: 95297 - DNA, 152 bp, Glycine max
  Clone ID: PAT_MRT3847_57065C.1
ctctctgcttcgccaagtcaggttcaagaattcttgatacacctactatgttggccagcagtggcaaactgataggttaggcgctggtttaagttccttggatcaagaatcgtctgataaacttgcagctttagcacagtccctatcaattc

SEQ ID NO: 95298 - DNA, 906 bp, Glycine max
  Clone ID: PAT_MRT3847_57066C.1
gttgatcgcattttattgcgattaaaaattaaaagcatatagatataactaggttaacaattttaccagttcttttggaagctaatatgacaatacaccgaaacgccattgagatgtagaaaagaaaaggggaaattaattacattcaaaaagaaaaagtcaaaacttcaaaaaaaaaaaaaagaacgaactttgccttgtctgcggttggcatcatatataaactattttatttccaattttaacatgcacaaaacgagaaacaaaatagatgaaagtaacatcaaacaggcagaaaaaggactataaccagggggagagggagtcgaataattaacccctgtaagtggtttgatctactgtgtacggaggtggataagttggaggagcaccatttctgtaatcatacaggccatagctagtctgtgctgaataagaaccactagaccggtaaccagacggacccaaattgtcaacaggaatagagtagtgctgttgtgttattccagccgggctttgagtgtgggaagttccataggttgctgtgtaaagattagcagttgctccatcgtatatggtctggctggggtagttgaatggaacagaaaatcttgcaccgggactgggttgtagagaaggtgccaggttcctgcgactgaaagatgatgagtgcgcactgctaaatttggctgatttggctggacgtgaagagctggatccactgcctcgcttgttctgaggtttacttccggatgtcgaactctttttcttttcagccttggctttctccagaagggtagcccacttcctcaaattatcaaggttaaattctgattcaagcttgtgatcttctacacatttgattatagccttaatggaattcaactccgaagtgcttgaatcatc

SEQ ID NO: 95299 - DNA, 362 bp, Glycine max
  Clone ID: PAT_MRT3847_57067C.1
cgttttttttttttttttttttttttttattttttttttctttttttttttttttgattatggttatattgtttctatacattttaactatttgttgatgctttgtcaagtgattctgcatctacggccaacagcccatgaaacagaagggaacatggcgagacacacggcactaccacaacactgccatcacacgcaaacaagccttttgcttcccaaggctgaccaaactcaacaagggcgccatcttctacaaggcacaaaaacggcggcttgacatctgaggagcagtggtaaacactggccacaccccagaacttgaccttggacccccaactaacgtcacaggggcgggaggcggc

SEQ ID NO: 95300 - DNA, 495 bp, Glycine max
  Clone ID: PAT_MRT3847_57068C.1
gacaaggccatcatcatggcagctgcttccccaatggcaagccaactcaagtccaccttcactaggactcttgtagctcccaagggcctctctgcctcttcaccacttcacctcgtgccttctagaaggcaatttagcttcactgttaaggccatccaatcagagaaggtacaccacttcctccaatttatgttctaattagtaattactctcttttcttgttatttatctatctaattctaaccaatgtcctttttgagctagtatggatgacccttttcttttcttcttggaatatactagtcatgttaatgtagattagggcaatatattcatctttcacaatttaattttcattgtgaatatgttatcatgtatccgatttacatttacataaatccgagtcctttgctaacactacaattctataatggtattggaatctaggatagagtagtatcaaagaacatcttttggaaaagtttaatctcattg

SEQ ID NO: 95301 - DNA, 462 bp, Glycine max
  Clone ID: PAT_MRT3847_57069C.1
attcctcgaatcatcacatctcagtatttagcttcattctcacattcaatcaggttttttctctctctagttaattccttgaatcctattatctttgtatcattttcgtgagtttcccctaaatcaactcttcacttgatttgcacaacgttgcttcttctctcaagttagttcgctgaatccttacacttctgatcgatatccttcaatctcaagtattttttgttggtttgtgtttgtagttccattgtcgaggtgcacaaattcgtggtggaaaaattgttctcttctatcaggattgacacgtcaggcacatatttgatttaactagaaatgggttcacactttgtaatgtacctagctaaggtgaaaggtttgatcatgacttatttcaaatctattatgcttactaagttgcctgagtatattctcatgggatgagatataagtccttcaagctgt

SEQ ID NO: 95302 - DNA, 544 bp, Glycine max
  Clone ID: PAT_MRT3847_5706C.1
cttgagtgtggggcacatcagtggttgcacttctcccgccgacctctcatctccacaatggccgctgacctgtcaggaaaggacgttgaacgcgcccagttcgtgttctccatctacgactccgatggcaccggtgccgtcgactgctgcgagctcggcggtgtcctcagggccctcaacctgaaccccacctgcgccaccatcgagaagctgggcggcaccaagaagaagggcgagaagaagctcaccctggacgagttcctgcccatcttcagcgcatgcaagaaggacaaggaccagggcgtgtacgaggacttcctcgagtgcctgaagctgtacgacaaggctgagaacggcaccatgctcggcgctgagctctcccacaccctcctctccctcggcgagcgcctggaagacaaagaggtcgatgaggtccttaaggactgcctggaccccgaagacgacgagggcatggtccaatacgttccattcctcaagaagctgatggcggcttaaatcaacattctaaaggaagacacctttc

SEQ ID NO: 95303 - DNA, 187 bp, Glycine max
  Clone ID: PAT_MRT3847_57070C.1
accgctcctacaacagcagagaaaggggcacaaatgggattgatacttgaaataagtaggaaccgcgtttggaaatccaatgtccttggattcatcactcccacagattccatcgcatgacactaccatgactacaagtgcctcctcactcggaatgtatccatccgatggcgtatctactccggaa

SEQ ID NO: 95304 - DNA, 519 bp, Glycine max
  Clone ID: PAT_MRT3847_57071C.1
tggagcctacataactttctttacttgaaagctttcttcagatttattttttctttggttacagatatttaatcagggtaattataaccaggtctaaatagtttagtctctgttatcaaagtcttcttggtctggattctgtaatttaataatcatatttttatattaagtaggcacttttaaaactttcattttttcttctttgaatgaaaagaaacaaaatatatcggttccctcaacaaaagatgtatttttgacacaaaataaattgacatcaatgtatgccatttcatcacacatttgtcattttttctttgtttaaattgcgttgtccgcaccaatcatttctttgggcccttaaacttttcatctcttaacctttctctgttgttttgttgactgaatgtaccgtttaaagactgagttttgtatctaagttttcctggtggaggtaggcaacatcttttttctcttcctcttcttacttttttaagtacaattgatcatcaatgttttgat

SEQ ID NO: 95305 - DNA, 2100 bp, Glycine max
  Clone ID: PAT_MRT3847_57072C.1
gtcagaatggccccacccaattcgttagtgggtctaagttgccccttcctgatgaaaaacacaatgaagagatgcactccactcatgatgcacccaataaagaacaacctgattctgattctggctccgacacattagaatttcctgaagttcctaaggtatcagtccagccaaatgcaaatgttgccacagctccagaaatggttacacctttgactatggaacccctcgaggttgatcttgattcaccaagacattctggagattttgcagatgcaaaacaggagcaagttgaagatagatcatcagttcacaaagatgaaccccacacttcaatttgcaaaacggagaataaacagtttttgccattcatctcccctccatctgtatcatctggatcattttctgcaagacatagtgactcacctccctccttctcaagcacaaaatctgaaggcaatgtggacttacaggatgtgttggctgctgcccatgctgctgctgaaactgctgaacgtgcagcagcggcagctcgcagcgcggccagccttgctcaactccgaattaatgagctgacaaagaagaaaagtagtgaacatgtgcctgacagcagtagctctgagaacccgttttatgctggtcgcagtaatgaatctccaacaataatagaaaagcatttcactgagcaaaatactgcaggtaactctgatgtccataatggaaacgatgttgaacatcaccaggatcattatgcttccccagactctcattcatcaagttttccctcctttgagacacttaaggaggattttgcttcttccctacccaatgatcatcgtgtattggatgacaagtcctcgagtcaccagcctaagagattaccttcaatggacgacgactcgtatttctcataccccaacttatttacctctcaaaactctaatgtgggatctcaggctcattcagataacagccgttcccctcattcagataacagccgttcccctcatgatctgtgatgcagaattatcatccggccacccatttccttatgagtctcaagtcttgcttatgagtgtgttttatacttctgcagtcagtactttatttttattttattttcaaagagcatgcaattcttggctttgttgtctacatagtaaatattaaggctggctttgcataatgatggatgggcactgccactatataatttctttggttcagaagcgttactgtttgtggctggggctgcaatgagtgtagaaatcttatagtgttggaataaaagcattcagcttcattttctttatgttcttgtgtttaaacgccagctatagaaaagatatacgagttaaaaattcgtagaatattatccattttaatgctttcagaacttcatttgtaattattgtaatactgtggcggcatgttagagtgtggaatatatcacttcatagatatttgcatgatttttcttttgagtaatatgtaacacattagccttattgttgccaaatctgttagatatgcatcatttgacaagaaattgttcttaccttttcaaaacacatatttctcgtaccccaacttatttacctctcaaaactctaatgtgggatctcaggctcattcagataatagccgttcccctcatgatctgtgatgcagaattatcatccggccacacatttccttgagagtctcaagtcttgcttatgtgtgttttatacttctgcagtcagtactttatttttgttttattttcaaagagcatgcaatccctggctttgttgtctacatagtaaatactaaaggctggatttgcataatgatgggcactgccactatgtaattgctttggttcaaaagcgttactgtttgtggcaggggctgcaatgagtgtagaaatcttatagtgttggaataaaagcattcagcttcatttttctttaaaaattttttttgtttcaagggcagcaagccagcagatacccgagttagacaaccggtggatattagacatttaatgctttcagaacttcattttgtaattattgttatattgtggaataaatcccttcatagattttttttccc

SEQ ID NO: 95306 - DNA, 481 bp, Glycine max
  Clone ID: PAT_MRT3847_57073C.1
gtttctttttttaaaaaaattgaatattaattttaagtctaaactatagataaataaaattaagtgaaatttataatatttctacgagaatgtgtgaagggagcaaaaggagagtgtgaggagagaaaataatattaaggtattgtttcttagatttttatgttgtcatttaattacaaaggttatgttagaatatttttgagaacatatttttataaattccaacatacaatatgaaaaagaaagaacttgttactttgagaataaaactacttcatttttttagaataaatttggccaatctctactaaaatctaaatataccaatacatcattaataagagtgataatgaatttagactccttaaataaagtctcatattaaaatttcacgaatgaaacctaactaaagatgtttaaagctttataaaattctgtttagatattacttaaagtagtgtttgaatttataacttaattg

SEQ ID NO: 95307 - DNA, 737 bp, Glycine max
  Clone ID: PAT_MRT3847_57074C.1
ggctcgagaaatgacaggaaaaaaatgcaataaaatcacccatctaggtcctttaatttttgatgataattgttgcattcatcatcaatggtgattgatattcctggcatcctcaaagaacaacagctatgtatttgcagcagagaataatagcaacccagcaacacagtttcattaactgtttgtattttgacaagattttgcctatttatcaaatgcacgtttgtagtttaaaagaaaaaaaaaaaaaaaaaaaaaaaaaaaaaaaaaaaaaaaaaaaaaaaaaaaaaaaaaaaaaaaaaaaaaaaaaaaaaaaaaaaaaaaaaaaaaaaaaaaaaaaaaaaaaaaaaaaaaaaaaaaaaaaaaaaaaaaaaaaaataaaaaaaaaaaaaaaaaaaaaaaaaaaaggggggggggttttaaaaggaaaaaaattgacaaacccggggtgggaccgaattaatttttttttagggggacccaaaaaaaaaccagcggggccgaatttttaaaaaggccgggaacagggaaaaccttggggagtccccaaaaaaatgggtggggaaagaaaccccctttgtaccggggggtaaaaaagaaaaggggcggaggtaaccccctttccaaaacggtccctcgccggggggggaaggggccccccccccggtggggcccattaaccggggggggggggggggggctgccccagggagcctctaaattgggagagcccttaa

SEQ ID NO: 95308 - DNA, 178 bp, Glycine max
  Clone ID: PAT_MRT3847_57075C.1
gactccttcaattgacacacaacggcacccccaaagtcctcatcatcatcatcttcttcttcttcttcaattgacacactacggcaccaccaacgttattttttcttgcaggtacctcaacattttcttcatctacatgaaatttcagtcgcaatttatgaaggaagaaatttgtcgt

SEQ ID NO: 95309 - DNA, 181 bp, Glycine max
  Clone ID: PAT_MRT3847_57076C.1
ctctttccttggctcaaacaaaacgtaattcaaacggttctacgttgtgcagacaactatgaggagcacccagctaactgtggctgagaaatcatatgaggcagattgactgtaaacaaaatgtccttgctcgagtgcgtgccagtttgacaagcgagatactggagatcatctattcaag

SEQ ID NO: 95310 - DNA, 606 bp, Glycine max
  unsure (1)..(606): unsure at all n locations
  Clone ID: PAT_MRT3847_57077C.1
cggaattaccgcctcgacccacgcgtccgccgatngtgaagaaaaattccagggagaaaggacgagggagaaatggaaggttttttttctagcgagcggaaacctgggtctaacaggatgatgagcaccgcttgctggagacgtacctgattttcatctatagtatcaccatatttcataagaatgttttcttttcagcccccccccttgtgtggggcagagaaaatatctccctcctttcccccccccccccccccccccccccggggggccccggccggcgggccggggggccccccccccgcggcgggccgcgcccgccccccccccccgncccccccccgggccgcccccggggcccgccgccgccccccccccccccccccccgcgccgcccccccccgggcgcccccccccccccccgcccccgccccccccgcgcgccccgcccccgccgcgcccccccgcccgcccccccgcggcggggccggcccgccccccccccccggccccccgcccccgggccgggcccgccccgcgcccccccccggggggggggggggcgcccccccccccccccccccggccccccccccccgccccccc

SEQ ID NO: 95311 - DNA, 197 bp, Glycine max
  Clone ID: PAT_MRT3847_57078C.1
ctcgagccgcggctagagcggctcgagacggctgcgagaagacgacagaagggggttcttagaccgggcatttctccaacttgggagagaacattctttttcttaggaagcaaaagttattaataaacagaaaaaatccttaatatgaaaatccaaagttaaaacaattcaaagcagccatatacttactaacagga

SEQ ID NO: 95312 - DNA, 365 bp, Glycine max
  Clone ID: PAT_MRT3847_57079C.1
gtgtagagaacaaatgaaatgttttttaacccggtgcccaatacaaggcccggtccaatcataaaagaaaaatgaaagggactctcttccatacagaaaagaactttacttacaaaaaagggaatgggctttgcttatacaaaacaaaagataggggctcccgttctaatactaaactagagccgaaccccaagcttagcttacctaccctggcatggcatgacttttttcttctgtagcgtaacctcaattcaatgccctgggcgttgcaatacaaagactggaatgggacaagccttgcccaacccaatttaattgcattgcaaaacattctccttttattaggtggtaaaaaaaagaacagg

SEQ ID NO: 95313 - DNA, 316 bp, Glycine max
  unsure (1)..(316): unsure at all n locations
  Clone ID: PAT_MRT3847_5707C.1
gtcgcangcacgcgtacgtaagctcggaattcggctcgagntcccatttcctcttctctctnctcncnnttcgnctttcnctnnntctctctttcagatnnctgnctctctcatctntntctctccgnaagggcaaancctaaagacngnntgcacncaccaangatcgnagtggcgnncagatcgnggggnnttcgttttncgncgantagatcnattgnnatggannannatggnttgaacatgcccaattggggttatnacgaaccctcagagggggacatcttggccttcagctcagcctggtatgactgaa

SEQ ID NO: 95314 - DNA, 223 bp, Glycine max
  unsure (1)..(223): unsure at all n locations
  Clone ID: PAT_MRT3847_57080C.1
cttcattgttctcttcttcaagacactcatcaaaccttactatatctccaaacaccgtaacttaccactcccacctgactccataagattaccttacatagaaaaaacctttcaaatgtattctcaagacccaaatatcttctttacctcaaaaataaaaaagtttaactctatatttaantcccacattctgaattatccctacataataatttccagcccc

SEQ ID NO: 95315 - DNA, 465 bp, Glycine max
  Clone ID: PAT_MRT3847_57081C.1
aaactttgtgctttagttctatgttggataaagtactacgtggacattttatactagaattgaaatatgatcttttacagacatggtgttgctttacgatggactaattattgatattacccacaagcgaaattaataataaaccttaattgcgatccttactgttcaaccccaagccttgcagacaacagatcgttgttgtctctttcgtaacatctgtcttctgcacagggatccattttctaccttccagcaccctatgatggaagagggcaacctttttttacaactttaaccttaatgagctgtgttcaacacaaccgcgccacatattaaacaaaaatttctgaaagcgggtgacatttttaccatgatacttgtatctaaggtcacctgtctggacattaccattgaatgggcggcgctggtgcatcgaacaagaaatagtgaggctaatgggggcta

SEQ ID NO: 95316 - DNA, 271 bp, Glycine max
  Clone ID: PAT_MRT3847_57082C.1
gatacctaccagaaattgctaaatcaaccttcatggctacattactgcatacttacatgtcaaacaagtggtctcattggaaggataccaaagtgcatgctggaagctatcctcctgtcttgaatatcactgcattccgtcacaactaagataggtagcacggcccactttctggggaatcgcataggagatgtgcaccgggtttcacacgcaacagggggtttcttttttgatcttacccacagacagatgcggctatgctgactaacct

SEQ ID NO: 95317 - DNA, 1078 bp, Glycine max
  Clone ID: PAT_MRT3847_57083C.1
cggacggctgcgagaagacgacagaagggggctcccagcagctaaggaatcaaatcggaaattcagactctcactcttcccttctcccctctccttagcttccactcattgtacacaaaattctgcagagacagagagaaaagtgttgaacatggcaggaagagaagttcgtgaatacaccaacctcagcgaccccaaagataagaaatggtgcaaggggaaagataagattgacgatgaagacattactttccaacgcatggttgcaaagatgcgagaggttgctggggagcgcggaggttaccttcatggacgaggcgccttggacagtgatgatctactttatctcaaagagcaaatggaagccgaggaggatgcagaacgcctcctgcgtcgcactgaaaaacgggcatttgctgcatttaagagagctgcaagtttagcagattcttcacctgcatcagtaccactggcatttcgggttgagccaaagcccaaaagtgggatcaggcagcaagacttgctgaagaaagttgttgagattaaacctaagcggccaagatctgatgcaaatcgtaagcctgatcacgatccttcgaaagagaaagagcagtctttgccaagaacaaagaaagtggaggagcaacctttgtctggatcaaagaaagcagaggaacatgctccattggggtcacaagaagccgaagctaagcctaaggttgaaagctccagtgggggattactgggcctggcatatgatagttctgatgatgatgaatgatttggtaattgtagtttgatggtagatctcttctttccatcattgtctttgtaggttgtagtttttagtacagaatgcttgatttatttagagaaagtattaaattgtagtgttcaaggtataaaaagttccttgtatgaagattagtcttgaagggtgggaaaagaaaatgaagtattagtccattactctacaaccagatccaagatacaacagctttatataaaaaaaaaaaaaattttaatgtgccagttttgtttattcttgaaatatgatgtgggtcctggaggaattgct

SEQ ID NO: 95318 - DNA, 911 bp, Glycine max
  Clone ID: PAT_MRT3847_57084C.1
caggaagatttgttcgtgaatacaccaacctcagcgaccccaaagagaaaaaatggggtaagggaaaagataagattgacgatgaagacattactttccaacgcatggttgcaaagatgcaagaggttgctggggagcgtggaggttaccttcatggacgaggcgccttggacagtgatgatctactttatctcaaggagcaaatggaagccgaggaggatgcagagcgcctcctgcgtcgcactgaaaaacgggcatttgctgcatttaagagagctgcaagtttagcagattcttcacccacctcagtacctctggcatttcgggttgagccgaaacccaaaagtgggatcaggcagcaagatttgctgaagaaagtcgttgagattaaacctaagcggccaagatgtgatagcaatcagtcaacccctgctagtaatgctcctgttacaaatcgtaagccttatcacgattcttcaaaagagaaagagcagtctttaccgggaacaaaagaagtggaggaacaatctttgccgggatcaaagaaagcaaaggaacatgcttcattagggtcacaagaagccgaagctaagcctaaggttgaaagctctggtgggggattactgggcctggcatatgatagttctgatgatgaatgactggcaattgcagtttgatggcagatcagttctttccatcattgtctttgtaggttgtagttttagtacagaatgcttgatttaatcagagaaagtattaaaaattgtagtgtttaggtataaaaagttccttgtatgaagggtgggaaaagaaaatgaagtattagcccattactatacaactagatccaagatacagttttgtatgcgatcatcgaattttaatgtgccagttttgttaattcaagaagt

SEQ ID NO: 95319 - DNA, 299 bp, Glycine max
  unsure (1)..(299): unsure at all n locations
  Clone ID: PAT_MRT3847_57085C.1
tgcacgcgtacgtaagctcggaattcggctcgagngntcctccgcctctttgaacccagattcgaggcttcccctggccgagntatgtcttcgccatggcgctcagcgatgcanatgtacagaagcagattaagcacatgatggctttcatcgaacaagaagccaatgagnagcagnagaaatcgatgcaaaggcagaagaagagttcaacattgagancggtcgtcttgtgcaaacccagagattgaagattatggaatactatgagaagaaggaaaagcngatcgagcagcagaaga

SEQ ID NO: 95320 - DNA, 562 bp, Glycine max
  Clone ID: PAT_MRT3847_57086C.1
cacgcgtacgcccacgcggcctctttccttcttcttctttttcttcttccttcatagcaaaagccatggccacgagacccgagagtgaaaaagaccctccacaaccaccttcacgtggctttctggccacagtacaagaaatcacaagaatctatagttcactgccacctagaccttctattgaagaagtagaagctgccacgtccactgtggacaccctcaacaacgaggagcaaatcaaactcaacgaaatctcaatgcaacaacaacctcctcacgatgatgtccctcaagacctcttctctgtcctgcaacaactcaaaaagactatggttctgttccacactcatcaacagaggagagatgcgctttatcttcttgagcttgaaaatatgtttcaaaccttcggtgatctcattcagagggcttctgaattagtttctggagatacccagaagcaaaaacttcccactatacccgaggaacacgcggtgatcactgaggaaagtgaaactctggtgaaggaagagaaaggaagacacaagaatgttttccatgtggt

SEQ ID NO: 95321 - DNA, 545 bp, Glycine max
  Clone ID: PAT_MRT3847_57087C.1
gtgaaattgggttattaaattactatttttattttgaaataaactgctcgcattcattatttgacaatgtggattgtagtataatacaatatggataatgttttgtagagagataacaaaaatataaaatatgtttataaaaaatatgatgtgacaataagagaattagagagaaaacaagatatcaaataggtaatagttatcattactcatattatattatagttgtgacacaaatactaataaaatcaagaaaatcatctgaataatgaaattgtactccaaggtctaaaattaaattcaccccaacaaagacaaaaataacaggtaatccaaaatcgaactccaaaatgcatggcaaatagtagttagcatctagtatcacaataacaataccaaatacaaatgaacagagcaatcaatgctttgcagtaagcgtttgattctaggtttataattgattttgaatttatttttacatgttttggataattcataaactttattaatttgacagcataaaaaatgaagcaattcagtgttag

SEQ ID NO: 95322 - DNA, 231 bp, Glycine max
  Clone ID: PAT_MRT3847_57088C.1
aaaaaaatcgggactggttcccaaagggataccgcctgccccttgggggggtactttttaaaatttattataagcggctaaacaaaaggcaccagaaagggtaataatcggttactgggggcaaacatgttacggaccgcaaccttaaaaatataaaacgggggcgcataatgggtgaaaaaaggcgcaactaatggggggggcaaaatacattaattgcggggggaaaac

SEQ ID NO: 95323 - DNA, 751 bp, Glycine max
  Clone ID: PAT_MRT3847_57089C.1
gtcattcccagcagagttattaatgccttgatcgcttctcagagcaaggatctgaagctcgttgctggagatgttagccagaatactgaaaatgaacaatgtgctgaattctacaatcaaccgtgggttgaggatgctgttgttcgctacctgacccgaaaaaatgctcgaagtgatgctcctggaaacatctgagagataattgtgaaatagtaattgtttttcacttgggtggtggaggtggttagttttctgataccactttaaggtcttgtcccaacattgctaaagtttctattccatccttcatatttatgttttggagtagagtactgacagtacgttgactcgagaattttctgatcgcccctggctcatttttggagtccctcaactgttgtatctgtacctattgtttctcatccactcttctactcacccattctagtttggtaaaatgagccaagaacaacaatatatgtagagcatcaagtcttcacaatggtatatttgagatggattagatatctaccttgtcctttttcccaggcatgtagaatgcaaggattacactaatgtctccgcacttcaggaagcttcattttactgtatttacttaaattatatattattatttatttgttctcctctgggcatcaaagactataaggcataagctcttcacggcctatctgatagtttgaatctacaaggtccgttcgttcgggaattgagatgaatattttgaatc

SEQ ID NO: 95324 - DNA, 243 bp, Glycine max
  Clone ID: PAT_MRT3847_5708C.1
tcgacggggacgagatcacattcattcacgcggccactgttagaaagggttgccgcacgttaataccggaaacaagagaaaagtgttacttcattgcaagagtattgcatgttctaaggacgagaagctgtacgatctcttaagggaaggaaaacctctgactgggtgggtcactgacttccctatggagtttaattttgaggctcagcagatgtgctgaacactctcctagttgatattgga

SEQ ID NO: 95325 - DNA, 549 bp, Glycine max
  Clone ID: PAT_MRT3847_57090C.1
ttagcattcacaaagagagcaccatcatccaaagaacgtcaagattctccacattcaaaaccattagattcatgggttttctaactctcactaattacttgatttttttgctcatattttccagcttctatatgggtgtaatctctgtgaatgataccatcacatcaaccagattcatcagggaccctgagactataatctcaagcaacggtgacttcaagctaggattcttcagccctgaaaaatccacacatcgctatgtagctatctggtatctcgctgaaacctacatcatatggatagccaatagagaccaaccacttagtgatttatctgggcctggggtgttcaaaattcacaaggatgggaatcttgtggtattgaatgcacaaaatagggtcatatggtcaacaaatgtgtcaattactgctaccaatacaactgctcaacttgatgattcgggaaatctgatcctgcgtgatgtcacaaatggaaaaacattatgggacagtttcacacaccctgctgatgctgcagtgccatcgatga

SEQ ID NO: 95326 - DNA, 399 bp, Glycine max
  Clone ID: PAT_MRT3847_57091C.1
ccaagttattattatatctttttccagagcatctaccattatacctacaatgatagatgctctggaaaaagatataataataacttggcccggagcgtctatcattggagggttaacgggcgatgctctggaccgaggtcttattatacctactaagatcgggcctacggttggtgttctcaaccgaaaagagcgtttacctatttttttaacagatcgtatgggagggcatactttaggagaattttcacctactcttaattttctaggacatgcgaaaaaggcggacagatctcggcggtaacggtaaatttaacatatatttttagaccgggacctagtaccgaaccttacaaaacggaattcttattaaaatgaaattcagatcatttcttttat

SEQ ID NO: 95327 - DNA, 463 bp, Glycine max
  Clone ID: PAT_MRT3847_57092C.1
gaattcaacctcggcgcgctgcccttccctgcctcctcgaggctcaacattccgacaaccttaaacacagggttgttcagcaaccagttctcgtcatctccgttgtctttcggaggcgacgttaactcggtctcggtcactaacaatgctttgtcaggctttcagcttgacgcgactcctgcaactgtcctgtcaaattccttgatgagccttgcgtccaacaacaacactcagaataataataatttctgggcgctgcaggatcggtcgcaaggctcgacactattactgtctgattcattcaacagtagtgcaatgcagtctatgcagcaatctctgaacgttcatagcagtcttgcttcttcgattgagtcactgagctgcgtcaaccaggacttgcatctgaagatgcagcagcagcgttacgccacaatgatgttcggtggggacagctaccaccaca

SEQ ID NO: 95328 - DNA, 543 bp, Glycine max
  Clone ID: PAT_MRT3847_57093C.1
ctgcttgggggggggggggggcacttatgaaacagagggatacgcggcgtatatgctaagaggcgagggtctgcgattcgggtgatgggcgataaaaaacaaggagatagacagtaaataaagctgtggggtggcttatacgaacaacgaatctgctaaacgaagtagggcattagagttggacagagcaccgagtcaaaacaaaacggcgcgccaagttaggtgagctgtggctcccaggggctaactgcatagggtggaatatgtgggtgtacccaggtcccgacgcaggtgaccagtagagttagcatattaggcccctataaattgcacgttggccgcaagcatgtaataactgggccgaacacgaggggggccgttggctcgagcttgaacggactgtcaagagaggtcgctgggctaatggtgactgtggcaaatatttgtcggccgcgagagatatcgattgcgcaaccggtagataaataatgtaggatggaggacacggaactagcgtaaagggcacaaggcaggagtcgagcg

SEQ ID NO: 95329 - DNA, 360 bp, Glycine max
  Clone ID: PAT_MRT3847_57094C.1
atccttctatgggaatagtgcagaggattcttggctaccagtttttgtgaatcgactctatcctgaaagtcaagtacctgcagaagcttgctttgtaaatgttcatgtggcatcggacgtgctggcttacccacctctgcttgtattagtactgcagtcatcactcgatcctcatatatgaccatgaggagacccgcagcactagggataggtctgaaaattgttcttcttactagagttgatgcttttccaggagctgtacatgctgttgttcatggcgttaagactgaaaatgtgagatctgacgccagtaatcctatgctgacgcgactccatgagaactgtaagagtctcaaatat

SEQ ID NO: 95330 - DNA, 597 bp, Glycine max
  Clone ID: PAT_MRT3847_57095C.1
ggagtgtccaattgagggtgaacaatgctgaattggctcaaagatctgcaccagcaatggaacatggtgggaagttacctagagtctcaagcagtccattgctcaaaacacttggatctcaaatgggtgcccaagagaacaagaattcagcaattcatcaggagcaggagaaaatggaaggggccaattctcaagaggaatctacaatttctgagcaaaccccaaatggggaaattggggtgaaaacttcccaagatattatgaattccaggaaaagaaaagcttcttccaaaggaaaagccaaagaaacttcaaacactactaatcctaccaagggtgttgaaggcagtgagtattcaaattcaaagcgcagcaagccaaatgagggaaatgaaaatggccaagtgaaggttgaggaagagtccaaagcagaggaagagaaacagagcaaaagtaactcaaaacctcctgagccaccaaaagattacattcacgtgagagcaagaagaggccaagccacttgacagccatagtctaccataacgtgtacggagggagaaaattagttagaggatgacgcttgtccagatcttgtcc

SEQ ID NO: 95331 - DNA, 607 bp, Glycine max
  Clone ID: PAT_MRT3847_57096C.1
aaaaaaggactaaaaccaaaattttttatgaatatggaggaatattaaaggaaacagggacttttgctaaaggaatatcttccaaaaaagggccatttatattttgctttttgaacaacatccgggatgaacaataaaatggaaaaagggttatccagcaaatgggataggaaacaattacatggaaaaaaatcctagccctagtcttaaaaagggtacagctggcaaatctgtctataatcgggggacacccttaaccctgaatgggaaatcttttaaaagtttcaccatcgggggggctttttcccaaaaaaatatgcaaatccagctattgaggcagaaaaaaaaaccccagctggagcaggccaagcaaaaaagggtttttccaaaaggagggcggaggccctaacctcaatggggggggaggccatcggtttctcgctaactggaacagaaaacctaaaaccctgtttttaaagttaagtcaagtcttaaattaccggccttaaccaaggggcctgggctatggcttaatactcttctttagccccgccttcaaggaaagccccaacaaggggatccttgcttacccaggatgctccaaagg

SEQ ID NO: 95332 - DNA, 574 bp, Glycine max
  Clone ID: PAT_MRT3847_57097C.1
ggctcgataattggatgacctcatttttcttttaatttctacggttcaaataaaatagctagagaaagtcacttataagcattgtttgctgaagataaactaccccagatagctaatagttctaaaaaacaaaagaatgtactcaagtctaatcaagtttggaaaaatgaaacagctattttcattcaaccatgttctgagtctgactagagactttaggaacaccgcttgtagtaatgatgttagtaaggacactgcctggggtgatgatggaatttcctgcttgaacatcagtatttgtttcagctttcttttgatccacacccatatccatactttgtggagggtgaggaacatttgtttgcacaactggaactgtctccatatgaatgtttgctgcaatcagctgcttcggcactgtttcagtagtagtggcccttacggcattaacatttgctgctgtttcagtagtagtagcccttacggcattaacatttgctgctggatccatcccagttttctgctgatccataggtgctgcctcattcacagcatgaagttgctgtaatctcgt

SEQ ID NO: 95333 - DNA, 496 bp, Glycine max
  unsure (1)..(496): unsure at all n locations
  Clone ID: PAT_MRT3847_57098C.1
cctcgtgccgaattcctgaagagggttcatatcatccgtctctaacattgaacgctactagcgtagtagttttttatgatgatatattcaaacgtatttcgtgctgctactggaagtcgattttactacgtcatgactgcgaatacattctactcgtgttcttgggacctttggttatcatgctccagagtaagttattcctggaagcctaatttgaccttcttttgcagtgaatgcttgctttttcacatacagaagaccggatatgataaagaatttctgcttaagttgaaagatgaaaaaactggaataagagaatatgaaaatcacaattgagtaaacatgaaactgattaattgtaaattacaaatatttttggacagtgatgtactgaacttcaatccactttanggccaattattaactctctttacacaagttgtggtttttttataatttattgngcttgatttttttatgacagatatgcaatgac

SEQ ID NO: 95334 - DNA, 446 bp, Glycine max
  Clone ID: PAT_MRT3847_57099C.1
tataggggtagtggattgacggatgcggtattgcttggcaaggatctaaatcgttaggcagggtgaatacgcaggctgtgaatgcgtgacaaccactaggccgtgttgaatgcgaccatgatgctctctgggtttttagataatgcgagagcctctcctgtgacactctatatgtatggtctctctactgaaacgtcgcacaagggaactaatacggctgaatcatgtggaacagtcgtgcacgctgctgaactggctgacgttgctgccatcggtcatggcatcggtgtcaggctatcgtgagcattacttgagagcgtgactaccttgagcgtcagcgatacatatcacatatttgtaggtgttgccagagacagttcgattggactcctaatgcctttattgcgtgggtgatcataccagggtgaatcatctactgcgggatc

SEQ ID NO: 95335 - DNA, 271 bp, Glycine max
  Clone ID: PAT_MRT3847_5709C.1
tagagcattaatgaaccagaggaatgaaaaatcgtctcgatgacctgcatataaaatggttcaggaaactgctctaaaccatatattcagctgtgggggaagtcagaacgattttggagctactcaggaaatggaccttcgcaatctcgatcatttgggttgttattcgttttcaggttcaagtaaagagatataataaatggtaaacatgtatctatccatttatatacaagatgcttatgcttaccactttcccaacctcttatactac

SEQ ID NO: 95336 - DNA, 425 bp, Glycine max
  Clone ID: PAT_MRT3847_570C.1
cccacgcgtccgctgacgcgtgggcaagatacgacgccggggccggaaatcttgttgtagcagaagtttgcaaagcgggggtggtggagcttacaatggggcggggggccgaattggaggaggttggaagagaggttgagggattggaggttgcaggcgactggctctctggactgtttgtaacttaaatgccgtcatcctcatacgcgttttcatgagcaatgtcaacaagcccttgttatccctctctagattgattcgttacaccaatggaaaggaggataagatagctgtggtagtctgtgccgtgaccgattacattagggtgtatgaagtccctgttctgaagtaactgtcctgaagtttactgatactgctataattagaattgataaggctgttgttgaattctttacctttgatca

SEQ ID NO: 95337 - DNA, 421 bp, Glycine max
  Clone ID: PAT_MRT3847_57100C.1
gaagtactacaaagaaacaaacaatcccactacgtccaggaaagacagaggcacagaacacaaaattcaaataaaaaaaaagaaagagactgttttttttttaaggaagccgacccttgataaaaataaaacatatataaaggatgatttgaccaacaaacaagacattccttacccattcttataggggggggtaggaaggacgaccctagcaaaaaacagacacacgaatgaggaaggacgctggcccgaccaaccaaataaattcaatatatattgaataaagaatgcagaaatgaataataaaaagaaagggatggatatggaaggtaagtatattccctacacgcaaagcaatcaaggaaaaaaagaaaaaccacgcacctacatcaatgaaagaaaaagcaacacataccttgct

SEQ ID NO: 95338 - DNA, 293 bp, Glycine max
  Clone ID: PAT_MRT3847_57101C.1
acgtacgtaagctcggaattcggctcgaggggaatgtactttgtgtcctctgtactgctgatccgaatgagtatgcccccagaataccgcaccataatcacagaggtcctcggagagcttcagttcaacttctatcaccgctggtttgacgtcatcttcctggtcagtgccctctccagcatattgttcctctatctggctcacaagcaggcgccagagaagcatatggccccttgaactcaggccgcctgccaacttcaggaaagaagacacagtggggatgccagagcctt

SEQ ID NO: 95339 - DNA, 127 bp, Glycine max
  unsure (1)..(127): unsure at all n locations
  Clone ID: PAT_MRT3847_57102C.1
cacgnncaatgcntgattgtcnggtnatnncgggncnggtcggatcggattcgggatgnangtgganaaagancgacggagggtttgattcggtgatggcgagtggaganantggggtctacaccgc

SEQ ID NO: 95340 - DNA, 573 bp, Glycine max
  unsure (1)..(573): unsure at all n locations
  Clone ID: PAT_MRT3847_57103C.1
cggccgctcaggcggcgggcgggaattatctttgatacacgagcgccacaatgcccaaagttcgtcgtactaagaagaccccgccagagggatgggaattaattgctcccactattgacgaattggataagaagatgcgtgacgccgaaaacgagccgcatgaaggcaagcgtcgcaacgagtctacttggcctattattagaattcaccaccaacgcagtcgttacatctacgatatgtattacaaaaagaaggccatctcgaaagaactttacgagtactgcttggccgaaaagatcggtgacgccaacttaattgcgaagtggaagaagcctggatttgagaagttgtgctgcttgcaatgcattcaacctaagaacactaactttggtactgcttgcgtttgcagagtccccaagactgagcgctctgaaggaaaggtcgtcgagtgcattagctgcggctgcactggatgctgctcaggcgattaacgattcacttcggcgtagcgccaccatgcactatacaccctatgaagggtattgtttgtattanataaaaactttgaacagg

SEQ ID NO: 95341 - DNA, 416 bp, Glycine max
  Clone ID: PAT_MRT3847_57104C.1
ttgggggggggggggggcagctgcaatggacaggagccggtaacgacaaataccccaaaactatagcccagaaagcgcacaaaacgcaaagactaggtagattagaagcatatctgcagagggaaatggaacaacccgagggcataaaagtaacagtcattcagcacaagtggttcatggagccacggttgtaaggagcccgttacgcttcagggtatgcttactgcagccattagatggagatagcctgttatttcaagtattagtactagcttgccaaatagtgctctgagcagcccaggataaagctgtgataatgatagtaggggagatgcaaagctcgtggatgtagtaacggccggtatagtgacttaggccagacttgctctaagaccagtgctaagccgtggaggagt

SEQ ID NO: 95342 - DNA, 247 bp, Glycine max
  unsure (1)..(247): unsure at all n locations
  Clone ID: PAT_MRT3847_57105C.1
acgcctgcaggacccctccccagttccccgggcgacccaccccggcgcgcaaacactccactcatcattattattttactccgagcgaggggacacccattccactcactcaaccactgagccgagtcacgcgtgttgagcgtctaaaacaaccacctttcttccactcctgggactctttcccttccttcgtgctccaagactcactctctctcnacctcgacctcttgccacttgggaggcactt

SEQ ID NO: 95343 - DNA, 398 bp, Glycine max
  Clone ID: PAT_MRT3847_57106C.1
aattcggcaccagattcatggctcttcatgctaacaagatattcaagtggcagcagcatctccatagtagaaaccactcgaatgttccaaagggtcacatagtagtgtatgttggagaggctcaaaagaagaggtttgtggttccaatatcttacttgaaccatccttcgtttgttgacttgctaaaccgagtcgtggaagaatttggctacaatcatccaatgggcggtctcactatcccttgcaaagaagaggcattcatcactctcacctctcaactacgtgcctcctgaacctgaaggatctatctatatatctgtcttcatttttcagcctgctgtattcaacattagagtgtttttcctactgactccactcttgataaatagatatgtatt

SEQ ID NO: 95344 - DNA, 252 bp, Glycine max
  unsure (1)..(252): unsure at all n locations
  Clone ID: PAT_MRT3847_57107C.1
aactacaccaataattattaacctanataactcatncctncccattaactccatcccgctaattattaaaaatatccgccgcccaccaaaacatcatatcaacttactaaaaaaaaataataaacaaatattactattaactcatcaactccaatcaaaaatcattcttataaattcaataatcaaaaaaacaactaacaaattcaatatataaccatatattatcccaactttttaaaattataacctcac

SEQ ID NO: 95345 - DNA, 1396 bp, Glycine max
  Clone ID: PAT_MRT3847_57108C.1
cccggctgcgagaagggaaaccagattaggggaaagaaagaaggaaagcaaagtagacgagtgattgcgttgcgattgacgacgacgaggaatcatgtcttccggcggcggcggtggtaagccgttcttctgccacgtgtgcagtcagaggattacgtgctccgatgagtcggaaccattctgcccgatgtgtatggaaagtttcgtagaagaatgcaaccctaacaatcccaaccctaatctcttccccgacagtgatgaatcttcggatcccgaactccccttccaccgcttctcacttctccctctcttgctctcatcagtctctaggtcccgatccgaacccgacgtgttcgacccgatggtcttcctccagaaccaccttcaggaccttcgcgccgacggtgccaacattcaagttgactttgaccatccttccaacgagaatcaaggctttcgccttgcgaacatcggcgactactttatgggccccggcctcgagcagtttattcagcagcttgccgacaacgaccccaaccgctacggaacgccgcccgccgccaaggacgccgtcgagaatctccccaccgttaccgtcgacgacgacttgctgaactccgagctgaaccagtgcgctgtctgccaggacgagttcgaaaagggttctaaggtgacacagatgccctgcaagcacgcgtatcacggcgactgcttgattccgtggcttcggctgcataattcatgccctgtgtgccgctatgaattgcccacggacgacgccgattacgagaacgaggtttcacggtggtgatgctgggtcgaggacaggtgggagcgacggtggaggtgggagtaatagaccttttcgcaggactgttaggatatatttgcgccatcctgatgctggtgactctgcgcaggacggtgctgaaagggaatggagatggagaagttgagattgaaatttatgttttgtttcatgttgaaaaactggaaactatcttgtgcagctctgagcttccgtgaatagattgtagcattgcaatgtttacagaagtccttgtgaggaatgcaagaaatgttatttcccgtggcaaggaactttgttcgatcaaaggtctttgtttgttatggtagtagatagctggaacatgggaatgcacgaaaacacaactattgagattttaggtactgtgttaatgagcgttgataagaaacttcccgttacttttgtacagatcatcttccaaacatccaatattgattatcgtccttttgtacaatatgaactagtcatggtctatattgctcctgtgtgtgtgtataaaacgttttaatttagaaaaatgttcttttgacctatttagaaaaggtttaatgttacttttgattcatt

SEQ ID NO: 95346 - DNA, 120 bp, Glycine max
  Clone ID: PAT_MRT3847_57109C.1
ataggggaagctggtgcgcctgccggtaccggactcggaatttcgggccagacctacgctttcgcttacgagttcttagacgcgtgggttaggagtaataggccggattattgacgccct

SEQ ID NO: 95347 - DNA, 229 bp, Glycine max
  unsure (1)..(229): unsure at all n locations
  Clone ID: PAT_MRT3847_5710C.1
cttnnaaatatgggggtttttttagcatatagggtcttataacacggaatcaagagaaaacatcctaaacatgggaggccagggatcgatatgtgcacccgaagctacggcaaacaaatggaaatgtattacattatgaatttcaagttcctggcatggcaaacataaagggaaactgggaagttgttgtatgtggatctgagttggcacatccatatatagacaaacc

SEQ ID NO: 95348 - DNA, 663 bp, Glycine max
  unsure (1)..(663): unsure at all n locations
  Clone ID: PAT_MRT3847_57110C.1
ccacgcgtccgcatttttcatcttcaccttctttttttcagggtagccacataaaagtattgtgcatgtgtttgccagagggagaaagaggcatggcactagaagcagtagtatatccccaacctcaagacccgtttggctacggaatcaaagacccttcttacaactacaacaacttgttagaaggtggtggaggcaactggggctttgaaaaagaagagcaaggttttgtcacttttctggagaaccaaacagagaattatccttatggagaatggaactgttctccttctccaccatccatgttgcctcacttgaatgcatcaaatcctcagtcttcagaaaccagcaacatacataacaacttagatagttcaatttccacccctgctcgtcccaaaaggcgcagaaccaaaagcaggaagaataaggaagagattgagaaccagagaatgactcacattgctgtagagcgcaacagaaggaagcaaatgaacgagtatctctctgttcttcgctctctaatgcctgaatcttacgtccaaaggggtgatcaagcatctataattgggggtgctatcaactttgttaaggagctggagcagaggctgcaattncttgggtggtcagaaagagaaagaggagaaatctgatgtgcccttt

SEQ ID NO: 95349 - DNA, 507 bp, Glycine max
  Clone ID: PAT_MRT3847_57111C.1
gcggacccagggcagcctgcggctcatcctgaacacgaagctgtgggcacagatgcagatggacaaggccagtgaaaagagcatccgcatcacagccacggacgctgaggaccagggcgtcaaggtcttcctgatctcggccagctccaaagacacaggccaactgtatgctgcgttgcaccaccgcatcctggctctgcgtagccgggccgaacaggaacaggaggccaaggcacccccacctgagccaggagccacccgggctgccgaggaggaagacagtgatgaggatgctgtgctggctccttcaggtgtcacgggggccggcgcaggcgatgacggtgatggtcaggctactgggagcacatagcagcggagccgctgtaccaggctgctgcttcgtcgtctgtctgctgctgcccatccctccctgcaggccgtgtcataggtggtgtctattgccggggtggccacaggctggatccgagtgtcccctctgcagcagac

SEQ ID NO: 95350 - DNA, 311 bp, Glycine max
  Clone ID: PAT_MRT3847_57112C.1
tagcttgcctcaatttgtaacacttagggattataatatcaaggttcaatctttcattatgccacctccccttcccatttaagtaaccaagaaaagcaacgtatttagtacgatatcttgcttcgctatgttgttataaactagctcttaaaaattcaagtatgccaaaaaaaaagtcgctcctggtgcttctgaatcaagtaatcggctacgatcatttacagaattgtgtaaccttaagaattttcaactgtacttccctaagaattaaattcaggcaaaccccagtgctttttgcaggccataacact

SEQ ID NO: 95351 - DNA, 1491 bp, Glycine max
  Clone ID: PAT_MRT3847_57113C.1
aggaacttggcatttttcggggcacccacataaaaatattttgcatgtgtttgcctgagggagagagaggcatggcactagaagcagtagtgtatccccaaccacaggacccgtttggccatggaatcaaagacccttcttacaactacaacaacttgttagaaggtggtggaggcaattggggctatgcagatttcaaccttgaaaaagaagaccgaacttgtgtcccttttcttgcgaaccaaacagagaattatccttatggagaatggaactgttctccttctccaccatccatgttgcctcaattgaatattgcatcaaatcctcaatcttcagaaaccagcaacacacagaacaacttagatagttcagtttccacccctgctcgtcccaaaaggcgcaggaccaaaagcagaaagaataaggaagagattgagaaccagagaatgactcacattgctgtagagcgcaacagaaggaagcaaatgaacgagtatctctctgttcttcgctctctaatgcctgaatcttacgtccaaaggggtgatcaagcatctataattggtggtgctatcaactttgttaaggagcttgagcagaggctgcaatttcttggtgctcagaaagagaaagaagcgaaatctgatgtcctcttttctgagttcttctcctttccacagtactcaacaagtgccagtggtggctgtgacaattctacagccatgagtgagcaaaagagtgaggctcagtcgggcattgctgacatagaagtgacaatggttgagagccatgcaaatctcaaaataagatccaagaaacggccaaagcagctcttgaaaattgtctccagtttgcatggcatgcgtctcacaatcttgcacctaaatgttaccacaacaggggaaattgtcctctattctcttagcgttaaggtggaagaagattgcaagctaggatcagtggatgaaatagctgcagcggtgtaccaaattctggataggattcaacaagagacaatctcgaattaagatctgaagttgagctaatttggcccaatttttttaacctgatcaagaagaccttattatatttctttctctttttttcaagttgtacctaattattgaaacggctgtggatcctgttgttatattctactgaagcgccttgatcgatgtgggggtccttggaggcagtttttggttgattccttcttattgtctatctagctacctctattttttatccttctctctctttctctctttctgtactttgggtggagaaggttgtagtgtattgtattgtgcttgagacacattcaagtgctctcagtcaattctgcttaccttgctttaatagcggtaggccatctcaatctcaaacaaaagccaatttgtcaagcccaaaaacagaatatctcaaagtcactttgaatgaaaaaagatagccaaagattttaggagattcacacataaaacccaaccc

SEQ ID NO: 95352 - DNA, 353 bp, Glycine max
  Clone ID: PAT_MRT3847_57114C.1
ggctcgaggcgctacactgaagaagccacttttatttcgaatggttcgacccacatacatgctggatcatcaagatcccagtggttagatagctccccaggcgatgtctctgctactaaaaagaaaaagcctagtgagtcactatctctaagggctgctgtccaagatatagagatgccactgccacctttggcccttgctccatggcaacatggaatcagatcatgcaatgtttctgaagagtcgacagacttggttgattcagtgagaccactggcccagggtcagaaacttgtagtgtaactgcaggacctctgatcatgacctttgctagctgcatgtacagaacctgc

SEQ ID NO: 95353 - DNA, 388 bp, Glycine max
  Clone ID: PAT_MRT3847_57115C.1
gaggagtcatgactttgtggcgattacttctgcttctggctggtgcctgcactgcaacctttgccgagaagcgtgccctcttttttgaggactttacatttaaggacatacaaggtaatacagtttcatatcttgagactgacttttcgaaattggacccatcaacattcgaaaactgcaaagatgattcggacagtgacgtcgagctgtgtcgtaggtggaaagatggaactgaactcagcatcaggaatatggagtattgcgtcaccagcactttaaccaaaagtacgttaatttggcggtcatgtgtgccttctaacacgtctcactggtatggtggtggcgaagaatgggagcagctttggcctctcgaaaaataccaaaattt

SEQ ID NO: 95354 - DNA, 353 bp, Glycine max
  Clone ID: PAT_MRT3847_57116C.1
ctcttcctcttctcgttccatgtatccctcataaataaccttccaatccaacaacctcatcctcacactcacacatacacacatctaaactcttatcatccctaccatctcttcaaatctcatcctcaattaactcaactactttcacaaaaacccaccaacttctttcatctcttatccaataccttattacaagttccattttctagcaaccaatattttacctgctaataatccttatactacatcatcattcctatttcactatacactttcctccatatcatctctttaaacctcccaacataaccattataactatacactttcattcataaacattaacaaccaat

SEQ ID NO: 95355 - DNA, 623 bp, Glycine max
  Clone ID: PAT_MRT3847_57117C.1
gaataataaatactgtttaaaattttaaaaacattaaacacgttaaagtatcaggaagattttatagaaaaatataacattactcttcccgctaatacataatcaaatatagatctaagttaccaaatactagtattacacaacccatggttaatccctcaaatgcataaccattgcagtacaaaggattatttccaaaatttacatgaaccttattaaccttaatttccaacaagtcacctaaggatcaagcatggtttccacttgcaggccctccaagtgtcaaaaccaacccttgaaggtcactcctcactttatgctctttggctaaagacacagtagtgcctctcatgattggtgttggctgagctagcacaggttggcttatgccgtggcagggctctgcacgcgaacaatttgctacttgctgagaatccctcacatgatgatttgagttcataaatggttgagtggagggaaatgaacatgatacagaacactttggctcaacacttgtggagaatactcctgctcctggtgcaaataatactcctctgaaaactcttccattcacagctgcagtcatgagtaaacctgaataaaaggctccatcaactttcccc

SEQ ID NO: 95356 - DNA, 124 bp, Glycine max
  Clone ID: PAT_MRT3847_57118C.1
caaagagctgtatcttgttgggaaaaagataagtgatgtagaagggctacaaaggctattgaagataacagttctagacttgagctacaacaagatcacaacagcaaaagtcttaggtcagctt

SEQ ID NO: 95357 - DNA, 599 bp, Glycine max
  Clone ID: PAT_MRT3847_57119C.1
gggggatcccgttctcaagattctgatgcagaaagttcgttatctggacttaaatttgtctgttttggagcagtatatggaggacttaaattctagatatatcaacattttcaaagagtacagcaaagacatgggagaaaaagatctacttctagagaagatcaaagaagaaattagtagattccttgaacgacaagatgttatgatgaaagaatttagtgatcttgactcttggaggtcccatttttctgtgcaactggatcatgtactaagggacaatgctgttttaaggtctgaggttgaaaaagtccgggaaaatcaagtgtctttggaaaacaaggttgtagttgtgttttctgtgtgtgttattttttcattgcttgctatttttcggctatctttggatatgattatgaacctctatagagtcctaagttttgatagaacaataacctccaggagattttggcaagggagctcttcctggtttttcctattattgagttgtagcattattattttcacattaactttatgaaaatccatttttaagcaaaggggttactatcttctgcatgattcttggtaaaaaagaaaaa

SEQ ID NO: 95358 - DNA, 458 bp, Glycine max
  Clone ID: PAT_MRT3847_5711C.1
ctgatttaaaatcaaacatcactgagcaaagcgtaaagaatgtcagcaagtccgaagtagactcaagcaaggataaaaacaaagttgaggtaaattaatctattgctttttcacaaaagttccaatatatatttttgcttttatttttctctataggaagacgacctagataaagagatatgacatgattaggttatgaccaatgataatgataaaaagacttttccggagaaaagaaatttgttggtgaaccagtcttgatccttgttgggtacatattgaggtagctcagaagttcatatttagagtaaatatctctatttcatccaactatgtcttggtagctcagaagttcatagtttgccgtggtctattccctttctaaatttggctactttcagttagacgtgggtaatgattgggtcaaggtggaaatgaattgagttaagttaagattt

SEQ ID NO: 95359 - DNA, 328 bp, Glycine max
  Clone ID: PAT_MRT3847_57120C.1
tccacgcgttcgtacggctgcgagaagacgacaaaaggggagaagaagaaaaggccggggaaagttgaacggggacactactttttctttcaccctaacacaacaacggcaatgcaaactcttcttctggcggcaacacgcgccggcaggtttacggcagtttctctggcaaccttcgtcgttggcttcccttcacttccttaaacattttttagtccgaatttctttccctcactccttttcaatagggctcggtcatattcctcttttaatttcttcatagcttgttaaccatggaagaaggtttccttcaccggaagcgcttttt

SEQ ID NO: 95360 - DNA, 286 bp, Glycine max
  Clone ID: PAT_MRT3847_57121C.1
ggagaacattgtggggccaacaagtaatacgccgccatctatgtcgccaatttcgaacgcttcgtcaaatggatcaatccccatgaaagtcaagaggccgagtcttggtagcgcatcacgtgcaactgctggaacagcagcttccgttgcaagagcaacagcaaaattaacagcgcgaggtcagtctatcagtcgttcggcgtcacctggaccaacgaagaagcgcgcaaggtcacacatgagttcatcaggacccggttggcagaaatagcttcatgtacgactc

SEQ ID NO: 95361 - DNA, 716 bp, Glycine max
  Clone ID: PAT_MRT3847_57122C.1
aagccttccgaaacaccacctctaacaaaaacaagaactagtggaagtggaagaggctagaacaacagatcctctcacgtgcacaaccatcagagggaaagagagagagactgtagtaattaatatgtttcctgtctccatgtctaattatgaccggatttcagagctgatatgggagaatggccagctatccattcatgggcttggtgggcttcaacctactaaccctactcaggaaaagcccatatcaagtggggcccacgacacattggagtctatcgttcaacatgccacgttccaacgttatcaaccgtcaaaattcactagggaagaaggccatgcccctactagtaatagtaaaaacaacaactccattggtgcaccctattatggtggtgaggttcaaggtgtgctatcctcgacgaggaaaagaacatggtccaatgctaacaacagcatgttggaagaatgtgacatccttagtggttgtgctagtgctggtgctaccttttgtagggacaatgatacaaccatgatgacatgggtctctcttgatcagtctggtcgtagcttatagactatggaggaagattctgcttgtcactgtggatcggaaattcgagacaaccaagatgacagagacagcaaagcagaagtaggccaaagcaactcataaagaagaagtcgaactgctgccattcataaccagtctgagc

SEQ ID NO: 95362 - DNA, 281 bp, Glycine max
  unsure (1)..(281): unsure at all n locations
  Clone ID: PAT_MRT3847_57123C.1
gcggaccggacggatggccgggccgacccacccgttcgttgacggggccgacccaaccacgccgaagggagtagtggcagacccgccggccagcccgacaacaaaggagggcggacaagaaacccccagacggagaagaagaggcagacgagcagagaataccactcgaatgaggagggtttgnccccacaaactgggtgcaggcagaaacaccggtgtctgaaaccggaatagcgacagacggtgagcgaccgggcaaaaaaatgggacggggaacgggg

SEQ ID NO: 95363 - DNA, 430 bp, Glycine max
  Clone ID: PAT_MRT3847_57124C.1
cgttttatcctttttggttgtggaagtgacttacttcaacaagcttccaaagcggtacacgggggtggaatattatatcttgcatcgaaggaggccacactggccaaaacaacatcctccatggtcagtgcagggacagaaccgcacacctcaccgcatttaggacctgcacccgccgctacaagtccattcacaagcacactatctcctctatctcttcaaaatgaacagaacacagcccctgaccatgctcccatataaactacaccccttgttagacgcctctatgatctaaaggagaagaccttacctttgctaaaatagctcaaaagaaaatccgcccccgtgggcgtgcatggcaccttatgtggatgctatccaagacatgctgtgtggttgaagcctcaaaaattgccttgatgctgttctt

SEQ ID NO: 95364 - DNA, 250 bp, Glycine max
  Clone ID: PAT_MRT3847_57125C.1
gtacgcttgcttccggtcgggcgagcgcccttcctttttttttttttttttttaatgcacggtacaaaacattggacgcattttctgtgtggggggagcaaggggtgattacctcttatcaaaatacctccgtccacaaggcaattgaattcaatggacgggcatagttacaggatgcgcatgattacggaccgtagaaaacggtattaatttgttcacttataaaaacaacgggtttgggccccacatt

SEQ ID NO: 95365 - DNA, 625 bp, Glycine max
  Clone ID: PAT_MRT3847_57126C.1
attcctttcgacggcagtcgccggttgcgtcttccgacgtgctagaatcttaaccgctattttagatccctcacatcgccgatactgtgttcactttcattgccggaggcggcgtaaccagccgtaccagccaccgacaccggccaatccatgtcagcctgttcgaattacgatgacgtatttcaagaaggacagccattaacgatgactatgatcgcgtgagggacatcaagcgcaatcacgactgtgggaggagaataggtgagactggcttaggatatgcaaacgtgcaggcgcagcccactctgcggatgaggagcatcgctgcctctgatatatgggtgagatcggtagctgcaggtactgatgcctagaagctcaagtttctccatggtatggaatgctgagacctcctcgtcgtagagcaggaggatctatgtatgctccaaagacagattcacgagggagctgcatggaagtcaagtgtagctgcgagcgactgatcctactgagatgctactcgatgtgtgccgaagccggctcacctaagatgagtatagaaaatagtatgctttctggtgtgagcagcactccttaagccttagttactcatggaaaatatcct

SEQ ID NO: 95366 - DNA, 144 bp, Glycine max
  Clone ID: PAT_MRT3847_57127C.1
caatcttctgatattggttggtttaatgtagcaaggatgtttcctttcgggtaaaagggtcaaaagataatggtggctatggtggatatgcatcataatgtgttggatatcaacagaatcaacagtgttggaggagatagttga

SEQ ID NO: 95367 - DNA, 315 bp, Glycine max
  Clone ID: PAT_MRT3847_57128C.1
ttgatttcgcgagcgagaaagacaaaccgcgagcaggggaagcggcaccataaaaccggaaacaaaagcaaacggaagaggaaggcaagaacaggtgaacacagagcaacaaaccagcgaacgagaccgaaacgggaaagaaaacaaggcactgagcaggccacagacatagggaaacaaagacaaacccaggcatagaacacgggctgaacacactccaagaagaaaaaggaccaggaggcagaacaaaacgtaacacgccaaaataacaagaggcaggcgaatagcaagataagacaggggaaatcggggagc

SEQ ID NO: 95368 - DNA, 1294 bp, Glycine max
  Clone ID: PAT_MRT3847_57129C.1
ggctcgagcaacacaacccaaccctagcaagtagcagcagcctcaaagtaccctacaccctcctcacttaagctctcaccctgatccctaaaatgaagatcaaacaacaatctctcttctcagcctcaattttactagttatagcacttattaccttcttccacaccacttcagcccaactcacaccaattcaagccccagtttcatcacccccatccccaccaccaccacaaccacaaccaccagcattcacaccaccctctccaccagccactgctccagccccaggattcaacacagtacccttagtccccgtgacaccaagtggcgcccccacacccaccatcccaaaagcaccatccattgacatagtccaaatcctaagaaaagcaaagagattctccgttctcattaggcatctcaaaaccactcaactcatcaaccaactcaactcacagcttctaacctcaggctcaggagggttaaccctcttcgccccagaagacagtgccttctcaaaactaaaagctggtttcctcaactctcttagtgacagacaaaaagtggaacttttacaattccacacactctcttccttcatttccatctcaaacttcgacacactcaccaaccccgttcagactcaggccggagacgaccccaagcggctccagctcaacgttaccacgtttggtggcagccaggtgagcatggccaccggcgccgtcaacgcctccgtcaccggaacagtttacacggacaacaagctcgccatataccaggtggacaaggtgcttctcccacttgaccttgtgcttcccagtgaggctccggcaccggcgccaggaaaggctaaaggggcttccccgaagacggataagacgaagtccggtgccgctggggatgatagtgacaatggtgataacaaggacttgcccgctgaagcttcttctgctggttcttccgtgagtttcaagtttggagtggttgcgtttgttcttggggtgggtctgatgggtgaagccatggtgtgacgtgaaagggttagtggttcaattgtgttgtttgaggttttgtacgttagggatggatattgttgtgttttgtgttctggtttaattgtttgcatgtagcattggattaaaacgtatacatggtggattgctttttgtttaagggtagggaaaaaatgtatgcatgacatgctgggtttcttttactatgtttcttcttcttttgttttcataagtggtcatttgtgttaactggcttctggctatgtaaccggatttat

SEQ ID NO: 95369 - DNA, 351 bp, Glycine max
  Clone ID: PAT_MRT3847_5712C.1
gacgtcagcccaagcgtccgctcatcatttgctgaaccttgttgtgatctgaaattgcagaagaacaccgtgtaacgattctggtggccgttgcaccaagccaaggttggcatccaagttttataacactaactactgcatacaagagtatgagaatatacataacaacagttactgatattgttgtgattgtgtgtgattttggtgtcgtccctttttcgtatgtttaaggttgtaccgagtttatgtgtggattcaattcgtcgatcagacaccttagtttgatatcttgattggttccgtggacagttttttcttccttggtgtggtttttgggttgtgctgtttttg

SEQ ID NO: 95370 - DNA, 604 bp, Glycine max
  Clone ID: PAT_MRT3847_57130C.1
catgattacataattgactcaattacatattggtatccaagactaaaggaatgttatggtaaaacttcgtctgacaagatgcggtaaaaagcaacgtgacaactatgaaagacatgattagattacctgtggattcttacttcctccattttttctagaatatagaaatgaacatgctcttgactccacatcattcgttctgttccactataacttattgctttggggactgaaaagcagctgatgatgtaagtctatgatctaaatattacatgatggagctcgagtttattcatttatcacgggcaagtatctaaggatagtaaaaattaatacgctagaacaacttaaacagtctatttttgatagaaaaatagaaaagatccactttgaccaagggtcaaaaaaatggttataattagtaaaactgttatgatcataagtgtagccgcatgaattaacctactatacgtatgattctttcatagaaagaaaaaatggaatataagctgccatttctaacaagattgaagattccccacataatgcctatacctactgattcagagaatagcttatagatcatggtacaagttaataccat

SEQ ID NO: 95371 - DNA, 306 bp, Glycine max
  Clone ID: PAT_MRT3847_57131C.1
gggccaaaagggaaaggcccccattcaaatttttggggcccccttaacccaaaaattttaggggagaccccccctttttaaaaaaattttaaaatcctttaaaacctgggtttttttttttgcccccaaaaccttggaaatttctaaaattttcccccccgcgccctcataaattttttacacttggaccaaaccaccctttagggaccaaaatttttccttgcccaatttgttttcccccccatttaaaactgggaaaaaatccccccgttaaaaaccccccctttaggcttttccaaggccccc

SEQ ID NO: 95372 - DNA, 326 bp, Glycine max
  unsure (1)..(326): unsure at all n locations
  Clone ID: PAT_MRT3847_57132C.1
ggagctcgagccgntctctctgtattcatatttccttcctctttacttctatgctgatattattggcccgcacttccttttttttcatccagaaatcttggtgcccaagtgagggaaaaaggggtggcttggacacttctcaccttggtctctggggtatggtaatttgaaagaagctacttggcatcaaaaatggggtcaagggaatgggttaagacaataattaactcaagaaaatcaaaagaaagcgcattcaagaaagtgaagacttagatttattccagaaaaaagtgccatgggttaaccaatggaatcaaaagccaaaa

SEQ ID NO: 95373 - DNA, 556 bp, Glycine max
  Clone ID: PAT_MRT3847_57133C.1
tctgcatcccatggataactgcctaaagtttattgatttcacagatagtttgttttgagttctttcgcaatttgtgatgtgtaacaaattgaatgttaaaggttcatctgtaattaagggatgtggaaattctaaaattttatgcatgtattttcatgttgaggcattgcacaatgacatcatttaatccatgtagtttatccaacctacagaggaaagacttttgccatgtatattcttgttgaagcaagacaatttgatacttgtgcacccagtttgacttgataatgctttgttagcatgcacttttgatatttgattttacagttatctgaataatgctaaagcaacttttcactttagtaagtgcccttctagcatagatggaatcttttgaatttcatccactaataaagaaatagttctgtgagaattgggttcgttctagaagtagcttattaattgaaccattaaatttgattagcctcattctaattgagtatgcttgaagttctgtagttgtcttcaactaaataatttcctctcataaatatat

SEQ ID NO: 95374 - DNA, 442 bp, Glycine max
  Clone ID: PAT_MRT3847_57134C.1
tttccatgcttgactctgtgaagatgattttttttcttcctattatcccatttggcgtactctatggttaataaaacaaaaactgaattttaattcaattatatatactagtctttagctggtcacccgtttcttcatatcagtgaagaggatcaggtgacttattaaggtttcattgacttatcatggattctatctatgataatcaatctctatttgctgatattttacatgtgcaactgagcagttcttttttgtttcaccaatcaccacacgtattttctttaggaggcaatcctgtctgatacactgctgtcagtcgacgctaaatgtatacatatgtcctagctaggattcacaccttattcaccctctattcgatggttgtatagtagagaatgcttatgtacatcacccctatgcaatgagtctgtctttatta

SEQ ID NO: 95375 - DNA, 3377 bp, Glycine max
  Clone ID: PAT_MRT3847_57135C.1
gccggaattcccgggtcgacccacgcgtccgggccattttcctaaccctagccacgcatcaccgccatcatcgtccaccttccggaaagaaccatctctaatctatctcacctctttcccctttctccaattcaccattcacacactctctctctctccttctttaatttaagatctttcgaacctttctctctcccaccgaaaccctaacaacgacaatcgcgtgttcttctacccaccagaagatcagtggatccttctaaggccagatcgaggtaaaccctactcgaatcagtggttttttgtttctacttttgtttctatttattggggcaatgcaaatttggagctggtggtgacttgcgcaacttatacatatggacacttgagtttgttgggtatgcccccacttggttaagatcgagagttaaagttaggatccttttcatttgggtatcgaggtttttgtttttgcttttattttgcccctttctggttgactagtggattaggtttggacagtgatgtctgtgaacaataataacccttctaagggcattggggcctcttcctcatcctttggtaatgctggagtaccctccaattctataccttcaaaccctggattttcacagtcccaaggacaggcccagattcctgttggttatcaaggacagtttccactgtcccaggcccatgctattgtccaagctcagtccaaggcccaggcccaggcccaggcccaagcagcagctgcagctcatgctcaactccaggctcatttgcaagctcagggattgagtcttaatcagaaccaggctggtggtttgggggtgtcgtcaccgttgatttccacgccgggtaatgcgagtgggaaacggatccctctgaaaccccccatgcggccagttgggttttcccctcccaacagcttctccccattgagaccagtggagctcacgcctgctgctcggaggaagaagcagaagcttcctgagaaacagctgcaagataaagtggctgctattctgcccgagtctgcgctgtatacgcagcttctcgagtttgagtctcgcgttgatgctgcgcttgctagaaagaaggctgacatccaggaagcgctcaaaaacccgccgtgtattcagaaaactcttcgtatttatgtatttaatacttttgctaatcaaattcgcacaattccaaagaagccaaatgcggagcttccaacctggacactgaagatagttgggaggatattggaggatggtgtagaccctgatcagccaggagtagttcagaagtcgtctcctttgtatccaaagttttcagctttctttaaaagagtaaccatttctttggatcagagactttatcccgataatcacattattttgtgggagaatgctcgatcacctgctccacatgaaggttttgaagtaaagaggaaaggggataaagaatttacagtgaatatacggctggaaatgaattatgtgccagagaagtttaagctttcaccagctttgacagaagttcttggtattgaggttgatacccgcccgagaattgttgctgcgatctggcactatgtgaaggctaggaaattgcaaaacccaaatgacccttcttactttcactgtgatccgcctcttcagaaagtatttggagaagaaaatatgaagtttacaatggtttctcagaaaatatcatctcatttgttccccccacagcctatacttttggagcataagattaagctctctggaaacagtcctgctggtactgcttgttatgatgtgatggttgatgttccttttcctattcagagggagttgtctgccttattggctaacgtggaaaagaacaaagagattgagacatgtgatgaagcaatatgtggaatcattagaaaaatccatgagcaccgtaggagacgggcattttttcttggttttagtcaatcgccagtagaatttattaatgcattgattgaatctcaaagcaaggatctgaaacttgtatccggagaacctagtcgcaatgcagaaaaagagcgtcgttcagatttcttcaaccaaccatgggttgaagatgctgttattcgttacctgaatcgcaaaccagctgtgggaagtgatgctccaggaagcacatgacaccagttcatattttaatcattcatcatcctttttggcgatgtatctcaagataaattataccttgagaatttctgaagtagctagttttccaacttccatgcttgtattagtggccggaaggaatgctgctccatagtgataatatacaatatgttgttgtatgggtagtagtgtgagcacatttagttgcagtcttgataattgcttgtttaggtgataaatggtaccgcaatttcatgtctatcagttgtagtcaactgtgacggattctttggttacctcattgttcatttctccacgcaagatgttttacattattaggaaaaattgtattaggaggatttgaatcttgtatccggagaaccttgtcgcaatgcagaaaaaaagggtcgttcagatttcttcaaccaaccatgggttgaagatgctgttattcgttacctgaatcgcaaaccagctgcgggaagtgatgctccaggaagcacatgactccagtccatattttagtcgttcattatcccttttggcgatgtatttgaagatatataccatgagaatttctgaagtagctagttttccaacttccattctgtattactggccggaaagaatgctgctccatagtgataatatacaatatgttgttgtatgggtagtgtgatcacatttagttgcagtgctgataattgcttgttaggtgataaatggtaccacagtttcacgtcttagttgtagtcaactgtggtggattctttggttacctcattgttcatttctccacgcaagatgttttatattatgagaaattgtattaggaatgattgattggtgtacagtatcttcagttgtcgtgtgacaacacgagaaaacaaatgttgcacccccatgactgtcgtattccatccatctatgggttccgttgacgtttatttttggaccgtggtgcttgttcaattatgaatgttagtagtagttatacataaaaaaaaaaaaaaaaataaaaaataaaaaaaaaaaaaaaaaaaaaaaaaaaaaaataaaaaaaaaaaaaaaaaaaaaaaaaaaaatacatataaaataaaaaaaaaaaaaagggggggcccccacatagggacctctttacccggggaattaatccgggaccggtccctgggggtttaccatttttccctttagagggtctttttaaagttggggttaacttgggccaaacttttt

SEQ ID NO: 95376 - DNA, 339 bp, Glycine max
  unsure (1)..(339): unsure at all n locations
  Clone ID: PAT_MRT3847_57136C.1
acaantcntgcangcaacgcnantacgacncaagacangncngntntcnnnagcncnactnacncagnnanaggagngctcnccnccgnaacncacgnnnaagagcnngnccagnccgangnacaccangacnnancncgcannnnnngccagnacagcannaacacacgngcncactgnangnnacggncncagcgcannangcnnagcacnggnananngncngcacnacagaangnaagnnnccanacacnncnacccncagcagcntnaccnncagcnnnaacaantanntcncggcagnncngacnncnagcaccangagncccnnananaanc

SEQ ID NO: 95377 - DNA, 298 bp, Glycine max
  unsure (1)..(298): unsure at all n locations
  Clone ID: PAT_MRT3847_57137C.1
ataggatcccangttgatctatgccattgtaaaagtgttatatgtgggacgggtaaatattacaaaattacccggaatttgtatggagagactaaggatgcagttgtaccttcacatgttggtctaagctaaagcatttacacactatattgagtgagtggattccattgataaatgtagatgtagctcactcccatccaaattgtggtttcttgagttttgttattacacagttgaagtcgaagtctcggacccattacgatgacaatgatgataggaggggacggttgttgttaat

SEQ ID NO: 95378 - DNA, 260 bp, Glycine max
  Clone ID: PAT_MRT3847_57138C.1
ggttctagtgtgtgattgattgttgggggaactcgttcttcttcttttgttgttctgtgtttgtgactgcattttctctcacctgacaatgtctcgctgccctggcaactgtggatgcagaagctcctgcacgtgctgcaactgctgcagaggctgcgagatgtacccagacttgagctacactgacttaaccaccacctagacctcggtcatgggagaggcacctgttcaagctcaataacagggagctgaaatgagtg

SEQ ID NO: 95379 - DNA, 281 bp, Glycine max
  Clone ID: PAT_MRT3847_57139C.1
tttgagtttaagacaaacttagatggaggtagtccaaccacaactactcttctatactgttttgtgttctgaacttatctaggactaattacttttttttttgtatgcagaagagttcaataaaatgacccctttacctacaacattagcaattgtatcaactcattatctagtgtcattagcttgtgcaaactttcagagtcatttaaatgtagcaaacacatatctctgtaaaatttgttaatcgtttcttgggccctttatgtatttaggtttttatc

SEQ ID NO: 95380 - DNA, 373 bp, Glycine max
  Clone ID: PAT_MRT3847_5713C.1
gcactcgacagccaaccccacagggaccctttttgctacaacgatgggttctccatccacatgcaatcccatatctacagtctgcacataggctgtaggcgacaattcatacatttacaacccactcaaattcaactccggctatcgcgcgaggctcactcccaccagcagggccttcgtgatactcctcgaccagcagcaccgccaagacgaacatcgcgaactccaacgtttggccctatgcgttcaaactggccgatgtctgtggagattccgccagcggcaagatcgtaaggtcgccctcgagatcaacggcggctggcacctaaaccattgcaactgctggactagtctaagggctgttgaagaagga

SEQ ID NO: 95381 - DNA, 441 bp, Glycine max
  Clone ID: PAT_MRT3847_57140C.1
gccaaaaacaaaaccttccctaagaaaaaccgggggggcccgggccttttggtacccacctttgggggcccccagttaaagggcccggccccgggggcggccccgggggtcccccggggaattcgggccgggccccggggggggccccatttttccttatgggggggcctttaaagccggggggaaaccggggccaaaggggttcccggggggaaatggttttccgtccacatttccccccaacttacggccggggggcataagggggaaggccgggggggccaaagggggggcctacccccctttatgggggggggcccaacggcccggtttcaaggggggaacccgtgggggccagcttttttaaggaaaggccccccgcgcggggggggggggtttggtttttgggcccccggggggttttcttctttcccggggggg

SEQ ID NO: 95382 - DNA, 465 bp, Glycine max
  Clone ID: PAT_MRT3847_57141C.1
agactgttttcactattgcaaataggtatggtgattacattcggacagggtggaggaatattcttgattgcatcttaaaatttcacaagttaggtcttcttcctgctcgtatggccagtgatgcggctgaagagtcagagctttctacagaaactgaggatggggggaagcagaatactaattctttatctttatctcgtcttccatctgttaatactccgaagagaccctcaggattgatgagcaggtttagtcaactattatatcttggtgctgaagagccaagatcagaacctactgaagaacaacttgctgctcagcagtgcacccttcaaacaattcagaagtgtcacattgacagcatattcactgagagtaaatttttgcaagctgaatctctattgcagcttgcaaaagcactcactagtgcaggagtgtggcctaagaaagggaacagcacatctg

SEQ ID NO: 95383 - DNA, 782 bp, Glycine max
  Clone ID: PAT_MRT3847_57142C.1
ccggaattcccgggtcgacccacgcgtccgggcttattcttacaatattggacttgtataaaaaggaccaagatatagcttttctggctacatgtagtctccacaatcttttaaatgcctctttactgtctgaaagtggccctcctatgcttgattttgaggatttgactcttgttctatcaacacttctacctgtggtttctttcaataatgacagcaaagaccagtcagatttccctgtgggactgaagatgtataatgaggttcagcattgctttctgacagttggcttggtgtatccagatgatttgtttttgttccttgtaaataaatgcaggttgagggaagaaccattgacttttggttcactttgcattttgaagcatctcttgccaaggctgtctgaagcttggcatagtaaaatacctctactagtcgaagctgtaaagtccttgcttgaggagcagaatttaggtgttcgaaaggcactttctgagttaatcgtggttatggcttctcactgttatttggttggttcgtctggagagttgttcattgaatatcttgtacgccattgcgctataacagatcaaaatcggagtgatcttgagagcacaccaaataagagaatagagatgaaaattggtgcagttactcctggtgagttaagagcagtttgtgagaaagggtctctttttgtactattacgattcctgaaatggagcatattctttggccttttctgttgagggatgatattccattgacctacactggtgctg

SEQ ID NO: 95384 - DNA, 179 bp, Glycine max
  unsure (1)..(179): unsure at all n locations
  Clone ID: PAT_MRT3847_57143C.1
atggctcccaaaccgcctattacgggtcttttngnnggacngaacaaggggcacntctagaccaattttgaattgcctccaggcccctcagatcgtaaggggaaaacaagcatgagggtgcactttgtgaggaacctcatatgataggtagccggttttgcaccctattaaaagcgtat

SEQ ID NO: 95385 - DNA, 324 bp, Glycine max
  Clone ID: PAT_MRT3847_57144C.1
ggctcgagtttttatgattaaggtttaggtgacttaaatgtaaagtagaatattatattttattagatgaaccttagttgaataaatgcattaaaagttatttttgtttcaatttttcagaaagcttatttattatagtgagtgtgtgagaagaaagattgtgaaacaaagttactttgttgaaagaaaagtgtctttgtgtgatagtgttatcaattattgtaactatcgagtgagatacttgaattgtaaagtgatatactatttagggtgtgttataatcttgtaattatttttgtaataatgaaatattttttgagacgg

SEQ ID NO: 95386 - DNA, 281 bp, Glycine max
  Clone ID: PAT_MRT3847_57145C.1
ggcttggaacctttgggctgatttatgtgcttgatggtcgtgagaaagatgatagaggacatggtcgtgagaagaatgatagagggggccaatgagagttactattgaaaaaaaaaggggaaaaaaaaaaaaagtaagtggctgactcagaggacgtaagtccatgcatgtacgtacgtgaagcgacagtctacacacagagctattcaaacctaaccgatcggttgctgacacataatgcatcgatcgggaaaatttcggagccatttaaaccaactggt

SEQ ID NO: 95387 - DNA, 212 bp, Glycine max
  Clone ID: PAT_MRT3847_57146C.1
gggcactgctatttatgattgccttttatatctgcggtgagaattacctggaagggtcctataccagtttccagaccagagagagttcaagatacgtcggccttgcgttcttttggaaatttggatcggttctgaattgggaaaaggcccgtcgatgtggctatgctccgaaaattatttctttccttcaagctgggaaatttatggcgtgg

SEQ ID NO: 95388 - DNA, 395 bp, Glycine max
  Clone ID: PAT_MRT3847_57147C.1
tagtctctaactttaatttgcatttgaccttattacaacaacgcattttgttttaacacaacttatttgttgtgtgctgatgtgctttacatcccggttgactcccccaaatttggggcaaattgccttgaaccatctgctctcctagaatctaagcaaggtatctggagatattcattcaagttcaaggttcaattttgaaaatgtaatttagctcacaaagggtgcaaaggatacaattataattcaaggcaagctttttggtcaattggcttgtatatacaatcatggccttcatcatgtccatattcatacatttcattctaaaattcagaaattgatacaaagactattactcaatgctagtcattcactcacagtttaagatcacactc

SEQ ID NO: 95389 - DNA, 158 bp, Glycine max
  Clone ID: PAT_MRT3847_57148C.1
acaacaccaccaccaccaccaacacctatacagggtgcacgcccattccctttatcatctccatatccatcggactcgttgttcgatgtttggttcacacacccgtacaagtcacccccgaggactggcagctactctggatattcctctcaccatcg

SEQ ID NO: 95390 - DNA, 180 bp, Glycine max
  unsure (1)..(180): unsure at all n locations
  Clone ID: PAT_MRT3847_57149C.1
tgtgaggttggtttatgagccccagccacgtcctcgcgcaattacagctcttgccggggtcacttatgtttctgcggcatctgcttctagcacccactaggtactgaattcgatcgctcaatccatccgcaagtggcttgcggcgantggaggcatagggccgaggagcttacggaggag

SEQ ID NO: 95391 - DNA, 520 bp, Glycine max
  Clone ID: PAT_MRT3847_5714C.1
aagctctgatttcgctctagataccagctggatgttatctagatgaatgactaccagaagaacctacatgtgaagcgtcacacatgactcgacaaaatgggcacagcctgataagactcatatcaacgtcaggagatcttagacctgccgagcctggctagtctaccgccactggtcacaaagatctaacagggcagcaggtctaagcatacagtaccgtcgacaagcacacagaaggaaggccgctgatctctgcaaggggtccctcaagggcacatgaggtgcttgccaagctcaaggccgaacgtgagcaaggaatcaccagacacatacatctctgagaagttggagactcccaagtaccatgactgcggcatagactctacccgtcacgcatcatcccatcaagaacatgctcagcagcgactcgccaggccaactgcgctatgctgatcatcgctgactctgctgggagagtgcgaggcctgatctctgcaacgatggccagactccgagagca

SEQ ID NO: 95392 - DNA, 442 bp, Glycine max
  Clone ID: PAT_MRT3847_57150C.1
gaatgcagcaagcgtgtttggttgggggggttaatattcttgagccttgcggaatacagttccatggtggtggagtgtttcttttcgagttatgcaggatgtgggagtagtgatgtttccattactgagctctgcaaactttaggcttgatttgctatagattatcatgtttattgatagatatcatcaaatggatgattaagttggatttaccatgcctataatgatatgataagtagactaattaaagctgcatgcaattatttattgtggtcgtgagttgaatgaacagatagctattaaagtttttgtttttttattccttatatatgcctttctatttcatgatctagacattaagattgaattgatgaaacacggtattggatgaaaagattcatattttaatttcagttgcatggcaatttgaaaattatgtgtg

SEQ ID NO: 95393 - DNA, 438 bp, Glycine max
  Clone ID: PAT_MRT3847_57151C.1
cagttatgttttatttttaattttatcttctaaactctagtcttcaatagaagctgaaatttgttttattttgatggctattttgcattagttgctacaccttaaacttttggtcgccgtgttaaaatttcagaatcaacagcagtttccccacagggaagcagctctgtttcactgggcaccatgtgggctggcttatggggtataggaagccaccatattgggttttcctgttcattttaaagccttggacacaagtaacattttgtggttgggttcagtggctgagggtagaaggatgggaaatcatggctgattgattgctcttttggtctcctgttctgccaggtgacaagccaggacaaggctccaagtgtcatcagtcgtgtccttaagaaaaacaatcgtgactctgcagtggcttcagagtatgagctg

SEQ ID NO: 95394 - DNA, 347 bp, Glycine max
  Clone ID: PAT_MRT3847_57152C.1
cccacgcgtccggtcgttgaccagatctgatcctggtagataaatttgactttcttatccaaattattacacccatgttgttccttcctcttcacatcccaattctccggcgaccccatcatcagcacgctctctggcgacctaactccggcagccgacgacgcctcctcattttccggctgatcgcggcaatggcgaattttctctgttacgacgtttacgacttggaattaacaaaagtctctgataactccgagttgcggtcgttactaatacaaacgacgaaccggtctataatagtaattgaagacattgactgttccgttgacataacggcggatagaacg

SEQ ID NO: 95395 - DNA, 196 bp, Glycine max
  Clone ID: PAT_MRT3847_57153C.1
cacacaaaaacatccatgtcttttattgaaataaagggtcacccacaacccaaataaaccttgtttcttgattgaaataaacatccatattttatattatcaaaccccctcattcttttcacctcgaaaaactgacactaaactgttatataatatcttcactcgctagaacatattctatatcccgacaaaactt

SEQ ID NO: 95396 - DNA, 1299 bp, Glycine max
  Clone ID: PAT_MRT3847_57154C.1
ggtgcagcgacagtgagtggaacgcaatggttggtggtggcgtctctcgcatttcccaccattttcgagactgcgacttccatttccatttccacttcacttttacttactctgcttttcaaactttccacctttcgtctcccccactccctctcaaacctcgctggggaggcatttctcaaaccacagttccctcaaattaccgctgttttggcaccccacctaagtcccccggcgaaattcctctccttttcgattgtttcagccaacaagaagaggatcgtgaaattctctctgatggaacatctgccgtggcaggtggaattgtagcattgggaaagtttgatgctctacacataggtcatagagaacttgcaattcaagcatcaagggctggacctccatttcttttgtcatttgttggcatggcaaaagtacttggttgggaacctagggctcctatagttgctaaatgtgaccgaaagcgaattctttcatcttgggttccttattgctgtaacatggtcccagaagagtttgaggttgaattttcaagcgttcgacatctcaatccccgacaatttgttgaaaagttatcaaaagagcttagggtgcggggagttgttgcaggtgagaactacccgattcgggtataaagcagcaggtgatgccttggagttagttaagctttgtgaagagtacgggatggaagcttacataataaaatctgttatggacaagaatcgtttttctgctgatatgaattctgttaccaactccaaagagaggggacaggtctcatctacacgtgttcgtgaagcccttgccgtaggggacctgaagtatgtctcagagcttttggggaggcctcatcgtctcatattaatggccactgatcaagaaagattcagtactgggcagtataaagtgtctgctcctagatcctgcttattgaatctagcaccaaaggaaggattatatgagaagtgctcacttttacttgatcaggaaaatgttgtgcagtgtagtgtagttattgacagcaagtttgtccatatagaaacagattatggaggtctgagtgacattttttgttctcaaaatttgaagttcttgtttattgagtttggtgattcctgcacttgattcagtttagataattatttctatttaaatttttagtctactgaattgtagatgatttttatccatctcccaaagtagagtgatacaggtatatatgtacctttcttccttttttcccctcttcaatgcaatatgcctccaaactaagtgatg

SEQ ID NO: 95397 - DNA, 265 bp, Glycine max
  Clone ID: PAT_MRT3847_57155C.1
tgataactttattagtgataatgaatatgtgaggccttactttagtggttgtaaatagaaaagctctgtaggatggcgtaggatgaccattactgagggcattgtcacaactagaggaacttggcagttcataaagtgaggcgatcgtgattttatcaagataaactttaagcacaagtcataatggtctgtgggtggctcttgtggacacggtgagtttatggacacatcttctttatggttgacgacataactctggaaatgc

SEQ ID NO: 95398 - DNA, 240 bp, Glycine max
  Clone ID: PAT_MRT3847_57156C.1
atggatttcatccaacaatagaaagttgaaactagtgtgttaaaaataaataaaaaaaaaataataaaaaaaaaatgagtaaataaaatcataattgaaggcaagtgagcttcctgattgtccatcccagacaatatacagtgattgatattctctagggaatctctctagattttgagattgctggaaactactcgtatgccagctttttctgattcacaggctactgacagatcttct

SEQ ID NO: 95399 - DNA, 411 bp, Glycine max
  unsure (1)..(411): unsure at all n locations
  Clone ID: PAT_MRT3847_57157C.1
cgtccttttttttttttttttttttgatagatggttgaaaaaaggaaggggaacgaacttgtttacagtatagtttccattaaacaaaaaaacggcagtttgcattacacaaatggaacttgtcctgcaaaaagggggttctcattccacagaggagacctaggtaggccactttctctccttccttctgaaaatacaaacattttatatgggggaggagtgacttgtcggggcttgttgtccgcaacggggatggaggagccatgatcatgcttcctttgacaagctggttttgtggcaaagctggttaagcctatnggaaaggctcggaatgcttgaagtggggaatcccctggcccacaggaaaaagaaattccccccttttttttttggggggttttttggttctgc

SEQ ID NO: 95400 - DNA, 704 bp, Glycine max
  unsure (1)..(704): unsure at all n locations
  Clone ID: PAT_MRT3847_57158C.1
gaattcaataaaaataattatatatactaaatttttccacaagtttgtaaatcatttcactttcaatttatttattttatcaaaattaattttacataacacagtcacccaaacatatgttatattcagaaaaaggtttacaacctttcctttttcatcatatggagcaaaaactcattccacgtatcaacagggccaggcatgcaccaatgaacgcaatcgttgacgctcacatttctatccaaattgtggccatatttatgaggatgtccatcaggcctcataagcatcacgccagttatattcatcaacccaaaacgcaaacctttctctctcgcttccttctctgcagcagtgaattcctccacttgtgtctgataaaattcatccaaaccataaggacgcaaaaacgcactttcttcccttgtaacaggcagtgttctattacaaccccctcctttattccactccccattctcaaaatgattcggcgaatgagtcaccataaacaccacccccttgaaccctttaaggtttataacggttctaaaagctgttcggaatgcgtgtctgtatccgtacaagtttagagggtcttccatcaggttatggcacttttgacaccctacaacantggccgttttcgtagaatgtcaagggtcggaagaaccattgtcctcctgagaaaataacgtagtcgaaat

SEQ ID NO: 95401 - DNA, 1831 bp, Glycine max
  unsure (1)..(1831): unsure at all n locations
  Clone ID: PAT_MRT3847_57159C.1
tacggctgcgagaagacgacagaagggtacggctgcgagaagacgacagaagggtacggctgcgagaagaattcggctcgagactacacaagaactagctataggcctcaattagttattatattaatttggtctaagtagttgttattacttgtctttcttgtactagcacctagctaggactcaattctttggttacttaatagtagttcctttttaactatctttcttcaatggctgactcagcctcagcctcagcctcttcttccagaatgtggtgctccatccccgaaagggttcagctgcatgcggccatgttggccctgcagtttggctatgccggcttccatgttgtctcaagagctgcccttaacatgggcattagcaaacttgttttcccagtctaccgcaacattatcgcttttctcttgctccttccttttgcctacttcttggaaaagaaggagagacctgccattactttaaacttcctcttacagttctttcttctggctcttgtcgggattacagcgaaccaaggtttctacttgcttggcttggacaacacatcccctacctttgcatcagccattcagaactctgtcccagccattacatttctcatggcagtcatactcaggatagagcaagtgaggctgaaccgaaaggatgggatagcgaaggtggcgggaacgatattctgtgtggctggggcgacggtgattacactatacaagggtccaacaatatatagcccaactccacctctacagagtgagagactcagcagtagttgagtttgggacactctcactgggagatgcaaaaggggaaaaactggacccttgggtgcctctacctcatagggcattgcttgtcctggtctgcttggcttgtgctccaagcacctgtactcaagaagtacccagctcgtctctctgtcacttcctatacatgtttctttggactcatccaattccttgtcatcgctctcatcgttgaaagagatgcccaggcttggattttccaatctggtggagaagttttcactattttatatgcgggagtggtggcatctggaatagccttcgctgtacagatatggtgcattgacagaggtggccctgtgttcgttgccgtgtatcagcctgttcaaactcttgttgtcgctattatggcttccattgctttaggcgaagagttctacttgggagggatcataggagcagtgttgatcgttgtgggactgtactttgtcttgtggggtaaaagcgaagagagaaagtttgcaaaggaacatgctgctattacgtccaccccagagcacagtggcatcaggtcctcaagccatgccaaaacatcactcactcagccacttctcccttcatctacggagaatgtctgatcaacaaaaccatgacttcaagctggggcaccattttctgggagagaaaaagggaaaaaggaggaaaaagaagaaaataatacccagttatacattattactactttgtgtcaggaagcttgtgtgtgtacgaaggggctttcatctttttttctttttttttttttggttaattcacatgctttctttctaggacttttagaatgagggttttctatgggaatcattacaatgatggatgtcacgtaaaagcgggctttaaagactgaaatcccatatgcttttatatgttaattaatggtttgatttactaaacgagatttttaatttaaaaaaaaaagggggggggggggggggaagggaaaggtggccgcgccgcttctaagaaggatcncaagcttacggtacgcggtgccatgcgacgtc

SEQ ID NO: 95402 - DNA, 2062 bp, Glycine max
  Clone ID: PAT_MRT3847_5715C.1
ggctcgagctccaaagcttccctcttttttcttctcttattgattgctcaaaacccaatgctctttatttaaactcccacactttgcaccattaaaacagaaaaaaaaaaaaatcagaaaaaagacttataaggaataagtgatggagagaaggaggcaggaattgcatgtgcttggtaaccaaaaccaaacaaagccttaagagttcatttttgggatgatgcgttttctcggagacagcatcaaaatccaaaactgttatttttttttcgggatctcttacttttctgaacgccacacagatccaatggcagagctgctactaatcacatgcatctcactacttttcctcattcaatatcaaaactgacaaaaaaagacaattgagaaggctattctgttcaaccccacagttttcagtttcagttttttgtgtgttgttttgtgagcgtgtgtgtaacaaacagttacaagtacagaagaaacattcccagtacgctacctagctaggcttattcagtgttataaccaggaaaaaaaggacctttgcactttaatttgctggtgtttttggaaatagcagcctgcatccgtcagagtggttttgttatttgttagtgccatcactctctattagccattttgggtgttaattttccttgtgggatcattttgatttcacttatgctgctgaggaacagatcaagggcagtgacaaagccaggtttgatggctgatcacggcacccagaattctccaaatcaaaactatgctaaaactattccttctctatttgggtcaccaaaattcagagatttcaccaacaagtgtctctcttcaggaactgaggccttaaggagcccaacttcaattcttgatgccagagcattatccccttttgcctttggaaacccattttcaacccttccaaacaaaacctcctcaccaaacagaacctcctgggacaagcctgattcaaagggtattggccttgctcttgttggtgctctcaaagatgatgataacccaatttgtcacaattctgaacccaagaaaggaaatgttctgcttagagtgagaataccatttgagtctcaatttcaaacatgtgtggatgattttggaatcgccaaaaccaatggttcaaagaactcatcagggtcaggaatttgttcaaaggattgttgtgattctccaagaagtggtggcgttctgtcttggagtgcgatggagctttctgaggaatatacatgcgtgatatcccatggacctatcccaaaagccacacacatattcaacaattgcattatggtggagacatattattctctccccccaaaacaaaactctcactctgctgctacctccgggaatttcctcagcttctgctacacttgcaagaaacatcttgaccagacaaaggacatctttatttatagaggagaaaaagctttctgtagcagggaatgccgccacagagaaatgatgttagatggaatagaaaatcttgagtttgaaagcaatggttattcttgactagatcatcacttgcgtgctttgcatgcaccgtggccgcaaagtcctgcattttgagtagaggataataaccagaaaatgctcaaagtcaaatccaaattttccaattcataatgattttattatatgactaggtagcagtagtagtaacgagtttactagttagtatttcattgtaatcagtacaagttccttttttctctttcttttttcatccctttttgaagaagacttttgctttatttcttttttttgcatcctctcccttgcaaatagagataagagaggatgttgtagagttggttctaagtgtcagtggtgactaatttgattgcttcttctggttttcactaccattgttttcgggtgaagcagacgatcgatgatgtgtgattgaaaacagtgcctttcttctttttctttttctctttgaaaatatgataatgatggtgctgtgcctattgtcttaaaaaacaaaacaaatatctctatatttccactcatattattttattttatttataat

SEQ ID NO: 95403 - DNA, 379 bp, Glycine max
  Clone ID: PAT_MRT3847_57160C.1
ttatgatgtcaaaatttagtgaaacttgcatgacttatctttggattgtagtggtagacgagtgcatgatatattgatgtatattagagaatattctggttggaaaacatgatgtgctgtttatttcttggattatattcaacttattttagttcttattctgctaattttcctaattcctataaaataaagattactgaatcatgcttcctttaacttattctgctccagaaaaggaaaggcactatatgatgaccatggttttgggttgtttcgaacaatgtggcatattaattgaattatgtttcttgtaaattccttattacttttatgttcatgtttcttgtaaattccttattacttttatgttccttataaa

SEQ ID NO: 95404 - DNA, 1410 bp, Glycine max
  Clone ID: PAT_MRT3847_57161C.1
tttcctctcggcaacggatatctcggctcttgcatcgatgaagaacgtagcgaaatgcgatacttggtgtgaattgcagaatcccgtgaaccatcgagtctttgaacgcaagttgcgcccgaagccattaggccgagggcacgcctgcctgggtgtcacacggacactgcggtacagagagaggcaagtcccacatggatgttccaaacagcccggaaatctcggttgatgttcctccttaccttcgagtgcacaaagacagcacggtcgagagaattgccggcacccaagtcgttcccgcaggcctcgattccgacaccaacgttgtctccaaagacatcctcgtcgtccccgaaaccggcgtcactggcaggctctaccgtcccaattccaccccgccaaccgccaataagctccctttacttgtctacttccacggcggcgccttctgcatctcctccgcctccgatcctctctaccacacctctctcaacaacctcgtcgccgaggccaacgttgtcgctctctccgtcaattacaggctcgcgccagaacaccctcttcccaccgcgtaccaagactcttggtccgcgattcaatgggtcgctgacgcctctcgtgctaaacaacaccaccaagaagattggatcagggacaacgttgactttgacagagtcttcctagcaggggacagcgcaggtgccaacctgggacactacatggccttaaaattgaataataattttccaacaaatgatggtttcgatttcaaggttgcgggtcttatcatggtgaacccttatttctggggaaaggaagcaattggagtggattactgatccggagaggaagaagatggtggataagtggtggagttttgtttgtccttcggataaagggaacgatgaccctttgattaacccctttgtggaggaggctccgggtattgaaggggttgcttgcgatagggttcttgttactgttgcggagaaagacatactgagggaaagggggaagctttatcacaaaatgttgagcaacagtgactggagaggaactgctgagttccacgagactccaggggaggatcatgtgtttcacatcttcaaccccaactgcgagcaagcaaagagtttgattaaacgcattgctcatttcattaatgaacattgaatgtttactgtcattttgttcttttttcttgtgttgtgttgtgtgtggatccattaataaaattcaacaaaggttgggaagcctcttcttttaatgtatttcactgttggaaatccatacaacttgttttctttccctgtttataattactgtcatgtgttttattaattactatctgacagtgttgtaatttctataaaataaatttgtatgtgggcttcgtgctttgttaatgtt

SEQ ID NO: 95405 - DNA, 182 bp, Glycine max
  Clone ID: PAT_MRT3847_57162C.1
acaatgtattttatcagtttgactccgtcgtggggggcgccgagacacagaaccccacgggagcgttttaagcggtgaacgataaaagccggtggttaagatcctcgcgagaacacctacacaaaaaaagcactgccccgtcagaatggaaaatgttgtgatcaacagcaaaacacgtcaaa

SEQ ID NO: 95406 - DNA, 1218 bp, Glycine max
  Clone ID: PAT_MRT3847_57163C.1
ggacactgcactgcatagagagcgaaagtccttttccttattatatggaggctccaagcaacttggaaatctcggtggatgttcctccttaccttcgagtgcacaaagacggcacccaagttgttcccgcgggcctcgattccgacaccgatgttgtttccaaagacatccttatcgtccccgaaaccggcgtcacagccaggctctaccgtccaaattccacccccaaaaccgccaagctccctttacttctttacttccacggcggcgccttctgcatctcctccgcctccgaccctctttaccacacctccctcaacaacctcgtcgccgaggccaacgttgtcgctctctccgtcaattacaggctcgcaccagagcaccctcttcccaccgcgtaccaagattcctggtccgcgatacaatgggccgcttctaatgctaaacaccatcaagaagattggatcagggacaacgttgattttgacagagtcttcctagcaggggacagcgcaggtgccaacatgggacactacacggccttgaagttgaataataatgttccaacaaatgatgatttcgatttcaaggttgcgggtctcatcatggtgaacccttatttctggggaaaggaagcaattggagtggagattacggatccggagaggaagaagatggtggataagtggtggagttttgtttgtccttcggataaagggaacgatgaccctttgattaacccttttgtggaggaggctccgggtattgaaggggttgctggcgatagggttcttgttactgttgcggagaaagacatactgagggaaaggggggagctttatcacaaaaggttgagcaactgtggctggaaaggaattgctgagttctacgagactccaggggaggatcatgtgtttcacatcttcaaccctgattgcgacaaagccaagagtttgattaaacgcatcgctgatttcattaatgaacactgaatgcatgtttactgtcatcattgtgttgtgtgtggatgcattaataaaattgaacaatggttaggaagcctcttcttttatttcactaaaaaaatccgtaaaacttgttttgcttccctgtttataattactgtcgtgagctttattaatatacctggctgtgttgtattttctataaaatgaatttatttgtaggctttgttaatttatgttattatccgtgctt

SEQ ID NO: 95407 - DNA, 320 bp, Glycine max
  Clone ID: PAT_MRT3847_57164C.1
gcaccccgccccacgtgaatcctcatttttttggaggccatggggaaaaccgtacccaccttgtccccctgaaattgcgttaaagaagaacaaatacttgacgcccaacaaaatcggggggggaaggaaccgggaattgtgttctcatcccccccccgggaaaaaattggcccttgaaaattttgggaaaaacccgccctgcaagggaaaaaaaaaccgcctgcgtgggggacaaagacccttaagaacttaaacttgttgctggggacatcaatggttgaaaaaaagaacttccaaagggaactttgctggatgagcca

SEQ ID NO: 95408 - DNA, 401 bp, Glycine max
  Clone ID: PAT_MRT3847_57165C.1
cgccccgctttttatctttacgccctacagagttaaatcgcagcgcccgcaattactgaaaccctaacgctaccttcttgcagacatagctgagcaacgaaagctttgatcctctgacccaaaacccactacacgcattgggccgcatcggccggaccaagacccagttgggcccgccctacagctgcgacgacccaaccctaaacaaactctataagatcctaacacgatggtcatcgactaatcaaaacatggtagaagaagaagagtaagaagactaagaacctgaaaacgccaaaagcgcagatgaggaataggaagcttgtgaacaacaagaggtgcggtcaccataaaccctagaagagcatcaggatccagaaaccctgtcggctgcaaaccac

SEQ ID NO: 95409 - DNA, 142 bp, Glycine max
  Clone ID: PAT_MRT3847_57166C.1
gccacgcgtacgaacaggctgggcattacgcagatgcaagagcaatctatccttcacatcgggtacaattcattgattacaagagctgctatcacgtacctaacttgggacgtcggcactgagagcggactagctgacaaat

SEQ ID NO: 95410 - DNA, 376 bp, Glycine max
  Clone ID: PAT_MRT3847_57167C.1
cgacccaagcgtcagcccacgcgtccgcccacgcgtccgcttttggtgaggtttgtacttgcgtcctccttaagcttgttctgtctcgctagaacagaattgtttactgggctcatgagtctagactctagaagttccaatttatatatttatcctttattattgaataaaggaggatgcggtttggaaaaaaaaaaaaaaaaaaaaaaaaaaaaaaaaaaataaaaaaaaaataaaaaaaaaaataaaaaaaataaaaaaaaactgaatgaagaaaaaacagataattaaattcgaagagttgtgaatgtaataaactaattgcggtgaacatttataacaatcggcaggacctctagatgacagtaactataac

SEQ ID NO: 95411 - DNA, 391 bp, Glycine max
  Clone ID: PAT_MRT3847_57168C.1
gctactactcagcggccgccttccttccttttttttttaaacaacaaattttggtttatacccctgctttacctactatgggcattggtatgtttgccaaatctacaactcttttccaccaaaaaataccacacattacattcatgcccatatccactatcgaaattcatttatgcacgaatacacacaaaagacacaggccaatggactgtactttttacaaactcaagagccaccaattgcattgcctttgtcgtggttgcacttgtccgacacttgaacacaataagattcagacgggccattacgtgcatcttcgtgttgaaccatccttccccagaatactaacattgtcacttatcgattacacattcagactttttttgcctcc

SEQ ID NO: 95412 - DNA, 168 bp, Glycine max
  Clone ID: PAT_MRT3847_57169C.1
ggctcgaggagagtctttgagctcactacttttttatcaggaccaagaatcattgcaacaacaagagtgttattttcgaacgtcctacgttatccttcagcgcaaacagaatctaccactggtagggataggcgggtaagcccacccactgcagagcctgagaatggc

SEQ ID NO: 95413 - DNA, 361 bp, Glycine max
  Clone ID: PAT_MRT3847_5716C.1
atcaaacaaccacaacaggaggagaacaagaaatattagacgataaagaaccgatgttcgagaagcccttaaccccgagcgacgtggggaagctgaaccgtctcgtaatcccgaagcagcacgcggagaagtacttcccactgagtggtgactcgggcgggagcgagtgcaaggggctgttactgagtttcgaggacgagtcggggaagtgttggcgcttccgctactcgtactggaacagcagccagagctacgtgctcaccaaagggtggagccgctacgtcaaggacaagcgccttgacgcgggcgacgtcgttttgttcgagcgtcaccgcgtcgacgcgcagcgcctcttcatcgg

SEQ ID NO: 95414 - DNA, 120 bp, Glycine max
  Clone ID: PAT_MRT3847_57170C.1
ggctcgagccaaaattctcttatcctctgtctatttacttactataatcttctatctgctaccgggaacgaaacaatatctcactccagattccatctctcataccccgatgtacgcata

SEQ ID NO: 95415 - DNA, 2106 bp, Glycine max
  Clone ID: PAT_MRT3847_57171C.1
tttctgcgtattattccgatcagaatcatatatcatacctaatccatgattttttgtgcatgcatgtgttcccttcattacattgcattcataattgaattttatcatccaattcgtgaaactatttatctgtttcgagtttttgtcatttgaatttggttacaaaattgaagctggatatgaaaccactcttaattagcctactagggtgcaatcgaactctggtggtgttattatttgaatgtaggtagttctatggaattggaataattttgaagctagttgacttgctgagattttgaaacgttttcatgaggtgcctttaattaaagaacttacggggaaccttcagagaacatgggtctgatttgacagaagttgaaaattttggttgagtgagaggcttgtctttgttccgctaccatgtctcatgagacatgcccttctgtaaagaatgtccttcttttggattccgatgggaaacgtgttgcggtcaaatacttctctgaagactggccgacaaatagtgccaaggaaaattttgagaaagttgtattcaacaagactcagaaaaccaatgcccgcacggaagcagaaatagcaatgtttgagaataacattgttctttacaagtttgtccaagatcttcacttctttgttaccggtggtgattatgaaaatgagcttatcttagccacagttctgcaggcattttttgattctgtgggccttctgctcagaggcaatgtagacaagaaggaagcactagagaacttggatctcattctattgtgcattgatgaaattgttgatggcggtatcatacttgaaactgatccaaatgttatagctgggaaagttgctagtaatagtatagattctggagctcctttgtccgaacagacactaagtcaagcattggccacagccagggaacatcttgcaaggtcccttcttaaatgattcatatggcatttcacaatgacggaggaaacttgtctttaggtttttcctataaacgtttataagaaagaacctcattgcattctcgagaagtcgaacctggatgttgatgttacttgcgtagtgaaagttaatattgacatgctaatacaggctattctagcagtacttttcttctggcgatttgttattttagttacctattaaatttcaggatggtggcatattccgtatgttccaaaaatttcataggaatcaattttagtgcatactaattctaaaaaaaaatggaagggataaagattgtatctcactgaatggacaactctatgcattaggttgcccggatggatgcaagctcactgtatatgatagagcaacagattcatggaaaaagcttattgatagcaagcttcacgtggataaatttccatctctagtagctgttgcacctgtttcccttaatggaaagctctgcattatccgccacaatatgagcatcagtttagttgatgtttcaagtcctaaccaacaactggaaagcaatcctcaggacctttgggaaaatattgctggaaaagctcagcacattcgcaggtctttagttagaaagttatggtcaactatagcaaggcgtgatttttccaaggttgcattgtttgctgtcaggtgctacaagcctgagaacaaaatctcccctgataatattagttatgcagctaaggagactggtctctttggaaattaattgaaatatgtttatccactttcttgcaatggacatgtaggagaaattatgcttcttctttaaggttaattgtagatttttggcaatagaaccaagtctttcctatacaatcttgaataggtggcagacgttgtatatgctaaatctctctaaggccgtgccttttcctttgttactagatattaagtatagagcttttttcaatagagaagctcttaaaagagcttccaaccttgtatccaaacaggctctagttggttagcagatataaagatttgatgtaatcactttgaactcaccttactcattctaccttcagttaataaatgttcaacggcggccgcttataggatcaagctaaaccatcaattaaaacaaagaaatgatacatttat

SEQ ID NO: 95416 - DNA, 263 bp, Glycine max
  unsure (1)..(263): unsure at all n locations
  Clone ID: PAT_MRT3847_57172C.1
gttgaacaagggtttctctgtctgcttcttcactttctctcgtttcaatcgaaaccaaaacaaaaacatgggcagaaaattattcgtcggtggnaactggaaatgcnatgggacnactgaggaggtaaagaagattgttactactttgnatgaggcnaaagtccctggagangatgtcgtagaagttgttntgaggcctccttttgtgttncttcnccgttgtaaaaagtttgctgcgccctgatttccatgtttcggcacaa

SEQ ID NO: 95417 - DNA, 448 bp, Glycine max
  Clone ID: PAT_MRT3847_57173C.1
caagggtctctatggacaatgctagttgccatgattgtacactgatcaaggttgatagtgttaacaaacctggaattctgctggaagttgtgcaaatcttgacagaccttgacttcataattaccaaagcttacatatcttctgatgggggttggtttatggatggtatgtttgagactgaattgaacttttacttgaaatgcattaaaaactacaatgatgtgtcctgttcatgctttttattggcctaattaaatgtggatgactatagaaaactttggctgctatcaagtttctctctattactgtcattattctcttgactatatgaatgtatccatgagaacatgaagtggttttcctccctctcttgtgtctttgcatcactgattactgattaggcaactccacctgctgagaaaaaaggtttggtttttgtattttaatt

SEQ ID NO: 95418 - DNA, 346 bp, Glycine max
  Clone ID: PAT_MRT3847_57174C.1
aattcggctcgagctcgagccgctcaaacccaatcggctcgagaatatattcccctaaatctgtttgttttaaaatgcgtcatactaacgcctttttagatgccacgcggtgatgaaatggctgcatggacctatacttaccctgactatccactgtctaaggcaaatccgctacctaaattcaaactctcaaaacctgtgctttgtattgccggcttgttgcagattgatcttttgggatagattctgagacaaaagatggctggtgtattatacacaagtgcttctcatgttcaaattctgggaggtttatctcttccatccaacaatgactatattcttaaac

SEQ ID NO: 95419 - DNA, 367 bp, Glycine max
  Clone ID: PAT_MRT3847_57175C.1
actcattccttctacacattttttatattaaattgtttatttacacattctactatttgttttaccatataaaatgtttcatttcttagatatcttgcgagagttagtacttatttggcatgttctcttcagaaatatttaatagttttctttgttctaaactggccttgttcaaaaaatgaaacgtttggtacattcttatagccatcttatcttatagttagaagtttgccctacatgttcaacaatcaagcttgttgcagtattgtgcttgaatattattttcttttttttcctataatatatttttttaatttttttgcattaggttagcatggagagtaatggcaagggtgtctcaattgat

SEQ ID NO: 95420 - DNA, 524 bp, Glycine max
  Clone ID: PAT_MRT3847_57176C.1
aaaccaaatctaaatttcaaataataaaaagtacaggatcatcacaacgttcttccaccgaaatttcccacaataataatccaaatgtcccccaaaaaatacaagcggcaataataacaaatccgtgtcttttaaaaaacaaaaagcggttcgatttatttcttcacgatttttatcaacgaaccgcgcatccgtgacgcgtgaacccgatccgcgaccggtccaaatcgaactcaaacaagtacccctgctgcatcagattcccaatcaccgaaaaccccgaatccggtcgaaccggctgaaccgcaagacacttaactccctccgccggttcaataaaataattacccaccggcggcgacagaaccgctttcccggcgagccggaatctcagccccgtcagcttcgaactcgccacgccggaaacattaacacaaagctcgcaccccagcgcgctgcatcagattcccaatcaccgaaaacccagaacccggtcgaaccggaggatccgtgggtaagccggc

SEQ ID NO: 95421 - DNA, 252 bp, Glycine max
  Clone ID: PAT_MRT3847_57177C.1
aaaaaatacattcaaaaaacctttttcaccctttaaaaatccaatcaattggcccaaaattctaataaaattcccattgcatcaaaacggaaccattccttaaccaaaaaataattttttattaaaaggaaaaaaggaaaaaaaaacccctttaagttttaataaaatccctttaaccctataaataaattcctattactcataaaccccccaattttttcttccccccctaccaaaacttcctttgaaggg
